United States Patent Application Publication US 2007/0067865 A1 - sequence listing, part 26

SEQ ID NO: 161052 - DNA, 332 bp, Arabidopsis thaliana columbia
acccacgcgggcgctctcctcaggtaactaattaatattcaaaatgattttttaaaaagtggaagcagggggtggcgccggaggagcttcatgggatgatggtgtccacgatggcgttagaaaggtgcatgtagggcaaggccaagatggtgtgtcatctatcaacgtcgtgtatgcgaaggactctcaggatgttgaaggaggtgaacacggaaagaaaacgttacttggatttgaaacgtttgaggttgatgcagacgactacatagtagcagtgcaagtgacctacgacaacgtgtttggccaagactctgacattatgacatttttta

SEQ ID NO: 161053 - DNA, 274 bp, Arabidopsis thaliana columbia
aatcgaaaccaattttagggttcgcgaatctaattgcggtgaaaatgggaatcaaatcatcctaacttaaggctaattttgggacctttttcgattgcttcccgtaggatcctaccagatatgggatcccaatcaactctaatgagtcctaatattgaggagaaaagcatcctcagggagaaacctgaaaagttggtttgggcttaacctgaggcaaaggctgttcctattgggtcaaacctccaaattagtgattgtgaaaatgaggaccacc

SEQ ID NO: 161054 - DNA, 197 bp, Arabidopsis thaliana columbia
ttgggattcccatggcaccaaaaaatgctttgaaaattgggtctcgaaggtcctttagtgccaaagttctaaccaaaaaggaaaaaccccttaaaaatgtttccattaaaaaaatggaccaggaaaaccttaaaaagttacctcaccagggccctgaaaaccaaccaccaggttcagcaagcaaaccaaaggttgct

SEQ ID NO: 161055 - DNA, 328 bp, Arabidopsis thaliana columbia
tccaaacctttccaatcctctttttacatttttcccacttttccttcctttagaaccccgtgggcatgaaaaatgggcggaggattccaccaccatcgacttcggcaggccaggccctgttcccaaaggttaaggccttgtcgtaagggccccgaaaaaaaagggttttggggcagtcgcctaaggaggtggggccaagagaggttggcttttattcgatttcctcctccgtttggcggccatagcaggaactattggggctgcctttgtcttgtccaccgccggggaaacttttcctttttttactcagttcctccagttccaagcc

SEQ ID NO: 161056 - DNA, 258 bp, Arabidopsis thaliana columbia
aaaccaccccaaagaagggggcagccggggatgtaccaaaggtttaggggaaaacaccccaaggaaaagagaaattggggggaaaacctgatgtttcaattgggaatataccaaatcctgaaaccataacccctccgttcaaaggaaccaatcccctggtaatcctaactagtcctggcccaaaaatgaaccctggttttgaccccactaaagggggaaaacctgagtccatttccaaagatgaccagattcctgacc

SEQ ID NO: 161057 - DNA, 278 bp, Arabidopsis thaliana columbia
  unsure (1)..(278): unsure at all n locations
aacctcctaaaacctgaccatgtgaaaaaaaataagtgtgtgggggcctncccccatcgaacctgccaaaaaaaaactccccgaaaatgaaccatcccaaagtttcgaaagcgccgttttaataatcgccgttcctggaaccgtcgaaaccaccttgccggaaattttccttttttctcccccacccgttgttccatgaaaagattactgtgccctttcttgtcctctccctacctggaacccccgccatccatccagatccttccatgccaattttt

SEQ ID NO: 161058 - DNA, 323 bp, Arabidopsis thaliana columbia
  unsure (1)..(323): unsure at all n locations
aaaaaaaaaaaaaatttcncccattgttttttaattccccaccgccggacctcaatggatccggggttcccaacttccagtcaggctccgtccccttccataagccaacacacaatcctttttgggcttaaaataaggcaccgttcgtggggaccgtgtaacagccatggttccatccaaggtaaagttcataacaccaaaaggtaacctaaaggttgagtgtaacaacaacgtttacgttcttgatcctgctaaggaacctgaaatcaattggcctaactctggccggcctggttcttgttcaacctggcctggtaaagttg

SEQ ID NO: 161059 - DNA, 356 bp, Arabidopsis thaliana columbia
  unsure (1)..(356): unsure at all n locations
cgcaactgcacacagttgagattttgagcgtgtcatggattctgattgataacgatattcaagtgggcaatctcattgcagtagaaaatggaatcgaatcatcctcacttcaagctaattttgggatcttcttcgattgctcgacgtaagatactaacagatatgggataccaattcactctcatgagtgctgatattgatgagaaaagcatccgcaaggagaaacctgaagagttggttttggctttagctgaggcaaaggctgatgctattgtgtcaaaactacanattagtgaatgtgaagatgaggaacaaccgagagtcttgattgcatcggatacagctgaagcaatcat

SEQ ID NO: 161060 - DNA, 381 bp, Arabidopsis thaliana columbia
  unsure (1)..(381): unsure at all n locations
gatcagcggatgttgcttatangactctttttgtaccttatgagaaatcaaagttttgggggtccttttgagtatggtcgcggggctgaaacttaaagggaaagacgctaaggacttaaaagatgggaaacctgcagatccaaaggtgacagaggaaaaacgtccttcacctgccaaagacgcaagtgttgaaacagcgaaacctgatgctgctgcctcgggagagggagagaaacctgtagctgtgactgaggccgagggaaccaaggcggagtgaagggtctttagtattactgttgggggattatttgatattgatgaagtcacaatagctgcgggcgaaaataataagaggtaagttatgtgcacatagaagctctt

SEQ ID NO: 161061 - DNA, 399 bp, Arabidopsis thaliana columbia
gtttgagactctatcttacctccctgaccttagtgttttcgaattggctaaggaagttgactaccgtctccgtaacaagtggattccttgtgttgaattcgagttagagcacggatttgtgtaccgtgagcacggaaacactcccggatactacgatggacggtactggacaatgtggaagcttccattgttcggatgcaccgactccgctcaagtgttgaaggaagttgaagaatgcaagaaggagtacccgggcgccttcattaggatcatcggattcgacaacacccgtcaagtccaatgcatcagtttcattgcctacaagcccccaagctttaccgaagcttaatttcttttctaaaacattcttatgaaatatttttgctcattttattttct

SEQ ID NO: 161062 - DNA, 337 bp, Arabidopsis thaliana columbia
aaagttatatcaatgtcaatcatactatacattttttatgtatctcacctaaaaccttcacggcggctgatacttgagccacggacgacactcatatgctcagtcacagagactatcttgaaatttcaccattattctctatcaccaggggttttatgcttgatcaattcacagaattgaaaaagctgcaagatgaatgtactccttattttgtggatgatgttgttactctcttctttgaagactgtgagaagcttatcagacatatggctagagctttagatcagacatgaaaagtacatttcaaacaggacggtgctagtgttcatcaactcaa

SEQ ID NO: 161063 - DNA, 337 bp, Arabidopsis thaliana columbia
  unsure (1)..(337): unsure at all n locations
ggccgggcccacgggaactgaattttacgtccccaccttactactttcgttattacaaccgaccactacaagnatggcccgtcgccatattaatatagcttgcgacccctaccataggattcatctcctccaaagttttactacaagtctgcaacactaccatacatttacatctacccaccctcactatattactctttttattcaattgttcattacaaatctccaccactaccatacgtgtataactctgcacctacactatactattctccttttataaagattacttacatgtcatcaccacccccatatctttacaaaagcgccttactat

SEQ ID NO: 161064 - DNA, 157 bp, Arabidopsis thaliana columbia
gaagttttatctttgtttttacttttatttgttagtaatgtagtggaccgaaaatcggatgacaagtggacattggtccgagggatggtttatttggttcgttataatataacgtcaagtgtaatcttattgtggttattaatgttatcatcctatt

SEQ ID NO: 161065 - DNA, 457 bp, Arabidopsis thaliana columbia
  unsure (1)..(457): unsure at all n locations
acaatggcgtcttcgctgttntatcatatttttacaatctgccctctgcctaatggagtgtggttattctttgctatcattctgccactctctcangccattcatttccaattctaaacctatgttttccttgatacagaatagttatggctctcaatttgttgtgaaatcttcattctcctcgacaacattgttacttatttttgcaattttatatcttttcaaattcaaattatgtattttgttttttggtacattattcttttgaaattgatgtcattacattaacaaattataaagtctgtttatggagtcaacacttgataaaaacctaaataaaatgcttttaatgatgaaagatgtaccaattaccttaacctgttgtttattccttcaccccaagtgatttcttttcttacagaataaaactctgaaaccaatttatcctcacagacca

SEQ ID NO: 161066 - DNA, 377 bp, Arabidopsis thaliana columbia
ggaaaaatcattacagcatccgcgtagaagctttattttaatccgaattcaccaattgatccagctcgtgtaattctaatgcaaaggagcttgcaaattgaaatcgaacaagcgatttgctgataaaatcatgcctcatcttctcaacttgtacgggtctagtgcaaaagccaacgattttgacatgtatgcaccaaatgcttcatttgaagaccctttgacgcatgctcagggagtgaagcatatcaaaccatcattttattcactccctaaagtgtttggtgagtctaaaattgttgaatatcatattcaagaaagtgaaacctctccggtgaagaaagagatactaatttacaacaaacaacacttcaagatca

SEQ ID NO: 161067 - DNA, 356 bp, Arabidopsis thaliana columbia
  unsure (1)..(356): unsure at all n locations
cggccgnaaacgacagcncaaagtgcactccaattcatttttttttcatttcactctacaccgaacagaacgatctttattaaacctggcctggacgtctaataagagttgaaacaacaatggacccaaatctcactcgtgcatatctattagatgatcaagtcctagaagaaatcgtttcacttactgatgtatttgctgaactctatgtgaacttatttcttctaccacttttgattagagtgataacaaatgcttcagagaaacaatgtaaagtgtcaaacctaaccaaaagatatattcttctgctcaacattggtttgatctccactgaatccaaagttttatgattttaa

SEQ ID NO: 161068 - DNA, 462 bp, Arabidopsis thaliana columbia
  unsure (1)..(462): unsure at all n locations
ggcgtccgcgattctccacgaagcgttacactttcnctttatttgtactatgagctcagcaaacgtgctggcggtgcttaagaactcgcgaacgcaagagtagcagcagcggtttcaagaatcgaggaagctaaagaaacagaaatgagaagcttggagaagttggaagaagtaaacagagacatggatgcgagaaagaaggcattaaaagaagcaactgaaaaggctgagaaggccaaagaagggaagttgggggtggagcaggagctgaggaaatggagggcagaacatgaacaaaagagaaaggctggtgatggagtcaacactgagaaaaacctaaaagaaagctttgaaggaggaaagatggagcaatcacctgaagctgttgtttatgcctccagcccaagtgagtcatattgaacagaagaaaactttgaaaccaatctatccccacagaccaag

SEQ ID NO: 161069 - DNA, 454 bp, Arabidopsis thaliana columbia
aaaaacataacaatggaggttgagaagacagagattaacattgcagaggatgatgagtctaagatgatctacagaggatggaaagtcatgcccttcatcattggaaatgagacatttgaaaaattggggattgttggaagttcatcgaatctggttatatacttaacgacggttttcaacatgaagagcatcacggctgcgaaagtcgtcaacatctacggtggcacaagcaactttggcaccatcgtcgctgctttcctctgtgactcctactttggccgctacaagaccctatctttcgccatgatcgcttgctttctcggttcggtggcaatggatctaacggctgtgattcatcccctgcatccagctcaatgcgctaaggaaataggaagcgtgtgcaattggccattcattggacaaatcatgtttctcgccggagcaatggttttgc

SEQ ID NO: 161070 - DNA, 190 bp, Arabidopsis thaliana columbia
  unsure (1)..(190): unsure at all n locations
anacctcaatctcacaancgcacttcctattttattttattcgtcaaagacaactcctcagtgaggagatttttttcaccgaatggggtactccgaacgatcaattgaagattgaaatggaagctaattcaggcggaggaggaggagcttaatgcggaagagcagttacctgatgaggaggaggaggagg

SEQ ID NO: 161071 - DNA, 337 bp, Arabidopsis thaliana columbia
agaacaagggctaaccgtatgcgctcaagcgctactatggttgaacatccctctcaggccactaggggaactgcttcaaacggacggaaggcctccgccagcttgcaaaccacccgcagggctaccaacgacactactttcatcacaagcaactgacacagagataactggatgcaggtctgcactgcgattgaaaaaaacaagtttgagactctcttttacctgttctgacactaccgaccacaaagcggcaataaaaactgactaccatatcctcaacacgtcgatagctagtgttgaattcaaatgggaacaaacatttgtgtacctggtgcac

SEQ ID NO: 161072 - DNA, 290 bp, Arabidopsis thaliana columbia
  unsure (1)..(290): unsure at all n locations
ttctcttatttttcccttgncgnatccgacgcgggggtatttttaaaccgtggctggggaccgaagaagaagatggaagctaacgggattgagaacttgacgaatccgaatcaggaaagagagtttataaggagacatcataagcatgagcttgtggataatcagtgtagctctacgcttgttaaacatatcaacgctcctgttcatattgtgtggtcacttgtgagaagattttgatcagccacagaagtataatccgtttatcattagatgtgtggtgaaaggaaaca

SEQ ID NO: 161073 - DNA, 308 bp, Arabidopsis thaliana columbia
agaaagaatccccccaaaaaatggccatttcttagaacatccttattgcagctctctcgctcattgcattttctcctttttgtttgtgttccaaagcctatggaagtggcggctatctctttcctcagttttatgaccaatcgtgtcctaaagctcaagagattgttcagtccattgtcgctaaagcattcgaacatgatcctcgcatgcctgcctccttgctcagactccattttcacgactgtttcgtcaagggatgtgatgcttccatactattggacagcagtggaaccattatcagctagaaa

SEQ ID NO: 161074 - DNA, 380 bp, Arabidopsis thaliana columbia
ctttaatcaagctagcgacaatggtggttggtgtaatcctcctcgtgagcactttgtatctcgctatgcctatgtttctttccatcgctaagtataaggctggtatcgtccccgtctcttaccgcaggatcccatgtaggaagaagggaggaatcagattcacaatcaatggattcaagtacttcaacttggtgctggtcactaacgtagccggagctggagacgtcattaaggtgagtgtgaaaggatccaacacacaatggttagatctgagccggaactggggacaaaactggcaatccaacgcactttttgtcggccaatctctttctttccgagtcaaaacctctgatggccgaagcttcacctccaacaacatt

SEQ ID NO: 161075 - DNA, 361 bp, Arabidopsis thaliana columbia
acgaccgttgctagtggcttatttggccatttttagtataacaagctgaaggaggggtcgggcgagtttgtatcaaagggtggagttagaagtgctcaaggaaaagagaaaattggaggagaagctgatgttttcattggggatataacagatgctgatagcattaacaatgggtttgagggaatcgatgcgcttgtgattctcactagtgctgtgcctaaaatgaaacctggttttgatcccactaaaggtggaagacctgagttcattttcgaagatggacagcatcctgaacaagctgattggattgtacagaagaattaaattgatgcacccaaggctgctggcgttaagcatattg

SEQ ID NO: 161076 - DNA, 445 bp, Arabidopsis thaliana columbia
gaaggtgtcagggttcttttgcttgtttgggatgacagaacttctgttgatgtgctgaagaaagatgggctcatggctactcatgatgaagagaccgagaatttcttcaggggaagtgatgtccattgtattctgtgccctcgtaacccggatgacggtggtagcatagtccaaagtttgcagatctctactatgttcacgcatcatcagaaaatcgttgttgtggacagcgagatgccaagcagaggaggatcagaaatgaggagaattgtgagttttgttggcggtattgatctttgtgatggaagatacgacactccgttccactccttgttcaggacattggacacagtccaccatgatgactttcatcaacctaacttcactggtgctgctatcactaaaggtggtccaagggagccttggcatgacattcactcccgtc

SEQ ID NO: 161077 - DNA, 454 bp, Arabidopsis thaliana columbia
cgtccggccgtttttaactatccaccgaagcagcagttttttgccaccggttatcctcagcctgctgagccctacgcccaaggttatgttgttaatggagtaagaccaacagaacacggtcgttgttgcggtatcggcattggctgggtattattcatccttggtttcttcttcgctttgccctggtacatcggtttcttccttctattattctctaggaacccgcgtgagagaccaggatatatagcttgcgcagttggggctgtttttgctaccattatcgtcatctttggaaccgtaagaggatcaggggtgtggtcatgaaggtgaagatgtcaacaatctgaatccgttgagattttgtttcagaagaagatcgatccataatgtttgtttacataatgtgtattgtctctagattacaaaacagtactgtatatgtttctttgaaaag

SEQ ID NO: 161078 - DNA, 418 bp, Arabidopsis thaliana columbia
  unsure (1)..(418): unsure at all n locations
gaagatgtaatggcttcctttatgctctctttttccgctgcggnnacctccccggctgagggcaccattttcgctccattcactggtttgaagncatccgcttctttcccggtcacccgcaaggccaacaacgacattacttccatcacaagcaatgggggaagagttagctgcatgaaggtgtggccaccaatcggaaagaagaagtttgagactctatcttacctccctgaccttactgacgtcgaattggctaaggaagttgactaccttctccgcaacaaatggattccttgtgttgaattcgagttggagcacggatttgtgtaccgngagcacggaaacactcccggatactacgatggacggtactggacaatgtggaagctttcattgntcggatgcaccgacttcgctt

SEQ ID NO: 161079 - DNA, 465 bp, Arabidopsis thaliana columbia
cgcgtccgggaaaaaaaaaaaaattctttgatatgagacttgttttctctggtgcctcttctttcacctgggaggcttttttgttcctcccaacaggtcaatggaagaggaaaagaactgaaaaacccaatttctctaaaccacaacaaagatttggactttctgttaaagaagttagctccgccactcacggcggttttacttgctgtttcacccatctgtttccctccagaatctcttgggcagactttggatatacagagaggagctacattgtttaatagagcttgtatcgggtgtcatgatacaggtggaaacattattcaacctggtgcaacgcttttcacaaaagacctcgaaagaaatggagttgatactgaggaagaaatatatcgtgttacctactttggaaagggaagaatgccgggatttggtgagaaatgcacaccgagaggacaatgtacc

SEQ ID NO: 161080 - DNA, 318 bp, Arabidopsis thaliana columbia
  unsure (1)..(318): unsure at all n locations
tttttatgcaatggagtcaatnggcattttttttccnggaaacgagtgttttcatgggcgggttattattcatggaagtgccatccacaaaagttctactctgatgtcgtttgaagatcatgatatgactacccatgggagattttcctttgccaattctaagattaagaagattgatgggatcctctgaatcagttgttgctccatcgtacaagcttgaaatacagccggttcctcattgaatgggagctccctgccatgactaaccaaatctgctgtggcccgtaaaacaaaagtttctacagcccactgccttca

SEQ ID NO: 161081 - DNA, 446 bp, Arabidopsis thaliana columbia
  unsure (1)..(446): unsure at all n locations
gcgtccggagtgagtgagactcaaccatggcgtctttgtcttatcaattctcgggattgagatgttcccgactctcttcttcttctaggtgatcgaggagagcttcgaagaactttccccagaacaaatctgcctctgtttctccgactattgtcgccgcggttgcaatgtctagcggtcaaacaaaggagcttcttgagctgaagaagatgttcgaagatgcttatgaacgatgtagaacttctcctatggaaggtgttgctttcaccgtcgacgatttcgctgctgctattgaacaatacgacttcaattccgaaatcggcactagggtaaaaggaacagtgttcaagactgatgcaaatggtgcattagttgacatttctgcaaagtcatcggcttacttgncggtagaacaagcgtgtattcatagaattaagcatgtggaa

SEQ ID NO: 161082 - DNA, 456 bp, Arabidopsis thaliana columbia
cgtccgaaccacaattacaaaacattccattacacattttttatagcacacactttttctttcttttgagggccaattgcaagagaaaatggcgaaagagtccaccaccatcgacgtcggcgagccaagcactgttaccaaaagttcaagccatgtcgtaaaggacgcgaagaagaagggctttgtggcagtcgcctcaagaggtggtgccaagagaggtttggctatattcgatttcctcctccgtttggcggccatagcagtcactattggggctgcctctgtcatgtacaccgccgaggaaactcttcccttctttactcagttcctccagttccaagccggttacgatgaccttcctgcgtttcagtactttgtgatagccgtagccgtagtcgctagctatctcgttctttcacttccattctccatcgtatccattgtccgtccacatgc

SEQ ID NO: 161083 - DNA, 340 bp, Arabidopsis thaliana columbia
gccgcatcctgatacctttgactttttatagctagccatgggggtccaaaaccaccacgatctgagcctatcttgtttcgccaacctacagctggcttgcaatttcaacaggtattcttgaaggatactgatgagagagcatgtgcatacattgcgggaccagcgccaaatcgatggggctttacagatgacggggatgacctttttcagtctgttagcaaacttcctgtagctcatgatggacttttgaaatctgaggaacaattgctagagggaggagacagggagttgcaaaagaagcttcttgcccacccttttttctttggagttacaatgggtt

SEQ ID NO: 161084 - DNA, 309 bp, Arabidopsis thaliana columbia
gctgcaggctctttaccttcctccaagtcatcctctctcctcaccaaaatctcctctgtatcccctcaaaggattttcctcaagaagagcacagtgtgttacagaagagttgtgtcagtgaaggctcaggtgacaacagatactaccgaggcaccaccagttaaagtagtcaaggagtctaagaaacaggaagaagggattgttgtcaacaaattcaaacctaagaacccttacactggtcgctgccttttgaacaccaagatcaccggtgatgacgctcccggtgagacttggcacattgtctttacc

SEQ ID NO: 161085 - DNA, 425 bp, Arabidopsis thaliana columbia
  unsure (1)..(425): unsure at all n locations
gccgattcttctattagcctccatggtgtagttctcgcaagaacccgacaatcagacgaaggcttgcatggctagaggatccgatcttagggttcacttcaagaatactagggaaacagcgcacgcaatcaggaagctaccattgatcaaggcgaagaggtaccttgaggatgtgatagctcacaagcaagcaattcccttcacacgtttctgcagaggtgttgggagaactgctcaagctaagaacaggcactctaatggtcaaggacgttggccagccaagtctgctcagtttgttcttgatttgctcaagaacgctgagagcaatgctgaggtgaaaggtttggatgttgatgccctcttcatatcacacattcaagtgaaccaggccgcanagcaaaggagaaggacttaccgtgctcacg

SEQ ID NO: 161086 - DNA, 447 bp, Arabidopsis thaliana columbia
cagggatcaagctgtggccatcaaatgttctattcaggtgcagttgctggaggcagggaggctttgatttctggggtaccctctttgtcaatatcgttgaattggaagaaaaatgaaagccaagaaagtcactttaaggatgctgttggtgtctgcttacctttgataaacgcaactatcagagacattgcgaaaggagttttccctaaagactgctctctcaacatagaaattccaacatcaccctcatcaaacaagggtttcaaggtaacaaagcaaagcatgtggaggcagtatcctagttggcaagctgtttcagctaatcgtcaccctggtgctgggaatttcatgtccaaccaacaaagtttaggggctcagcttgcccagcttggcagggatgcttcagcggctggggcggctcgtcgttttaccactcagaagaagagt

SEQ ID NO: 161087 - DNA, 396 bp, Arabidopsis thaliana columbia
  unsure (1)..(396): unsure at all n locations
cgcgnccgacctaatcttcttctccaatcaatctcatatttaaaaagaaatggcaacaaaccctaanagctacttttacatgaccggggggggcaaatccaccggtcgtatcgtgatggagctttacgccgacacaacaccagaaaccgccgagaatttcagagcactctgtaccggagagagaggaatcggtaaacaaggtaagccattacactacaaaggatcaagctttcaccgagtgattccgaaattcatgtgtcaaggaggtgatttcacagccgggaatggtaccggaggtgaatctatctatggatcgaagttcaaagacgagaactttatcaagaaacatacaggaccagttattttgtctattgcttacgctggtgcgtacactaa

SEQ ID NO: 161088 - DNA, 434 bp, Arabidopsis thaliana columbia
cacttccttcctcatccaaaaaagctcctccattttaatggcgacagcatcagctctctcagtgactctcttcactctcactccacacccgaacctcttctctcatctcctcttcctccacaaaatccatcgtctctttctcctccttcctcaaccgccgcttctcatctctcactctcgtcaaagcctcatcgaccgataccgaaaccatcttcttcgaagacgaaacaccagaaataaccgcaaatgtcgtcttcgacccaccaattgctcccgaaggattcgtctctcctccgtatttcgacgaaggaagcgacgagacagaggaagagatcgctaccgcttttgaagagctctatggacctgcgtatagtggtgagagtatgcttgggaaagatatttatgtgatggactcaaagcataagaagagttca

SEQ ID NO: 161089 - DNA, 465 bp, Arabidopsis thaliana columbia
ccacgcgtccgctctagccaaattactgggccacgaccataatctttaaacaccgcttagcttctaaaatcgggagatcgttaaaaaatgagttggtggtgggctggcgccatcggagctgccaagaagaaactcgacgaagatgaaccatcacaaagcttcgagagcgtcgctctcatcatcggcgttactggaatcgtcggaaacagcttggcggagattctccctctttccgacacacccggtggtccatggaaagtctacggcgtcgctcgtcgtcctcgtcctacctggaacgccgatcatccgatcgattacatccagtgcgatgtctccgacgccgaagacacaagatccaagctttcccctttaaccgatgtcacacatgtcttctacgtcacctggaccaatcgtgaatcggaaagtgaaaactgtgaagcaaaaggctcaatgctccggaacgtt

SEQ ID NO: 161090 - DNA, 336 bp, Arabidopsis thaliana columbia
cgcagttccgttcatttcgcgactagtctttttttatgtcactccatttctgggcttcgccctgttttttctctgaagatttgtacagttgcttcccccaattctcaaaagcttcattcttttaccgttttcgctcataagggctacaagatgaagacccacaaggcctcagcgaagcggttcatagtgacgggtagagggaagattgtgaggaggagatctggaaagcagcatttgttagctaagaagaacaacaagaggaaattacgtctatcgaaaatgactgaagtgaaccggagcgactatgacaacgtgatcggagctctgtcctacttg

SEQ ID NO: 161091 - DNA, 404 bp, Arabidopsis thaliana columbia
ggggccgaccgacgcgtccgcgctcttgactacgagcaagagctagagacatctctttagcagttcttcagtggagaagaacgacgatctacctgatggacaagtcataaccatcggagctgagagattccgttgtcctgaggttctgttccagccatcgctcatcggaatggaagctcctggaatccatgaaacaacttacaactccatcatgaaatgtgatgtcgatatcaggaaggatctctatggaaacatcgttctcagtgggggttccaccatgttcccaggaattgctgaccgtatgagcaaagagatcaccgctcttgcaccttagcagcatgaagatcaaggtggttgcaccgccagagagaaaattcagtgtctggatcggatgatcaatcctt

SEQ ID NO: 161092 - DNA, 365 bp, Arabidopsis thaliana columbia
  unsure (1)..(365): unsure at all n locations
gcgtccgaatcctcaaagagcctagttggnggtttatcttctcttctatcatcaccatggatccgggcatgtgttgttcttcaagcgcgtacaactccccattctacaccacaaacggtggtgctccagtctccaacaacatctcttccctcaccatcggagaaagaggtccggttcttcttgaggattatcatttgatcgagaaggttgctaatttcaccagagagaggatccctgagagagtgtttcatgctagaggaatcagtgctaagggtttctttgaagtcacccatgacatttcaaaccttacttgtgctgattttctcagagcccctggtgttcaaactccctttattgtccgtttc

SEQ ID NO: 161093 - DNA, 405 bp, Arabidopsis thaliana columbia
  unsure (1)..(405): unsure at all n locations
cttccggnttacaggaagccaagttatgtaaaatcttagtatcaggaagaaggatatagaaagcctaggtatgtgaatattctaggaggaacaagacgaaagtaatagaaaccctactattgaaaaacttaggaacaagaagaaagaagttacatgaaacctagttatgggaggtctgatgatcaggttgagagttacattaagcctagctatggaagatctgaggaacaggaggagggaagttacaggaagcctatttatttgaggtctgaggaacaggaagaggggagttacaggaagcagcctagctatggccgttgcaatgacgatgattatgattagcaacttaagaaccgttcttggtcttgtgattatgatgaagggagctattgtcttaataaatat

SEQ ID NO: 161094 - DNA, 376 bp, Arabidopsis thaliana columbia
aaaagcgcgagggcgaacccaccaatgttttcgtcgaggagatgaacgataccgttgcccgtttgtccaaatctgtggaagaactgaagatgtgtgggagtgccaaagatcaagaccagtttgcgtaccacatgagtaatgctcagacttggactagtgcggctttgactgacgagaacacttgctccgatgggttctcgggtcgggttatggatgggaggatcaagaactcggttcgggctagaatcatgaacgtgggacatgaaaccagcaacgctttgttcttgattaatgcctttgctaaaacttacttatttaaaactatattttgtcctgtaaaatatatatatagataaaagtaatgtcttgctaagag

SEQ ID NO: 161095 - DNA, 354 bp, Arabidopsis thaliana columbia
atttccgagatgttaatgagcaagactttcttctatttatcgacaatatcttccgtgggtgcaatctttatccgaggtatccgccttattgggtagaatgccttctgctgtgggttatcaacccacccttagtaccgaaatgggtactttacaagaaagaattacttctacgaataaggggtccataacctttattcaagcagtttatgtacctgcagatgatttgactgaccccgcacctgtcaccacatttgcacatttagatgcgactaccgtactatcaataggattagctgccaaaggtatctattcatccggagatcctttatattcaacgtcaactattctacaacc

SEQ ID NO: 161096 - DNA, 447 bp, Arabidopsis thaliana columbia
  unsure (1)..(447): unsure at all n locations
ccacgcgtccgatcaccccttctcctgttatgttccaagaggaccactatgtgtggaatgtccaattgtttagggcgattgatggaggagctgctgctgggtttcccgagtcgcctgaagctgctgcggaagccgggcttgtaagtgggaaagataacatcattgataggagtatccaagatgcttacattcatgcaatcagacgtgctaaggatttcatctacgttgaaaaccagtacttccttgggagttcttttgcttgggcagccgatggtattactcctgaggacatcaatgccctgcacttaatcccaaaagagttgtcgctgaagatagttagcaagattgagaaaggagagaagttcagggtctatgttgtggttccaatgtggccagaaggtcttccanagagtggatccttgcaagctatattatactggcagagga

SEQ ID NO: 161097 - DNA, 458 bp, Arabidopsis thaliana columbia
cacaaaacaaaaaaaaaatggcttccactgctctctcaagcgccatcgtcggaacttcattgcgatgcgtcgttccccagctccaatcagtctccgttcccttccatcagccaacacacaatccctcttcggtctcaaatcaggcaccgctcgtggtggacgtgtcacagccatggctacatacaaggtcaagttcatcacaccagaaggtgagctagaggttgagtgtgacgacgacgtctacgttcttgatgctgctgaggaagctggaatcgatttgccttactcttgccgtgctggttcttgttcgagctgtgctggtaaagttgtgtctggatctgttgatcagtctgaccagagtttccttgatgatgaacagattggtgaagggtttgttctcacttgtgctgcttaccctacctctgatgttaccattgaaacccacaaagaagaagaca

SEQ ID NO: 161098 - DNA, 323 bp, Arabidopsis thaliana columbia
  unsure (1)..(323): unsure at all n locations
attttggataaaccttccnnntctactttttggggcacgacggataacatcggggaggtctgttctacatttgcctcacgtccattnnatttaccagaaccactgaaaacaacgcatcagattgataactgtacagaatgctgtgtcttctttgctagaacaaaagagtactgctcggtcttccacacaaaaataagaaataaagaagtgaagaaactatatcttgctcttgctgcggcacctctttccattggaattatctcacattatatgcgcccaaaaaatatggcttcaagactcgtatccgaagattcaattcaagg

SEQ ID NO: 161099 - DNA, 351 bp, Arabidopsis thaliana columbia
  unsure (1)..(351): unsure at all n locations
cacgcgnncggcgaggaaacggggaagaaaccannntttctttatcccaccagcanngccaannaggcggggggtttttctttccaactgtatgacccaannatatttgatggaagttgtggaacacaactataccacttaaattaggcacctgtatatctaactgtgaacggcaaatgttacatacaaggtcaaatctcatgnggtaaaatcttttttgatagttgatacctaatgattttcctttacactttattcttatcaagaaactgtaatatatttatcttacttttacaccccctatatctttgtcgaacttttctttaaacaattacctttacattctattta

SEQ ID NO: 161100 - DNA, 312 bp, Arabidopsis thaliana columbia
ggggggggatcttccagggtgcctatcctaaaaggatcccaccataagtccttgggggttatttggccttatggccatcgaaggctaacccggaacccaattttgggaaagaatttaacttttgttaaccgccccaggtcgccgtttaagggttctggaaaataaccacccgacattcggggaaaccgtcccattaaaaacaatggcaaggttaacttttttccaaacaactaatctttggatctgtttgggtttaacatggatcccaatcgcaggagtcatgttcccttaaaggaccatgttcttaatccc

SEQ ID NO: 161101 - DNA, 426 bp, Arabidopsis thaliana columbia
cgcccgaaggtttcctttttttttttagccgtttttttttttccggaataaaatgccaacgggggcggtgaacttaatcggttaatggccaatttttaacttaatgaggccaaggatcgttttcaacttaaaatttattacttccaaattctttaaggaaacttttggttaaaaaagcaaattgttcttaaaataaaacccggttaacaaaaaaaggccggttttgattaaccttgccaaaccgttttgcaagtccaacataatcgttaattatatcgacaaggtttgaaacttttttgaactttcaattttcccgtccaatcaatacaaccgggccattgttcggttttggcctgcctacataaacaatcaggggttaatttttgtgagaagtttcctaacagttcaaggagaccaaaagaaaaa

SEQ ID NO: 161102 - DNA, 360 bp, Arabidopsis thaliana columbia
  unsure (1)..(360): unsure at all n locations
aaccgccagggcgggcaccaatccccaaccgcggtttgagccgccagaaaatggcggatttgccatggccccaaaggaacttttgggccaataactatggccatgacccgaaaggagaccatccccaaccaccagatggtnaaaccaaccaaccaaaggaagggttttattattttaatttggcataataaaccatccatgaataatgggaggttttgggacgggtccaaactggaaactatattgaagcagttgagcgtccggccctctttgatttgggattaaaaagaaaaggttttgtttttcaatacttggaaaggttcccatttggaatctttctaataatggaaaaattggggg

SEQ ID NO: 161103 - DNA, 415 bp, Arabidopsis thaliana columbia
acccttccgttgaaggtttaaaatcccttttacccaaatttattttttgttccattccaagaattttccgagggggttcaatccttttgggttgggaccaccattaaaggaacctaaaaacccaaataacttttactgcaaaaagtgttcccaacaccaccaaaatttccccaactttaattaaacttccaataccaaaaatcctaaggtaaatggaaagcccaccctgaaggtaactaaatcgaaaaacaaccccactaaccgaccagtttaacataaacttgtaaaggttataaatatctggttggtaagtctgagattaaaccgggtaatctacaaagggggttggtttcctttcccttcttagtttttcctttctaaaaaaataagggttaaggtttgttgctttaattgt

SEQ ID NO: 161104 - DNA, 343 bp, Arabidopsis thaliana columbia
accgtcaataacttaatcaaccgtcgttccaaaattccggattaattcttcaaacttgacccgaaaactaccgatttcaaacttgtgggggtttccgatgtttcggaggttactgaggaaaaagttaaacaagaaaaaattttccttgtaataatggtggggggcccccaaaacaaagggtttccaggtagttttttttccactaaaaggttaaaaaagccaaaggtggatgaccaaatggtcctaaacaaagggttgttggttgaaccaaaaccaaacacttccattgccaagccgtttgtaaccaaagcccctgaacaacctgttttggaaggtaaaggtt

SEQ ID NO: 161105 - DNA, 445 bp, Arabidopsis thaliana columbia
  unsure (1)..(445): unsure at all n locations
caaggggnccgnaaaaacccaaaaaaccgttattataaacctttgtttgtccaccaaccggagaaccaaacctccgggttttaaggaactttttggcctcttcaccaaaaatggaaatggttgcataaccccaaaggacctggaaccagtgttccggtaactagggcaaaacccaccaaaacctgacctccaggacaggaccaacaaggttgcccctgttggaaacgtaacctattcctccccggagtnctaaaaccaaagggctaaaaagagaaaggatccaaactcggaggaagagctgaaaaaagctttaagggggttcgccaaaaaccaaaccggtttaatatccgttgcaaagcttcgccatgtgatgccaaatttaggtgaaaaacttcctgataaaaaggtcaaggagataattcttgaaccaaattttgttggaaat

SEQ ID NO: 161106 - DNA, 264 bp, Arabidopsis thaliana columbia
cccaccaaaaaactcaatcaaccggtttaaaccaatccgttccattcccgacaacccccaaaaccaacaagaacataacttccatctaagccatcttggaaaaaataacctccataaagttttgcccaccaatcgaaaaaaaaaatttgaaaacccaacctaacctcccaaacctaaagaacgccaaatggcttaagaaagttgactaccttccccgaaacaagtgaataccttgtttctaatccaaattaaaccccgaatttt

SEQ ID NO: 161107 - DNA, 441 bp, Arabidopsis thaliana columbia
  unsure (1)..(441): unsure at all n locations
cggccccgcccaaggcgncggggacccccggggttttttttttccttttcttataaacccctgaaaaaaaanaggccggccttattctaacaatggcgagctttttttaaaccaatanccccccntttaatcaaccctggcccttttaattatttcctaccaccaaaaacaatgccgtttcccccccccggggcccgacccaaccccagggtataaatatctaccaaccatggttgttaaaacacggcaaggctcaaaaccaaaactctttttttaaaaaaaaccaccggtccaaaatcttaaaaaacaatcttcttttctccgattaccatacccaaaaaaaccttatttttaaattgggtttcactctttttccgcaccttactaaccataagattaaacccaagtttttttgacctaaaattaaaaaaaaagctaaaa

SEQ ID NO: 161108 - DNA, 436 bp, Arabidopsis thaliana columbia
  unsure (1)..(436): unsure at all n locations
cggcatgaaaaacccgggccgaccaaggcttccggttttttaatttactactttttgnttttcctctttcctcctctaaaaaatgccaaaaagaccgaaaaaggtagaaatggcggccaaaaccgaaccacttattgttccaagtttcaggaaccaaattaaaaaaatggaggtcacccaccccacaaggaccttctggaagtcctgggccaagtccggagtaaaccaaaaggctgtgggaatctggggtggcaaggattgtgccaaggtcaaggcagttgttcctaccacaataaccaccgccagtccggcaactgtaaaaaccccaaccaaaaggttaaggaaccaaaccaaggttaaaaagcctgttgccttttattatttggttcccttgtttggccaattaaagttttccaaactttttccttgtgatttt

SEQ ID NO: 161109 - DNA, 412 bp, Arabidopsis thaliana columbia
ggggattaactcccagtggatttcaaaaaccttttgttatgcacctggtttaagcctacaatggtggggggatgcgttgcagtgttgcctatcctaaaaaggatcccaacataagtccttgggggttatttggccttaatggccatggaaggctaacccggaaaccaattttgggaaggaatttaactttggttaaccgccccaggtggccgtttaagggttttggaagattaccacccgacattcggggaaaccgttccattaaagacaatggcaaggtttacttttttccaaacaactaatttttggatctgtttgggcctaacatggttcccaatcgcaggagtaaggttccttttaaggatcatgttctaaatccccgaccgacaatttttcttccttagatttttaa

SEQ ID NO: 161110 - DNA, 423 bp, Arabidopsis thaliana columbia
ccaaggcgtccaaaacaaaggatcttccagggccaaccgctgttaattccgcaggaccaaaaccataaaattccggagaataggaatttaattggatggttaatttaaccccttgatctggtttttaatttggggaaggttttgaaagggggctggatttggcatggggggacccccaggaccccaataaagcggttgatctacctcctaagtcaaaatcaatgctggttcctgggaagatccaacacataatttgcactggaaatctttgcataaaaaaaatccatgactccttgaagactatctgcccctgattggcatatagttcagggggggttggccaaaaatccccgaacccttgggaataaaaccttgccttttgggcaattaaagctgggattgggtcatggccaccaggggatc

SEQ ID NO: 161111 - DNA, 358 bp, Arabidopsis thaliana columbia
cggcaaaaatcccaaccaaaaaaaatatataattgtctcccctggcccttcctttcccccagcccttaattaatcccttggcggttccaaaatccaaaccattaaccctttctttccccgaatcctaaaccttttcaatccccccttttaccaaacccccaaccgctttaacaacccgcccttctaacaccccaaccccgccaactaaccccggaatttcaatagcgtcgacccccctcccttttttaaattttttccattccggccgtttccttttcccccataacccaagcttggaattgctgttcaacccaatcttcccaatcctaaacctttccaaatcgttcccgaccccaac

SEQ ID NO: 161112 - DNA, 409 bp, Arabidopsis thaliana columbia
cggcctggaaaccccgggccgccccacccgtccgttcccatatttataaaatttcctttttttgtttcccctaaaagccaaaaaaataagggtcgaaccattaaaaaaaaagggtttcctttccacctattcctcctggaaggtttttttccttttcctttgggttcctaatggaaatggtggattttttgttgccttttttctaataatatcaccaagtttttttaaaaaaaaaaaaaaaaagggccgcccgttttaaaggacccaaccttccttccccttccttccaacgtcttaccttttttttagggccccctaaatccaattccctgcccgccgttttccaccgtcgggcctggaaaacccctgccgttccccaccttaatccccttgcagaccatcccccttt

SEQ ID NO: 161113 - DNA, 437 bp, Arabidopsis thaliana columbia
ccgggccggcccacagccgtccgaaaaaaaaatgttgtggccatccaatcctttttttttccctcctcaaaaaaaacctttgctgccattgttgaaaaaggaaggttcattcaaaactgccaatgtcaacctaataaaaggaaaccaaaaccagcctgagtttttcccgattaaccctttcggtaaaatcccagtcctcgtcaccggaaactccaaaatcttcaagtcccttccaaccatgaggtttttaccaaaaaagtttagatcccagggccctgatcttttggggaaaacttttgaaaaaagaggccaggtaaaccattgtttaaccgttgaggctccaagttcccatccaccactatggccttaaaccctcaccattgcttttgcaccactaatggttttccctgttgatgagaaagtatttaaggaaaggg

SEQ ID NO: 161114 - DNA, 419 bp, Arabidopsis thaliana columbia
aaaaaatgccaaaatcactcttttgtcaattatctttaaacctttttttttccaccatttgttcgtttttaaaaaaaaaccaaattgcttcctcggaaaccaccaaaacccaaccatcgtcttttttgttttggaaaaaaagggaactgtcctttgaattaataaccactttatttccaattggtttcgtaggtaatgccagaaaaagccccgccccaaatccaccaatttttgaacctgataacaataaaaaccttttcaaaaaagtgaaccaggatcggaaaaaaaggattgaaagacaagctgtttttaattttgttgccaaggaaaagggttttttgcaggatcttgtttccaagttgaccaaggtaggacaagcctttgaaaccattgatctaccacttgcaggtttggttttg

SEQ ID NO: 161115 - DNA, 387 bp, Arabidopsis thaliana columbia
  unsure (1)..(387): unsure at all n locations
ggggncggtttttggaatccaaaccggtaaaccaacctttttttctgcccatccatctcggttttcccggcggccttcactttttaaaggggattttttaataatcccatcggtttttggctaatttcctttaacctttttttggttccgtccaaggcaaccccagaaccggaagcgtttggttcaatttggggctccttacggggccggggggggttccaccgatgaagaatggttcgaaggatacggacctcagcaaattcaacctatggtcaaggttaaattagatccagttgagtttgaagcttggtttaagggaggcgaccaggggacttccgttcttgaggaaaggattcccctttgggaggatttgaggatgaatgaagc

SEQ ID NO: 161116 - DNA, 412 bp, Arabidopsis thaliana columbia
caagccgtccaaccaaattcaaaaaaggttttttcaacccttttattttgaaactaaagtccggaaccagcggaaggggttttgtccaatagaggatattgaacccaaatattgaggaaaatgtttttttggccaagtttaaataatccgaccttaaaatggtttttgaatttttaacaaatgggttgcttttttaatttaaaaatttttgaaacaactgtgttaatgttttttccaatcaaatccgttttttaaacccaaaccattgtattaatggaaaagtaaaagcggtttttggttaaatggtggataacatgaaatttgaaaaagttaataccatgaaatttagaaaagttgttaccaagatgaccattattaataacgggaagttggggtttttaactaattaaaa

SEQ ID NO: 161117 - DNA, 353 bp, Arabidopsis thaliana columbia
  unsure (1)..(353): unsure at all n locations
gtttcttccctttttttccccaaggtgttctttaaaccaaccaaaaagggcaacgatttggttttttttcgtttttaaggacgttaaaaatcctcccgacctgaaaatccgatccgaattttaaacgaattggtagatctgatctgggattccatcgtggccgacggatcttggttaccatggttggacctgccgcaaatctgccgttttttatagatctagatcgggatcgtccttgggggttttttaacatgcaagatcttgggaatggtcaaggtgggggcataattncgggataactgggagacgaatctgttgcaaacggatgtttgggtgttgatttgaatggaaat

SEQ ID NO: 161118 - DNA, 414 bp, Arabidopsis thaliana columbia
tcctttctttgaattgaattaaaccttagtttccaattttggccacataacttttccgccattcttctttggccgggcaaacggttttaaagccttccagggacctaatccaaaggggggccgtttgggccgggggccgggtgaccatccgtcgacccgtcaagtttactccccaaagcatttggtttggcccaaaccgtcccaggtccttgggaccattttcggggaccccaccgttttacttaactggggaatcccccggggactacggttgggccaccgttggactttcggttgacccggggccattcgttaaaacccgtgggcttgaagtaatccacagaagatgggctttgtggggggctttcggatgcccattccctgaaattttttccaaaaccgggggtaaattcg

SEQ ID NO: 161119 - DNA, 362 bp, Arabidopsis thaliana columbia
  unsure (1)..(362): unsure at all n locations
cggcctgaaanacccgggcggaccacacccttccaaaaaaaaactaaaaaaaaattttgtgttctttgaaacctctttccaaccaaccgttccagccctccattctgaaaaaatcgccacccttccttctcccgaaagttttaacctccaatcaattaaacccgtcgccaaattttttggcttcaaaacttcctcggttcgcttaacttgttccttccagtctgactttaaggacttaaccggaaaatcctccacccctgccaaaatccccgaattcctttttgccacctttgttttcgtcgtttcggaaccaagtccgaagggagctccaaaaaaatggacctatgataaaattcaaacca

SEQ ID NO: 161120 - DNA, 435 bp, Arabidopsis thaliana columbia
ccccttccgaaaaaaccaggtaaaacctttaaaccgggtttttatataaggaattggcgacttcggaaccgggggggacggaggttccgttgaagggatcgccgaaaaaccactccaaaacctggaaaagcaaaacccatgttttcgttgcccccattggccaccacatccaaaatgtctttgttaacaaaggcaaccataattttaacggttttatcaggagttggaactccccatttaatggaaagaaggaaatgttcaaggagaaaagagggttggttgttgagattaaaccattgccaaaaaaaggactggatggccacttgatggaccatttaaaagtttttgatttcatttacaaattaattcccaaatttgaggatagctgcttttgcaaaataactatgatttgggagaagcccaccgataactttc

SEQ ID NO: 161121 - DNA, 437 bp, Arabidopsis thaliana columbia
  unsure (1)..(437): unsure at all n locations
caaggggtccgaattgggccacaaacaagtatttttaatggaatcctttaaaggctacaaancccaanaaaatcgcccattgtaaaagcccaaggactggcttaaccccgggggaagtttcaaccaatggggttgggttaccgacccaaaggcattcgttgggttaaaggtaaaggacctaaaaaacggaaaatgggctatgtcctttatgttggaattcttcgttaaagccatcgcaactgttaaggaaccgataaaaaaccttgttgaccatttggccgatccagttaaaaacacccaatggcccttcgcaaccaactttgttcccggaaaggaacccaagtttaatctgattttggcttaagcctttgtctttgaagtttgaaaggagaaaaaaagcttgttaaaatttaaaaacttcaggatttttttttttt

SEQ ID NO: 161122 - DNA, 343 bp, Arabidopsis thaliana columbia
  unsure (1)..(343): unsure at all n locations
aaaaaacctctcggcaaccagttccccaaaggtaaaccctcctttgaattcaaaaattngggaaacatttgttactgtaccaccgtttggcaggctcttaatttcggggncccttcccggaaccaactgttcaaatcctatcccagtaataaaaccttgcccgatcctgaaaaaaatttaataacctgcctgccaaacttgttttaataagttcccagaaaaaaaaaccaggttttattccccctaaccaattggtccaaaggttgaaaaaccaaaataaccttttttgaagttatttccccagaattcccataaattcctgaaatatttcttgaataaattt

SEQ ID NO: 161123 - DNA, 379 bp, Arabidopsis thaliana columbia
ggcgtccaaaaaattccattgttgaatttttttcactgatcttttcctaaaccaccattgccaacaccccgtcccttaaaatctttaaccggccttcttaaataataaacggaccaaacaaacttcgtttttaatttcccgcaataattttttttccttaaacaacggacctttttccaagtaaccgaagccaaagccattccaaaactttccaaccgtaaactccgtttccccgtaatcggtggtgaaccaccagccgggccacttccaaaaactttaccccaaggaggaatcgaaacaattttaatcgaccgtaaaatgaccaattgcaacccttccggtgccccaattcctttttttttggccgaaaaattcaact

SEQ ID NO: 161124 - DNA, 424 bp, Arabidopsis thaliana columbia
aaccaccaccaaacccttaatttttccactctttttaagaaaaaaccaaaccaggtttttggagaatttaatgccaatggcggcttccgaaccttccctaaggggcctgggtttttctttcctaaccgaagccaaaaaaggtcccaccgaattgccaaccgccttagccactgaacctaaaaaagttgccagaaaaactttaattgcccttgttgcggttgttaaccctaaaaaattttgaatccttgccgttaaaggtggggccaactcccttgaccttaaatggttcaatgcctccttaccagaaaatttcggtttcaaccaatgggttttgggaaaaaacccgctttttttaaaatgtaccaaaaaggctaacctaatccatgcccaatggccaatggcaccggtttttggaatcttcttc

SEQ ID NO: 161125 - DNA, 400 bp, Arabidopsis thaliana columbia
tccaaaaaattaaaaaaacctcccttttcctcaatttgattaaaaaaaaaaaccaaatttttgatgaaagttataaacaatgaattaataaattttgaaaaaaaaaacaataaaattagtgataggaccaaaaaacctaaaagtgtggatgataaagtgagacaaaaggaaatgaaaaagggttttgatctacttactacactcaaacgtttcaaaaaaaatttcgtaataactgatcctaggtttcccaataatccaataattttggaatcgaaaagttcttggaacctaacggaatatacccggaaaaaaatttttgaaaaaaattgcaggttttaacaaggcccaaaaactgatttaaccacattgaaaaaaattcgaaatgctattgataaccaaa

SEQ ID NO: 161126 - DNA, 435 bp, Arabidopsis thaliana columbia
caaaagaccactttttggatttttttctccttctatttaaccccctttccctaactaactgctgcagggtcttattaagcccgaatcttaatcattttaactcaaacattttccgccattaagccaatctttcccccacccctgccggtgcccttgcctctaatccaactattgtccgtaaccgttcttccccaattccaaccaaccctcctccttttttaactgccttaaccccaattctttggggtaccacaagggtcaaaggattccaaaataaaatgaaaaacaacatctaaatccgtcctaagcctgccaaaagcttctccaacccagcggtcttcaacggccaccctggtccgtcctttttcaaattcctaaggaaaaaccttattaaaaagttgtttgttccattccaacctgaatcgtttttaaatg

SEQ ID NO: 161127 - DNA, 245 bp, Arabidopsis thaliana columbia
  unsure (1)..(245): unsure at all n locations
ttttattccctggccggccccaaaaagcccncaaagctttcccccccggaatttgaagtcctgggaagcggccgtttgccattgaggaaaactgttgccaatccaaagggccaataaggcagcccatggtccggtatctgaccgtgtaaagaccttgggtccattttttggcaaataaccaacctacctaaccggaaagttccccggaaactacggttggaacaccgccgaactttcagttgacc

SEQ ID NO: 161128 - DNA, 414 bp, Arabidopsis thaliana columbia
ccaccccgcccggtggttttgggcctcgaaaaccaataacaattttttgtttaataaccacctacccgaaggggcgggtttacggagaaccgaagccgcaaaactcaaataaaaaagggactttgccccaattgaaacaaaaccatcgaaaaggtaagccgataacaatggcaaccgcctacaataacccttttgccgttaacatcaatccagttggaatcaatgtttgtttcgtcggaaattaagcggccagggtggtccatggttataacaccacttttcttatttcctaaaagaaaatgcttgttaactgtccgcccgttgttcgcggagccaaaaaaccactttttgtcggcgatttgccgtttggtcctaatgaatttagcaccaatcaggcggttgatactgcaatta

SEQ ID NO: 161129 - DNA, 433 bp, Arabidopsis thaliana columbia
  unsure (1)..(433): unsure at all n locations
ggaaaaccaaatttaaaccgtttaatttngttttgatttactaaacccaaaggcccgcctcggcaggggttttttcttccctggccttccccaaaaaggccgcaaacctttcccccgcggaatttaaagtccttgaaaccgcccttttaacaataagaaaaactgttgccaacccaaaggcccaataagccaccccatggaccggatctaaccggttaaagaacttggttccatcttttgccaaataaccaacctacctaaccgaaaagttccccgaaaactacgaatggaacaccgccgaactttaagttaaccccaaaacattccaaaggacacctaaactaaaagtattccacagaaggtggcccatcctcgaagccctaggctgcgttttccctgagctttgggctaaaaacggagtcaagttcgaaaa

SEQ ID NO: 161130 - DNA, 367 bp, Arabidopsis thaliana columbia
  unsure (1)..(367): unsure at all n locations
ataataagagagttttaagcatttgaaacaaaaaaaatggcttccaaggctttggttctggtgggtctctttgctgttcttctcgtcgtctcagaagtagccgcggcatcttctgccacagtgaattcagagagtaaggaaactgtgaaacctgatcaacgtggctacggtgacaatggaggaaattacaataacggaggaggttaccagggaggagggggtaattaccaaggaggaggaggtaattaccaaggaggaggaggtaattaccaaggaggaggaggaagataccaaggaggaggaggacggtaccaaggaggaggaggacgataccaangaggcggtgggcgacaaggaggagggggaa

SEQ ID NO: 161131 - DNA, 194 bp, Arabidopsis thaliana columbia
  unsure (1)..(194): unsure at all n locations
atgaactgtttttttttatccgaananganccnncaagggcccgatttttatatacacaggcacgcatccctactaaatttnttcacattttcagctcaaaagcctcgatttctcccatatgtctcaatttctctacttcttcttcttccacaattcccacgaagcctctaactctattatcttcaaaatcttc

SEQ ID NO: 161132 - DNA, 406 bp, Arabidopsis thaliana columbia
cacgcgttcgactactttatgctgacaatgaacaccgggtatgcaccttgcttcagtctacaatggtaggaggatgcgttgcagctatgcctatccttaaaatgatcccaacatcagtcctttggggctattttgccttcatggccatcgaaagcttacccggaaaccaattctgggaaagaatcttacttctgttcaccgccccaagtcgccgcttcaaggttcttgaagattaccacgcgacattcgtggaaaccgttccattcaagacgattgcaatgtttactcttttccaaacgacttatctcttgatctgctttggtctcacatggataccaatcgcaggagtcatgttccctttaatgatcatgttcttaatccccgtacgacaatatctcctcctaga

SEQ ID NO: 161133 - DNA, 374 bp, Arabidopsis thaliana columbia
  unsure (1)..(374): unsure at all n locations
gcgtacgcctgaagctttcctctctcttcgagtcggttcttaatctccgggataaaatggcgaccgaggacgtgaagctgatcggctgatgggcgagtgtttacgtcatgagggcgaggatcgctctccacctcaaatctattagctacgaattccttcaggagacgtatggttcaaagagcgaattgctcctcaaatcaaacccggttcacaagaagatgccggttctgattcacgctgacaaaccggtgtgcgagtccaacatcatcgttcattatatcgacgaggcttggaactcttctggaccttccattctnccgtcccatccatacgaccgggccattgctcggnttgggctgctacatagacgatca

SEQ ID NO: 161134 - DNA, 454 bp, Arabidopsis thaliana columbia; identical to SEQ ID NO: 129255
  unsure (1)..(454): unsure at all n locations

SEQ ID NO: 161135 - DNA, 346 bp, Arabidopsis thaliana columbia
  unsure (1)..(346): unsure at all n locations
ctcatatcctccgctacgctgattttgatgcctgcttcgcgacccccttttctaaacnctatttcctcnacgacgtaaccgccttgactttcaatttccatgagaatcgtttgaatcttctttctcgagaatctcccgctgcgctcagaggaggactcgtccgtgctgtctatttctataagaattcacggcggctagaccaattgtctgctctagttcttttccccaccgactatgatactcactcacatactgacattttctataaacaagtcactcattatgcagcctcagactcgcatatttatatggaaaatatgcatgttcaatttacccaacatacctc

SEQ ID NO: 161136 - DNA, 364 bp, Arabidopsis thaliana columbia
acgcgtttaattactttaacctcagaattcgagctggacatagccaagctcttgtgggcccgagtggggcagggaagagttctgggattgcgatgatcgagcggttttacgaccctcttgctggaaaagtcatgattgatggcaaagacatccgccggctaaacctgaaatctctaaggctcaaaatcggtcttgttcaacaagaaccagctctcttcgcagcaacgatcttcgacaacatcgcctatggtaaagatggtgcaactgaatccgaggtaattgatgcagctcgagccgcaaatgctcacggtttcatcagtggtttaccttgaggttacaaaacttcagtaggcgaaagaggagt

SEQ ID NO: 161137 - DNA, 345 bp, Arabidopsis thaliana columbia
  unsure (1)..(345): unsure at all n locations
accatttgtgtgctatagtacaaaaactttaatctagcgggatgcacagcggatagctctagctcatgcagaccgccatcgcgtgcacccatgcgcaaccgcgggttgagccggcagcagatggcggcattgacatgggcacagaggaacttcttggtctataactattgccatgatccgaaaagagaccatacccaaacaccagaatgttaaaacaaacaaacaaaagaaaggttataataattttattttgcattatcaaacatacatgaataattggaggtcttgtgacgggtccacactggaaactatatngaagcagttgagcgtccccgtctctatgat

SEQ ID NO: 161138 - DNA, 372 bp, Arabidopsis thaliana columbia
  unsure (1)..(372): unsure at all n locations
ctgcaagtgtgagatgccgtataacccagatgacttgatggtgcaatgcgaggagtgttgtgagtggtttcatccttcttggataggaacaacaatagaggaagctaaaaagccagataacttctactgcgaagagtgttccccacaacagcagaatttgcacaactctaattcaacttccaataacagagatgctaaggtgaatggaaagcgcagcctggaggtaactaaatcgaagaacaaacacactaagcgaccaggttaacataaacttgtaaaggctatagatatctggttggtgagtctgagtatcaatcgtgtaatctacaaaagtggntttgttttctttccctctctagttttttctttctt

SEQ ID NO: 161139 - DNA, 443 bp, Arabidopsis thaliana columbia
ctccatttgcttaatctcattttcgtttcaccgccgtctctctctatatcaaaatggggcgccgtggctcatgaggaagagggggccctcgccctcgtcctgctgctgcacgcagcccagctcctcaacctgtacaccgtgcacctcctccagctccagctcaggccagcggtggtggtggtggcatgttctcaggcattggttcaaccattgctcagggtatggcttttggtactggaagtgcagttgcacacaaggctgttgattctgtgatgggtccacgaaccattcagcatgaggctgttgaggctgcttctgcatctgcagcccctgctggaagcgccatgctttctagcacctgtgacattcatgctaaggctttccaaagatgcatcggcagctatggaagcgaagatagcaaatgtcagttctacatggacatg

SEQ ID NO: 161140 - DNA, 352 bp, Arabidopsis thaliana columbia
ctccctatatgctctctcccgttactaggggtgcctctccggttcaggccgctatggtcgctcctttcagcggactaaaatcctccgttgccttccagccacccgaaggctaaaccgacatactccatacagcaacgcgaagagtactgatcagggtgcctcgatgaagagagttgaacttttacctctcctaccaccatgctagagtactctatcacaggatctggtgatcggtgacacgtggcctaccgactacgtcatagcgctgcaggactctgtgtgcctctagtgagggaagcaagaccactatgatgtcccccagcactatatccaccactacgatctgtggact

SEQ ID NO: 161141 - DNA, 439 bp, Arabidopsis thaliana columbia
acgatttctttctccttccactgcgtcgacgtctcgaactcgattcaccgtcgctccgaaatgcgcggaatcagtcgtcgaagcggaaccggagactaccgatatcgaagctgtggtggtttccgatgtttcggaggttactgaggaaaaagctaaacgagaagagattttcgctgttattatggttggtggacgccaatacatagtgtttccagggagatatctctacactcagaggctaaaagatgcaaatgttgatgaccagattgttctcaacaaagtgttgcttgttggaacaaagacacacacttacattggcaagccggttgtgaccaatgccactgtacatgctgttgtggaaagtcaaggtttgaatgataaagtggtagtcttcaagtacaagcctaagaagaagtaccgtagaaatatcggtcacaga

SEQ ID NO: 161142 - DNA, 448 bp, Arabidopsis thaliana columbia
  unsure (1)..(448): unsure at all n locations
cgaaaaaccaaagaaacgagaagaagaagctatggttgatcagctaactgatgaacagatgtgctgagtttaaggaagctttgagccgcttcgacaaagatggagatggttgcatcaccacaaaggagctgggaacagtgatgcggtcactagggcagaacccaacagaagctgagctacaagacatgatcaacgaggttgacgctgatggaaacggaaccattgacttccctgagttcttaaacctaatggctaaaaagatgaaggatacagactcggaggaagagctgaaagaagctttcagggtgttcgacanagaccagaacggtttcatatccgctgcagagcttcgccatgtgatgacgaatctaggtgagaaactgactgatgaagaggtcgaggagatgattcgtgaagcagatgttgatggagatggtcagataaacta

SEQ ID NO: 161143 - DNA, 469 bp, Arabidopsis thaliana columbia
cggacgcgtgggtttctcttcttcttctcttagaaaacactgaagaagaaatggggttcgttaagccaaccatggcgattcgttttctagcgatggtcgccgtttcatcagccgtggacatgtcaatcatctcctacgacgagaaacatggcgtctccaccaccggtggccgtagcgaagccgaggttatgagtatctacgaggcatggttggtgaaacacggcaaggctcagagccagaactctcttgttgagaaagatcgacggttcgagatctttaaagacaatcttcgtttcgtcgatgaacataacgagaagaatcttagttatagattgggtttgactcgttttgcggatcttactaacgatgagtatagatccaagtatcttggagctaagatggagaagaaaggtgagagaaggactagtctaccgtacgaggcttcgtgtcgtgatgagctaccggagtc

SEQ ID NO: 161144 - DNA, 419 bp, Arabidopsis thaliana columbia
  unsure (1)..(419): unsure at all n locations
ggtttctcatctacgacggcgtggtgttctttcttcctgctctgaaaaatggcgaggagagcgaagaaggttggaagggtgggcaaatacggaacacgttatggtgcgagtatcaggaagcagattaagaagatggaggtcagccagcacagcaagtacttctgtgagttctgtggcaagtacggagtgaagcgaaaggctgttggtatctggggttgcaaggattgtggcaaggtcaaggcaggtggtgcttacacaatgaacaccgccagtgcggtcactgttagaagcacgatcagaaggttgagggagcagatcgagggttaaaagtctgctggctttttatatntggtttccttgttttgacaatttaagttttgcaaactctatgcttgtgattttgaatcaaaacttataca

SEQ ID NO: 161145 - DNA, 341 bp, Arabidopsis thaliana columbia
  unsure (1)..(341): unsure at all n locations
agctactgagatcaatgcagtcaattatgtctctcctagaagttggttatctacctctcggttcggtctaggatttttcctgttcgcgggtcatttatggcacgcgggaagggctcgggcagcggcagcgggatttgaaaaaggaattgatcgtgattttgaacctgttctttccatgactcctcttaactaaagtagtaggtaaaacaaataggttcatattaaaaagtcttctttgtttctttcaattcaatctaaatttttctggctcggctatactatccanccccaccanaaaaatttatttatcatgctaagaagttaaaaaagccaaataaaaa

SEQ ID NO: 161146 - DNA, 345 bp, Arabidopsis thaliana columbia
  unsure (1)..(345): unsure at all n locations
gcctatccttaaaaagatcccaacatcagtcctttggggctattttgccttcatggccatcgaaagcttacccggaaaccaattctgggaaagaatcttacttctgttcaccgccccaagtcgccgcttcaaggttcttgaagattaccacgcgacattcgtggaaaccgttccattcaagacgattgcaatgtttactcttttccaaacgacttatctcttgatctgctttggtctcacatggataccaatcgcaggagtcatgttccctttaatgatcatgttcttaatccccgtacgacaatatctncttcctagattcttcaaaggagctcatcttcagga

SEQ ID NO: 161147 - DNA, 457 bp, Arabidopsis thaliana columbia
  unsure (1)..(457): unsure at all n locations
aaacaaaggatcttccatgggcgatcgctgttaagttccgcaagaacaaaaacatcaaatgccttgaaatcaggaatcttaggcgggagtctatttgagcccttgatctggttttttatttggtgaaagttttgaaatggtgctggtattggcattgggggatctccatgtaccccatagagcggctgatctacctcctaagttcaaatcaatgcttgttcctgggaagattcaacacatcatctgcactggaaatctctgcatcaaagaaatccatgactacttgaagactatctgccctgatttgcatatagttcgaggngagtttgacgaagatgcgcgataccctgagaataaaaccttgactattgggcaattcaagctgngattgtgtcatggccaccaggtgatcccatggggtgatctagactcactcgccatgctttagagacaactg

SEQ ID NO: 161148 - DNA, 400 bp, Arabidopsis thaliana columbia
  unsure (1)..(400): unsure at all n locations
gcgaaaatcccaaacaaaaaaaatataagattggcgtctctgtgcctttctctccgccaagccctaactaatccccggtcggctcccatatgcagaccactcagcctctccttccccggatcctcaaccttctcgatccgcccctctagcagacgcgcaaccgccttgacgacccgcgcctcctacaccccgacgccggcgactgagcgcgtgatttcgatagcgtcgtacgcgctgccgttcttcaattctctgcagtacgggcggttcctgttcgcgcagtacccaangctgggattgctgttcgagccaatcttcccaatcctgaacctgtacagatcggtgccgtacgcgagctttctggcattcttcgggctgtacctgggagtggtgaagaaca

SEQ ID NO: 161149 - DNA, 397 bp, Arabidopsis thaliana columbia
  unsure (1)..(397): unsure at all n locations
gaagaaaaatggtgttgacaatctatgctcctttattcgcttcttcaaagagagctgttgggacagtggtggagaagggaggatcattcnaaactgtcaatgtcgatctcatgaaaggagaacagagacagcctgagtatctcgcgattcagcctttcggtaaaatcccagtcctcgtcgacggagactacaaaatcttcgagtcgcgtgcgatcatgaggtatatagcagagaagtatagatcacaaggacctgatcttttggggaagactattgaagagagaggacaagtagagcaatggttagacgttgaggctacaagttaccatccaccactattggctttaacgctcaacattgtctttgcaccacttatgggtttccctgctgatgagaa

SEQ ID NO: 161150 - DNA, 399 bp, Arabidopsis thaliana columbia
cagaaatggcgaaatcactcctttgttcatcaaccttaaaccctttcttctccaccactcgtctgctcttcgaagaagaaccggattgcatactcgggaaacagcaagaaccagacatcgtcgtctctgttatggaaaagaagggaactgtcgcttggatttatgagcagcttagttgcgattggtctcgtgagtaatgacagaagaagacacgacgcgaatgcagcgattcttgaagctgatgacgatgaagagcttctcgagaaagtgaagcaagatcggaaaaagaggattgagagacaagctgttcttaattctgctgtcaaggaaaaggggtatttgcaggatcttgtttacaagttgagcaaggtaggacaggcctatgagaacaatgatcta

SEQ ID NO: 161151 - DNA, 413 bp, Arabidopsis thaliana columbia
acgctttttgaatccgaaacgagaaaacaaactatgtttcagtccattcatcttcgtttttccgccacgccatcaccttctaaaagagagtctctcataattccatcggttatttgctcatttcctttcacctcttcttcgttccgtccaaagcaaacccagaaactgaagcgtctggttcaattttgcgctccttacgaggtcggaggtggatacaccgatgaagaattgttcgaaagatacggaactcagcaaaatcaaactaatgtcaaagataaattagatccagctgagtatgaagctttgcttaaaggaggcgaacaagtgacttccgttcttgaagaaatgattaccctcttggaagatatgaagatgaatgaagcatctgagaatgttgctgtagaattggctgc

SEQ ID NO: 161152 - DNA, 442 bp, Arabidopsis thaliana columbia
tcccggggcgcccgcgcgtccggtgcgagatctctccaactaaaaaatggcttgtagactcttttgggcttctagggttgcggctcgtctaaggatctccgttggtcggcgagggttttcttccgtggttttgaaggatttgaaatatgctgattcacatgaatgggtgaagattgacgggaataaagcaacctttggtataacggatcacgcgcaggaccatttaggagatgtggtctatgtggagttacctgatgtaggacattcggtgtcacaagggaagagttttggagcagttgaaagtgtgaaagcaactagcgatatcaattctgcagtctcgggtaaggtggttgaagtcaatgaggagctgaccgagttccctggattggtgaactctagcccgtatgaacaaggatggatcataaaagttgagctgagtgat

SEQ ID NO: 161153 - DNA, 330 bp, Arabidopsis thaliana columbia
  unsure (1)..(330): unsure at all n locations
cgacccacgcaaccggnaagagtttatagtggtttgcttctaacttgtcaaaccgtacgtntactangagcggggcattcattttaggatgcggcggacattactataaaataantnacnaatctatggatatatcaagctaggtatagaataccagtaagcagtgcccctcccggttcctgcgttttaattgaaggtgtcgatgcatccatcatgaaaactgcgactctctgtaatgcaagctatcatgaatatgtctacatattccgcgctctccaatttaataccctcccaattattaaaacttcaactgagcctttaatcctattt

SEQ ID NO: 161154 - DNA, 394 bp, Arabidopsis thaliana columbia
aacgaactcgagaaaagtttgttcgatccgtacaaactgaaactaaagtacggaaacagcgagatttggtttgtgcgatagaggataatggaaccaaattatgaggaagatgtttttctcgccaagtatcaatcatccgaacttaagattgcttctgaatttcttacgaattggttgcctttcttatctagagatctctgcaacgactgtgctcatgttctctccgatcgaatccgttctctagacccagagcattgtagtaatggagaagttaaagcgggttctggttcaatggtggataacatggaatctgaagaagttgataacatggaatctgaagaagttgataacaagatggacaatatttatgacgggaagttgcgtgtttctcact

SEQ ID NO: 161155 - DNA, 453 bp, Arabidopsis thaliana columbia
aaaacgcaagctaccacagatttagtgttttttcaccttatctttcgccgagagcgcgaacggtggctgatgtggaacgcggaggttgcagcagcaggagttccaaagaagagaacgttcaagaaattcgccttcaaaggagtcgatctcgatgctcttctcgacatgtctaccgatgatcttgtcaagctcttctcttcccgtattcgcagaaggttctctagaggattgacgagaaagcctatggctttgattaagaaactccgcaaggcgaaaagagaggcaccagctggtgagaagccagaaccagtgaaaacccacttgaggaacatgatcattgtgcctgaaatgattggaagcatcattggtgtgtacaatggaaagactttcaaccaagtggagatcaagcctgagatgattggacattaccttgcagagttctccatctcgtac

SEQ ID NO: 161156 - DNA, 363 bp, Arabidopsis thaliana columbia
tttgcttcctccctctttttcgccaatgttttctttagatctagctaatatggcgacgaggtgggtctttctcgcttctaagcaccgtagagatcctcccgatctgcaaatccgatccgaattctcaacgaatttgtagatctgatctgtgattccatcgttgacgacggatcttcgcttacatcgtttgatctgtcgcagatctgccgttttctatagatctagatctggatcgtccttcgcggcttcttcacatgcaagattctgtgaattgttcaagttgaggcatcatttctggattactaggagaccgaatctgtgcagacggatgtgtgtgtgttggattgaattgagattagggtg

SEQ ID NO: 161157 - DNA, 446 bp, Arabidopsis thaliana columbia
ttcaatcctttcctttcattgtagttaaacaaagattacgattatggccacatcagctatgcaggaatcctccttcgccggcgcaagcggctctcaagccctccagcgacctcatccaaaaggtgggcgtcttgggcggtggccgtgtgaccatgcgtcgtaccgtcaagtctactccccaaagcatctggtatggaccagaccgtcccaagtacttgggaccattctcggagaacacaccgtcttacttaactggagaataccccggagactacggctgggacaccgctggactctcggctgacccggagacattcgctaagaaccgtgagcttggaagtatccacagcagatgggctatgttgggtgctctcggatgcacattccctgaaattctctccaagaacggtgttaaattcggagaagctcgtgtggtcaaggcaggc

SEQ ID NO: 161158 - DNA, 448 bp, Arabidopsis thaliana columbia
  unsure (1)..(448): unsure at all n locations
ttttgactttccaactactccttcttctacttcgtgtttcatcggaatctccatggatcggcgccggagatgtgtctcgaagcccgatcaatttcctcgaattagcaaagagcccggaggttttcgattcaatggtgagaatcagaaggaaaatccacgagaatcctgagctgggatacgaggaattcgaaactagtaagttcattaggtcggagcttgaccttatcggagttaagtataggtttccggtagctatcaccggtattatcggatatatcggtaccggagaaccaccattcgtcgctctaagagcagatatggatgccttgcctattcaggaagctgttgagtgggagcacaagagcaaaaatcctggaaaaatgcatgctngtggacatgatggtcatgttgctatgcttcttggtgctgctaagatacttcaacaaca

SEQ ID NO: 161159 - DNA, 364 bp, Arabidopsis thaliana columbia
ctcaggtaatactcgtaagatttatcaacataagcaaaaaagatggcccaaaagcgggaagcaaagggtggtgagatgggagatgtatgggatgatggtgtttacgaaaatgttagaaaggtatatgtagggcaagcacaatacggtatagccttcgtcaagtttgagtatgtcaatggttctcaagtggttgttggagatgaacatggaaagaagacagagctaggagttgaagagtttgagattgatgcggatgactacatcgtatacgtggaaggttaccgtgagaaagttaacgatatgacgtgagaaatgatcacgtttctttctattaagacttttaaaggcaaaaccttttattcta

SEQ ID NO: 161160 - DNA, 408 bp, Arabidopsis thaliana columbia
aaaaaaaactcaagagagactttgtggccatggcagcctctctccaatccaccgcgacatgcctccagtcggcgaagagcggcgaccgctccttctcgcggaagttctcacctccgatcgactcaagccgtcggcaaatcttttgggctcgaaacttcctcggctcgcctcacttgctccttccagtctgactttaaggacttcaccggtaaatgctccgacgctgtcaaaatcgccggattcgctcttgccacctctgctctcgtcgtctcgggagcaagtgcggagggagctccaaagagattgacctatgatgagattcagagcaagacatacatggaagtgaaaggaactggaacggctaaccagtgccctactattgacggtggctctgagactttctcgttc

SEQ ID NO: 161161 - DNA, 448 bp, Arabidopsis thaliana columbia
  unsure (1)..(448): unsure at all n locations
cagaaaacaagtagaaactttaaaacgagagagagagaaagaaatggcgacatcgggaacgtacgtgacggaggttccgttgaaaggatcggcggaaaaacactacaagagctggaagagcgagaaccatgtcttcgctgacgccattggccaccacatccaaaatgtcgttgttcacgaaggcgaacatgactctcacgggtctatcaggagttgggactacacatatgatggaaagaaggagatgttcaaagagaagagagagatagatgatgagaataaaacattgacgaaaagaggactggatggtcacgtgatggagcatctcaaagtatttgatatcatctacgaatttattcccaaatctgangatagctgcgtctgcaaaatcactatgatatgggagaagcgcaacgatgactttnccgaaccaagcggctacatgaaa

SEQ ID NO: 161162 - DNA, 450 bp, Arabidopsis thaliana columbia
  unsure (1)..(450): unsure at all n locations
aatttgggccacacaagttattttgatgggtgcctttgaaggctacagagtcncaggacaggggccattgttagaggccggggacttgctttaccccggtggcagcttcgacccattgggtttggctaccgacccagaggcattcgctgagttgaaggtgaaggagctcaagaacggaagattggctatgttctctatgtttggattcttcgttcaagccatcgtcactggtaagggaccgatagagaaccttgctgaccatttggccgatccagttaacaacaacgcatgggccttcgccaccaactttgttcccggaaagtgagccaagttttatctgtattttgcttcagtctttgcttcgtgagtgtgagaggagaaagagagcttgtttagatgtaaaaattgcaagactttgtatttttttcataatcaaaaactcngtttctc

SEQ ID NO: 161163 - DNA, 400 bp, Arabidopsis thaliana columbia
  unsure (1)..(400): unsure at all n locations
ctttgagagaatctccgagtcaggatcagatataaattgtgatacggaagctagttctaggggtagggggcgccgagggctcgagaacgcgagaaagctctcggcgaccagttccccgaaggtgaacgctactttggattcgagaatttcggcaacacttgctactgtaacagcgttttgcaggctctttatttctgtgttcctttccgtgaacaactgctcgaatactataccagtaataaaagcgtggccgatgctgaagagaatcttatgacctgcctggcagacttgttttcataagttcccagaagaagaaaacaggtgttattgcgcctaagcgatttgtacagaggttgaagaaacaaaatgagctgtttcggangtatatgcaccaggatgc

SEQ ID NO: 161164 - DNA, 418 bp, Arabidopsis thaliana columbia
  unsure (1)..(418): unsure at all n locations
gagagactccattgttgaagtgtgttcactgttctttttctcaaacaacaatggcgacgacgtggggctcaaatacttcagcgggcgtcgtcaatcatcaacggagcaaacaaacttcgtctctcatgtaccgtcatcactttctctccctcaacgacggacctctctccgagtaaccgcagccagagccactcccaaactctccaaccgtaaactccgtgtcgccgtcatcggtggtggaccagcaggcggngcagctgcagagactctagcacaaggaggaatcgagacgattctcatcgagcgtaagatggacaattgcaagccttgcggtggcgcgattcctctctgtatggtcggagaattcaacttgccgttggatattattgatcggagagtgacgaagatgaagatgatt

SEQ ID NO: 161165 - DNA, 504 bp, Arabidopsis thaliana columbia
  unsure (1)..(504): unsure at all n locations
cgcgtccggaaaaagaaaagcgaattcaattgcatagtttacttcttttttctacatatctgcggccgggtctttcgcttgagagcgagggcacatgattgacactctacagagacaacacaagaggaatatgagattctttatttgtcaggtctgttattggtaactgcttatggagctgcagggaagatggtgtacacagatcttgacattcttgacgagcttgagaactttgatgtactggtagatgatgatgatgatacaaagctcttggattggccatcattcacaagccggcattctggtaaaaatctggtgaatgttgatacattcggtgcagctggagatggagtttctgatgatactcaggcattcgtaagcgcatggagcaaagcctgcagtacatcaaaatctgtggttctggttccagaaggacgtcgatattaagtaacgcacanagtcaatggtcatgtgaccaaaagtgtcattagatggacgacatag

SEQ ID NO: 161166 - DNA, 456 bp, Arabidopsis thaliana columbia
  unsure (1)..(456): unsure at all n locations
gagaacaacaaccaaacactcatttctccacatcttgagagaaaaaaacagagcaagtatggtagagatctcatggcgatggcgggctccggagctgtcctcagtgggcttggttcttcgttcctcaccggaggcaagagaggtgccaccgcattggcaagcggcgtangcactggagctcagagagttggcaggaaaactcttattgtcgctgctgcggctgctcagcctaagaaatcttggatccctgccgttaaaggtggtggcaacttccttgaccctgaatggctcgatggctcgctaccaggagatttcgggttcgacccattgggtttggggaaagacccggcttttctgaaatggtacagagaggctgagctgatccatggccgatgggcgatggcagcggttcttgggatcttcgtcggccaggcctggagcggtgtggcatggttt

SEQ ID NO: 161167 - DNA, 449 bp, Arabidopsis thaliana columbia
  unsure (1)..(449): unsure at all n locations
aaaaatctaaaaaatcttccctttccttcatggggatcaagaagaaaagcgaatctttgggtgagtctataaacgatggatggatagagtatggaaaagaagacgatgagattagtgatagggacgagagacctgagagtgtggatgataaagtgagacanaaggaaatgaaaaagggtattgatctagctactacactcgaacgtatcgagaagaatttcgtcatcactgatcctaggcttcccgataatcccattatttttgcatctgatagtttcttggagctcacggaatatagccgtgaaaaaattcttggaaaaaaatgcaggtttctacaaggtccagaaactgatctaaccacagtgaagaagattcgaaatgctatngataaccaaaccgaagtgacagttcagctcatcaactacaccaagagcggaaaagagttctgg

SEQ ID NO: 161168 - DNA, 352 bp, Arabidopsis thaliana columbia
  unsure (1)..(352): unsure at all n locations
gacccgcgcgaccgaaagaacactctttngatttttctcttcttttacttaactcactaagcctgactcactgggtcagcgcgcttctgaggccgcgtcgtcatcnctttcactccaacactctccnccactcaacctatccttccgccgacgctggcggtggccttgtcgtctatcccacgtatggtcgtcaccgttgctccgcgattgcgatcgacgctccgtcgtctctgactggcgtgacaccgattcgttggggttacacgagtgttcaaggattccgagatgagatcgaaaaccacatcgtaatccgctctgatgctgtcgatagcttcttctacgcagcggtctt

SEQ ID NO: 161169 - DNA, 334 bp, Arabidopsis thaliana columbia
  unsure (1)..(334): unsure at all n locations
ccacgcgaacgcaacaacaaatcttaaacgttntactttgtttttcactactcaaccacaatnnccnccccgacacggtctatttactgcccggcctgcgccantaaagccttcaagctttcccccgcatcatctgaagtccttgcaaacggccgtgtcacaatgaggaatactgttgccaatccaaacggcccatcacgcaacccatggtacagatctgaccgtgtcaagtacttgcgtccattctctggcgaatcacccagctaccttacaccagagtttcccacagactactcattgtacaccctcggactttcagctgaccccgagacat

SEQ ID NO: 161170 - DNA, 114 bp, Arabidopsis thaliana columbia
  unsure (1)..(114): unsure at all n locations
acgaaaaaaactcttgaatttttcaagatcaaattaaaaagacatctttaatggcggggatgagctcnattgttctcactggcgggtcncaattgctgctctggctcgtagagc

SEQ ID NO: 161171 - DNA, 433 bp, Arabidopsis thaliana columbia
gttgctctcgtgcttcgagagccatcaccactcgttcggtttatgagcaacgtaccggagggcacggtttactgaggaccgagaccggagaactcgaatcagagagtgactttgacgcaattgagacagaagcatcggaaaggtgagccgataactatggtcaccgcctacgattacccttctgccgttcacatcgatacagctggaatcgatgtttgtctcgtcggagattcagctgccatggttgtccatggctatgacaccactcttcctatctccttagaggagatgcttgttcactgtcgcgctcgtgctcgcggagccaaaagaccacttcttgtcggcgatttgccgtttggtacttatgaatctagcaccaatcaggcggttgatactgcagttagggtgttgaaggaaggaggaatggatgcta

SEQ ID NO: 161172 - DNA, 377 bp, Arabidopsis thaliana columbia
  unsure (1)..(377): unsure at all n locations
acgatgccattgcatctggcaactacctttagtgtaaacttttcatccagaccatcgcgcccgcgatattatgataagtgcgacggctgacccacttgatgtgaccaanatctggcctgaggatattttgcctctgcaaccggttggtcgcttggttctgaacaggaccattgacaatttcttcaatgaaactgagcagcttgcgttcaacccgggtcttgtggttcctggaatctactactcagacgacaagctgctccagtgtaggatctttgcttatggtgacactcatagacattgccttggaccgaattatttgcagctttcagtcaatgctcccaaatgtgctcaccacaacaatcaccatgaaggtttta

SEQ ID NO: 161173 - DNA, 445 bp, Arabidopsis thaliana columbia
  unsure (1)..(445): unsure at all n locations
caacaacaaatcttaaacgttttactttgttctgcactactcaacctcaatggccgcctgaacaagggctctctcctcccgggcctgcgcccntaaggccgtcaagctttcccccgcggcatctgaagtccttggaagcggccgtgtgacaatgaggaagactgttgccaagccaaagggcccatcaggcagcccatggtacggatctgaccgtgtcaagtacttgggtccattctctggcgaatcaccgagctaccttaccggagagttccccggagactacggatgggacaccgccggactttcagctgaccccgagacattcgcaaggaaccgtgaactagaagttatccacagcaagtgggccatgctcggagccctaggctgcgtcttccctgagcttttggctagaaacggagtcaagttcggagaggcggtttggtca

SEQ ID NO: 161174 - DNA, 425 bp, Arabidopsis thaliana columbia
  unsure (1)..(425): unsure at all n locations
gaccacgcgtgcgacaaactccatagctagctannagagaaatataatttagatgncgaaagaagtgagcggagaaggcgaaatccaccatgggagagagtacnttnatcctccaccagctcctcttctcgacatgggtgagctcaaatcctggtctttctacagagctctcatcgctgagttcatcgctacactcctcttcctctacgtcaccgtcgctactgtcatcggccacaagaagcaaaccggtccttgtgaccgcgttggtttacttggtatcgcttgggctttcggcggtatgatcttcgtcctcgtctactgcaccgccggtatctctggtggtcacattaacccagctgtgactttcggtctgttcttggtccgtaaggtctctttggtgcgagctcttggttacatgataactc

SEQ ID NO: 161175 - DNA, 378 bp, Arabidopsis thaliana columbia
  unsure (1)..(378): unsure at all n locations
ggaacaacaacactaagcataaaagtaaagttttatgttttttgagagacaanggcatcaacagggcacgcgctcaatcaatgttcggacccgaacaacattccttggccagactaaagcctcaagctttaacccccttcgtgatgttgtctctctcggatctcccaagtacactatgggaaatgatctttggtatggacctgacagagtgaagtacttaggacccttttccgttcaaactccgtcttacctcaccggagaattccctggcgattatggttgggacaccgccggtttatccgcagaccctgaagcctttgccaaaaacagagctcttgaggtgatccatgggagatgggcaatgttgggagcttttgt

SEQ ID NO: 161176 - DNA, 365 bp, Arabidopsis thaliana columbia
tttttggcccttttttttttttttataactcggcctcctcggttccggcaatgtgccaacaggcgcctttttcaattgccttaataataattttccttttaacaattttataacccgtttaacctgaaccggcaacagtccagcctttccgggtaaaataatcccaacccgaaaccataccggttttccgggagcaatccgatttttccggttgccaactcgattaaccagaggaccttttcaacggaataaagtaagttggcaggggcaaaaagttcaacaagggaaaaggtggcccggaactaggggcggggttttactttgttaactaaaccattgttttaagccgttcgatttccgccgcc

SEQ ID NO: 161177 - DNA, 291 bp, Arabidopsis thaliana columbia
acacccttccggacaatttgaaaaaaaatgaaattgattaacttgaaaatggggatgtttgggggattttggatctacaaccaaatgatccttgggttaaaccagtttttgcccttaaaattgaaaccaggatccaaaacctaaggaaaaagccaggtttggaaccaacaaactttggggaagggtccttccaataattgaacaagaataattttgtttttaaccaagttttagtttttaaggaccaaaccatcagggattaatttgcctcaattttacttttgcctattt

SEQ ID NO: 161178 - DNA, 392 bp, Arabidopsis thaliana columbia
gcgcagttccgggtttgccgccccgccccgccttaaaaaaaacattggcccattgtaaattaaaaccctttgtcggattaaactaaaaaattggttggcattttattgactccattgcctaagttaaagggttttcagcccaccaaaatttttgcagttcctgtccaaggcctggcaggggttcagcccatgaaacgcaggggaaagggagctttgggggcaaagggggacttaatgggttaataaacaaatttgatattggtaacgtcgacaaccttgatgttgttcgcggggggattcggacttgcgccatcagccaataggaaggcgacagttggacttaggttggaggcacgtgactaaggtttacaaacggttgacccggccgggtt

SEQ ID NO: 161179 - DNA, 392 bp, Arabidopsis thaliana columbia
gggccgcagttccgggttggccccacccgtccggcggaggagagaaaaccaaaaagggcggtttttggttcgctttcgccggggatccttttttttttttccgggaaatcctccggaggggggagaaggtttccgtttttggggttttttttaccggttttttcgaacccgccggtccaggtcggcttttttgcgaattcgaaagggggattgcaggtgaagggtgaagttgacccgccaccaacaacttttttggttccggcgaatcaccgatggatgttcgccgaaaaaaaagctaatggccctgccatttggaccacgacatggtttccaaaggcttcagaccatgtgaccacggccaagccctggttgggggttgatgcacctgccaa

SEQ ID NO: 161180 - DNA, 370 bp, Arabidopsis thaliana columbia
  unsure (1)..(370): unsure at all n locations
cggaantccggggaggaccacaggcgtccgagctgccaggatttgggggcgggccatttaaaatgttatttccaaagctggttaatatcctggaatgaacattattggacctaagggggaagtattccctgaccagggggagttccaagttggcccaaccgtaggaattgatgcaggtgaccatgttgggggggctagatacttttttgggagaataccaaaccaagctggtgttgtcctaccacttgatcccaaaccgttagagggtgactggaccggtgctggttgccccaccaattccatgcccaagagcattaaaaaggaaggaggttttgaagtgttcaagaaggtttttttgatccttttcttt

SEQ ID NO: 161181 - DNA, 385 bp, Arabidopsis thaliana columbia
gcttggaagaacagaaaaacgttttttggttgttataataaccagaattcgatactgggtaattaatagaataactataccttccttattaatgggggccgggtaattcgtaagaaccggttaagttaacaaggggttcggaagccctggtccaaacaagttttttacaaaaggccgccagggcattcaattaataacaggccgtttggattttttggaacaactcgatgaatttagtaaatttttttaggaggacccaaggactttggatgggacctatccaatttttacagggcgctggttggctgttaatggactagctgaacctaccgtttttttttgggggtcaatatcagcaatgcagttcatccaacgttaaacctaa

SEQ ID NO: 161182 - DNA, 249 bp, Arabidopsis thaliana columbia
aaaccttagtcggggaagaccttacccctgggggtggaataatccacaaccttggccaaggtgaaggcaataatccaaaccagggaaggattcccaccggaccagcagggatggattttggccgggaaacagtttgaaaacggccgaaccttggccgattacaacatccagaaggaatcgacgcttaatttggtcctccgtctccgggggggggttaagaagaggaagaagaagacttccaccaagccg

SEQ ID NO: 161183 - DNA, 284 bp, Arabidopsis thaliana columbia
ttcagaaggatcaatttagggggaccaaaaggggatcggaggagagggtttttacctccgggaggtaatgggtaacaccatttaaccagacccgttggtttcttttctttaagccattacttttgaaaccatccagggtttgggtggcaactgggggcagagaacaaaggtttaaggttaaggccttaaagagggacagggttttgaccggtttttccggggttgttttaactgtttggagggggattccggaaatagctgaagctgctggttctggaattttt

SEQ ID NO: 161184 - DNA, 305 bp, Arabidopsis thaliana columbia
cgtccggacctaattaacgacgccggagatggccgccatttaaaccgccgttgttgttttttaaataatgggtccccggggggtttccgccattagttccaattaaggccggttaacagcccggttcggattcggaaccaaaaaagcatttccaaaaagggttaaaacggttttttaaaaccggcctttatggttcccaggcgcaaaataacccgaatttttggacggttaatttgtcggggactacgggttcgatcctttgggtttaggcaaaccgggggagattttccaattcgattgggatt

SEQ ID NO: 161185 - DNA, 335 bp, Arabidopsis thaliana columbia
ttaattcattgagaaaaagggggacccttttttcccttggggcgctttttcttcttttaaatccaaaaccttggtcctttaaccagaccaaaccaatttaacattaatggtttttttaaaaaccaaccaccttttccggtcttaaacacttttcaacccggttaactaaaccggaataaagaaactggttaatagatgcaaagcagggactagctgctttagcttaatttttaactttaactttttaacctgttggcactgtttagcctttgagttaaatatcctaaacgatggtccacctaaggaaacttacgtagtcgatgacgctggggttc

SEQ ID NO: 161186 - DNA, 377 bp, Arabidopsis thaliana columbia
caaaaatccaaaaccgcccaagggatcccattacccataacccacctccttccgccgccggaatccttcttcaaccacctggaaccaccatttccgccgaaggagggggggttttttaccaccaccttttcaaccaccaccaccaccagttccaacttttttggccctaccaacgccaggagatcgaccaggttaccgatttaaaaaaccatcagtttccactagctgggataaaaaggatcatgaaagccggtgaagatgttcgtttgacctccgcaaaagcaccgttttttttggggaaagctggggagcttttaattttgaggctaacgaccagatctgggtttaacgctggggagattaaacgtcgtccgctt

SEQ ID NO: 161187 - DNA, 411 bp, Arabidopsis thaliana columbia
aaaaaaaagccagttcctgttaagtccaaggttgcttttgaaactagcgatgagctcgccagggggtttggtcctgccaggaaaattttttggcctgagggtctttgggatagatcagagatcccagagtccttaaacggggaagttgttggagataatggttatgacccattgggccttggaaggaagcctgaaaactttgttaaatcccaagcttttgaatggatccatccaagagggcctttgttaggagcagttggtttaataattcctgaagctttaaacaaaaatggcgttaactggggccttgaagctgtttggttaaagactgtggctttgcttttggatggaaccacattgacctcctttggcaagaccatcctttataaccttgttttggccgtaattgct

SEQ ID NO: 161188 - DNA, 373 bp, Arabidopsis thaliana columbia
aggatctggttaaccgttctaatttcttaatttttccgtccgccgaaaaaccaaatggttcgaaataggggtttttgctgggggaaaatccaagaaatcttagcctttaacatgggccaggctgggacccaggtcggaaattcgggtggggggctttactgtttcgaccatggaatccagccggccggaaggatgccgggggatcctccagtgggggtggaccacaatgcgttcaatacttttttaagcgagactggggctgggaagcaggtccttagggctggtttcgtggatctcgagcctaccgtatccgacaaagttcggccgtggcctaaccgccaacttttccatccagagcagtttatttttggga

SEQ ID NO: 161189 - DNA, 373 bp, Arabidopsis thaliana columbia
atctttccggaaatggggtttaaggggtgggtcccggttaaaaaaattggccacatttagactggtcgggctgaaccataaccgagttcccgaggttaattaaggacttacaaagattttgggggttggccatttccattattggaattaagggaaaggggcctgagtggtaatggactttgcctttaatgctcaatgtaaatttttaacgcacctcctttgattcctgggagggtccgccaaaaataatcttaaattcgccgatttcggagttggattggagttcaaaggccttcaagggatcttttcttattattccaccttatgtaaacataatggttgcataaaataactatttaactggaggcatacc

SEQ ID NO: 161190 - DNA, 307 bp, Arabidopsis thaliana columbia
ggggcgcttggcctcttaggaaggatctttttggttccataaaagggcctaagtaaatccgttttaaagggcaaaagcgtttccttaaccaaaggttgaaggttcctccagtttttaaccagttaaccaagacctttgttaagaatttggccaccagccttttaaagatttttttgaagtttaggccaaaggccaaagccgaaaagaaggaccgccttttgaccaaggttaaagctgaggcaaaaggaaagcctgttgaatccaaaaagcccatggttgttaagtttggcctaaaccatgtgactta

SEQ ID NO: 161191 - DNA, 427 bp, Arabidopsis thaliana columbia
ttggtggttaaagggttgaggttatcctccctaggaagagggaaattttaaaccatttttaaaagttgggataaccggttccttttaatgttttggccgtcgacaccagtaacgttgaccgtaaatcaatcggccgttggttaaaagtttcttttggcaaagttactgtggtggatggggcaccaggagctctccaatccctgggttgggatgttggggaaaaatcattcggtttgggggattggaaggttaatttaattatgactgattcctcaaggcccggtttgactggatatgaacttttgaggaaaatcaaagaatcctaagtttttaaagaagtcccgggggtatttatgtcctccgggaccatttggcctcttatggaaagatgtcttgaaaaaggggctgaaaattttttactgaagcc

SEQ ID NO: 161192 - DNA, 352 bp, Arabidopsis thaliana columbia
aaaaaaaagccagctccggttaggtccaaggttgcttttgaaactagcgataagctggccagggggattggcccggccggggaaattttctggcctgagggcctttgggatggacaagagatcccagagtccttaaacggggaagttgctggaaattttggttatgacccatttggccttggaaggaaccctgagaacttggctaattcccaagctttggaattgacccatgcaagaggggttatgttagaagcacctggttgaataattcctgaagctttaaacaaatatggcgttaacgttggccccgaacctgtttgtttaaaaactggggctttgcttcttgttggaa

SEQ ID NO: 161193 - DNA, 416 bp, Arabidopsis thaliana columbia
ccggccggttcgggcccggattcccggggcggacccagccgtccggccgaagcaaatccaacccaaggttttcctttttggaggctccttaaagcttttgaggaataataaagccactttggttttttggataaaaaagggtttaagctgtaccttttttttaaacggcaacttttggaccgggtttttttggtttgggagttctttttgaattaaaggctcttaaaatatgttcgattgggtaattggatcaaacccatttgtttaaaagccgttcctttatgaaacctttaaacgttgagtaacattaacgaggcgaatctggggtaacttgggcttaaacttaaatggctcctgaagttgaagagaaggggggagaagttgaagactttgggcacctggttaaaaagctggaa

SEQ ID NO: 161194 - DNA, 392 bp, Arabidopsis thaliana columbia
ggattcacaatcacattcttcttaaattgccgggttttggggtgggatcttttaggtttagctggggataagggttacggcaactactaatgcctgggcctggattttccgacctggtccttaaaagccaagattcctaaccggtttttccggtgggtggaaccgggactggtcgtttacatggatcggttaatgggccaaaacgtcgtcgttaaaggtggaagctaaaaaaggagaatggtggcccggttgggcatcgcctgattatctaaccggcagttttgccggtaccaatgggtttgacccgttgggtttagctagggttccagaaaatttgaaatgttttgttaagtttaaattttttcaacggtcttttgttttttctttgtttt

SEQ ID NO: 161195 - DNA, 379 bp, Arabidopsis thaliana columbia
ccggcccggaattccgggtccgcccacagccgtccgggtggatgttttttgggattaagttgtttttggtgggaatacggtggaaagagaagggatttcattttttaacccggcggggttaatttggatcggttaaggaaatccggaaaaaggagagtttaggccacagttttttgatcggttgggtttgcttgcccaagtggggccggttggagatgctgttttacgggcaaagattgttgaaaagggagctcgtttggttggtaacccaaaggatttccgtgccattaacaaaaccgggcaggacaggtctaaaaaccagatttaaactgttagggcaaacctttcctcggttcaaatggatagggaattgaaggtt

SEQ ID NO: 161196 - DNA, 357 bp, Arabidopsis thaliana columbia
ccggcccggaattcccgggccgcccacacccgtccgcgggaattagcttaagattccatggccggattaccctaaaagggctctgaccaaggtttggggggtggcatttgagggaggagaggtttccggttcaccttaaaatccataaggggaaggggggggacctttctgaatgggataaccaagttgctcaggctttttttgatttggggacccccaatcaaaatttgaaaggtgacctgaaggattaatccgtcacctcggttgtccaagttgttttctttggaggccccagggcaattgtggccaatgttccttccaacctgagaaaagcttaccggaaaatccatgttaggc

SEQ ID NO: 161197 - DNA, 357 bp, Arabidopsis thaliana columbia
ttcaggggagggcaaaaccaccggatggcctttgttggggccatccttagggatcctagaatcctaatcctcgatgaagccccaggtgccctcgttgcaaagggcgaccccattgttaggggcgtccttggttttatcggaaccgcctcaccaccaaagggaggcgtcttagtgttggcccacaaactttttccaattaaggctgcggttggattagtggttttggccaggggccaagtcgtcaggatgggcagtaccaaagaacttttgggcaaagatggctattacccgggattgacgaaaggccaaaccgatgccgcttaatgatggatcctacccatgctaaactgttcatga

SEQ ID NO: 161198 - DNA, 332 bp, Arabidopsis thaliana columbia
attcgcggcggacaacccgtccgaaagaagcgttggtggagatgtgtaaggatgagtttgttcagaagatgacattcattggttttttgtccaagcgggtggggcgggttggccctttggaggatttaaagtgggttgggaacaccatgggaggtttggttggggtaattgctttaaggaaagagatggataagctttatggtttaatatccaattattgtggcttttctgcattatttaatttgttatcatctttttttttgtctgttaatattaattttaccttatatgtttggtttcttctataaaattttattttattttttttttta

SEQ ID NO: 161199 - DNA, 463 bp, Arabidopsis thaliana columbia
cggccggtcgggcccggaatcccggggcggaccacacccgcccggggaaggtggcagtcctgcgttttcttggttcctccgggccatgaggcatttggggcattgagagttcggggggggggggtaactgccattgcattcatgggggtggcggctgtggagggaattcgccctaaaccaaaggaggcattacttaacccaagggctgttgttgacccaatggtattggttttaattaggataaagagggagctagtccaaatggagggatgcaggacctttcttaattgggttggttccctgaaaatgggggtggggatgttccaagggttcaaaccagggctttgaagggggaaattgtcattgatctgtgggaaacctgtatgcttgttgctgagctttaagaatttgaaagcaaattccccacaaaattgccaagggctttgtaatctgggctgtcttt

SEQ ID NO: 161200 - DNA, 335 bp, Arabidopsis thaliana columbia
aattccggggcggaccacaggcgtccgttggtggattatggcagtaacagaaaaccgtaaggtttttactggatctaagggttagttaaatagttggcagccttaaaccggcctccatggggttttttggggtaatatcccgggggcaagaagctgcgggtggttaaggggtagataaggggcctaattccgggaaaccgaaccaaatgaatgggctggatgttggaggggtttttggcaaatccaataaggccaatgttgggattgcaggtcaattagacgaagaagcgttttcagttttggggaacagatccgggaaagcatgggaattactt

SEQ ID NO: 161201 - DNA, 391 bp, Arabidopsis thaliana columbia
ccggacctgaagggttcctgggaaggctgggggatcaccggggaagttaacaccatcaaaaggttcgttggggggcctaaggagggggtttcgcccattagggattccatgccgtcttcgcagtccagggttgacttggcaggacccgttgttgaggtcatttttaatttcgggggcttgtcctgtaccaggtttaagtgtgccggcttggcccctgggatctttgttttcgatgacccgcttttttttaccatcctttaccacaggaaaaatggttttttcgggggggagaaattgacctcaccgaaattcggggtttggttccagaagaagaaagccccagcagtgccccccatgaagaaatgtgcccacgccttcagagaagggggct

SEQ ID NO: 161202 - DNA, 350 bp, Arabidopsis thaliana columbia
gggaactaaaagtaatccacagcaggggggccttgctcggagccttaggctgcgttttccttgacctttgggttaaaaccggggtcaagttcggaaaggcggttgggttaagggccggttaacaaatcttaagcgagggagggctcgattcctggggaaaccttacttgggttaaccctcaaagcattttggccattgggcccacacaggtaattttgatgggagccgttgaaggctccaaagtcgcaggaaagggcccattggaagaggccggggacttgttttaccccgggggcagcttcaacccatggggttgggttaccgacccaaaggcattcgttgggttgaag

SEQ ID NO: 161203 - DNA, 378 bp, Arabidopsis thaliana columbia
cgtggaacaccatttgaggttccttccttttgttctttaggacaggttttccaatgtttccaccgccatttggaaacccgccaccggggttagaattttggttgagggaaaggagaaaaaaaaggccattttactttttggggaagactttgagcctgcattgatccttgccaggaccatccttgaccttgaggacaggaaaccagaggatggggccgaaggagccaagattcctgatccaaatgccgggaagcctgaggactgggatggggatgcacctttggagattgaaaatgaggaagctgaaaaacccgaaggatggttagatgatgagcctggggaggtcgacaaccccgaagcgaccaagcctgaaaattg

SEQ ID NO: 161204 - DNA, 348 bp, Arabidopsis thaliana columbia
agaaattcaacctaaaaagggccgggaggatctcgcccatggaggaatggaccctttccctggttttactaagtttcggccagggtggttttggccggcttcgcctcggtttttccagccaaaatggccaaaccgtcgaaaccatcgattttaaggtggtggggggggcattcatcagggattcatcgatggcccccgcatggatccgcctttattttaacgatggttttaccaccgggggggaggcatcgtttcttttagatggttcgaccggggggaaaagggcgtaaccaaatttaagggtccgcggttccaaagggttggatgccattaagtttgcggccgaaa

SEQ ID NO: 161205 - DNA, 399 bp, Arabidopsis thaliana columbia
aaatttttaattaagactaagacggagccataaccattggcgaaatttccaaaaccagagcttccgaccaaagttttgggtgggggggctagaaccaaatccggggttttttttccttttaacttttttagaaaagccaatggggaaaatgatgggccagggaaaattttgttttggggggttggccccactgtttaccacaccatcaaaaacgactggggttcctcgtattacccagtagttccagggcatgaaattgtggggatcgttccaaaagttggtaggaccgtgactaatttcaaagaaggagatcgggtcggattagaagggatcagggcctcgggccaatttggcgaattttgtgcccaggattttgaaatctcctgtcctaaaatgttt

SEQ ID NO: 161206 - DNA, 221 bp, Arabidopsis thaliana columbia
acacccttccgatcacaaaaggttaccgttaacgaatgcgaacttgattttaacggttttataaggggtgggaactacacatggaatggaagggaggaggttttaaaggagagatgagggtttgccgatgggaccaaatctttgcctttaaaaggactggaggtcaactggttggaccagttaaaagtgaacgacgtttttttccaatttattcccaattt

SEQ ID NO: 161207 - DNA, 249 bp, Arabidopsis thaliana columbia
aaacctttaactaaaattaagacagggtcttaaccattggcgaattttccagaaccggagaatccgaccaaagtttttggtggggtggttagaaccaaatccggggttttttttccttttaatttttttaaaaaggccaagggggaaaatgttgagccagggaagatctggttttggggagtttgcccaactgttttccccaccattaaaaacacctgggaatcctcaatttacccagaagttccaggg

SEQ ID NO: 161208 - DNA, 400 bp, Arabidopsis thaliana columbia
ccggcggacccggcccggaattccggggccgcccacacccgtccggtaaagaagaccaagggtttcctttatgcttttttccgttactatggtggcttttccggttaaggccattatggcggttcttttaaacggactaaagtcctccgttgccttcccagccacccgaagggttaacaccgccattacttccataacaggcaacgggggaggagttaacggcatgcagggggggcctccgatgggaaagaaaaagttggggacttttttttaccttcttgaccttaccgattccgaatgggttaaggaggtggactaccttatccgaaccagggggattcctggggtggaattcaggtgggagcccggatttttgtcccgtgggcccggtaactaaccc

SEQ ID NO: 161209 - DNA, 366 bp, Arabidopsis thaliana columbia
ttggtttagaaaaagcatgggccatttaagaattccaccatttttttttggttggccaaacgaccttaaggccatccaacgatttcttccgaaaaatcggagcctccaagggggggggccgaataataatgcgtggtcccgtaaggtttactcttaaaagcatttggtccggaccaaaccgtccaaaatacttaggaccattttccgaaaccacaccttcttacttaaccggggaataccctggagactacggtggggacaccgttggtttttaagccgatccagaaccattcgaaaggaatcgggagctcgaagggatccacagtagatgggcaaggttggaagttttaggctgaaccttccttg

SEQ ID NO: 161210 - DNA, 381 bp, Arabidopsis thaliana columbia
ggggggcccagcgtccggaggaccggcttctgaaaaaacctaatcctgctttggctcccacttcggccggttctttaccaaatccttttttggtttttccggccaaggcacctcctccttcgccggttaaccatccccttttcggaggtcgaaggggtggtcttagaatcaaagcgatttccactaaaggggacccgccaagggtggttcctaaggcagccagagtcctggtccgtctggaagaccttcctattaaatcctcagggggggattggtggcctaaggcagctgggaagttggggggatccctaccaggggggattttatctgtgggtcctggggtgggccaccaggttggccctggaaggggggttttgttct

SEQ ID NO: 161211 - DNA, 312 bp, Arabidopsis thaliana columbia
gaccgccagagacagcgggtttaaaatcaaagatgtcggcaacctttacaggatcggaaccggttttggggttttggggttcttcgaaaatttcaaaaggggtttttttttaaccagtttttaaccgatgctgaataaagatgtttgtttccgccgacaagaaaaaaaaaggtttaagctttaaaaaatttgaggaagctttaaaggttgttaaaaatttaatgcctgaaggggggaattccccggttcgggcattaaaatccgtggggggccaacctgtttggatggattttgttaaaggctaaaaattgt

SEQ ID NO: 161212 - DNA, 364 bp, Arabidopsis thaliana columbia
gaggaccaccaccattaggcaaaaatgaaaggttaaggccgggggggccatgggcttaaacattaacgggctaaggcggggttttaacccaaccaccattcttgggccggactaaagcctaaggcttaaacccccttggggaggtggtttttttgggatctccaaggtccactttgggaaaggatctttggtttggacctgccagagggaagtactaaggacctttttcggttaaaactccgttttacttaaccggggaattccttggcgattttggttgggcaaccgccggtttttccggagaccctgaagccttggccaaaaccagagttttggaggggatccatgggagatggccattgtt

SEQ ID NO: 161213 - DNA, 409 bp, Arabidopsis thaliana columbia
  unsure (1)..(409): unsure at all n locations
gggnatggaaacccggggcggaccaacccttccgccccgtttccttttaaactccatttcttgattccgttctcctttacctcgcaggggcgagaccatggtttaactgagccggcaaaccgaaaataatccaagtttaaagctggtaattgtgggggatggaggcccaggaaaaactactttggttaaaagacattttactggggggttggagaagaagattgaacctactatggggggggaggtcaatccattaaattttttaacaaactggggcaggatccgttttaactgttggaccactgttgaccaggaaaaatttgtgggcctaagggtgggatactacatccatggccaaggggctataatatggttggacgtaacagaacggttaaaatacaagattgtt

SEQ ID NO: 161214 - DNA, 213 bp, Arabidopsis thaliana columbia
  unsure (1)..(213): unsure at all n locations
aaccaacaacaaaaagtnaaagaaccttttcatcatcttaaccataatcaggaacccccaagcttaaacctttccatgtgccgttctttttaatatcaacatttcaccaactttgatcgtttaaaaaaaatattggccagccaccaaattttgaaaatagcgatgaaggttaaagcttacccttgggaagctaaaaaaaaaaccaaaaggcac

SEQ ID NO: 161215 - DNA, 191 bp, Arabidopsis thaliana columbia
ctcccaagggaatgggtaaacaattaaacgggggggtgcgttcttttctttaagcaattacttttgaaaccatcaaaggttttggttgcaactggaggcaaagaacaaaggttaaatttaaggccttaaaatgccaaggttttaccggttttccgcggttgttttaactgttaatggtaattccgaaaata

SEQ ID NO: 161216 - DNA, 379 bp, Arabidopsis thaliana columbia
  unsure (1)..(379): unsure at all n locations
acgggccgggcccacggnccaaccaaatttaaaaaaaaccttttcaataaactttccttttcctcctcccttgcaaaccaattgcctagatcttttttttttcggggaagcgccaataaaaaattccatttcaacccacattgtccagcctgtatttaaagtcgaaaatcctggctggaaccttaactgttttgaccatggcatcaaccctgatggccaaatccctggtaccaaaactgttgtgggaggtaataatcctttcaccacctttttaagggaaaccggtccagtaaaccacgtccaacgtcctgcttttgttgatcttaacccaactgtaatcgacaaggtcagaactgttcctacaccgaagtttttccac

SEQ ID NO: 161217 - DNA, 384 bp, Arabidopsis thaliana columbia
gcccaaccgtccgaaaaaaagaaaaccccaaaaccattttttttattgcttccctaaaccatgcttttgccctcgcttacatttcgccgagagggttaaaaaccctccccattaaaatgccctcgaagccgcccttttacccataagaaaaactttctccaacccaaaggtcccattttccttccaatggtccgaatctacccaagcaaataccttggttccattttccgccaagcccccaatttccctacaccttaagtcccccgggacctccgaatggaccacctttgttttatcccccacccaaaaaacttttcccagaacacctaatttaaaagttttccacagaaaatggccaatcctcgaaccctaaggtttcttttt

SEQ ID NO: 161218 - DNA, 431 bp, Arabidopsis thaliana columbia
cgaaaaaaaaaaaaagggggcttaccctaaaattttttttttccgattccgctcctgggaaataaccaggtccgaaaaaaaagaggggacggcccccaaactaaagaccggggatgggttttggagggcaaagggctaaatgaacggggaagttttttggattctgggccacaggtttgaccagtttcagcaaatttaaagggatcctttgaataaggtttttaaggggttggagaggtcctggcattatgtgaagcgattaacccgttccaggaatccaaatgctgttagccaggtccgggaattcctaagcagccatcaactaactgggttggggctttgggttctgggcaatttttgccctgaaactgttgaagaagcaggggcaatggttcctttttttaagccaaagggaagggctcatgatgttg

SEQ ID NO: 161219 - DNA, 217 bp, Arabidopsis thaliana columbia
  unsure (1)..(217): unsure at all n locations
cctcaactgtttaccttgccttttaagttcccaacctaaantaaagaattgggcttagggcaaaatgttaagagtcagggtcctaaacaatcctttaaaaaccatgtccaatcctaaaaaacaagccaagagccaggtcatgaccagcccttcctccaaagtgattttcaagtttctgattgtaatccaaaaccccggttccattggtaagtttaag

SEQ ID NO: 161220 - DNA, 321 bp, Arabidopsis thaliana columbia
ccccctcccccgccgaaccggttttaattccatccaaggactgcctcccaaaggttgttttttccgttggtgcccttttacccttccttcgtcccgtcaagtttattcttaaaagcttttgttccgttcctacccgcccaaagtcctaagacccattttcggagattccaccttcctacttaaccggaaattcccccgaaacctacggttggaccaccgttgaactttcgcttgacccgaaacctttcgttaagacccgtggccttgaattattccacaccaattggcctttgttggttcctctcggttccccattccttg

SEQ ID NO: 161221 - DNA, 443 bp, Arabidopsis thaliana columbia
ctctttgtccctctctctttctctattactctgtctcctctgttccggcgatgttccgacacgcgccttcttccatttgcctgatcatcatcttcctcttcaccattctatcacccgtttcacctgaaccggtcacagtccagccattccgggtcaaatcatccccacccgcaaccatacccgctttcccggagcaatccgatttctccggctgcccactcgatttaccagaagacctcttccacggcatcaagtcagcttgcagcggcaaaaagctccacaaaggaaaatgttgccccgtactaggcgcgtggctctactctgcttactcaaccactgctctaagccgttcgatttccgccgccgcaagaaactcatcctcctcctccgccgcggtaacgactcctgaagaagatatgcctttgcttcccgatgactcggag

SEQ ID NO: 161222 - DNA, 309 bp, Arabidopsis thaliana columbia
  unsure (1)..(309): unsure at all n locations
gacgatttgaaagagaatgtgattcgattcatttggagatcgcgatcgttttggagagcctgcctctactatcaaaagaggctgcgcgcataaacanactttgccccanagaatgaaaacaggatccagaaactaacgcaaaagtcacgtctggaaccaacagactttgtggaagtgccctaccaattattgcacgacgatgcatctgctccgaaacaccacccaatctaccaggaacccttcatcacggcttcaagtcgactcgcagcacctaaaagctccacaaaggcataacatgcccggggcggg

SEQ ID NO: 161223 - DNA, 295 bp, Arabidopsis thaliana columbia
  unsure (1)..(295): unsure at all n locations
acgcgtacgaggaatctgatattttcgttgacggcatgctttctgagcgacgggactacaacctcctgaatggcggagaatattccggtggtcggtataanaaagaaactgaagaaagcagaagaagaagcggtggagatcgtgaaagaaggctttgagacggcggagaaaggcgttgatgcggcggagaaaggattagaagcggcggagagaggtgtagagacggcagagaaggaaatcgtgacggcggttagctttaatggattgacacaagctggagccgtcgtggcggctg

SEQ ID NO: 161224 - DNA, 403 bp, Arabidopsis thaliana columbia
gacccgtacgaaaaagacacagatcttgataataaatgttttgtagaatcaactaagaaaatggctggcactgtgatgactacattggctcagggcaatggtcttcgagccaccaaaatctctgcagctcctgtacaaggcctggcaagtgttcagcccatgagacgcaagggaaatggagctttgggtgcaaagtgtgacttcatcgggtcatcaacaaatctgataatggtaacgtcgacgaccctgatgttgttcgcggggagattcggacttgcgccatcagccaataggaaggcgacagctggacttaggttggacgcacgtgactcaggtctacaaacgggtgacccggccgggttcacgcttgcggacactttggcttgtggcaccggtggtcata

SEQ ID NO: 161225 - DNA, 398 bp, Arabidopsis thaliana columbia
gcagttgagagaaaaacaatatatggcggttctttgctcgtcttcgacggtgatactctctgcttctgccgtgaaatcctccggaagtgagagaaagtctccgtttttagggttctctttaacggctatctcgaagccgtcggtacgagtcggcatttatgcgaattcgaaaagaggattgcaagtgaagtgtgaagctgagccgacgacgacgacttctcttgttccggcgaatcaacgatggatgttcgacgaagaagaagctaatggccctgacatctggaacacgacatggtatccaaaagcttcagaccatgtgaacacggacaagccctggtttgtggttgatgcaactgacaaaattcttggtagattggcatcgacaattgctaatcaca

SEQ ID NO: 161226 - DNA, 451 bp, Arabidopsis thaliana columbia
cgacccaagcggaccaacttgccaaggatttgggggtttgacatttaatttgtgcattacaaagcttgtttatatgctggagtgaacattagtggtactaatggtgaagttatgcctggacagtgggagttccaagttggcccgagcgtaggaattgatgcaggtgatcatgtttggtgtgctagataccttcttgagagaatcacagaacaagctggtgttgtcctaacacttgatcccaaaccgatagagggtgactggaacggtgctggttgccacaccaattacagtaccaagagcatgagagaggaaggaggatttgaagtgatcaagaaggctatcttgaacctctcgcttcgccacaaggagcacatcagtgcctacggtgaaagaaacgagagaaggttgaccggaaagcacgagacagctagtattgaccagttcttatggg

SEQ ID NO: 161227 - DNA, 467 bp, Arabidopsis thaliana columbia
  unsure (1)..(467): unsure at all n locations
cgggtcgacccacggcgnccggcctggaagcacaggagaacgtttttttgctgtttttattaccagtattcgatactgggtcgagggtagcattactatacctggcgtattcattgcgggctggttattcgtcagcaccggtttagcttacgatgtgttcgggagccctcgtccaaacgagtattttacagagagccgacaaggcattccattaataacaggccgttttgattctttggaacaactcgatgaatttagtagatctttttaggaggacccaatgactatagataggacctatccaatttttacagtgcgctggttggctgttcatggactagctgtacctaccgttttttttttggggtcaatatcagcaatgcagttcatccaacgataaacctaattcaattatagagctatgacacaatcaaatccgaacgaacaaagtgttgaattaaatcgta

SEQ ID NO: 161228 - DNA, 419 bp, Arabidopsis thaliana columbia
  unsure (1)..(419): unsure at all n locations
acagattttcgttaaaactctaactgggaagaccataacccttgaggtggaatgatgcgacaccatcgacaatgtgaaggcgaagatccaagacaaggaaggaatcccaccggaccagcagcgattgattttcgccgggaaacagcttgaagacggccgtaccctcgccgactacaacatgcagaaggaatcgacgcttcatctcgtcctccgtctccgtggtggtgctaagaagaggaagaagaagacttacaccaagccgaagaagatcaagcacaagcataagaaggttaagctcgctgttcttcagttttacaaaatcgatggatctggaaaggttcagcgtttgaggaaggagtgccctaacgcaacctgtggagctgggactntcatggcgagtcattttgatcgccattact

SEQ ID NO: 161229 - DNA, 365 bp, Arabidopsis thaliana columbia
ctcagaaagatcaatctagagagacctaaatgtgatcggaagagatggcttctacctgcgcgatgtcattggtcacaccacttaaccagacccgttcgtctcctttccttaagccattacctctgaaaccatccaaggctttggttgcaactggaggcagagcacagaggcttcaagttaaggccctcaagatggacaaggctttgaccggtatctccgcggctgctcttactgcttcgatggtgattccggagatagctgaagctgctggttctggaatctctccttccctcaagaatttcttgctcagcattgcttctggtggcctcgtactcactgtcatcattggtgtcgtcgtcggcgtc

SEQ ID NO: 161230 - DNA, 458 bp, Arabidopsis thaliana columbia
gaactaactaacgacgcctgagatggccgcctctttaaccgccgctgctgcttcttcaatgatgggtacccgggtggtttccgacattagctccaattcaagccggttcacagcccggttcggattcggaaccaagaaagcatctcccaaaaaggctaagacggttatctcagaccggcctctatggttcccaggcgcaaaatcacccgaatatctcgacggttcacttgtcggggactacgggttcgatccttttggtttaggcaaaccggcggagtatctccaattcgatttggattccttggaccagaacttagccaagaacttatacggagaagtgatcgggactcgtaccgaggcggtggaccccaaatcgacgccgtttcagccatatagtgaagtcttcgggctacaaagattcagagaatgtgagctgattcacggtcggtgggcaatgc

SEQ ID NO: 161231 - DNA, 420 bp, Arabidopsis thaliana columbia
gcgacgtattactggaaaaatgtaaccctcttttttcggcgcttctcccctctcagccggacctttgcccttgcgggaccaaacccacttacattcattgtctctctcaaaacccaccaccttctccggtcctaaacacctctgcacccggttcactaaaccggaatcaagaaactggttaatagatgcaaagcaaggactagctgctttagctttatctctaactctcactttctcacctgttggcactgcttagcctctgagttcaatatcctcaacgatggtccacctaaagaaacttacgtagtcgatgacgctggtgttcttagtcgagtgacgaagtcagatcttaagaagcttttgtctgatcttgaatacagaaagaaactgagactcaatttcatcactgtccgaaagctc

SEQ ID NO: 161232 - DNA, 457 bp, Arabidopsis thaliana columbia
cgcgaacgaatcctttactcactctctctctctctctaataacagagctcaacaataatgatccactaagagagattctcttttctcttcttctccggtgatttacttacttaacaatcatggcgtcgtcggagggattagcaagcgttgatccttggtcattccgtcaaaacttcaacatcgattcgtggctactctctgattccttctcacacgacagtgatatactcgctaaagctcttcacagatccatctccacttccaccgaatcatctcctctttctccttcatctttcttcgactcttcaaccgccgccgtcgatttttctcctcctcaaactctctccaacgtctctttcggctcagatccagaaatccccgccgctagtgctcttggtctcgggaaacgaaaacgtggtcctggtgtttccggtggtaaacaaacgaaacgccgatc

SEQ ID NO: 161233 - DNA, 449 bp, Arabidopsis thaliana columbia
  unsure (1)..(449): unsure at all n locations
aaanccaaaaccgaccaatggataccaactatctagcaaccacctccctccgccgccggggtggcttcttcaccacctggggccaccatctacgccgcaggaggaggagcttcttaccaccaccttctccaacaacaacaacaacagctccaactattctggacctaccaacgccaagagatcgaacaagttaacgatttcaaaaaccatcagcttccactagctaggataaaaaagatcatgaaagccgatgaagatgttcgtatgatctccgcagaagcaccgattctcttcgcgaaagcttgtgagcttttcattctcgagctcacgatcagatcttggcttcacgctgaggagaataaacgtcgtacgcttcagaaaaacgatatcgctgctgcgattactaggactgatatcttcgatttccttgttgatattgttcctagaga

SEQ ID NO: 161234 - DNA, 456 bp, Arabidopsis thaliana columbia
  unsure (1)..(456): unsure at all n locations
cgaccacgcgccgcttcttaagaaaaaccagctcctgctaagttcaaggctgtctctgagactagcgatgagctcgccaagtggtatggtcctgacaggagaattttcttgcctgatggtcttttggatagatcagagatcccagagtacttaaacggtgaagttgctggagattatggttatgacccatttggtcttggaaagaagcctgagaactttgctaaataccaagcttttgaattgatccatgcgagatgggctatgttaggagcagctggtttcatcattcctgaagctttaaacaaatatggcgctaactgtggccctgaagctgtctggtttaagactggtgctntgcttcttgatggaaacacattgaactactttggcaagaacatccctatcaaccttgttctcgccgtagttgctgaggttgttcttctcggtggagcccag

SEQ ID NO: 161235 - DNA, 457 bp, Arabidopsis thaliana columbia
  unsure (1)..(457): unsure at all n locations
ccgggcgcgagcccacgcgtcacggcacaattacccgcactttggttcttcttggtttctttatccgatgcgaaacaacggnnnattgggtgccgtgggcttatacttatgcgcgggtgacattaaagacaagtgagcattttccttctgagtactcgcgtacgattgcctacggaaatatttcatacacaatctacagtcacagcttcctcgattatgggaaggatgcagcactaaaaaagttattggaaaaacttcaaaactcagctaactctacaatggatggagtagttgaagacccttgtacttctaaagggtacatttacgacacaaattcaaagaattattcatcccgattcttagctgatgaaaacaaacttaaaagcttcctttaagcttcttgttattttttaaaaatgcccattcgcttccttttcccttttgaaaaaaaggaaaa

SEQ ID NO: 161236 - DNA, 163 bp, Arabidopsis thaliana columbia
  unsure (1)..(163): unsure at all n locations
caaagtcggtgcgcatgaaaaacattactattattgttgttcgtgatcgtgatgtgtctcgtgaggtgagttccactagagcgttatgtctngncgaattngagaagtcattgttttgccattaatctgtactgtcttattttgtttggaccccagtgattct

SEQ ID NO: 161237 - DNA, 449 bp, Arabidopsis thaliana columbia
  unsure (1)..(449): unsure at all n locations
gcgaacgaagatctcgctcaccgttcttatttccttaattctccgaccgncgaagaagcgaatggctgcagattagggtttctactgcgggaagatacaaaaaatcataagcattcacatcggacaagctgggatccaggtcggaaattcgtgttgggagctttactgtctcgaacatggaatccagccggacggaatgatgccgagtgatactacagttggtgttgcacacgatgcgttcaatactttctttagcgagactggtgctgggaagcatgtccctagggctgtcttcgttgatctcgagcctaccgttatcgacgaagttcgtactggtacttaccgtcaacttttccatccagagcagctcatttctgggaaagaagatgctgctaacaacttcgctagaggacattacactgttgggaaggaaattgtggatctatgtc

SEQ ID NO: 161238 - DNA, 435 bp, Arabidopsis thaliana columbia
  unsure (1)..(435): unsure at all n locations
gcgaccggngcttgcacgtgaccatacttgttttatgttggaagaggttcagacttccagcccgtcggttttcaagacagggggggaggcttagctaatcatggtttctattttgcaacttgggcaatctcctgtttctccacaccctattgataatgattcgtatgagcggattatgttgtgcataaaattgctttgccataggaatgttgagatgaaaaagatatggttggaatcctgccgccagagttttgtcaagatgatttctgaaaaacagcttatagagatggaggaactgaaggcgaagacccaaacaactcatgctcaaccggatgatctaattgacttcttccatctaaagagtcggaagggaatgagtcaacttgggttggaagaccaggtacaagatgacctaaagcgtgccactggagaatt

SEQ ID NO: 161239 - DNA, 470 bp, Arabidopsis thaliana columbia
cgggccgacccacgcggaccaaccttaccggaaatagtgtttcattggttgttacttgttcagaaaatttgacacatctagggtggggtgctgcaacatcagcgagttcccgatgtttattaaggacttacaaagattatggtggttagacatttccaataatagaattaaaggaaaagtgcctgagttgttatggactctgccttctatgctccatgtaaatctctcacgcaactcctttgattccttggaaggtacgccaaaaataatcctcaattcgtcgatttcggagttagatttgagttcaaatgccttcaaaggatcttttcctattattccaccttatgtcaacatcatggctgcatcaaataactatttcactggaggcataccacttatattctgcaaaagatatcgactcagtctccttgatctatcaaacaacaacttcagtgggacaattccgagat

SEQ ID NO: 161240 - DNA, 429 bp, Arabidopsis thaliana columbia
  unsure (1)..(429): unsure at all n locations
cctccaattaaggaactntctctttacatcaaatggcctaagtcaatcctgctgcgaaggcagaagcgtatgctgaagcagaggttgaaggttcctccagctcttaaccagttcaccaagacccttgataagaatctcgccaccagcctcttcaagattcttctgaagtataggccagaggacaaagccgcaaagaaggaacgccttttgaacaaggctcaagctgaggcagaaggaaagcctgctgaatccaagaagcccattgttgttaagtatggtctcaaccatgtgacttacctcatcgagcagaacaaggcacagcttgtggtcattgcacacgatgttgaccctatcgagttggtggtctggttacctgcactctgcaggaaaatggaagtcccttactgcattgttaagggaaaatctcgt

SEQ ID NO: 161241 - DNA, 339 bp, Arabidopsis thaliana columbia
cagtcacgttgatcgtaaattcatcgagcgtttgctcagagtatcttcttgcaaagttactgttgttgatagtgcaacaagagctctccaataccttggtttggatgttgaggaaaaatcagtcggttttgaggatttgaaggttaatttaattatgactgattactcaatgcccggtatgactggatatgaactcttgaagaagatcaaagaatacgtagcttttagagaagtaccggtggtaattatgtcctccgagaacattttgcctcgtattgatagatgtctcgaaaaaggggctgaagatttcttactgaagccggtaaaacttctggatgt

SEQ ID NO: 161242 - DNA, 237 bp, Arabidopsis thaliana columbia
gaaaaggtaagaaaagccatttttgctaagttttggctggctctgagactagcgatgatctgtctgtttttttatagacctggcgggacacaaaaaacagcctgatggtcttttggatagatcagagatcccagagtacttaaacggtgaagttgctggagattatggttatgacccatttggtcttggaaagaagcccgagaactttgtttaattctaagctttttggattgattc

SEQ ID NO: 161243 - DNA, 445 bp, Arabidopsis thaliana columbia
  unsure (1)..(445): unsure at all n locations
aaaaccgggcggggcgggcgaacgatacataaacattttaatacaaattgtttacccagaaccactagttgngagcccgcccggttttaaaaaaagggggggccacaacaanggcgtagnactccccgccaaacacgnggncatctatttaaatatttttttttcattcccaaatnggcaagctccctcctctccagtaaccgcttctctctcctctccgtcactcgagcttcctccgacagtggatcaacctctcccaccgccgtcgtctccgtggaggctcctgagcccggggaagggatagttaaagagcctgccgcgtggacggcgggggttaaaaaggaagaaaccggcaccgcttaaaatggtcgctccgatggtggaggagtgaaaaacaccgggagtggtgcaaattccatgttgcggattgtcaaatggaacctgg

SEQ ID NO: 161244 - DNA, 437 bp, Arabidopsis thaliana columbia
  unsure (1)..(437): unsure at all n locations
gcgaacggacgtatcaaatccaatacctaagctcttctttttacgagccacttaagctaanncgccgcatggatacacaaattgggggggaataaaaatggctttagctgntactnctncttcaactgcaanctctggatcgagtttttttttttttttagcttctncngaatcnaaagctctncaaatatgttcgattaggttatctgatcgaacccatttgtctcagagacgttactctatgaaacctttaaacgctgagtcacattcacgaagcgaatcttgggttactcgtgcttcaactctaattgctcctgaagttgaagagaaaggaggagaagttgaagactttgagcaacttgctaaaaagcttgaagatgcttctccacttgaaatcatggataaagctcttgagagattcggagaccaaatcgcaa

SEQ ID NO: 161245 - DNA, 436 bp, Arabidopsis thaliana columbia
  unsure (1)..(436): unsure at all n locations
cttaatataaagttagaaattcattaaaaacaaaatagcnagaaaaaatcggcgggatacataagaaacatggggggaatgaggccattgagcattaaaccaacatcgctagatgtagctagacatgccacatcagtagaatcatttgggaatcaccgaccgccgatatcgccgtggcactcaccggtgccgtacctattcggtggtcttgcggcgatgttaggcctcatagccttcgctttacttatcctagcctgctcttactggcgcttgtcaacctccggtgatgactccggcgaaagagtcgacgaggaaaaagagagtcggtctggagtgaaagcggctagcgcggcgtgcgaagagaaagttcttgtcataatggctggagatgacttgccgagggttcttgccacgccggccgcgaacaaatgcatgt

SEQ ID NO: 161246 - DNA, 428 bp, Arabidopsis thaliana columbia
  unsure (1)..(428): unsure at all n locations
gcgtacgggttgatgttcttttttattcaactgtttttgtttggaatacggttgagagagaaggggtgtcgatttctaacccgggggggggatctagaacggntcaggaaatccggaagaaggagagctnaggccacagcttcttgatcggtttggtatgcatgcacaagtagggacggntagagatgctgatttacgggtcaagatagtggaagagagagctcgtttcgatagtaacccaaaggatttccgtgacacttacaaaaccgagcaggacaagcttcaagaccagatttcaactgctagggcaaacctttcctcggttcaaattgatagggaattgaaggtgaagatctctagagtttgttcagagctcaatgttgatgggttgagaggagacattgtgactaacagagcaacaaaagcac

SEQ ID NO: 161247 - DNA, 451 bp, Arabidopsis thaliana columbia
  unsure (1)..(451): unsure at all n locations
gtccggggggtttagcttcagttttcattggcggtttatgtctcagagtgctctgatcaaggttttggaggttgcatttgagtgaggagatgttttcggctcancataagattcataaggagaagggtgtggaactttctgaattggatgagcaagttgctcaagctttctttgatttggagaacaccaatcaagaattgaaaagtgagctgaaggatttatacgtcaactcggctgttcaagttgatatctctggaggacgcaaggcaattgttgtcaatgttccttacagactgagaaaagcttaccggaaaatccatgttaggcttgttcgtgaacttgagaagaagttcagtggaaaggatgtgatcctcattgctacaaggaggattgtgaggccgccaaagaaaggttcagcggcaaaaagaccacgcaaccgtactctgacctc

SEQ ID NO: 161248 - DNA, 364 bp, Arabidopsis thaliana columbia
  unsure (1)..(364): unsure at all n locations
gggcaaaaacatacttattgcctttgtttgtgccatccttagagaacctaggagcgtgattcttgatgaagccgcgtgtgcactcgatgcanagagcgaacacaatgtgaagggcgtactacgttctatcggaaacgactcagcaacaaagagaagctttattttgtttgttcacagactagcaacaattcaagctgcggatagaatattggctatggacagtggacgagtcgatgagattggcagacacaaagaacttgtgagcaaagatggcttatacgcgagatagactaagagacaaaacgatgccatgttatgattgaacctacacaagctaaactagtgcatgaaatagtgatgatta

SEQ ID NO: 161249 - DNA, 381 bp, Arabidopsis thaliana columbia
gcgaccgagagaagcgtttgtggagatgtgtaatgatgtttttgttcagaagatgacattcgatagctgtgtgtacaagcgggttgcgccgggtagtcctttggaggatatcaagttggctgtgaacaccattggaagtttggttagggctaatgctctaaggagagagattgagaagcttagtgtttaagaaacaaataatgaggtctatctcctttcttcatctctatctctctttttttgtctgttagtaatctatctacactaatgttgttactcttcaatgtattcagtatcatatttatgttttctgttcattgaattagtcaaaaagcatttggctttacccaaaaaaaaaaaaaaaaaaaaaaaataattaat

SEQ ID NO: 161250 - DNA, 450 bp, Arabidopsis thaliana columbia
  unsure (1)..(450): unsure at all n locations
gcgaacggggaatgatgcaaacttgtttaaccctttttttttctgcacacgaggcattaggagcacgcatagttttaaaagcacggggcgctcacaaaacaatcattgtggttgctgctgatgatggaattcgnccccaaacaaangaagcaanagcttattttttttttttttttttccaatcgnnanagcnataaataagataaagaaggagctagtccagatagagtgatgcaagagctttcttcaattggtttgatgcctgaagattggggtggtgatgttccaatggttcagatcagtgctttgaaaggggaaaatgtcgatgatctgatggaaactgtcatgcttgttgcagagcttcaagagttgaaagcaaatccacacagaaatgccaagggcattgtaatcgaggctggacttgataaaacaaaaggaccatttgcgacg

SEQ ID NO: 161251 - DNA, 451 bp, Arabidopsis thaliana columbia
  unsure (1)..(451): unsure at all n locations
cgaacgcaaatacacaactngttactttaaatttttttttttcaacgaagagagagagaaaggcncgccgtgattaacatgaagggggcggcaaaaactagnccaagctcaatggggaagagagagaccaaaccatggctctaatcaatgaagcttgtgagaattgttttttttttgtgatagtgaaccatggattaccacatgacttaatggacaagatcgagaagatgacaaaggaccattacaagacatgccaagaacaaaagttcaatgacatgctcaagtccaaaggtttggataatcttgagacagaagtcgaagatgtcgattgggaaagcactttctacgttcgtcacctccctcaatccaatctcaatgacatttcagatgtgtctgatgaatacaggacggccatgaaagactttggtaagagactggagaatcttgctga

SEQ ID NO: 161252 - DNA, 400 bp, Arabidopsis thaliana columbia
gaaaaaatgggccgtgtactataagaaacatgggggggatgaggccattgagcattaaaccaacatcgttagatgtagctagacatgccacatcagtagaatcatttgggaatcaccgaccgccgatatcgccgtggcactcaccggtgccgtacctattcggtggtcttgcggcgatgttaggcctcatagccttcgctttacttatcctagcctgctcttactggcgcttgtcaacctccggtgatgactccggcgaaagagtcgacgaggaaaaagagagtcggtctggagtgaaggcggctagcgcggtgtgcgaggagaatgttcttgtcataatggctggagatgactttgcctggtttctggccacgccggcggcgaacaaaagcatgtgcgg

SEQ ID NO: 161253 - DNA, 462 bp, Arabidopsis thaliana columbia
  unsure (1)..(462): unsure at all n locations
cacgcgtccgacggacctgaaaaggttcctgtgaaagctggtggttcaacgtggaagttcacaacatcagaaagtgcgatgtggtgcctcaagagtgtgtatcgcacattaaggattacatgacgtcatcgcagtacaaggatgacgtggcgagaaccgttgatgaggtcattcttcatttcgggagcatgtgctgtagcaagtctaagtgtgacggcatggacgcttggatctttgatatcgatgacacgcttctctctaccatcccttaccacaagaaaaatggcttcttcggaggagagaaattgaactcaacgaaattcgaggattggatacagaagaagaaagcaccagcagtgccacacatgaagaaattgtaccacgacatcagagaaagaggcattaagatcttcttgatctcttcccggaaagaatatctcangtctgccaccgtcgacaacc

SEQ ID NO: 161254 - DNA, 440 bp, Arabidopsis thaliana columbia
  unsure (1)..(440): unsure at all n locations
gnggactagaaagtattccacagaaggtgggtcttgctcggagccctaggctgcgtcttccctgagcttttggctagaaacggagtcaagttcggagaggcggtttggttcaaggccggttcacagatcttcagcgatggagggctcgattacttgggaaaccctagcttggttcacgctcagagcattttggccatttgggccacacaagttattttgatgggagccgttgaaggctacagagtcgcaggaaatgggccattgggagaggccgaggacttgctttaccccggtggcagcttcgacccattgggtttggctaccgacccagaggcattcgctgagttgaaggtgaaggagctcaagaacggaagattggctatgttctctatgtttggattcttcgttcaagccatcgtcactggtaagggaccgataga

SEQ ID NO: 161255 - DNA, 393 bp, Arabidopsis thaliana columbia
  unsure (1)..(393): unsure at all n locations
gnccgggtggaccaccaatctgaagttccctccctttgtttcttatgacaagctttcccatgtctacaccgccatcttgaaacccgacaacgaggttagaattttggttgatggagaggagaagaaaaaggccaatttactctctggtgaagactttgagcctgcattgatccctgccaagaccatccctgaccctgaagacaagaaaccagaggattgggacgaaagagccaagattcctgatccaaatgccgtgaagcctgaggactgggatgaggatgcacctatggagattgaagatgaggaagctgagaaacccgaaggatggttagatgatgagcctgaggaggtcgacgaccccgaagcgaccaagcctgaagattgggatgatga

SEQ ID NO: 161256 - DNA, 440 bp, Arabidopsis thaliana columbia
  unsure (1)..(440): unsure at all n locations
cgcgnccgagaaatttcaactaaaaatggccttgaagatttttttcattgaaggattgatcctctcccgtgctctacttatcttcggccatgggtgttatggccagcttcgactcggattctacagtcaaaattgccaaaacgtcgaaaacatcgtatctaaagttgttggagaggcattcatcaaggattcatcgattgcacccgcaatgatccgcctttattttcacgattgttttagcaacgggtgtgatgcatcgcttcttctagatggttcgaacagtgagaaaaaggcgtcaccaaatctaagtgtacgcggatacgaagtgatagatgacattaagtctgcggtcgaaaaagaatgtgacagggtcgtttcttgtgctgatatcatagctctcgcgactagagatcttgttactcttgccagcggaggggaaa

SEQ ID NO: 161257 - DNA, 460 bp, Arabidopsis thaliana columbia
  unsure (1)..(460): unsure at all n locations
cgggccgacccacgcgnncgaaanctctcactcagactattacagagtcagtttctatggcgaaatctccagaaacagagcgtccgaacaaagtctttggttggggtgctagagacaaatccggtgttctctctccttttcacttctctagaagagacaatggtgaaaatgatgtgacagtgaagatcttgttctgtggagtttgccacactgatttacacaccatcaaaaacgactggggatactcgtattacccagtagttccagggcatgaaatcgttgggatcgctacaaaagttggtaagaacgtgactaaattcaaagaaggagatcgtgtcggagtaagagtgatcagtggctcgtgccaatcttgcgaatcttgtgaccaagattcttgaaactacctgcctcaaatgtctttcacatacaatgcgattggatccgatggaaccaaaaatta

SEQ ID NO: 161258 - DNA, 446 bp, Arabidopsis thaliana columbia
caatctataactcaaactatgacagagtttgtatacaatggcgaaatctccagaaacagagcgtcctaacaaagtctatggttggggtgctagaaacaaatccggacgtacatctctccttttcacttatctagaagagacaagggtgaaaatgatgagacagggaatatcttgttatgtttacgctgccgcactgaaatacacaccatcaaaaacgcctggagatactcgaattacccagcaaatgcaggacatgaaaggcgagaagaacatgcaaaacgtcggagaaacgtgactaaaaggaacgatggatatcgagtatgagtacgacggatatgcaggtcagtcgcaaaacagcgaatgttgagaccaaaatcttggaaactactgtccttacatgtgtttgacatacaatgcgattggattccatggaaccaagaattact

SEQ ID NO: 161259 - DNA, 446 bp, Arabidopsis thaliana columbia
acggtaaagaagaacaatgtcttcctctatgtttttttccgctactatggttgcctctccgggggggccactatggtcggtcctggcaacggacttaagtcctccgctgccttcccagccacccgcaaggctaacaacgacattacttccatcacaagcaacgtttttagagttaactgcatgcaggtgtggcctccgattggaaagaagaagtttgagactctctcttaccttcctgaccttaccgattccgaattggctaaggaagttgactaccttatccgcaacaagtggattccttgtgttgaattcgagttggagcacggatttgtgtaccgtgagcacggtaactcacccggatactatgatggacggtactggacaatgtggaagcttcccttgttcggttgcaccgactccgctcaagtgttgaaggaagtggaaga

SEQ ID NO: 161260 - DNA, 459 bp, Arabidopsis thaliana columbia
acgcggacggcaaggacttccaatgcctgttttccgtggtgtttttaaggctgccctggaaggaagtttacgaggggaacggctcaaaccgtttgaacatctcaagagtctcggttgggtctcagagaaccggacttgtgatcagggctcagcagaacgtgtcagtaccagaaagtagtcttcggtcagggattggactcgtggcggctggtttagccggtggttcattcgttaaagctgttttcgccgaagctattccgatcaaagttggtggtcctccacttccttccggtggcctacctggaacagataactcagaccaagcaagagacttttcattggcattgaaagatagattttacatacaaccattgtcaccaacagaagctgcagctagagccaaagattctgctaaagagatcatcaacgttaagtcatttatcgacaaaaaagcttggc

SEQ ID NO: 161261 - DNA, 358 bp, Arabidopsis thaliana columbia
  unsure (1)..(358): unsure at all n locations
aaacaacaagatattttaacgtttttaaacacccacaaccaacaaaaagggacggccttttttaaaaccaccacggccaaaccaancaccggctngaagtcatccgctgcattcccggncacccgcaagaccaacaaggacatcacttccatcgcaagcaacgggggaagagctagctgcatgaaggcgtggccaccaannggaaagaagaagtttgagactctatcttacctccccgaccttagagacgnccaatnggctaaagaagntgactaccttctccgcaacaagtggattccttgtgttgaattcgagttagagcacggatttgtgtaccgtgagcacggaaacactcccg

SEQ ID NO: 161262 - DNA, 215 bp, Arabidopsis thaliana columbia
  unsure (1)..(215): unsure at all n locations
aaaaaaaaactctgatcttgctcaggacagagaggagtgtacgaaccagctcatagaactatccacgtgtattccgtacgttggaggagacgccaaggctccaacaaaagattgttgtgcagggtttggccaagntataagaaagagtgagaagngnggangcatattgagcagagacaaaaaagatcctcaacttggtatcaagaataacgcaa

SEQ ID NO: 161263 - DNA, 439 bp, Arabidopsis thaliana columbia
  unsure (1)..(439): unsure at all n locations
ttggttattaaaaaccaatggcttcttagttttttacactcttctttcgctggccaagcgacggtaatgtcatccaacgaggtgctccgcaaaatcggagcctccaatggcggtggccgcatcatcatgcgtcgtaccgncaagtctactcctcagagcatntggttctgttcttaccgtcccaaatacctaggaccattttccgaaaacacaccatcatacctaaccggagaataccctggagactacggttgggacaccgctggtctctcagccgatccagaaacattcgcaaagaatcgtgagctcgaagtgatccacagtagatgggcaatgttgggagctttaggctgcaccttccctgaaattctctcaaaaaacggagtcaaattcggtgaagccgtgtggttcaaggcaggatctcaaatcttctcagaag

SEQ ID NO: 161264 - DNA, 454 bp, Arabidopsis thaliana columbia
ggccgacccacgcggacaaaaggacctgcttctgaattaatcctcatcctgttttggctaccactttcgactgctctcgcgcggatcctttctttgcttttccggtcaaagcaactactccttcgacggctaaccatacgcttctcggaagtcgaagaggttgtcttagaatcaaagcgatttccactaaatgggaaccgacaaaggttgttcctcaggcagacagagttcttgttcgtcttgaagatcttcctattaaatcctcaggtggagtattgttgcctaaagcagctgtgaagtttgagagatacctaacaggagagattatatctgttggttctgaggttggacaacaagttggacctggaaagagggttttgttctctgatgtgagcgcttatgaggtcgatttgggaaccgatgctaggcattgcttctgtaaagagagtgactt

SEQ ID NO: 161265 - DNA, 454 bp, Arabidopsis thaliana columbia
  unsure (1)..(454): unsure at all n locations
acccacgcgaccggaccgccagagacagctagtttcagatcataatatgtcggcgacgcttacaggatcgccagctgctttggggttttcgtggggctcgaaaaacacgaaaagagtttcttcttcaccagcttctaaccgatgctgcatcaagangncngnnnccgncgacgtgtttttttttttttcagcccncagaaatctgaggaagctttcaatgctgctaagaatctaatgcctggaggtgtgaattcccctgttcgagcattcaaatccgntggtggacaacctgttttgattgattctgttaaaggctcaaaaatgtgggacattgatggaaatgagtatattgactacgttggctcttggggacctgctattattggccatgctgatgacgagggtcttgcggctctagctgagacgatgaaaaaaggaacaagctttggtgctc

SEQ ID NO: 161266 - DNA, 446 bp, Arabidopsis thaliana columbia
  unsure (1)..(446): unsure at all n locations
cggaagttcaacaacactaagttaacaagtttttttttaagccacagagacaatggcatgaagcttcactttctaaagcagggtggttaccccaacaacattccttggccagactaaagcctcaagctttaacccccttcgtgatgttgtctctctcggatctcccaagtttttttttttaaatgatctncggnatggacctgacagagtgaagtacttaggaccctttttcgttcaaactccggcttacctcaccggagaatnccctggcgattatggttgggacaccgccggtttatccgcagaccctgaagcctttgccaaaaacagagctcttgaggtgatccatgggagatgggcaatgttgggagcttttggttgcataacccctgaagttcttcaaaagtgggtccgtgtggacttcaaagaaccagtctggttcaaag

SEQ ID NO: 161267 - DNA, 380 bp, Arabidopsis thaliana columbia
  unsure (1)..(380): unsure at all n locations
aatatccgggcggacccacgcgtacgcgccgcttccttcttaacatcatcgcctgatttcgctctcctctagctcgcgattgccagacatggttctacctaaccagcggaccgtaaattatcccagcttcaagcttgtcattgttggtgatggaggcacagggaagactacttttgttaagagacatcttactggggagtttgagaagaagnatgaacctactattggtgtggaggttcatccattagatnnctncacaaactggggcaagatccgtttttactgctgggacactgctggacaagagaaatttggtggccttagggatggatactacatccatggtcaatgtgctataataatgtttggacgtacagcac

SEQ ID NO: 161268 - DNA, 449 bp, Arabidopsis thaliana columbia
aaaccaacaacaaaaagttatagaaccatcttatcatcataatcataatcatgataccacaggctggaacctctccattgcacgcatcatcatcatatcaacattacaacaactttgatcgtataaaagagattatggcgagcgagcaaattatgaagatagcgatgaaggagaaagcttacgctgaggaagctaaaagagaagccaagaggcaacgagagatagcggaaaacgagtttgcaaatgccaaaaagattaggcaaaaagcacaagctgaactcgagagagctaagtttttaaaggaacaatctatgaagaagataagttcaacgatcatgcaggtcacttgtcaaacatgtaaaggacagtttcaagcagttgcggttccggcggctacggctgatgagacgtctcttgtcgtgagttacatgtcgtcagcgaatactgac

SEQ ID NO: 161269 - DNA, 356 bp, Arabidopsis thaliana columbia
gagaacgcgtggaaagaagattaatctacaattttttatcaatcaaagagaagtaagagaagtgcgcgattctaactgtggatgtggctcctcctgcaaatgtggtgactcttgcagttgcgagaagaactacaacaaggagtgcgacaactgtagctgtggatcaaactgcagctgtgggtcaaactgtaactgttgatgaaattattatggtctaaaatcatatatatggcagaaaaattggggaaaatatgtgttttatgctaagagatgtgtgtgtgttgctggaataaagacgcgaccgctgtgttgcgtatcaactctcttaagctctgacttttcccaactctgacatt

SEQ ID NO: 161270 - DNA, 414 bp, Arabidopsis thaliana columbia
  unsure (1)..(414): unsure at all n locations
ggaaagaacaaacnagagagtccaaaaacagttctttttacatcgctnctacctccgcgatgggagtggttataccacttaaccagaccccaacaaaactttccttaagccattacctctgaaaccatccaaggctttggttgcaacttcaggcagagcacagaagcttcaagttaaggccctcaagatggacaaggctttgaccggtatctccgcggcttctcttactgcttcgatggngaatccggagatagctgaaactgctggttcttgaatctcttcttccctcaaaaatttctttctcagcatttcttcttgtggcctcatcctcactgtcatcattggtgtccatctctgcgtcttcaactttgaccctgtcaagaaaacctaaaacctatatatctttcttacatc

SEQ ID NO: 161271 - DNA, 363 bp, Arabidopsis thaliana columbia
  unsure (1)..(363): unsure at all n locations
taaagaagagcgtntttataaacttcctttttcttctaccctacaaatataacttcgtcatctttatatattccgcgcgacgacacaaaaagagtgcatttcgatccacattggtcaggctggtattcaagtcggaaatgcttgctgggagctttactgtcttgaacatggcattcagcctgatggccagatgcctggtgacaagactgtttgttgaggtgatgatgctttcaacaccttcttcagtgaaaccggtgcatgtaagcacgtcccacgtgctgtctttgttgatcttgagccaactgtgatcgacgaggtcaggactggtacttaccgtcagctttttcaccctgaacaacttat

SEQ ID NO: 161272 - DNA, 352 bp, Arabidopsis thaliana columbia
  unsure (1)..(352): unsure at all n locations
cgcggacggacaacaagtactacgnngatctcatgaacctcttgtgctattcacttctgaccagnatctcgtcctgtatatagaagacacgtggcgttcaaaaaagctttgcgatcgaccagcagctgttttttgattattttactgtggcgatgatcaagatgggtcagatgagtgtcttaactggaacacaaggagagaancgntccaattgttcagccagaaacacccaaagnntcangnccgntttggtagttttctttttttacgctatttccangancnaaanaaccaaaaatctcgacctttcctttgtcaactttgtnntttattagatcatgcacttttggtt

SEQ ID NO: 161273 - DNA, 423 bp, Arabidopsis thaliana columbia
  unsure (1)..(423): unsure at all n locations
cgaaaaaaaaaaaaaagaggcttttccaaaaatttttatggttcgatttcgctccttggtaatgacgatgttcttagaagaagaggagaactccaccaaactcaagatcggagatgagtttttgaaggcaaagtgcttaatgaactgtgaagtctctttgattcttgagcacaagtttgaacagcttcagcaaatctcagaggatcctatgaatcaagtttctcaagtgtttgagaagtccttgcaatatgtgaagcgattcattcttttcatgaatccagatgctgntagacaagttcgagaaatactaagcagacatcaactcactgagtttgagctatgtgttcttggcaatctctgtcctgaaactgttgaagaagcagtggcaatggttccttctcttaagacaaaaagaagagctca

SEQ ID NO: 161274 - DNA, 382 bp, Arabidopsis thaliana columbia
ggtaaccgggcaaaggaggaggggaaccaccaggaggtggtaagggtttcctttatgctttcctccgccgttggggttacatccccggttaaggcaaccatggtggttcaattaaccggttggaagtaatccgttgaattccgggtaacccgcaggaccaacagggccataatttccatcgaaggcaacgggggaggagttagctgcatgaaggggtggccaccaatgggaaagaaaaagttggggactttatttaacctccctgaccttagggacgtcaaatgggttaaggaagttgactaccttttccgaaccagggggattcctggggtggaattcaagttagagcacggatttgggtaccgggggcacggaaccactc

SEQ ID NO: 161275 - DNA, 403 bp, Arabidopsis thaliana columbia
accactggttccaaactgttccaatacttttccacgttgttaaaagaagcaaccgttccgggggttcttgtggtccccccattttggatggaattcccgcaggaggaacctccttttagcaccgatgaacccttaatggccggagggggtttactggttaagggggttaccaccaggggaccaccccaggcttccgggtttttgcctggcaaagaataatggattgacttgggaaacggtaggacttacgttggaggcaggactaacaagatggatgctccaaaggggagatttcttgcgtttaaaagggcaggacccatcatcccagggagggcccggtttaggcaaagttcttttaaaatggccaaggatccttaatccttggggggaggctttgaccagt

SEQ ID NO: 161276 - DNA, 332 bp, Arabidopsis thaliana columbia
ttggtcctccgatttttttccgttccgggaccagaatcgattcctaataaccatgggtttttttttttttttttggggggaggttcgccgcttaaccggaataataaggttggggaatccgcttttttttttttccggtttggtggccctcgattaataaacctagggtttttggattccaaaaggccgccgtttgtgaagttcaggaaactcctcccgtttttaaaggggccaaggactcgccatgggactttttagttctaaaagcaactgggcctgtagtggccgacttttgggcaccatgggggggaccttgcaggatgattgatccg

SEQ ID NO: 161277 - DNA, 378 bp, Arabidopsis thaliana columbia
gggggaaggaaaaaggcgaagattccccagattccatccaatttagggttggggctgcccttaattgggaacccttggcctggtttttgaccggttttccggatccgccttgagggaaggaagacgccgccccattaccaaaaccatgggcccgaattcgtttccaccggttgcaaccttggatctagatgagcggatttggcagttaatgcagggcaggcttttttccgggcaacaggtaagagctttttgggggaaggctaaggggatcttaagggttgaaggcaacgtccagcctgttaaaggccctgtgccattctgcggggtttttaatggccggttccttgatcttgcagggcttttccgtattgggggaag

SEQ ID NO: 161278 - DNA, 300 bp, Arabidopsis thaliana columbia
gaccattacggaggagggggaggaaattacttaggaggtggaggacattacggaggaggtgttggagaaaacgaaggtggaggaaattacggaggtggtgaaggaggatacgaagttgaaggaggacacaacggaggaggaggcaacggcttaaacaaacttgttaaaattaagccgggttttaaaaattatttaatattttaattacaatgcataatggcttataattatataccctaatgtataatcaatatgcctataataaaacaatgttaagtttttaacgcattgctttaaaaa

SEQ ID NO: 161279 - DNA, 362 bp, Arabidopsis thaliana columbia
gaatcccggggccgaccacagccgtccgaactcccaggacccacccttagaaggaaggttttcaagatgagggaatggactacctgggggttaaccgggtggaaaagcctgggttactttgacctaatagttttggtggcccccttctgaatggcagcggttgccgtaattttggaaggtggggtttgaaggcccacctggcctaatattaatcttaaactttggccgaataaacttaactccctaaattttgagctagcaatttcttgcttaaaaagttgttttaaccccttaaccccaggctttttttccaaaatgaaaactggatttgtaccgacccataatttttggcatcattggaa

SEQ ID NO: 161280 - DNA, 376 bp, Arabidopsis thaliana columbia
cggggccgccccacccgtccgaggaaccaaactcgtcggaaaatcaagtccttgcctattaggaagaaaaaaaaaatgtttgggcaatattccttcaatgataacctaatgggggatgtcaaaggcaaccatttaaccgccgccgaaattttgggccaaaacggaagggtttgggttaaaagcgccaaatttcctaagtggaagcctaaaaaaatcgatggaataaaaaaggactttgaggagcccgggttttttgcccaaaccggcctatttttggggggcgaaaaatccatggttatccaaggtgaacaaggagctgtgatccaagggaagaaggaacctggaggtgtaattttcaaaaagacaaaccaagctt

SEQ ID NO: 161281 - DNA, 315 bp, Arabidopsis thaliana columbia
cagaattatggccccaataaaaaaattattctggggatgggtccggttccgggccaaaaatttagggaaataccctttcttattttggttccagaccctgttcctaataaagaggttcacttcttaaaatatcctatttttgtggggggaaccaggggagggggtcagattattcctgagggtggcaaaggtaccattccagtttttaatgctccggcgggggggttattaggtaaaattttccgaaaggaaagggggggttccgaaatacccataggggtggcttcgattggccgcgaggtaatggtttttttc

SEQ ID NO: 161282 - DNA, 397 bp, Arabidopsis thaliana columbia
gttggccccaggcgtccgggggttccagggggaggccaaggttattagaggcccgaccggggtggggttggtccgccgggggacccatgtcctggtttttttttttttccggttttacggaatttttttggttaatggttccatttaagccttttttggtccgaaattccagtaggacataactgttcccatttggtaaggtttggggaggcttaaaaaccgtaaggggcaccgtggttttttaatatgggggcatggttccaacgttccttcggccgagagttggggaccgcgccaaacgtttaggagttggtccatatgcttccggggaggaaatttgggcctttggtaacttttttttacaggcagccgttggacatgaaagaagcgaagagtt

SEQ ID NO: 161283 - DNA, 377 bp, Arabidopsis thaliana columbia
  unsure (1)..(377): unsure at all n locations
cggaannccggggcggccccacccgtccgtggccccttgggagggaatggaagttgttgtttatgacggggaccaccagggaccgggcttggaaattagagtctggccctagggggatggcaatggtgggaaggggttattttggccttgggttcagggtggttaccccagttttgggaagtggggtaactttattagaagcactggtccagctaatgcctggattgaatcctgaaaccagtaagctggcttatagggttttgttaatcccaagaaggatggcctttaatactgatgcttttgcaggcaaaatacctccggcaggggatgggaaaccagttctagtggtgctatttgatgccaaacccaaggaacct

SEQ ID NO: 161284 - DNA, 309 bp, Arabidopsis thaliana columbia
cggacccttggccggccccttggccttagtttttttctttggcctggaaggtcctggattaggccctggaacaacaggcgctgccgaataagtaagtaccatggggccacagggtttttttaacaccattataaaccaagccggtatgggttgaacaggaaaaagattaaccacccgcaattttttaatggacgctgttaataattttcaaaacttggcaggttccgttccaggacgtgaaatggcaggcatgtttgttaatgtaactaacaagaccggacacttttgttccttggaggaattaaggaa

SEQ ID NO: 161285 - DNA, 346 bp, Arabidopsis thaliana columbia
cgggcccggaattccggggcggaccacacccgtccggggcccctggggagggaaccaagctttttttccatatccggggtaggaggcataagagggttgggattgcacaaggtgatttgggccttgttggttggagggattcccaaaaggccaaaccggatgggaccctaaagaccatgtctgaggaggttgggcttttaaaggctaatggggggcttccaaagaatactcgtttaaatgaaggaatggtgggggatctgggggttgaggattgttaatatggttaatgactatgttgggttggaggccgaaaattttgttgggatcaaaggttttgttggttttt

SEQ ID NO: 161286 - DNA, 354 bp, Arabidopsis thaliana columbia
accaaagggggtttaggtttaacattactggttttctttttaataacttccttttccgttgggctaataattaaccaggtaacacagggcaggggattagagtccaccaccttttacagtttaacgtggaattttggagggccaccaggagagttgggggccgggcgcccttcaagtaggatggggccattaccaggcttttttgggattaaggccagaggggacccctttgaatcatttattttgggggctgccggttccaaatggggattagtttgtgccgtgaggggtaatccgaagggcggtttaaataataatatttaactttacgcgaggatggaaaagacagaaact

SEQ ID NO: 161287 - DNA, 385 bp, Arabidopsis thaliana columbia
ccttccggaattgaaccacaccatttttttcccaatttttaatttaaaaaggcctggccggatttttgtaaggccttggttaacccagccggccgggaaacccagagaaggaatggcggggcaaaaaagggttgggaaaattttccttggtccaatttttggacctttccgccctgtggggcttggccagccttttaagtccaccatgaaggtcaaacccggtaaaggattaattttggaaaagttaagggttgttgttttccaaaagaagttggcccctccaatgggttttgttgttgaccatcgtcgcaggacccgatttttgaagggttttaaaccaaatgtccaaaggttgaaaacctacaaaaccaagttggtcattttc

SEQ ID NO: 161288 - DNA, 412 bp, Arabidopsis thaliana columbia
gtttccataacagggggctggaccatcctgttccttgcccccagaaggcttggggcttaccaaacctcctatgatctaataaagggtggttgtttggccagtgggggttttgttttaccaaaggctgttgggaaggcgaccttttggccttgcccaaggccaagaccggttcctaggagaggccccattctttaaggccaaaagggttgggttcccagtaccaggacctgccttttaaaatgaagcgaaggatttgtttcgccggggtttaccatttacccaagaggatgggccggttgttttaccattggcccaggatccatatttggcctactttaagaggggggatggggtagtcttaaaaaccaacccagagttgctaaaggaccagatcctagaattttttgggtta

SEQ ID NO: 161289 - DNA, 388 bp, Arabidopsis thaliana columbia
aaccaccccaaaaggcaaggaaaagggccgaattaccttaagttcccgaaaccatcccttttttaaccggcctaaagcttgcggcaggttcaaaacctaggccttgttcccccatggttggtcccatttccgccaccggggcgccaccaaagttggtttggaaggcctttttgagggattccgcgagaaccttgggggaaccaaggggtttcattcgtttgagctggaaatgcaaaggccatggaggtcttttaaggatccggcaacggttccatggcttttttacacatgtgaattaccgggggataaagccaaaaggatcggtttcaagaacaacccagggttccaacataacgtgcttttggacgaaaacaaaatccttattgct

SEQ ID NO: 161290 - DNA, 353 bp, Arabidopsis thaliana columbia
gggttctggtggttgtggaccccaaccggaccaaccaaaaattcaatggaggggtttttcagccgttgggggaggcaaatagagaaagggttggctttactgcctccgtttcaaccgtttccgccgttggtccggttttctttttaaggcctaccgcggccatttttgttccggttttgggttggcctccaaggggtaaaaagaaggggggggggggatgttcattggagccaaagcagggaaccgtttaagtcatgggggctggggtttaagttgcagcaccagctgttttgacggcggtgataagcaatcccccaatggctttggttgatgagaggttgtcaccagaagga

SEQ ID NO: 161291 - DNA, 375 bp, Arabidopsis thaliana columbia
cttaagtttcacatggccggattagcctaaaagggctctgaccaaggtttggggggtggcatttgagtgaggagatgtttccgcttcaccttaaaatccatagggggaagggggtggacctttctgaatgggatgaccaggtggctcagcctttttttgatttggagacccccaatcaaaaatggaaaggggggctgaaggattaatccgccacctcggttgttaaggttgatatctttggaggccccagggcattcgtggccaatgttcctaccaacctgaaaaaagcttcccggaaaatccattttaggcttgttcttgacctcgaaaagaagtccaggggaaaggatgtgaccctaattgctccaaggggga

SEQ ID NO: 161292 - DNA, 362 bp, Arabidopsis thaliana columbia
aagcggcaataaaactgccctttttttcgaattcctgggggccgccgttggcctggttttttcctgattggaaccagcttccggaacggcaaaaagtgaagttggagttccttcaatggaagtgataaaacctgaactggtattaaaatcaatggttcctgttgcaatggctggggggtaaggaattaatggttggaccatcgttgtaataataagtcctggaattaaccccaaggccaagtttaataaccaattcaagggttatgctaattttttttttggcctagctgggggcctggctggcctttttgctggaatggttatggaaatcgccggggatgctggggttagagcaaatgccc

SEQ ID NO: 161293 - DNA, 384 bp, Arabidopsis thaliana columbia
aagaataccaaacaaaaagggtttggcaaaagtttcttttaatggggctgttttggttccggaccatggtggcttttccagcaaaggcaaatggccctgttggcccgccgtcaaccaaactaagccgggcaggtttccttgagggtttttaattgggcacggttactggggattaccaggtcgagggggcgattaaggaaactggtcggggcccagcctaatgggccatttactgtggaagatttccaggggggggcattaccgataccggcgatggggccgtggattttttccatcgttttagggaggatttccacctaatgaagattttaaccccagccgcctttagatggtttatggcatggccaagattatttcttaatg

SEQ ID NO: 161294 - DNA, 422 bp, Arabidopsis thaliana columbia
gttcgaaaaagcggttgggttaagggctggttaacaaatcttaagcgccggaggatgggactacttggccaacccgggctgggtccaccctaaaagcatttaacccatttgggctactaaggtaatcctaatgggagctgtggagggctccaaagtccccggaaatggtccattgggagaagcaaaggactggttttacccaggggggagcttcaaccaatggggcctggttactgaccccaaggttttcggggagttgaaggtgaaggacctaaaaaccggaaggtgggctatgtcctttatgttgggattcttcgtccaggccattgtaaccggaaagggaccgttgaagaaccttgcggaccacttggttgatccagtcaccaccaatgcatgggccttggttaccaacttggtccccg

SEQ ID NO: 161295 - DNA, 379 bp, Arabidopsis thaliana columbia
ttcctaataaaccaggaagctcctaaggctcgccttggttttttaataagcttgggcgactggtaagggggccaggttggttggggaagagaccgggcctttcacatgtaaccaacctaaacttttaaccaggggcaatttcgaaaaaggcttaattttcggggtggcatctttggtttaccaggtggaaggcggtaaaggccggggccttaacgttggggatggcttaactaaccgattcccagagaaggggggggctgttttgggaaatggaaccactcctggggactcatttcctctttggcagaaagatttagacgtgatggacgagctcaactttactggttacagattttccatggcggggtcaagactcctt

SEQ ID NO: 161296 - DNA, 371 bp, Arabidopsis thaliana columbia
cccatttttaaccggcctaaaggcctaacccttaaattaatccgccaccgccggaatccaaacggttgttgtggcataaccgaagctaccagggaggtcatttttaaggaacttgggggtcgcggccgaagcggttgcagtttaaatggtttgggccggaaccgccagggcattagaggttctttggggggggggggtggggccgttggctttaattcccaacgacttttttttagctaagggagggaagatggggttcaagaccaccgttggttccccccccatggttgtttttgatgaagccgagatcccaagtggcgtggccgtggccaagatctttttggacgagcaggatttccttaccggggcgg

SEQ ID NO: 161297 - DNA, 410 bp, Arabidopsis thaliana columbia
acacccttccgagatacagatccaagatctgggttgaggagtttggatggaccagggatcttgcaaggaagatttggcttttgggacctgaaaccacagggcctaccatggttgtcgttttgtgtaggggggttaagtcctttaccaaaataaaggtttaagtggtggttggtttccaggggccgtccaaggagggtcctttggttgaaaagaccatgagaggtttttgtttgggggtttgtgatgtggggcttaattttgatgccttcaacagaggagggggtcaggttttcccaccagccagaaggttaatttccccttccaaaataacagttaaccccagacttttggagccggttaacatggttgagatccaggcaccagaggaggcttttgaaggattttacagg

SEQ ID NO: 161298 - DNA, 325 bp, Arabidopsis thaliana columbia
agatgccatcctaaacctggctctttggacctttgggggggatgggttcaccaagggcgattgacctattcgtgggccgggttgctataaccggtttcgttgcatcgtggctggggggggcgtggccggaaaaggggattttacttcagctgaatctggaaccagggttcccgttttccgaagcaaagccatggcttttttctttaatctggtcaactctgtggggggccattgaggctttgggggccagaggaaatttcgtggccaatcctccaaccggcctcgagaaagccgtctttcctccgggcaaaaccgtccgatctgc

SEQ ID NO: 161299 - DNA, 374 bp, Arabidopsis thaliana columbia
gcaggcctttgaccgttgaatggaacgtttattcggggggttttagaagtttgtggaagtccattaaggccaaatccccaaatccggaaattttgatcatggaaaccggttttggggaagaactaggggcctaaaattttgtggttgtgggtcccgttgatcataccaggaaattttattttaaggggcattttttgggtttgcaagaagctgtttgcatcgccaaagggattgttccaggatccttggtttggccattgtgggataacttcgaggggcaggagggttccaaaaccagatttggactttactccgttgattcaaaaaataacctaacacgttccgggaaagattccggcaggttttacagggat

SEQ ID NO: 161300 - DNA, 377 bp, Arabidopsis thaliana columbia
gaggaccaagggccttttaaggagaccagaatcgctttggcaggaatccttttccggcctcggattttgatggaggggaccaaaatggatttggcgactcccgcttgggggttcaggatctcgaggccgaccatggtggctcctactgcctttcaaaagagggttaaccctgatggggaatatgctccggttggggctgcttttgttgttggacccatcatgccacttttttaatgggctacttaaagggttgaagaagttgcttccacagggccgggaatccgattcttccagctttatgtttccaagaccaggaggggggttgagcagttcgtgggaagagccaaaaaagctgggttcaaagccattgttttaac

SEQ ID NO: 161301 - DNA, 459 bp, Arabidopsis thaliana columbia
cggaataccgggtccgccccagccgtccgaaaaaaaaccacaaaaaggtttaaagggccgcttaaacatgggttttttcttcccttgttttggccggaagggttgtgaacctttcccttgcggaataaaaggtcctgggaggcggccggttgccattgaggaaaactgttgccaagccaaagggtccataaggcagcccatggtccggatccgcccgggtaaggtcctggggtccattttttggcgggtaacccagttcctttaccggggggttccttggagactacggatgggacacagttggtttttccgttgcccccaagacattcgcagggaaccgggggctagaagttttccacagcaggggggccatgctcggagccctaggttgggttttccttgagcttttggccaggaacggagtcaagtttggggaggcagtttggttcaaggttggtt

SEQ ID NO: 161302 - DNA, 438 bp, Arabidopsis thaliana columbia
gccaaatggcagggccctttccgccggactttcgttgagttcctggggcggcctggaccggctgggttttttggtttccttctttccagggggctgggtcgaggcctcaagaaaccaacccctgtgggggttgaaacctttttttttttgtttagagatgaaccaggccatgccggttttttgaccaggggatggtttgatttaaactgggttctggattggggtttcctgccaaaggcagggaaatccacttttttaaggccaaatttaattttttacgcgacttacttatccaggaaaatggggtcctggggatccataacattttacagccacctaagggaaaaccctgagttccaaggttccccaattcttaagtcctttgagacctggggtcaagacaggaaccgcaatggggattttttttttgttttgatg

SEQ ID NO: 161303 - DNA, 240 bp, Arabidopsis thaliana columbia
aattaaataggagcgcttaataaacccccttggtctttttccttggaaatctagtttttttcttccacgaaaaggagggagggcttttggatccacattggtcaggctgtattccaggtcggaaaggctggctgggggctgacctgcttggaacatggaattaagcctgatggccagatcccgagtgccaggactgttggtgggggggccaatgttttaaacaccttcttaagtgaaacc

SEQ ID NO: 161304 - DNA, 399 bp, Arabidopsis thaliana columbia
cgggaccggaattccgggtccgcccacacccgtccgattggtttaatttaccaaagagggttttaaaactaatttttttcctccttcttttgtttccacttttaacagcaacaatctggtcgggggtcgagcaggccttggtttccgccagggaactcttggggaccggccgaaccataacggttgacgggggagggtctcaactgggggggaggaagcagaggagggcttaaggttgtacctggttccagggccgagggtggttcgtggctttttaccctttttatgactggtccaagggtcctttaatggccggcgagttggatggtttaaggttcggccgcccggccaaccagttcctaaggtcctctgggcacccggaatcttgcaccatccaag

SEQ ID NO: 161305 - DNA, 257 bp, Arabidopsis thaliana columbia
  unsure (1)..(257): unsure at all n locations
cccccnnnngaaagaaaaaaccaaaaatagggaccccttttaatcgaaattaataattccgcccgaagattttttttttgatcattgacacccttaaaaggggtagggctttcgggaagccaccatgggggggggagctataatctccgattcaatacctccgcgggggtccctcggggtaattaacgggttaattgggccggatctgaaaaccaaagggaaggtttaaaagaggagatcgaatatccgatccgttt

SEQ ID NO: 161306 - DNA, 339 bp, Arabidopsis thaliana columbia
tccagatttggacctaaaggaggggcgttttattaaccccccttcttttttttggcttttttcctggcaaatttagtttttggacctttctttttttccgggaaccgaaaatgggggggggcttttggatccacattggtcgggccggtttccaggtcggaaaggctggttgggggctttactgtttggaccatggctttaagcctgatggccagatgccgggtgccaggactgttggcggaggggacaatgctttaaacacctttttcagggggaccggtgcagggaagcccgtccaccgtgcggtctttgtggatcttgagccacctgtgatcgatg

SEQ ID NO: 161307 - DNA, 383 bp, Arabidopsis thaliana columbia
cggaattccggggccgccccagccgtccggaacccataaaatccttaaaatttcgaacccttttttggttgggtcttaaatgagctggtttaaaccacccaaccaaaccttatttggtacctgggatgtatttagcttttccattgattccgtggttaaatttctttaaggactccaaggtttggaagaactcgttcccaccaccatgttgttccgtaaaagaatcggtttttggggttttaaggtggttgttatgccggcggtttgggttttaagtaagttttggtacctggatgctggggcctcagaaggtgccattccgtttttaatcatttaacccggtggatctattcctgtggggatgggattttatgatgcattga

SEQ ID NO: 161308 - DNA, 362 bp, Arabidopsis thaliana columbia
gaaaaccaaaagggtttcaaggggtggattccacgggccatttccggcggttttggaaggaggcttaaagatcattggttccagccgcttgaatggttttggaagagtggcggtggttaaaaggtttagacttgtcgtcagagttaaccaaagtggggggccttttcgccggtccgggatgggccttgtggctgttggttaagctgggggttcgttggttaaggctgtcctcgccgttgctatttcgaccaaagttggccttcttccagttctttccggtggccttcctgggccagttacctcaaaccaagcaggagactttgcttgggcattgaaggacaggttttactaacagccattgc

SEQ ID NO: 161309 - DNA, 346 bp, Arabidopsis thaliana columbia
gttaatcaggttttttgcaaagaaggtttttcttttcctaatggggggtttggtgggggcgggtaagactccaatctggtccaacctaaacctgggagggatcgggcctccaattccaaccattgttttaatgggggaaactggggattccaaaaccattactttaaccgggggggaggtcgggggtaaagacaggatttgtccttggggggggccctatttccagaaaactaagggactaattttggggggggccagcaatgaccgggaccgggtggtggaacccaaagatgaccttaacagaatgttaaccaaaaatgagttgaaagatccttgccttttcgtt

SEQ ID NO: 161310 - DNA, 413 bp, Arabidopsis thaliana columbia
gtcggccccagccgtccgggggggcacaccgcatcttggttggttaaaccggcactggtccaaaccgggaggaagctttgggaaaagatcaacattttttgcctaatcgggaccattttaagccgccccgttgaagatggaaccattctttggggcataatggttgagcgtcctaaactttccatggaggaggtggggcaccttttaatgaagggcctttttgggcattggatcgggggcttaatagaccaggggaccggaccaattaatgtttaaggggcgcacccgagggtcctagggattccacagatcagggttttgggggatcaattagccagtggggtggccaaagttaacaccactttactatttgtggaagcgcggacaccagatctggttgcagcttaggagaa

SEQ ID NO: 161311 - DNA, 426 bp, Arabidopsis thaliana columbia
  unsure (1)..(426): unsure at all n locations
ccgccgccggtccggatccggagttccggcccaggcttaggggtagggggttacacattttttttttaatggtatggattatccaagttncgagaggttgggtctctgccaggaaagaaaataaggtgggttatcaaaaangaaatggtccacagggaatcccaatggttccggggcaggaaggggggaaaccttcaaatggcaaagggggaaaaagaaggcgggacccaggaattactcgtccacacttcttacaccagaactggtttttgcatttgcctaagtcgtggatgctgaagccaatccggagggctagaagatggaagggggagttccctggtcttttttggttaagcctggtttttaaaaaatgatcctttcaagagtttaaaagtgggtggtattgtggaatccaagccttttttt

SEQ ID NO: 161312 - DNA, 284 bp, Arabidopsis thaliana columbia
cgtaattactaatctcctttaagggttcctttttgtattcaaatcggaaaaagggaactttgttggtttttatttgaatccgacaccgtgggacatcccgccaggtttggtgaccagatttccaacgctatcctgaaggctggcctggaccaagaccctggaggcaaagttgcttgtgggactggacccaagactaacagggtcatggttttgggggaaataacaaccaaggttaccgtggataacaggcggatgtgtcgtaaaacatgccgggggatgggatt

SEQ ID NO: 161313 - DNA, 360 bp, Arabidopsis thaliana columbia
gggggttctttattggacctgggttggggactttttcttcaacaaaggcggttaggggttaacaaacaagcccaaagcctcttctttaaccgtttcttttccgaaattccaagttttgtcagccaaatttggggattttgatctcagggggggctggattcatgggttttaacctggttgttaagctgttggaaaccgaaaggaatggggggatggtggctgttacctatttaactggttcaagggccacccttaagagggggttgggtcatccaggatttgggctattccgccacgatgtcccggagccccttttgatcggggttgatcagatttaccatctggcatgtccggcttttc

SEQ ID NO: 161314 - DNA, 438 bp, Arabidopsis thaliana columbia
  unsure (1)..(438): unsure at all n locations
agtaaacgagcaaaagaagaagagaaacaacaagaagtagtaatggcttcctctatgctctcctccgccgctgtggttacatccccggctcaggccaccatggtcgctccattcaccggcttgaagtcatccgctgcattcccggtcacccgcaagaccaacaaggacatcacttccatcgcaagcaacgggggaagagttagctgcatgaaggtgtggccaccaattggaaagaagaagtttgagactctatcttacctccctgaccttagtgacgtcgaattggctaaggaagttgactaccttctccgcaacaagtggattccttgtgttgaattcgagttagagcacggatttgtgtaccgtgagcacggaaacactcccggatactacgatggacggtactggacaatgtggaagcttncattgttcggatgc

SEQ ID NO: 161315 - DNA, 446 bp, Arabidopsis thaliana columbia
ccaaaactccagaaccctagaattcgaaatctccaaagaacccgacaaagcgccatgtcgctgactggcccggcgaatctcgggctcaacccgagatctaacaaatctctcactcaatccgtacctaaatcctccgcaagattcgtctgctccgatgacaaatcctcctcctccacacctcaatccatgaaagctttctccgccgccgtcgccctctcttccatcctcctctctgctcctatgccagctgtcgctgatatctcaggtttgactccttgcaaggactcaaaacagttcgctaaaagagagaagcaacagatcaagaagcttgaatcttctcttaagctctacgctcctgaatctgcccctgctcttgctctcaatgctcagatcgagaaaaccaaacgcaggttcgacaactacgggaagtacggattgttatgcgg

SEQ ID NO: 161316 - DNA, 467 bp, Arabidopsis thaliana columbia
ccggaacggaagtcccgggccgagcgacgcgacactagagacacactgatgccatacttctacacgttgttcagagaagcaaacgttacgggtggtgctgttgtacgcccattatggatggaattcccgcaagatgaagctacttttagcaacgatgaagccttcatggtcggtagtggtctactggttcaaggagtttacaccaagggaacaacgcaagcttccgtgtatttgcctggcaaagaatcatggtatgacttgagaaacggtaagacttacgttggaggcaagactcacaagatggatgctccagaggagagtatttctgcgttttaaaaggcaggaaccatcattccaaggaaggaccggtttaggcgaagttcctctcaaatggacaatgattcttatactttggtggtagctttgaacagttctcaagaagcagaaggtgaactttacattgatga

SEQ ID NO: 161317 - DNA, 479 bp, Arabidopsis thaliana columbia
  unsure (1)..(479): unsure at all n locations
cggatttgccggagccgacccacgcgnccgctcgtcctccgatttctctccgctccgagaccagaatcgtatcctcatcaccatcggcttcttctctttcttctcggcggatgttcgccgtcttaccggaatcatcaggtttgagaatccgtctttctctctctccggcttcgttgacctcgattcatcaacctagggtttctcgattacgaagagccgtcgtctgtgaagctcaggaaactactaccgatattcaagtggtcaatgactcgacatgggactctctagttcttaaagcaactgggcctgtagttgtcgacttttgggcaccatggtgtggaccttgcaagatgattgatccgcttgtaaacgatctagcacagcattacactgggaagatcaagttctacaaattaaacactgatgaatctcctaatactcccggccagtacggagttagaagcatcccaacgatcatg

SEQ ID NO: 161318 - DNA, 260 bp, Arabidopsis thaliana columbia
  unsure (1)..(260): unsure at all n locations
ctccgntaacttccnactcccccgccattttttatctctttcgccggctccatcaccactacttntctcatctctgagaacggctcaagcttagattgccggagaaaactttatgcaattttctttgtacttgggagcagcttcaacattggagcatcggcgatccaagacggaagttcactcaccttccgataacgcgactctgacctatctcaaatatttcattgacctcatattcagtgtgtctaattgctattctt

SEQ ID NO: 161319 - DNA, 263 bp, Arabidopsis thaliana columbia
  unsure (1)..(263): unsure at all n locations
gngcgaccntaaagctacagaaccctagaatgaggaggcttcaatttacccgacaaagcnacncntttcggctcggttattttaatttaccgctcagccccagatctaacaaatgttttactaaatccgtacctaaatcctgattatgatatcgacctgcgattctcttaaaagcgattatccatggctgcagctggaaacaagagcgttaacgccaaattggtgttgcttcggagatgttggtgctagaaaatcaagttttg

SEQ ID NO: 161320 - DNA, 416 bp, Arabidopsis thaliana columbia
gagagaaagaaaaaagcgaagaatacgcagattccatccaatttagggttagggctggcccggatctggaaacctttgcctcggttctgatctgttttccggatccgacttgaaggaaagaagacgacgacgcactaccaaaaacatgggcgcgaattcgcttccaacggatgcaaccctcgatctagatgagcagatctcgcagctcatgcagtgcaagcctctctccgagcaacaggtcagagcattatgtgagaaagctaaggagatcttaatggatgaaagcaacgttcagcctgttaaaagccctgtgacaatctgcggtgatattcatggacagttccatgatcttgcagagcttttacgtattgggggaaagtgtcctgataccaactatctgtttatgggagactatg

SEQ ID NO: 161321 - DNA, 450 bp, Arabidopsis thaliana columbia
cggacgcgtgggctcaaactctctcaacaacaacaatggcgtctcttcaacaaactctattggctggtcaatccaaactcccaccatcctccttccaaatcgccagatctctcccactccgaaaaaccttcccaatccgaatcaacaacggtggaaacgccgccggagcaagaatgtcagccaccgcagcatcaagctacgcgatggcattagcagacgtcgcgaaaagaaacgacacaatggaattaacagtcacagacatcgagaagctcgaacaagtcttctcagatccacaagtactaaacttcttcgcgaatccaacaatcaccgtcgagaagaaacgtcaagtcatcgacgacatagtgaaatcgtcgtctcttcaatctcacacatctaacttcctcaacgtcctcgtcgacgcgaatcggatcaatatcgtgacggagatcg

SEQ ID NO: 161322 - DNA, 387 bp, Arabidopsis thaliana columbia
gcgatctatcaagacccatactcatcaaacggaggctgctatattatgggcttgagaaactacagctgcccgtggttttaaagtcatggttactctcacctaactagcttctggtgctccattctggattgcaaccgctgccctcaattctgaaagtggtcggttgattaccacctgtaagtaggaataaccgtaaactcggccggttaacggtgacccggtctaatctggcgcaggattttcttggcgacttcagagctcgtgacccttacccggaggagatagcgagtcaattcagacataaagtgttgggaggccagagcactgggcactataatttgataccaaacgcatctgttgtgtctctcttccagcttcagtgttccc

SEQ ID NO: 161323 - DNA, 315 bp, Arabidopsis thaliana columbia
  unsure (1)..(315): unsure at all n locations
ggccgagcacgcgtccgaagaaacaaactcgtcggagaattcagtacttttcttagaggaagaagaagaagatgtctgggcaggcatacgtcgatgatcaccttatgtctgatgtcnaaggcaaccatctcaccgccgccgcaattctcggccaagacggcagtgtctgggctcagagcgccaaatttcctcagttgaagcctcaagaaatcgatggaatcaagaaggactttgaggagcccgggtttcttgccccaaccggactatttttcggtggcgaaaaatacatggttatccaaggtgaacaaggatctt

SEQ ID NO: 161324 - DNA, 430 bp, Arabidopsis thaliana columbia
aatctttcttttcagaattatcgtcccaatataaataatattcttgtgataggtcctgttcgtgggcaaaaatatagtgaaataacctttcctattcttgctccagaccctgctactaataaagatgttcacttcttaaaatatcctatatatgtaggtggaaacaggggaaggggtcagatttatcctgatggtagcaaaagtaacaatacagtttataatgctacggcaggagggataataagtaaaattttacgaaaagaaaaggggggatacgaaataaccatagtggatgcatcgaatggacgcgaagttattgatattatccctcgaggcctagaacttcttgtttcagagggcgaatccattgaaccttctcaaactgtttctttttaagaaccaaaaagatttgtgccctaacaatctattc

SEQ ID NO: 161325 - DNA, 374 bp, Arabidopsis thaliana columbia
  unsure (1)..(374): unsure at all n locations
tgaaangagagaacagagagggagcctttttttctgaaagcatcgatccatccaaanaagaacttcctcgctcgtatgcatatgaaagccatatctactcgccttcgcagatacggtctgaggtacgatgatctgtacgatcagtattacagtatggacatcaaagaggctatgaacagattgcccagggaggtcgttgatgctcgtaaccagcgtctcaagcgtgccatggacctctccatgaagcacgagtaccttcccaaggatcttgaggcggtgcaaaccccattccgtggctatttttaggacatgcttgctcttgttgagagggatagcaaggaacgagaggtccttgcgagcttttccactattcc

SEQ ID NO: 161326 - DNA, 376 bp, Arabidopsis thaliana columbia
  unsure (1)..(376): unsure at all n locations
ggaancccggncgacccacgcgtccgggggatacagagagaagccaaagctaatagttgctttaacggcgtcgggttagtccgacggaggggccatgtcctcgtctcttcttctctccggttctactgtatcttcttcgtttatcgctccatctaagccttctctcgtacgaaattccagtaagacatcactgttaccatttcgtaatgtttcgagaagcttcaaaaccgtcaagtgcaccgttgattcttcatatggaggcaatgttcccacgttccctcggacgagagtttgggacccgtacaaacgtctaggagttagtccatatgcttccgaggaagaaatctgggcctctccgaactttctttacagcagt

SEQ ID NO: 161327 - DNA, 416 bp, Arabidopsis thaliana columbia
aaaagtattattcgaaactttttaaagtattattcggtcaccggaaaattgattatggggggggccaatttgtaaccgggagaatcctagtgtagagaagaagaagaacctcttcaggctatgtccgttttggcagaggagaagcaccacttcttcatcttcaacacagaatccaaaccaaaactaccgtagccgccatggaaatcggaatacagatatttccgccgtctctaagcctccgttgactatgtcttccgtcgccagatcacttcttccagctcgccgtcgtctccgactagatccttctagttatttgtatttcccttatgaacctggaaaacaagttcgtaacgcaataaagcttaagaacactatcaaatcttatactgaatttatagtccaaacaacggcaccta

SEQ ID NO: 161328 - DNA, 434 bp, Arabidopsis thaliana columbia
  unsure (1)..(434): unsure at all n locations
cggacgcgngggaaggaattgaagttgtttgtttgactgtgatcaccagtgaccatggtccgaaattatagtctgtccctgagtggattgcaattgtaggaagtggttatattggtcttgagttcagtgatgtttacacagctcttggaagtgaggtaacttttatagaagcactggatcagctaatgcctggatttgatcctgagatcagtaagctagctcagagggttttgataaatccaagaaagattgactatcatactggagtctttgcaagcaaaattactccgtcaagggatgggaaaccagttctgattgagcttattgatgccaaaaccaaagaacctaaagatactttggaggtagatgcttgctcttattgctactgggagagctccattcaccaatggactttgcttgggaaatgttaatgt

SEQ ID NO: 161329 - DNA, 406 bp, Arabidopsis thaliana columbia
  unsure (1)..(406): unsure at all n locations
ctctcatcctcagaaagaatggctcaaaccatgctgcttacttcaggcgtcaccgccggccggttggtgaggaacaagagccctttggctcancccaaagttcaccatctcttcctctctggaaactctccggttgcactaccatctaggagacaatcattcgttcctctcgctctcttcaaacccaaaaccaaagctgctcctaaaaaggttgagaagccgaagagcaaggttgaggatggcatctttggaacgtctggtgggattggtttcacaaaggcgaatgagctattcgttggtcgtgttgctatgatcggtttcgctgcatcgttgcttggtgaggcgttgacgggaaaagggatattagctcagctgaatctggagacagggataccgatttacgaag

SEQ ID NO: 161330 - DNA, 455 bp, Arabidopsis thaliana columbia
cggacgcgtgggcggacgcgtgggcttagtctttttcctttgcctcgtaggtccttgtataggcgctggaaccacaagcgctgccgaatcagtcagtagcattgtgacacaaggtttctttaacaacattatcaaccaagccggtaatggctgcacgagaaaaagattcaacacccgcgactctttcattgacgctgctaataattttccaaactttgcaagttccgttacaagacgtgaaattgcaagcatgtttgctcatgtcactcacgagaccggacacttctgctacatagaagaaataaagaaaaggtcacgtggtaggtgcgacgagaacgtagagcagagaccatgtccatcacagagtaaaggtcactccggtcgtggtcatcagagtcttggtctcgaccttctacgccagcctgagcttgtgggtagcaacccaactgtagctt

SEQ ID NO: 161331 - DNA, 225 bp, Arabidopsis thaliana columbia
cggacgcgtgggatggaaccaagcgtttttttcatatccgtggtaagatgcataagagggttgggattgcagcaggtgatatggtgcttgttggtttgagggattaccaatatgacaaatcggatgtgatccttaagtacatgtttgatgaggctaggcttcttaaggcttatgttgagcttccatagaatacttttttaaattatgttttttctttattcctta

SEQ ID NO: 161332 - DNA, 452 bp, Arabidopsis thaliana columbia
cacaaatggagtctaggtttcacattacttgctttcctcttcatcacttcctcttccgctgagctcatcattaaacaggtcacacagggcagaggaatagagtacaacaactcttacagtctcacgtcgaatcttggagtgacgacaagagagttgagagacgagcgaccatcaagtaagatagtgacaatcacaagcttctctgtgattaaggacagaggagaaccctatgaatcatctatttttgaggctgccggttacaaatggagattagttttgtacgtgaagggtaatccgaaaggcggtataaataatcatatttcactttacgcgaggatagaagagacagaaactcttccaagagggtgggaagtgaatgttgatctcaaactctttgtccacaatcggaagttaaagaaatatttgtctgttacagatggaacagtgaagcg

SEQ ID NO: 161333 - DNA, 262 bp, Arabidopsis thaliana columbia
caaactcttctccctcgatcgtctccttcttttatctcgtttcttcattttccgcgtgttgattggtacaaaggtttaatcaaatggttggaggaggagttatccagcaaattcttaggaggaagcttcactcccaatcacttgcaacttcggttttgtcttggttttcttcgaagaaagctcatgaggatgctgtttcttctggtgtaagagcacttgtcttgttgggtgctggtgttacaggactgttgtgcttttctac

SEQ ID NO: 161334 - DNA, 440 bp, Arabidopsis thaliana columbia
gaaatgaagcacaacaatgttatccccaatggtcacttcaaaaagcactggcagaattatgggaagacatggttcaaccagcctgccaggaaaaccagaagaagaattgcgaggcaaaagaaggctgtgaagatcttccctcgtccaacttctggacctctccgccctgttgtgcatggtcagactcttaagtacaacatgaaggtcagaaccggtaaaggattcactcttgaagagctcaaggctgctggtatcccaaagaagttggcgcctacaattggtattgctgttgaccatcgtcgcaagaaccgatctttggagggtcttcaaacaaatgtccagaggctgaaaacctacaagaccaagttagtcattttcccgcgtcgtgccctcaaggtcaaggctggtgactctacaccagaagagttggctaatgctac

SEQ ID NO: 161335 - DNA, 282 bp, Arabidopsis thaliana columbia
  unsure (1)..(282): unsure at all n locations
ggccggccgacgcgaacgncaagaaccatctgtgaatctacctatttttttttatgctagaactgcttgnccacgagccgactatttttggaaacatgtgggatcatanacattgtggttcttgctggtcattaggtgctgttgaatcactatcagatagactctgtatccaatttggcatgaacatttttttatcagtaaatgatctcctagctagttgcggattccgttgtagtgattgttgttatctactctttttattttattttttttaatctcttt

SEQ ID NO: 161336 - DNA, 451 bp, Arabidopsis thaliana columbia
gcttacatcacagggagctggaacatactggtacttgcccccagaatgctttgagcttaacaaaactcctatgatctcatcaaaggttgatgtatggtcagttggtgttctgttttaccaaatgctgtttggaaagcgaccttttggacatgaccaaagccaagaacggatactaagagaagacacaatcattaaagccaaaaaggttgagttcccagtaacaagacctgccatctcaaatgaagcgaaggatttgattcgacggtgtctaacatataaccaagaagataggccggatgttctaacaatggcacaggatccatatcttgcctactctaagaagtgagattgtgtagtcttcaaaaacaaaccagagatgctaaaagaccagatcctagaatattttttggtatagcttataaaagttctgttttgtttgtctaaatatttt

SEQ ID NO: 161337 - DNA, 367 bp, Arabidopsis thaliana columbia
aaacaccccaaatagtaaaggagatggccgcaattacataagctaccgaaaccattcatggggtgggcggcctaaaactagccgccagctcaaaacctaatacattatccaccatgagtggatccacttccgacaccagggcgccacctaagctcgctttgaagtcctctgtgaaggattctcccgtcatctcagaggcaacagcagcatcagatcgctttagctggaaatgcgatggccatggacgttcttctaggatccgacgaccgtatcctggctcttgtaccatatgaattcactgtggctgaaggcgagaagatcgggttcaagaacaacgcaaggttcccacataacgtgccgttcgacg

SEQ ID NO: 161338 - DNA, 456 bp, Arabidopsis thaliana columbia
gtgttcttgttgctgtagaacacaaacagaacaaacaaaaaatcaattgaagagtctctcaggcggtaggggaagcaaatagagaaatggctagctttactgcctccgcttccaccgtctccgccgctcgtccggctctccttctcaagcctaccgtcgccatctctgctcctgttcttggtttgcctccaatgggtaagaagaagggaggagtgagatgttcaatggagacaaagcaaggaaacgtctcagtcatgggggctggagtttcagctgcagcaacagctgctttgacggcggtgatgagcaatcccgcgatggctttggttgatgagaggatgtcaacagaaggaacaggattaccctttggtctaagcaacaacctcttgggttggattctgtttggagtctttggtttgatctggactttcttcttcgtctacacttcatctctcg

SEQ ID NO: 161339 - DNA, 233 bp, Arabidopsis thaliana columbia
  unsure (1)..(233): unsure at all n locations
gagagagagaagagataaacatttttttttaaatggccgncgccncttctcgccccgcccttactttccaaaccttggatgctcacatatacaccgatcaatcctccaccgtcgtactttcctacttcatgacggctccagttcgaccagacattgttaacttcgttcacgcccaaatctccaacaacagccttcagccatactccttatctaataaggccggtcaccatacc

SEQ ID NO: 161340 - DNA, 443 bp, Arabidopsis thaliana columbia
cttcagtatccattggcggattagcctcagagtgctctgatcaaggttttggaggttgcaggggagtgaggagatgttttcggctcaacataagattcataaggagaagggtgtggaactttctgaattggatgagcaagttgctcacgctttctttgatttggagaacaccaatcaagaattgaaaagtgagctgaaggatttatacgtcaactcggctgttcaagttgatatctctggaggacgcaaggcaattgttgtcaatgttccttacagactgagaaaagcttaccggaaaatccatgttaggcttgttcgtgaacttgagaagaagttcagtggaaaggatgtgatcctgattgctacaaggaggattgtgaggccaccaaagaagggttcagcggcaaatagaccacgcaaccgtactctgaccttagtccatg

SEQ ID NO: 161341 - DNA, 449 bp, Arabidopsis thaliana columbia
gacggattcgaaaatggccaagtttcttcaatcctatggatatgatttgattctgggatctgtagctgcaatctatgtggtcatggcaccatatactaaggtggaagagagcttcaacgttcaggtaggttttcaaagtatttagagtcacactctttctccgttttactgaaaccgtttcactcgtctcaagtcaatgcacgacattctttaccatcgccatcatttggactcttatgatcatttggagttccccggtgttgtccctcgaacttttattggagccttcatagtctctgtttttgcatcacctgttgtatcaattatcagctgccttggcttccccaaggtttatagccttgttgcagctcgtttggtgttgggctgcatcatattgtccacactaagatttttccggattcagataaaaaaaaagtttggaaatcaag

SEQ ID NO: 161342 - DNA, 549 bp, Arabidopsis thaliana columbia
  unsure (1)..(549): unsure at all n locations
cccgggctcgaccccacgcccgtccgaatgnnngcttcttcaaaggtttcaaagcggnncgatgataacctgcttgctctttcntttcggattccnnntcggcgcggcgcgcgcgtgcngnnctcgttnnnttctccgtggtatngnnggagcangcnngtacccgggaccggcngnnaagagatggnnagttggacggttgcngtcngnnatgggagtngatgacgaccctcgannacttcgttatgannaatcgattcggttcctcgttcgtcaatggctcggtgggtgttaggtattttaaatggtttgatcaaatcgctgttanttatcaagtaccctgggattataccccaagggccacagtcttaaattacctaaattcgatggctatcgctcaatctctcttctgggctagcgttgtggtcttgcntggtctctctgctggtatggctattggaatcgtcggtgatgctggtgttagagcgaatgcgcaacaaccgaagctgtttgtgggaatgattctgattctcatctttgcggaagcgc

SEQ ID NO: 161343 - DNA, 447 bp, Arabidopsis thaliana columbia
cagaattacaaacaaaaatggttttgcaaaagctttctctcattgggctgcttttgctcctgaccatcgtcgcctctccagcaaatgcagatggacctgtttgcccgccgtcgaacaaactaagccgggcaagtttccctgaaggttttttatttggcacggctactgcggcataccaggtcgaaggtgcgattaatgaaacttgtcgtggaccagccttatgggacatctactgtagaagatatccagagaggtgcaataacgataacggcgatgtggccgttgatttcttccatcgttataaggaagatatccaactaatgaagaatctaaacacagacgcctttagaatgtctatcgcatggccaagaatatttcctcatgggagaaaggagaaaggagtgagtcaagctggtgtgcaattctaccacgacctcatcgacgagc

SEQ ID NO: 161344 - DNA, 466 bp, Arabidopsis thaliana columbia
gttcggagaagcggtttggttcaaggctggttcacagatcttcagcgacggaggattggactacttgggcaacccgagcttggtccacgctcagagcatcttagccatttgggctactcaagttatcctcatgggagctgttgagggctacagagtcgccggagatggtccattgggagaagcagaggacttgctttacccaggtgggagcttcgacccattgggcctcgctactgaccccgaggctttcgcggagttgaaggtgaaggagctcaagaacggaaggttggctatgttctctatgtttggattcttcgttcaggccattgtcaccggaaagggaccgttggagaacctcgcggaccacttggctgatccagtcaacaacaatgcatgggccttcgctaccaacttcgttcccggaaagtgagtttaatttgtgatcgagttgtgtgtatcctgtttg

SEQ ID NO: 161345 - DNA, 464 bp, Arabidopsis thaliana columbia
ctactaataaaccatgaagcttcttatgctcgcctttgtttttctattagctttggcgacttgtaaaggtgacgagtttgtttgtgaagagaacgagccattcacatgtaaccaaactaaacttttcaacagtggcaatttcgaaaaaggcttcatcttcggtgttgcatcttctgcttaccaggtggaaggcggtagaggccgtggacttaacgtttgggatagcttcactcaccgattcccagagaaaggtggagctgatttgggaaatggagacactacttgtgactcatatactctttggcagaaagatatagacgtgatggacgagctcaactctactggctacagattctccattgcgtggtcaagactccttccaaaaggaaagaggagcaggggagtgaacccaggagctattaagtactacaacggtctcatagatggcctcgtcgcaaagaata

SEQ ID NO: 161346 - DNA, 384 bp, Arabidopsis thaliana columbia
cgacaaagattgccggaaaactagccgtaacttaggggagctaggtgagaccagcgggggttccatcctcgtgagtaaagcagtgatcgtcggtccgttcaaatccgacaacttcacaaccatcaccgatgctattgcagccgcacctaataacactagaccagaggatggttactttgttatctacgcaagagaaggtgtctatgaagaatatattgttgttcccatcaacaaaaagaacttaatgcttatgggagatgggatcaataagacgattattacagggaaccataatgttgttgatggtgggactacgtataattgctcgagcttcgctgtggttggagagcggttcatggcggttgatgttacattcagaaacac

SEQ ID NO: 161347 - DNA, 425 bp, Arabidopsis thaliana columbia
agatcagatccaagatcttggctgaggagtttggatgggacaaggatcttgcaaagaagaggtgggcttttggacctgaaaccacagggcctaacatggttgtcgatatgtgtaagggagttcagtaccttaacgaaatcaaggattcagttgttgctggtttccagtgggcgtccaaggaaggtcctcttgctgaagagaacatgagaggtatctgttttgaggtatgtgatgtggtgcttcactctgatgccatccacagaggaggtggtcaggttatccccacagccagaagggtcatatacgcttcccagatcacagctaagcccagacttttggagccggtttacatggttgagatccaggcaccagagggagctcttggaggaatctacagtgtgctgaatcagaagcgtggacacgtg

SEQ ID NO: 161348 - DNA, 444 bp, Arabidopsis thaliana columbia
  unsure (1)..(444): unsure at all n locations
gaagaagaaaaaaaacagagctttacaatttctctctacagagatcgaagatatggaaggcaaggaagaagacgttagagttggagctaacaagttcccggagagacaaccaatcggaacatcagctcagagtgacaaggactacaaggaaccaccaccagctccgtttttcgaacctggtgagctttcttcatggtctttttggagagctgggatcgctgagttcatcgctacttttctctttctctacatcactgtcttgactgttatgggagtgaaaaggtcaccgaacatgtgtgcttccgtcggaatccaaggaatcgcttgggctttcggtggtatgatatttgccttagtctactgtaccgctggtatctccggtggacacatcaacccagcggntacttntggtctgttcttagcccggaagctgtcgcttactag

SEQ ID NO: 161349 - DNA, 445 bp, Arabidopsis thaliana columbia
agatgccatcctcaaccttgctcttcggaacgtctggtgggattggtttcacaaaggcgggggagctattcgttggtcgtgttgctatgatcggtttcgctgcatcgttgcttggtgaggcgttgacgggaaaagggatattagctcagctgaatctggagacagggataccgatttacgaagcagagccattgcttctcttcttcatcttgttcactctgttgggagccattggagctctcggagacagaggaaaattcgtcgacgatccttccaccgggctcgagaaagccgtcattccttccggcagaaacgttcgatctgccctctgtctcaaagaacaaggtccattgtttgggttcaccaatgttaacgtgttatttcttggaagtatggcacaattgggaattgcattttttcctttttgggaagtttatttcccggg

SEQ ID NO: 161350 - DNA, 450 bp, Arabidopsis thaliana columbia
  unsure (1)..(450): unsure at all n locations
gcaagcctttgaccgctgcattgaacgtttactcgagaggttttagaagtctgttgaagtgcgattaaggacaaatacgcaaatccggaaattatgatcatggaaaacggatatggagaagaactaggggcctcagattctgttgctgttggtaccgctgatcataacaggaaatattatcttcagaggcatcttttgagtatgcaagaagctgtttgcatcgacaaagtgaatgttacaggatactttgtatggtcattgttggataacttcgagtggcaagatggttacaaaaacagatttggactctactacgttgatttcaaaaataacctcacacgttacgagaaagaatccggcaagtattacaaggatttccttagtcaaggtgttcgtccatccgcgctcaaaaaggatgagctttaagctatttntggttcaatgtgtttt

SEQ ID NO: 161351 - DNA, 433 bp, Arabidopsis thaliana columbia
gaagatcaatggactcttcaagagaacagaaacgcttttgcaagaatcctcttccggcctcggattttgattgatgtgaacaaaattgatatggcgactaccgtcttggggttcaagatctcgatgccgatcatggttgctcctactgcctttcaaaagatggctcaccctgatggggaatatgctacggctagagctgcgtctgctgctggaaccatcatgacactatcttcatgggctacttcaagtgttgaagaagttgcttccacagggccaggaatccgattcttccagctctatgtatacaagaacaggaaggtggttgagcagctcgtgagaagagccgagaaagctgggttcaaagccattgctctcactgtagacaccccaaggctaggtcgcaaagagtctgatatcaagaacagattcactt

SEQ ID NO: 161352 - DNA, 471 bp, Arabidopsis thaliana columbia
aaaaaaaaacacaaaaaagtttcaatggccgtctcaacaatggctctctcctcccctgcttgcgccggaaaggctgtgaacctttcccctgcggcatcagaagtccttggaagcggccgtgtgacaatgaggaagactgttgccaagccaaagggtccatcaggcagcccatggtacggatccgaccgagtcaagtacttgggtccattctctggcgagtcacccagctaccttaccggagagttccctggagactacggatgggacacagctggtctatccgctgaccccgagacattcgcaaggaaccgtgagctagaagttatccacagcaggtgggccatgctcggagccctaagctgcgtctttcctgagcttttggccaggaacggagtcaagtttggagaggcagtttggttcaaggctggttcacagatctttagcgatggagggctcgattacttgggaaac

SEQ ID NO: 161353 - DNA, 469 bp, Arabidopsis thaliana columbia
gacaaattgcaaggacctctccgacagatcttcgttgagttccttgagcggtcttgtactgctgagttctctggtttccttctctacaaggagcttggtcgaagactcaagaaaacaaaccctgttgtggctgagatcttctctcttatgtctagagatgaagcaagacatgccgggttcttgaacaagggattgtctgatttcaacttggctcttgatttgggtttcctgacaaaggcaaggaaatacactttcttcaagccaaaattcatcttctacgcgacttacttatccgagaaaatcgggtactggagatacatcacaatctacagacacctcaaggaaaaccctgagttccaatgttacccaatcttcaagtactttgagaactggtgtcaagacgagaaccgtcatggtgatttcttttctggtttgatgaaagctcaaccttaggtccttaatgactggc

SEQ ID NO: 161354 - DNA, 218 bp, Arabidopsis thaliana columbia
atcagatctagattcagtttttttcatcaaataagagcgtcttcataaacgccctggggcgttcttccctggaaatctagtttctttcttccacgaaaatgagagagtgcatttcgatccacattggtcaggctggtatccaggtcggaaatgcttgctgggagctgtactgtcttgaccatggcattcagcctgatggccagatgccgagtgccaag

SEQ ID NO: 161355 - DNA, 439 bp, Arabidopsis thaliana columbia
atttgtctaattttacaaagatgggtttcaaactcatctctctcctccttctttttcttccacttctaacagtcacaatcttgtcgggagtcgagcaggcctttgcttccgacaaggcactcctcgtgaccggccgcaacatcacggctgacggtggaaggtcgtcactgagagggaagaagcagaggagagcatcaggatgtaacttgttccaaggccgatgggtgttcgatgcttcttaccctttctatgactcgtccaagtgtcctttcatcgacggcgagtttgactgtctcaagttcggccgaccagacaaacagttcctcaagtactcttggcaacctgaatcttgcaccatcccaaggttcgacggtggggcatttcttgggaaatacagaggaaaacgagtcatgttcgtcggagactcactgagtttaaa

SEQ ID NO: 161356 - DNA, 370 bp, Arabidopsis thaliana columbia
aagaagaagaaactacaataggtaatcaatcatacgagaaagtaagagaaatggcagcatactagcggaggatgtggatgactcctgcaggataccacgactctcgcactagagagacgaactacaacatggagtgcagacaactggggctgttgatcaaactgcacatgcgggtgaaactgagactgcagatgaaattattactggttcaaaacatatatatggcacaaaaatcgctggaaatatatagttcatgctaaaacatgtgagggtggggttggaataaagacatgaaccgtgactggcttatcaacgagagccagaacaagctctatcacgctttggatttgactgtggatagacatggtga

SEQ ID NO: 161357 - DNA, 357 bp, Arabidopsis thaliana columbia
caaagaagaaaaactaaaaaagagaatttcttataatcgaatatttattatttcgccccgaacattctatttctgatcatttacacccctaaaaagagtagagctttcgtgaagccaccatgtgtggaggagctataatctccgatttcatacctccgccgaggtccctccgcgtcactaacgagtttatctggccggatctgaaaaacaaagtgaaagcttcaaagaagagatcgaataagcgatccgatttcttcgatcttgacgatgatttcgaagctgatttccaagggtttaaggatgagtcgggtgttgactgctaaaaccatgatgatgtcttcctcaatgttaagcctt

SEQ ID NO: 161358 - DNA, 457 bp, Arabidopsis thaliana columbia
  unsure (1)..(457): unsure at all n locations
gaccacgcgnncggaaagatcataccatcttctctttaatcgattgattagtcaagttcgagaagtttggtccgcagaggaagaagataagtgtgtatccaagagaaattgtaccagagaatcccaatagctacagagcaagaaagagagaaaacttcagattgcaaagggagaagaagaaggcgagacgcgagaattactcgtacacacttcctacaccagaacttgttcttgcatctgcctcagtcgatgatgctgaagccaatccggagtgctagaagattgaatgtggagtttccttgtctctttttgtttagtcttgtttatgaaaaatgatcctttcagagtattaagagttggttgtattgtcgaatccaagccttttttttgtcaaattgagtcccaagcaggcgggtttttacccaacttgaggtattaatgttatcaaatggttatt

SEQ ID NO: 161359 - DNA, 448 bp, Arabidopsis thaliana columbia
atcagatctagatctaaaagaagagcgtctttataaacgcccttcttcttcttcgtcttctgccgggcaaatctagtttctaggtcttttctttctttcccgaaaccaaaatgagagagggccttttgatccacattggtcaagcccgtattcaagtccgaaattcttgcttggagccttaccggcttggaccatgcattcaaccctgttggccaaatcccaagggccaggcctgtggccggaggtaccattccttcaaccacctttttaagggagaccgggccagggaagcacgtccaacgtcctgtcttggtggatcttgacccaactgtgatcgatgaggtcaggactggtacttaccgtcagtttttccaccctgagcaactcatcagcggtaaagaagacccagctaacaatttcgcccggggcattacaccattgggaaaga

SEQ ID NO: 161360 - DNA, 398 bp, Arabidopsis thaliana columbia
gaaaccatagaatccctaaaacttcgaaacttttttgcgttaggtcttcaatgagcttggctagaccacccagacaaaccttgtctagtaactgggatgtatctagcttctccattgattccgttgctcaatctccttcaagactcccaagtttcgaagaactcgataccaccaacatgttgctccgtcaaagaatcgtctttttgggttctcaggttgatgatatgacggcggatttggttataagtcagctattgttactagatgctgaggactcagaaagagacattacgctttttatcaattcacccggtggatctattactgctgggatgggaatatatgatgcaatgaaacaatgtaaggcggatgtatctactgtttgcttagggttagct

SEQ ID NO: 161361 - DNA, 301 bp, Arabidopsis thaliana columbia
cccacctttgggacgtttcgctgttagggacatgatgcagaccgttgctgttggtgttatggagagcgtggacaagaaggacccaactggagccaaggtcaccaaggctgcagtgaagaagggtgccaaatgatgagactttcgttatgatcgactctcttatggttttctttggttcttaaaactttgatggcgtttgagcctttttcttttttctctttatttctgtgactttctctctccctcctttttggatatctctgagactttttattatggttttcaattatgcagtttccgg

SEQ ID NO: 161362 - DNA, 433 bp, Arabidopsis thaliana columbia
gaaaaacaaaatggcttcgatgggtggattacacggtgcatctccggcggttcttgaagggggcttaaagatcaatggctccagccgtctgaatggctctggaagagtggcggtggctcaaaggtctagacttgtcgtcagagctcagcagagtgaggagacttctcgccggtccgtgattgggcttgttgctgctggtttagctggtggctcgtttgttcaggctgtcctcgccgatgctatttcgatcaaagttggccctcctccagctccttccggtggccttcctgggacagataactcagaccaagcaagagactttgcattggcattgaaagacaggttttacttacagccattgccaccaacagaagctgcagctagagccaaagaatctgcaaaggatatcataaatgtgaagccattgatcgac

SEQ ID NO: 161363 - DNA, 429 bp, Arabidopsis thaliana columbia
  unsure (1)..(429): unsure at all n locations
gntcagcaagctctntgcaaagaaagatatttttatcctcatggtgggtctcgatgcggcgggtaagactacgatcttgggcaagctcaagcttggagagatcgtgactacgattccaaccattggtttcaatgtggagactgtggaatacaagaacattagctttaccgtgtgggatgtcgggggtcaagacaagattcgtccattgtggaggcactacttccagaacactcagggacttatctttgtggtggacagcaatgatcgtgaccgtgttgtggaagccagagatgagcttcacagaatgttgaacgaagatgagttgagagatgctgtgcttctcgtttttgctaacaagcaagatcttccaaatgcgatgaacgccgctgagataaccgataagcttggactttactctcttcgtcaacg

SEQ ID NO: 161364 - DNA, 455 bp, Arabidopsis thaliana columbia
  unsure (1)..(455): unsure at all n locations
acccacgcgtccgcgtgtgcacaacgcatccttgattgctcaaccagcacttgttcagaacgagaagaagcttggggaaaagatcaacattctctgccttatcgagatcatcttcagccgacccgctgaagatagaaccattcctttgagcatcatcgctgagcgtactaaactttccattgaagatgttgagcaccttctcatgaagagcctttctgtgcatttgatcgagggcatcatagaccaagtgaacggaacaatttatgtctcatgggcgcaaccgagagtactagggattccacagatcaaggctttgagggatcaattagacagttgggttgacaaagttcacaccactttactatctgttgaagccgagacaccagatcttgttgcagcataagagaaaagaaaaccttcttcctncttttggagctactgaatgtaaaacacca

SEQ ID NO: 161365 - DNA, 336 bp, Arabidopsis thaliana columbia
  unsure (1)..(336): unsure at all n locations
ggaaaaanggaatntgggggggtatatatgaatttgtggacgagaaacataaanacaaggtttgtgatcagatnttcgacgctatcctcgatgcttgccttgaacaagaccctgagagcaaagttgcttgtgagacttgtaccaagactaacatggtcatggtttttggagaaatcaccaccaaggctaacgttgattacgagcagattgttcgtaaaacatgccgtgagattggattcgtctctgctgacgttggtctagatgctgacaattgcaaggttctggttaacattgagcaacagagtcctgacattgcacaaggtgttcatggtcatt

SEQ ID NO: 161366 - DNA, 291 bp, Arabidopsis thaliana columbia
  unsure (1)..(291): unsure at all n locations
aagagataatctaaaaatgaacccgcactttatttaagctttgagctttcttggtttctnggccacttcatgtctcgctcaagctcctgcaccagcaccaaccaccgttactcctccaccaacggcgcttcctccagtgacagcagaaacaccttcaccaattgcttcaccgcctgttccagttaacgagccaactccagctcctaccacttctccaacaacatccccggttgcttctcctcctcagaccgatgctcctgctcccggtccttgcgctggattaacttcaac

SEQ ID NO: 161367 - DNA, 425 bp, Arabidopsis thaliana columbia
gggttctctcatcgatctcggtttgttatcttcttcttcatcaatggcgtctagtgggaggcaaacaagcccaaagcctcctccttcaccgtctcctctccgtaattccaagttttgtcagtcaaatatgaggattttgatctcaggaggagctggattcattggttctcaccttgttgataagctgatggaaaacgaaaagaatgaggtgattgttgctgataactatttcactggttcaaaggacaaccttaagaagtggattggtcatccaagatttgagcttatccgtcacgatgtcacggagccacttttgatcgaggttgatcagatataccatcttgcatgtcctgcttctcctatcttctacaagtacaaccctgtgaagacaatcaagaccaatgtgattggcacactgaacatgc

SEQ ID NO: 161368 - DNA, 239 bp, Arabidopsis thaliana columbia
  unsure (1)..(239): unsure at all n locations
aaaccagaccccccacaaaaaacaacaccgntcccaaaaangancccaccgccgccgaaccgaggaagaaaccncagataaccaaaaacaccggccaggacacatcaaacccgacggagttaattccaagaaaaaactaccaaaatcaaagtctgaaccgacgatcatcgaaaatcaacacccatcgaaacaaccatatctacatctatccacacaatgtcaacaaagcgttgaagaaa

SEQ ID NO: 161369 - DNA, 214 bp, Arabidopsis thaliana columbia
ttccgattcctttggccagggccttaggcggtccacctgggccaccaggttggtggggtttaacatggctcctgctttaatggccaggctggtggtcaacataaccaagacactttggactttgcctaacataaaggttccacttatttggggtttatggggaggcaaaggtcaaggtaaatccttccagggtgagcttgtcatggccaaaatg

SEQ ID NO: 161370 - DNA, 396 bp, Arabidopsis thaliana columbia
tttttccaaaggcctaagggtttttttgaaaatctttggggactttttttttaaggaggcaatttttggggaaaccactaactggcaggactttaactttggaggtggagggctctgccaccttcgccaatgttaaggcaaagtttcaggccagggaaggctttcctccggatcagcaaagtttatttttggccggtaaccagttggaaaatggccgtcccttggccgtttccacctttaaaaaggatacaccccttaatttggttctccgtttaagaggtggtttgcaatttttggccaggactttgcctggcaggaccattactttggaggtggagggctctgccccttttgccaccgtcaaagcaaagtaccaggccagggagggaatccctc

SEQ ID NO: 161371 - DNA, 456 bp, Arabidopsis thaliana columbia
acccttcggcaaaaaccatttgggggtggggctttggaccaccaccatggcccccaaaaaagggagggaaggagcctgttaaaaaaaagcccgcggagaaggtttaaaccccttttttggggaggaggcctaaccatttcggtttggggggagctttacctcctaagagggacctttttggttccataaattggcccaattccatccgttttaaaaggcaaaagaggatcctgaagcaaaggtggaaggtccctccagtttttaaccaattaaccaagactttggacaggaattttgttaccagccttttaaaggtccttttgagagccaggccaaaaaacaaagctgccaaaaaggacctgtttgtaaagaaggcccaagctcaagctgagggaaggcctcttgagtctaaaaagcccattgtagtcaattacggcctcaaccatgtgacctacc

SEQ ID NO: 161372 - DNA, 337 bp, Arabidopsis thaliana columbia
cggccccgtggccaaaaaaataatgttgaaccgtccgagggccatttttttgggccgcccatcgccgttaaggagggggcttaaacctcggcccgccttccgacgttgttttccggttggtccaaaagggggtggtctttcggaaggtggttcagcaggctttttgcgaaaaaggagatccgtttcctgttggtgggcctcgatcctgctgttaggacgcctttcctttccaggctcaaacttgaggggaccgtccccactattccacccattgggtccaccgttgggactgtggaatccaaaaccatcagcttaaccggttggaatgttgggggtc

SEQ ID NO: 161373 - DNA, 298 bp, Arabidopsis thaliana columbia
aaaccccattttcacacggaattttccaacataacccctacctccatttaattcaagggccttggtcccttccgtttggggggttcttcttccgccctaccaaaactttaaaccaccgggggaaaatcctcctccgttgtcgggggagctgagctaagcccttccatggtattaggtttaagaccaggtttttcccttttcttgggccgtttggtttttttaaacttccagggggggaccgtagcaaaccagggcttaccggagcagaacggaaaaccccatttcgaagctggagatg

SEQ ID NO: 161374 - DNA, 297 bp, Arabidopsis thaliana columbia
gaccaagggcttcctttaggctcttttccgttcctatggtggcctttccggttaaggccactatggtggctcctttaaacggacttaagtcctccgttgccttccaagccacccgaagggttaacaccgccattacttccataacaggcaacgggggaggagttaactgcttgcagggggggcctccgatgggaaagaaaaagttggggacttttttttaccttccggaccttaccgattccgaatgggctaaggaagttgactaccttatccgcaccagggggattcctggggtgg

SEQ ID NO: 161375 - DNA, 357 bp, Arabidopsis thaliana columbia
cgtccgaaaaaggcctacttttatcctttttccgtttattttgttcgccctaccgcctagggcaactggggcagctcttttcaccggcctgaaaccttcagttcacattccaatctacccgaaggcctaacaccgccattgcttcaatcccaggcaccgccgaaggagttaactgcttccaggggggacctccgctggtaaagaaaacgttggagcctgtttttaaccttcctgacctaaccaattccgaatgggctaagggggttgactccttcacccgtaccaggtggttacctggggtgaaatccagttggagccacggttttgtgttccgggagcacggtacctaacccggtt

SEQ ID NO: 161376 - DNA, 411 bp, Arabidopsis thaliana columbia
ggggcggacccaggcgtccggttaacccagagtaaagctggaaccttggtcctatatgatgggcgttttgggtggtgccggaaaggcttggtcctccctttaactgaagggcagtttaaagaccgtttgttccgttggcataaagcccatccacgttaaagacggtggcttttttttttaagaaaaagccagttcctgttaagtccaaggttgcttttgagactagcgttaagctcgccaagtggtttggtcctgacaggagaattttctggcctgagggccttttggttagaccaaagatcccagagtccttaaccggggaagtggctgggaatattggttttgacccatttggtcttggaaagaggcctgaaaacttggttaattaccaagcttttgaattgatccatg

SEQ ID NO: 161377 - DNA, 245 bp, Arabidopsis thaliana columbia
  unsure (1)..(245): unsure at all n locations
tggaatnccggggcggaccacacccttccgaagttccaaaaaaccgtcctccaatttctataattccgtatccgaaaaaaaattgggaaagggaggggtttttggccatcgtggaaggctttttcattagggaaataacttcctccaggtaattcaaaaggttttttggtccagcaaattaaataaaaacccctttattatttggatttagcctaccttaaaacccattttgtttaataccatct

SEQ ID NO: 161378 - DNA, 423 bp, Arabidopsis thaliana columbia
tttggatttccgggtcgcgcccacccttccgttggttcactcacaaggggaaccttgggttctcttttattgagccaggggtttcttggcccgctgctcttgccttaggcaaaagggcccctggtcgttgctcttcttacgtaattgctaattgccaggccggccgtccaggttccgaggcttacctggccactaacattctccttttttttaacccataaccagttgaggcttaccggaaatgcgaaaggggtaaaggggggaggatcggatttgcccatagtcctgttgggttcgaaacacatgaccttgttgtttaacaagaacggggcgtccatcgaccgtgcactggactttattttgggatggcttctagacccacctcctttgggggtttttccccagttcatgaaagactttgtt

SEQ ID NO: 161379 - DNA, 285 bp, Arabidopsis thaliana columbia
ggatttccgggtcggacccacccttccgaaaaaggctttaaacctaacccgtaaaatttttttttttccagcccgcccagaaccatcgccatggttggagcccaggaagagggttatcaccccaccccacttaggccggccctggttaagttattctcgactttgatctttgctttggccgcctaaggctccgaaattgcttttaccaggaccactgccaatggaccacccactctttccggccttggggccgttgccttagctaaggctttcggtctttttgtc

SEQ ID NO: 161380 - DNA, 274 bp, Arabidopsis thaliana columbia
acccttcggccggttttaatcttttaaaattcctttttttgaattggcaaaataggggcggggggttggaccctcctcctttttgggtttgggtaaccgtttttactttacttaagccgaagttggccacccgtggtcgccttcgccgttttttaacggcggcggacctagcagggtggctccaaaggatagaaaggtcaagggggtgttttggggatgtccggtggtgggaaaaggaacttacgctagtagactataaacccttttgggggtt

SEQ ID NO: 161381 - DNA, 225 bp, Arabidopsis thaliana columbia
gccttccgttaatttttaacctccaaccttttaaggtttcaattaccaaggggcttaatcgccggaaaagggcgggggttggtttgggggttggcttggtcaacagattttactatgggagaggcaaagttggtgaataagaagcctttgtttcctaaccttaaccctaatcctttcctccacaggaggggcttaaaaaaagaattcggcaactaaggtgggggg

SEQ ID NO: 161382 - DNA, 261 bp, Arabidopsis thaliana columbia
  unsure (1)..(261): unsure at all n locations
gggaatnccggggcggaccacagccgtccgaaggattggaggacctcctcctaagttaatttgggtggttttgatagggaggagaaagctgttggggcttatgaccttgctgaactaaagaccgggggtccttttactaacaccattttttttgcggagatttttcagaaggggatggaggccttgagaaccatgcttggccaggattatgtggaccatttgagaaggaagagcagtggtttctttagggttgcttccatt

SEQ ID NO: 161383 - DNA, 337 bp, Arabidopsis thaliana columbia
ggaattccggggccgcccacacccgtccgttctttttaatattaatccgtccttttctattctgcaccagcaaaattatcttccggcggaccgaacccctaatgggttcttccgtcctcctttggtcctcttagaatcggggcctctaacttttttttcttcctaataatccttttcggatggattctggaatccatgtatttccccattacccctaaaacccctagttgtcgaatacctttgattactgcagaaaggttataatcgtgttcaatcttttccggtatggaggtttttatttatttggtttggggggagagattccctatccgagtag

SEQ ID NO: 161384 - DNA, 411 bp, Arabidopsis thaliana columbia
cgggatttccgggttggccccacccgtccgattcggtaaaagcggtttcggccaaactttttccgtccaaggtggggggccctccacttccttccgggggcctaccgggaccagttacctaaacccaggcaggagacttttaatgggcatggaaggatagatttaacatacaaccatggtaaccaacagaagctgcagttggagccaaagattctgctaaggagaccatcaacgttaagtcattattcgccaaaaaagctgggccctatgttcagaacgacctccgtttaaaagcatggtacctccgttacgatctaaacaccgttatctccgttaagcctaaggaggagaagcaaagccttaaggatctaaccgcaaagcttttccaaaccattgacaacttggactttg

SEQ ID NO: 161385 - DNA, 442 bp, Arabidopsis thaliana columbia
tggatttccggggcggacccacccttccggaatttcctggagaaaaaggtctggcggtttagttacctgcggttgtggtcctggctgaaggtgcggaaccggtggtgggggtggcaaaaggtcccctgcctggggtttttccggcaggccacccacacctgagactttggtttggggcgtggcaccggcgttgaaaaatcagtccagggcttaaggggagagtaccaccgctgagaacaatgctggcaaggttggacctgactgcaggggtgaccctggcacctgcaggtgagaaaccctttttaaataagcagggataatcaagtctttttatttaattaagttttccaataggtaacccttatatgggagggggttttaaggttgggttcttgggtaataatggcttcaactttttttttaaccctccatggcctttggg

SEQ ID NO: 161386 - DNA, 315 bp, Arabidopsis thaliana columbia
ccttttggatttccgggtccgaccacacccttccgttttttaaatccgggcggcgaaaatgaatttcatcccaagagggccctttcttcccaaaaggaccaggaaggttattttaacagcttcctccaccaggaggcgtgggttattgagctttcctttttcaaccgatcttgtgaggaagtccaatgccagacccatcccattccgtaaggccgccaaggtccaaatcgtccgtggtccttacaagggccttgaaggcaaagtttgttcaggtttcccgccccaaatggttgtttcacatttggggattcacta

SEQ ID NO: 161387 - DNA, 332 bp, Arabidopsis thaliana columbia
tggaattccggggcggaccaacccttccgtaaggttttatatttggaaaaaattttgctccttttcaaaggcctaagggaccgggaggttttgtaaggtgatgaaccaggagcacccccctctgggtaaaatgtggccgtccaagtttcaaaatccagaaaagtgtttgttttgttggtgctaatccggcctttggtaagaggccttacacctggggggggaaggcaatccttagaaggcctactggacctgtaaggatgaggttctttcgtatggtccctgtaagtttaaagaccggtttaagagaggtgccctatgccaatccatggaac

SEQ ID NO: 161388 - DNA, 363 bp, Arabidopsis thaliana columbia
gaatcccggggtggcccacacgcgtccgttcctatccttaagggttttaaacccttttttggaacccggatccttaaaacccaagagggttgcaggatttttttattccatgggagtttaagatggcccaaatttccccctttgttggcaggcctttgcccgttgctttgaacgtttactcggggggttttagaagtctgttgaagtcctttatggccaattccccaattccggaatttttgaccatggaaaccggttttggggaagaactaggggcctaagattctgtggctgtgggtcccgttgttcttaacaggaatatttttcttcagaggcattttttgggtttgcaagaagctgttt

SEQ ID NO: 161389 - DNA, 301 bp, Arabidopsis thaliana columbia
  unsure (1)..(301): unsure at all n locations
gaatnccggggcggaccacacgcttccaatctaatataaaattgcaggcggtttatgttgttttggaggaggctgaaaagaagatgggggaggagtattcaagggacgcacctgcttaatttgatgcttaatacaacccatgggttgttgaaggaggggatgtttcctattctgaacctaaggccggggagaccaaattagttttttgcgtggaaccctttgtgaaggaccccacctttaatgattggctataggggaaaggttgaaaatttaatgaccaatattttaatgcattttaatg

SEQ ID NO: 161390 - DNA, 256 bp, Arabidopsis thaliana columbia
gccgccgccccaaagagggggtgtttggtttccatgggcccattggcaatggggttaatggtgggggcaaacatcctggtggccggccctttttcggggggttcattgaaccgggggggttctttgggcccggccgtggccgggggggattccaccaccattgggttctactgggtgggccccttggtgggggggggcttggccggcctggtttaccggtccgtttacatgtgcggggaccacgcccccgtggcca

SEQ ID NO: 161391 - DNA, 416 bp, Arabidopsis thaliana columbia
cgaagtaccaactaaggttttggtcggggaagggccagggaacccattcgatgaaccaggggaggctcaagttgaaactccgggggttggggggatcaagaaagatgaaaaagctccggttgaaactccggtggttgggggggttgaaagcaaaccaaaggaagttttttaggccaaaaaaggggaagaattttatgaaaagaagccaggggaagctccattggttttgggggaagagaaaaacccataggcctagggggtgaaacccgccggggaagcctccgtgccagctccattggaaaaggctgtttagttaatttgaagaaaaaaactgttttttgaaagacaaaagaagaagaaattgttggcaggtaatttttttgctactttaaagcctttggggcttgttttgtttt

SEQ ID NO: 161392 - DNA, 384 bp, Arabidopsis thaliana columbia
tccgggttggccccacccgtccggttaaggggggtgaaaaatgggcaccggccccgtttttttcacccaaatcgtttccaaaggccactgtttccaaatccggagctggggtttctgtccagaccgccattgccgtaaatggcggcaattccggccggggatggaagttggcgaacctggcctaagcggctggatggtcccagttcgacccagccttcaccgaagccccgtttggccaatccgggcctattagcttggaaagggaagattccaggtttggttattacgatggacctcatccttactatgaaggagaggtccaaaggggaccattttggggagcaattgctgttgacattgctgctggggaccaaactaatgggt

SEQ ID NO: 161393 - DNA, 368 bp, Arabidopsis thaliana columbia
gatttccgggtcggccccaggcgtcggttttttggttaacatcggaatccttcaccttgggccttccggccaggcttggtgatcagatctccgccgctttcctggtggctggcctggaccaggaccctgggggcaaagtggctggggggactggtcccaagactaacatggtcatggttttgggggaaataaccaccaaggttaacgttgtttccaggcagatggttcgtaaaacatgccgggggatgggattcgcttttgctgacgttggtttagatgctgccattggcagggttttggttaccatggagcaccaaagtcctgccattgaccaaggggtcaatggtcttttaaccaagaagccagag

SEQ ID NO: 161394 - DNA, 245 bp, Arabidopsis thaliana columbia
gccccctcatttgggtctttggttttggccacccccggccaggccaatggcttatttttattggcttacaggcccccaggcttaaccgaggcttaattcctttcttaaaccatccttatgaattttctctgctcattccatttcctatggccggggtccttttcttttttatgggacaatttctatcggatggccaatggcctgttttatgatttgggattttttttaaaaagaagaaaaatatt

SEQ ID NO: 161395 - DNA, 419 bp, Arabidopsis thaliana columbia
attccgggtggaccaggcgtccgggaaaaaccaagaaccgggaggatgaggttttggcggaccagctaactgtggaacagatctttgattttaaggaagcttttagccttttcgccaaagatggagttggtggcttaaccacaaaggagctgggaccagggttgcggccattagggcagaacccaccagaagctgagctccaggacatgttcaacggggttgccgctgttggaaacggacccattgccttccttgggttcttaaacctatgggctaaaaggatgaaggccccagcctcggaggaggagctgaaggaagcttcaagggggttcgacaaagaccagaccggtttattatccgttgcaaagcttggccatgtgttgacgattctaggggagaaactgactgttgaaaaggtc

SEQ ID NO: 161396 - DNA, 217 bp, Arabidopsis thaliana columbia
acccttggccacctaaaaatcttcccagttgggggaaggtggccaaaatagacctggcttttgccgcattcctatatttttaaaatggatggtgggggggttggggaaaagggcggcttttttaggcaaatcctgccggaacctgagttttccaagctggagtaacggacctgggagggtttcgccggaacctggaaaaccatggaatctttcctct

SEQ ID NO: 161397 - DNA, 449 bp, Arabidopsis thaliana columbia
atacgaatacgttagccaaggccttaggcagtacaacttggacaacatgatggatgggttttacattgctcctgctttcatggacaagcttgttgttcacatcaccaagaacttcttgactctgcctaacatcaaggttccacttattttgggtatatggggaggcaaaggtcaaggtaaatccttccagtgtgagcttgtcatggccaagatgggtatcaacccaatcatgatgagtgctggagagcttgagagtggaaacgcaggagaacccgcaaagcttatccgtcagaggtaccgtgaggcagctgacttgatcaagaagggaaagatgtgttgtctcttcatcaacgatcttgacgctggtgcgggtcgtatgggtggtactactcagtacactgtcaacaaccagatggttaacgcaacactcatgaacattgctgataacc

SEQ ID NO: 161398 - DNA, 429 bp, Arabidopsis thaliana columbia
ctctgcagctgatcgatatacaaaggaaagaagcagtattgttgtgattggacttagtattcacacagctcctgttgagatgcgtgagaagcttgctatacctgaagctgaatggccaagagctattgctgaattgtgtggtttgaatcatattgaagaagctgctgtgcttagtacttgtaaccgtatggagatttatgttttagctttatctcagcatcgtggagttaaagaagttactgaatggatgtcaaagacgagtgggatcccagtttcagagatttgtcaacaccgttttctgttgtacaacaaggatgctacacagcatataattgaagtctcagctggtcttgactctcttgtcctaggagaaggttagatccttgcacaggtgaaacaagttgtgaaagttggtcaaggagtgaatgg

SEQ ID NO: 161399 - DNA, 446 bp, Arabidopsis thaliana columbia
gtgcgataagagtacaatcatcaaacgtgcttctgttcccgctagggatttgaggatactgggccctgtcttctctcactcctctaacattctcgccagagagaaagctattgttgtgaatttagaggtcataaaggcaatagttactgcagaagaagtgttgttgttggatcctctccgtcctgaagttcttccattcgttgaacgactaaagcaacagtttcctcagaggaatgggaatgaaaatgcactgcaagcttctgcgaatgtacaatctcctcttgatccagaagctgcagagggtttgcagagtgagcttccttttgagtttcaggtcctggagattgcacttgaggtcgtctgctcatttgttgataaaagtgtggctgctcttgagacagaagcttggcctgtccttgatgaactcactaagaatgtcagcactg

SEQ ID NO: 161400 - DNA, 347 bp, Arabidopsis thaliana columbia
aaaaccgggccgaccacgcgtccggacttaaaatctctccaaaagcctaaagctatctttgcaaatctctcgcgactctctctgggaggatgcaaatcttcgtgaaaacactcactggcaagactatcactctcgaggttgagagctctgacaccatcgacaatgttaaggcaaagattcaggacaaggaaggcattcctccggatcagcaaagattaatattcgccggtaaacagctagaagatggccgtaccttggccgattacaacattcagaaagaatcaacccctcatttggttctccgtttaagaggtggtatgccaatctttgtcaagactttgactggc

SEQ ID NO: 161401 - DNA, 401 bp, Arabidopsis thaliana columbia
cggacgcgtgggcaaaaaaatcatcgtgaaacgttcgaaggccattttctttggacgaccatcggcgttaaggagagagcttagatctcgtgccgtcgtgcgacgttgttttccggcttgatcaaaatggggttgtcattcggaaagttgttcagcaggctctttgcgaagaaagagatgcgtattctgatggttggtcttgatgctgctggtaagacgactatcctctacaagctcaaacttggagagatcgtcaccactattccaaccattgggttcaacgttgagactgttgaatacaagaacattagcttcaccgtgtgggatgttgggggtcaagacaagattctgtttattggggagacattactttcagaacacacaggggactttttttttgt

SEQ ID NO: 161402 - DNA, 441 bp, Arabidopsis thaliana columbia
caaccacattctccactgcaatctcccacataaaccctaactccatctcattccatggccttcgtcccctccgtctaggtggctcctcctccgccctacccaaactatcaaccaccgggagaaaatcctcctccgctgtcgtgagagctgagctaagcccttccatcgtcataagtctcagcacaggtctctccctcttcctcggccgtttcgtcttcttcaacttccagagagagaacgtagcaaaacagggcttaccggagcagaacggaaaaacccatttcgaagctggagatgatcgtgctaaggagtacgtcagtctcttgaaatcgaacgatccaattggattcaacattggtgatgttcttgcttggggttctattggacacatcgttgcttactacatcttggcttcttccagcaatggatacgacccaagct

SEQ ID NO: 161403 - DNA, 425 bp, Arabidopsis thaliana columbia
gggagatgcggcgtcatctaatgttgaaaagcatctgagtcaagcgaagctaaaggagataggaggaaacaacatatttgcagatgggaaagtagaagcaagagactatttaggcggtgtccgtaaaccaccaggtggagagacaagcatcgcacttgtttaaaatcatctttttcggtaacaacttaactcttttataaaccgcggttgttcggtgtgtgttcttgtggtttcccatacacttcagctcaaagtgtgatttgtattttgcggtttcgtggttgttatttttattgagttggtttttaagccgttagggctttctaatgtaagttcgagcttaaactgttgggagattataagcattactacgggacagaggatgttgcttgtttcagaagttattgtttttcttttccgggtct

SEQ ID NO: 161404 - DNA, 450 bp, Arabidopsis thaliana columbia
gaacaatggcttcctctatgctctcttccgctactatggttgcctctccggctcaggccactatggtcgctcctttcaacggacttaagtcctccgctgccttcccagccacccgcaaggctaacaacgacattacttccatcacaagcaacggcggaagagttaactgcatgcaggtgtggcctccgattggaaagaagaagtttgagactctctcttaccttcctgaccttaccgattccgaattggctaaggaagttgactaccttatccgcaacaagtggattccttgtgttgaattcgagttggagcacggatttgtgtaccgtgagcacggtaactcacccggatactatgatggacggtactggacaatgtggaagctttccttggtcggatgcaccgactccgctcaagtgttgaaggaaggggaagagtgcaagaaggagt

SEQ ID NO: 161405 - DNA, 179 bp, Arabidopsis thaliana columbia
tctcggtactggagcttcatgacaaatccgatatgctcttgttcctatgaatgcaaggggattcatgcttggtgctgaccaacctgttatccttcacatgttgggcattcctccagctgatgaagctttgaacggagttaagaaggagttgatcgatgcttctttcccttttcttaaag

SEQ ID NO: 161406 - DNA, 246 bp, Arabidopsis thaliana columbia
aaatccctagctattaccttactcgttgttctcttttgattttcatttcccgaaggagcgggttctcaggatatgctggtcgatctctgagaagaaagggatttgcaaatttgagaattcacattttggattaagatagaaacgatgtcgtctgagtcaccgaatttgcctgctgctgcggtaacagtaccagataatcattctccttcttctcctgatgtaactgttgtagaagcttgaagcgat

SEQ ID NO: 161407 - DNA, 430 bp, Arabidopsis thaliana columbia
agccgcttaagagcttatcatctttgtgcttcctgcaaatagctctttgctgttgatcttggtcctccatcaacaaacatgggtaagacacgtggtatgggagctgggcgtaagctgaagagactccgaattaaccagaggtgggctgacaagcagtacaagaagtctcacttgggaaatgagtggaagaagccttttgctggttcttctcacgctaaaggaattgttcttgagaaaattggtattgaggctaagcagcctaactctgctatccgtaagtgtgctagagttcagcttatcaagaatggaaagaagattgctgcctttgtccccaatgatggttgtttgaactacatcgaggaaaacgatgaggtcttgattgctggatttggtcgtaagggtcacgcttggggagatattccccgagtta

SEQ ID NO: 161408 - DNA, 446 bp, Arabidopsis thaliana columbia
gttaaaccagagtaaagcttgaaactttggactaaaagaatggcgtctttgggtgtgtcggaaatgcttggtactccccttaacttgagggcagtttcaagatcgtctgctccgttggcatcaagcccatccacgttcaagactgttgctctcttctctaagaaaaagccagctcctgctaagtccaaggctgtctctgagactagcgatgagctcgccaagtggtatggtcctgacaggagaattttcttgcctgatggtcttttggatagatcagagatcccagagtacttaaacggtgaagttgctggagattatggttatgacccatttggtcttggaaagaagcctgagaactttgctaaataccaagcttttgaattgatccatgcgagatgggctatgttaggagcagctggtttcatcattcctgtagctttaaacaa

SEQ ID NO: 161409 - DNA, 451 bp, Arabidopsis thaliana columbia
ctcctatatctcttcaatctgatataactacccttctcaatggcttctaattaccgttttgccatcttcctcactctctttttcgccaccgctggtttctccgccgccgcgttggtcgaggagcagccgcttgttatgaaataccacaacggagttctgttgaaaggtaacatcacagtcaatctcgtatggtacgggaaattcacaccgatccaacggtccgtaatcgtcgatttcatccaatcgctaaactccaaagacgttgcatcttccgccgcagttccttccgttgcttcgtggtggaagacgacggagaaatacaaaggtggctcttcaacactcgtcgtcgggaaacagcttctactcgagaactatcctctcggaaaatctctcaaaaatccttacctccgtgctttatccaccaaacttaacggcggtcttcgttccataa

SEQ ID NO: 161410 - DNA, 255 bp, Arabidopsis thaliana columbia
cagttccaaaaaaacgtacttctatctcgattaagcgtattcgtaaaaaaatttggaaaagggggggatattggacatcgggggaagctttttcattagggaaatcactttctacaggtaattcaaaaagtttttttgtacagcaaaataaataaaaaacactataataattagaattagcctaacttaaaaaccaatttgtttaaatacatctaaaaaaaataggaagcaaaagaagaaaaaaagacaatatat

SEQ ID NO: 161411 - DNA, 437 bp, Arabidopsis thaliana columbia
gcgtccgcccgtttatatctctatacatttctctttctgtattggcgagattagggcgtgtggctagaggctcctccttctttggctttggtaaccgtttctactctacttcagccgaagctagccacgcgtcgtcgccttcgccgtttcttcacggcggcggagctagcagggttgctccgaaagatagaaatgttcagtgggtgtttttgggatgtcctggtgttggaaaaggaacttacgctagtagactatcaacccttctcggcgttccttacatcgccaccggcgatctcgtccgtgaagagcttgcattttctggacctctctctcaaaagctatcggagattgtaaattagggaaaattggtttctgatgagatcattgtagacttattggccaaaagacttgaggctggtgaagctagaggtgaatca

SEQ ID NO: 161412 - DNA, 441 bp, Arabidopsis thaliana columbia
ctgtgttcaaaacaagttcattcgatctatagagacgaaacaaaaagagagatcgtacgcaaaagtttccgatatggctcgctcgtttggagctaacagtaccgttgtgttggcgatcatcttcttcggatgtttatttgcgttgtcctctgcaatagaagaggctacgaagttaggatcagtgatagggatagatcttggtactacttactcttgtgttggtgtttacaagaatggtcatgtcgaaattattgccaatgaccaaggaaaccgtattacaccttcatgggttggttttactgactctgaaagactcattggtgaggctgctaagaatcaagcagctgttaatccagagaggactgtcttcgacgttaagagattgatcgggcgaaaatttgaggataaggaggttcaaaaggataggaaacttgtacctta

SEQ ID NO: 161413 - DNA, 454 bp, Arabidopsis thaliana columbia
ccacgcgtccgttgggtcactcacaaagtgaaacattgaatcattttcaatgagccatgggttttctcgcacgcgggctattacgtaggcaaaaggcacctgtcgttctcttttacgtaaatgctaaatgccaagccggacgatcaggatacgaggcttaccttgtcactcacaatctccttatctctcacgcagaagcagttgaagcttaccggaaatgcgaaaagtgtaaaggtgggaagatcggaattgcacatagtcctgcttggttcgaagcacatgaccttgctgattcacaagacggtgcgtccatcgaccgtgcacttgactttattttgggatggcatctaaacacaactacatttggagattatccacagatcatgaaaagacattgttggacatagattgcctaaatttacaactgagcagaaagcaaaactggaagcttcta

SEQ ID NO: 161414 - DNA, 260 bp, Arabidopsis thaliana columbia
gaccacgcgtccgaaaaagctttaacctcagcctttaaattttttttcgatcatgccgaccagaaacatcgccaggtgtgtagtccaagaagaggggtatcaccccaacgcacttagggcggcgctcgctgagtttatctcgactttgatcttcgccttcgccgcctcaggctccagaattgctttcaacaagatcactgacaatggagcaaccactccttccggcctcggcgtcgctgtcttagcttatgctttcggta

SEQ ID NO: 161415 - DNA, 362 bp, Arabidopsis thaliana columbia
accaaaaccaagggcgagcaccaccacaagcatcttcacctccgccacaaagctactatggagaccatctcttcctacaggactacttatctccaccgctcgaacagcttggacaaccgagtggcagatcatgatgacccaactcgctccataccattcatccgggtcatacacccgacccacttcaaaatttcgtctcgacccgacccaattcacttccgctgcttactccgagctccacctctacgttggtcttccttgcccttgggctcaccgcaccctaattgtccgtgctctcaagggtttaaacgacgccgttccggactcaatcgcatcacctggtcaagatggatcatgggaat

SEQ ID NO: 161416 - DNA, 448 bp, Arabidopsis thaliana columbia
agaaatggggttccttaagccaaccatggcgattctttttctagcgatggtcgccgtttcatcagccgtggacatgtcaatcatctcctacgacgagaaacatggcgtctccaccaccggtggccgtagcgaagccgaggttatgagtatctacgaggcatggttggtgaaacacggcaaggctcagagccagaactctcttgttgagaaagatcgacggttcgagatctttaaagacaatcttcgtttcgtcgatgaacataacgagaagaatcttagttatagattgggtttgactcgttttgcggatcttactaacgatgagtatagatccaagtatcttggagctaagatggagaagaaaggtgagagaaggactagcctacggtacgaggctcgtgtcggtgatgagctaccggagtctattgactggaggaagaaaggagcc

SEQ ID NO: 161417 - DNA, 280 bp, Arabidopsis thaliana columbia
ataatatttaaactacaaacattttaagtttccactaacaatgggtctaatcgccggtaaagtgcgtgtgtttgttttggggggtgctctggtcacagattttcctatggaagaagcaaagtttggtgatgagaagcccttgtttcctcaccctcaccctcatcctttcctccacaagaagggctttaaaaaagaattcggcgacttaggtggtggtggtggtatcagcggtggaggcggctttagagcaggtggcggttgtattggaggcagtgatgga

SEQ ID NO: 161418 - DNA, 407 bp, Arabidopsis thaliana columbia
ggggggcgttcgctctttttcatcatcaatctatcaaatcaattttcaacagcaaaattatctttctgcagatgttaaccctaattggtgtctggggtctccttatgttcttctagaatcggcgactcttacttttttttctttctaattatccttttctgatggattctggaatccatgtaattccccattagcgctaaaaaccctagctgtcgaagaccttagattactgcagaaatgttataatctgttttcatcttttcccgatttgaggtttttatttattttggttgggtgagagaatccgtatctagagattaaagccttgtgtagttaggatgagctagttttctttggctttgagctgtattttctcttttctgtaatcctttctctgtacatatatt

SEQ ID NO: 161419 - DNA, 292 bp, Arabidopsis thaliana columbia
aaaacaaaagaagagagagagagagagagactatagaaacagagagattctctcgaaaatggccaccattagagtaccaaacgaagttccttctccagctcaggactctgaaactctcaaacaagctattcgcggatggggaacagatgagaaggcgattatacgagttttagggcaaagagaccagagccagagaaggaagattagagaaagttttagagagatttatggcaaagatcttatcgatgttttatccttcgaactgtctggtgatttcatgaaagctgtgtat

SEQ ID NO: 161420 - DNA, 448 bp, Arabidopsis thaliana columbia
aatgatttgatgatcttcttctcagtttatctgggaggttatgatatggaggagaaagctgctcgagcatatgatcttgctgcactcaagtactggggtccctctactcacaccaatttctctgcggagaattatcagaaagagattgaagacatgaagaacatgactagacaagaatatgttgcacatttgagaaggaagagcagtggtttctctaggggtgcttccatctatagaggagtcacaagacatcaccagcatggaaggtggcaagcacggattggtagagtcgctggaaacaaagatctctaccttggaacttttggaacccaagaagaagctgcagaagcttacgatgtagcagcaattaagttccggggcacaaatgctgtgactaactttgatatcacgaggtacgatgttgatcgtatcatgtctagtaacacac

SEQ ID NO: 161421 - DNA, 313 bp, Arabidopsis thaliana columbia
aagacttttaatgatcggaaggaacaagatgattaggtcccacgaaccaccatacacactgcgagttttaaataagagcttggggtcagttgttgctcatagacttaaccaatcaaccatgtctaagatgatgatgttgcaacagtatcagccttttttttctctccttacttcttttatgtttgacttcaatggcgctaatctccatttacatgttcagtacaagaggaagtgttctttattcaaaattgcgctctctatgttttcattttctttgcttaaattaatatttctttttattactttgtttctt

SEQ ID NO: 161422 - DNA, 274 bp, Arabidopsis thaliana columbia
gaccatttggccgatccatttaacaacattttatgggccttcgccaccaactttgttccgggaaagtgagccaagttttatgggtattttgcttcagtctttgcttcgtgagtgtgagaggagaatgagagcttgtttagatgtaaaatttgcaagactttgtatttttttcattaatcaaataactcgtttttctctcatataaaaaaaaatttttaaaaattaataatatatatattttgggcggccgttctagatgatccaagctttactt

SEQ ID NO: 161423 - DNA, 74 bp, Arabidopsis thaliana columbia
caccgtagctgacggttacagcaaaggaactgttctcggagctgagattattggaacgttgttccttttataca

SEQ ID NO: 161424 - DNA, 452 bp, Arabidopsis thaliana columbia
cattcgttaaagctgttttcgccgaagctattccgatcaaagttggtggtcctccacttccttccggtggcctacctggaacagataactcagaccaagcaagagacttttcattggcattgaaagatagattttacatacaaccattgtcaccaacagaagctgcagctagagccaaagattctgctaaagagatcatcaacgttaagtcatttatcgacaaaaaagcttggccctatgttcagaacgatctccgtttaagagcatcgtacctccgttacgatctcaacaccgttatctccgctaagcctaaggaagagaagcaaagccttaaagatctcaccgcaaagcttttccaaaccattgacaacttggactatgcggcgagatcaaagagtagcccagatgctgagaagtattactcagaaactgtctcgagtttgaacaatgtt

SEQ ID NO: 161425 - DNA, 373 bp, Arabidopsis thaliana columbia
taatgatttatatttgttaaataactctttttctcttcaatgactaatgaaactttaagtggcggatttagaagaaacagggggcacacactctgtgtcagatttggccgttgcattttccacatccataagagtctttgttctgcttgtgcttatcctgtcgctctcatgagttcttacaactgtagtttgaagtcaatccgttgtaatacatactgtaactgtatatgttaggtatcttaccattgttcctcttatgttcaagactcttttcagataggttttcctatcctatccaagtaacaaggtagtcgctttattatcttaaacttttttttgtcatcaaatcatagtgaattcttttctattattt

SEQ ID NO: 161426 - DNA, 475 bp, Arabidopsis thaliana columbia
cggtccgaccacgcgtccgctctctcaatcccggcggctaagatgaagtacaacccaagagtgacctcttctcgcagaaagaacaggaaggctcatttcacagcttcctccagcgagaggcgtgtgataatgagctctcctctctccaccgatcttcgtcagaagtacaatgtcagatccatgccgatccgtaaagacgacgaggttcagatcgttcgtggtacttacaagggacgtgaaggcaaagttgttcaggtttaccgtcgcaaatgggtgattcacatcgagagaatcacgagggagaaggtgaatggaacaaccgtgaacgttgggattcagccgtcgaaagttgtgataacgaagcttcgtcttgataaagataggaaatcgcttttggagaggaaggctaagggacgtgctgctgctgataaggagaagggtactaagtttacgtctgaggatgttatgcagaacg

SEQ ID NO: 161427 - DNA, 270 bp, Arabidopsis thaliana columbia
tcatgtggggccgcacggaacattctctacagacgccaacacgtagtagacctaatgccgcagcaacctctctcgtccctttcttgaaattctgcaccggaatatcgaatgtcgggaatctgagtaatgggttttctctaaaatctccaattaatccgggggttctgttaaagtctcgtcctttcactgtccaagctagagctgctgcagaaaaaaccgttcacgatttcaccgcttaggacattgatgggaaggatgttgctttgaaca

SEQ ID NO: 161428 - DNA, 447 bp, Arabidopsis thaliana columbia
ccacgcgtccgaaattttctcgagaaaaatgtctcgctgtggagtaaactgcggatgtggatctgcctgcaggggcggcaacggttgtggaggtgtgcaaaatgtaccctgacttgggattctccggcgagacaaccacaactgagacttttgtcttgggcgttgcaccggcgattaagaatcagtacgaggcttcaggggagagtaacaacgctgagaacgatgcttgcaagtgtggatctgactgcaagtgtgatccttgcacctgcaagtgaagaagcctttttaaataagcagagataatcgagtctctttaattaattaagttattcaataagtaaaccatatataggatggtgtttttaaggttggtttatgtgtaataaaggcttcagcttatcttatatccgctcatttgtttttgtgttagttttgatcatttttttt

SEQ ID NO: 161429 - DNA, 318 bp, Arabidopsis thaliana columbia
gtataaaccatctggagttttagcttttgattaccacaacggcccccaagaaaggagggagggtcgcttctaagaagaaggcggctgacaaagtttcaaaccctatattctagaggaggcctaaccactccgatattggtggagcttcaccttctaagaaggatctctttcgctacatcaaatggcccaaatccatccgtcttcaaaggcaaaagaggatcctcaagctaatgttgaaggtccctccatctcttaaccaattcaccaagactcttgacatgaatcttgctaccagcctctccaaggtccttttgaatt

SEQ ID NO: 161430 - DNA, 378 bp, Arabidopsis thaliana columbia
ctactatacttcagtgttttcaaaccatttggagaaacctgatccttcaaaaccaagatggatgcaagattctcttattacatgggagtctaagaatgcgcaaaattacgccattggtagcaagcctttgaccgctgcattgaacgtttactcgagaggttttagaagtctgttgaagtacattaaggacaaatacgcaaatccggaaattatgatcatggaaaacggatatggagaagaactaggggcctcagattctgttgctgttggtaccggttgtcataacaggaaatattatcttcagaggcatcttttgagtatgccagaagcttgttgcatcgacaaagtggaatgtacaggatacttttgatggtcatt

SEQ ID NO: 161431 - DNA, 449 bp, Arabidopsis thaliana columbia
gttgcttctcgtggaaaagaaacgtccgcaattgtaggctcaggactagcctcatcttgatcagatacttctacgcacaagcgagtcagcggctacatcagagagcatagagagcttaaagcaaacactaaggaagctacgcggtctaagcgcacgtgatctcgtaaaccacccgaatttcgatgcgattatagcagccggtacacgttacgaggtactcagctcagcttctattggttacatctctttgctagccaaatacaaaaccgtcattaaagaaggactcgaggcttctcagagagtccagattgctcaaacccgagccaaactgctaaaagaaaccgcaatggagaagcagagaaccgtagactcggttttcgcagcagcaaagaccactgctcaaagaggagacgcgttgcacatcagaatcgtagcgatcaagaaactgg

SEQ ID NO: 161432 - DNA, 440 bp, Arabidopsis thaliana columbia
gtagctatctaatataacattgcaggcgcattttgcggcttacgacgaggctgatcagaagcgggtgcttgtaccacaggcggagccgctcgctacatcagagagcatagagagcttaaagcaaacactaaggaagctacgcggtctaagcgcacgtgatctcgtaaaccacccgaatttcgatgcgattatagcagccggtacacgttacgaggtactcagctcagcttctattggttacatctctttgctagccaaatacaaaaccgtcattaaagaaggactcgaggcttctcagagagtccagattgctcaaacccgagccaaactgctaaaagaaaccgtaatggagaagcagagaaccgtagactcggttttcgcagcagcaaagaccactgctcaaagaggagacgcgttgcacatcagaatcgtagcgatca

SEQ ID NO: 161433 - DNA, 447 bp, Arabidopsis thaliana columbia
cgcgtccggccaccgccgccgaccccaataaggggtctttttttaccatcgcgcccatcgccatcggggtgatggttttcgccaacatccggggcgccggccccttctccggcggctccatgaacccggcgcgctccttcggccccgccgtcgccagcggcgactacaccaacatctggatctactgggtcggccccctcgtcggcggcggcctcgccggcctcgtctaccggtacgtctacatgtgcggcgaccacgcccccgttgccagcagcgagttctaattacccatttcgccatcggcaacacgcataaaaatggtggtcactccatcgtcagaatcttgtgaggatgtgttgtgaaggactgatttggttcagatggggaagaaggcttttgttgcgaggatgtgacacttgggtgatgatcgatccatgtttagtttct

SEQ ID NO: 161434 - DNA, 433 bp, Arabidopsis thaliana columbia
cgaaaaaccaaagaaacgagaagaagaagctatggcggatcagctaactgatgaacagatcgctgagtttaaggaagcttttagcctcttcgacaaagatggagatggttgcatcaccacaaaggagctgggaacagtgatgcggtcactagggcagaacccaacagaagctgagctacaagacatgatcaacgaggttgacgctgatggaaacggaaccattgacttccctgagttcttaaacctaatggctaaaaagatgaaggacacagactcggaggaagagctgaaagaagctttcagggtggtcgacaaagaccagaacggtttcatatccgctgcagagcttcgccatgtgatgacgaatctaggtgagaaactgactgatgaagaggtcgaggagatgattcgtgaagcagattgtgatggagat

SEQ ID NO: 161435 - DNA, 449 bp, Arabidopsis thaliana columbia
ctaaagagccttttacttgcgccacactctcaccgcaatggccgcctcgacaatggctctcgcctgtcctgctttgaccggaaaggccgttaagctatccccggcggcctccgaagtatttggaaccggccgaatcaccatgcgcaaagcctccaagcccaccggtccatccggcagcccatggtacggatccgaccgagtcaagtacttgggtccattctccggtgagcctccgagctacctcactggagagttccccggtgattacgggtgggacactgccggtctatccgccgatcccgagaccttcgctaggaaccgtgagctagaagttatccacagcagatgggccatgctcggagccctaggctgcgttttccctgagctattggctaggaacggagtgaagttcggagaagccggttggttcaaggctggttcacagatct

SEQ ID NO: 161436 - DNA, 443 bp, Arabidopsis thaliana columbia
ctttcatcagccgttttgaatctccggcgacttgacagagaagaacaaggaagaagactaagagagaaagtaagagataatccaggagattcattctccgttttgaatcttcctcaatctcatcttcttccgctctttctttccaagctcataaaaaatggctgaggctgatgatattcaaccaatcgtgtgtgacaatggtaccggtatggtgaaggctggatttgcaggagatgatgctcccagggctgtttttcccagtgttgttggtaggccaagacatcatggtgtcatggttgggatgaaccagaaggatgcatatgttggtgatgaagcacaatccaagagaggtattcttaccttgaagtatcctattgagcatggtgttgttagcaactgggatgatatggaaaagatctggcatcacactttctacaatgagc

SEQ ID NO: 161437 - DNA, 400 bp, Arabidopsis thaliana columbia
gaaagaactaactacgttcctcgccaaagttgttctagctatgcggttcaagggattgggggggtgttaaatggctatggagtaggagatagtaactggtcgccattcacgaggaggggtgcttgggataacaacatgggaatatcagctgatttgattgctgctcaggctgtctcggcgctacagatatctgaaaatgctgatgggaacgcctttgtgttcaatgggatgttccggggatgacagatgccacgactcgtcctcattcggtttttaaaataaacatttgccttctgcttgctttggtgtcaatgctctgtttttttctcttgacgttagaccttatactctgttttcgtttcgctgtaatattaaagacgcaatttgagttgtatctatt

SEQ ID NO: 161438 - DNA, 425 bp, Arabidopsis thaliana columbia
catttccccaaatttcttttttcttctttgctatagccatgggaaccctatctctctggtgtgctcttaaaccttcactcgcgccatcaagactcaattcatcttcctccgcatcttcttcttcgtttcctaaaccaaacaatctctacctcaaacccaccaaactcatttcaccacctctcagaacaacttcaccatcgccattgagattcgccaatgcttcaatcgagatgtcgcagacacaggaatcagctattcgcggagctgaatctgacgtcatgggtcttctccttagggaacgaatcgtctttctcggtagtagtatcgacgatttcttcgctgatgctattatgagtcagttgcttctcttagatgctaaagatccaaagaaagatatcaaactctttaacaattctcctggtggt

SEQ ID NO: 161439 - DNA, 419 bp, Arabidopsis thaliana columbia
cgggccggcccacgcgtccgagaaaaaactcaaaaccgtttcatcatttcttcttcacacacattctcactcctcggggtcgctttctttctactcgggtttgctcccaccaagagaagccacaacatcactcaaatcctcgctgattctccagattactcttccttcaacagctactcttctcagactaagctcgcctactagatcaacatcctcacgactattacagttctcgtccttaacaatggctcaatgtctgctctctgccggaaaacattcactctccgttattaaaagccctttaagcctcctcgtcctcctcgattactactatccacaaaaactccacatgatctccaaaggcacaactctatttcaccacacttataccaaaccaccccgaaactcctccctgaaac

SEQ ID NO: 161440 - DNA, 291 bp, Arabidopsis thaliana columbia
accggaattgaaagaccgggccgacccacgcgttcgcttaacctccacctactatatcttcacttttttctacttctaccacttcttctacgtgtgggactttttatactcattggtggtcttctaaccaattattcttatctacgaccttcaccatcttctacctttcgaaactctattttcttcatactttcccgagaaattaacgaaatcatactgtgttaattgagactcctcctgaacataatatgctttgtgatttatcaagagaggcttctccaaaagatgaat

SEQ ID NO: 161441 - DNA, 420 bp, Arabidopsis thaliana columbia
aacctttgccacctaaaaatcttaccagttgtttgaaagttgccaaaatagagcttgcttgggtcgcattcctatatttttgagattgattgttggtgggtttgtgtaaatggcggctcttttaggcagatcctgccggaaactgagttttccgagcttgagtcacggagctaggagggtatcgacggaaactggaaaaccattgaatctatactctgctattaatcaagcgcttcacatcgctttggacaccgatcctcggtcttatgtctttggggaagacgttggctttggtggagtctttcgctgtacaacaggtttagctgaacgattcgggaaaaaccgtgtcttcaatactcctctttgtgagcagggcattgttggatttggcattggtctagcagcaatgggtaatcgagc

SEQ ID NO: 161442 - DNA, 392 bp, Arabidopsis thaliana columbia
gcgtacgcttttttgttcacatctgaatccgtcaacgttgttacatcccgacaagctttgtgatcagagggccgactctatcctcgaggcgggccttgaacaagaccctgagagcaaagttgcttgtgagacttgtaccaagactaacatggtcatggtttttggagaaatcaccaccaaggctaacgttgattacgagcagattgttcgtaaaacatgccgcgagattggattcgtctcttctgacgttggtctagatgctgacaattgcaaggttctggttaacattgagcaacatagtcctgacattgtacaaggtgttcattgtcatcttaccaaaaagccaaatgaggttggagcttgtgaccaacgttacatgtttgtgttttctt

SEQ ID NO: 161443 - DNA, 290 bp, Arabidopsis thaliana columbia
agaaggagtacccgggcgccttcattaggatcatcggattcgacaacacccgtcaagtccaatgcatcagtttcattgcctacaagcccccaagcttcaccgaagcttaatttcttttctaaaacattcttatgaattatctctgctcatttcatttcctattgtctgtgttctttttctctttatgagacaatttctatcggattgtcaaatgtctgatttatgaatatgtaatttatataaaaaaaaaaagaaaaaaaatcaaaaaaaaaagaagaaaaacacaacct

SEQ ID NO: 161444 - DNA, 471 bp, Arabidopsis thaliana columbia
aaccccggggacgccccacgcgtccgacaaaaaccatttggagtgggagcttgggacgatcacaatggccccaaagaaaggagtgagggtggcttttaagaagaagaccgcggagaaagtttcaaaccctttattcgagaggaggcctaagcaattcggtattggtggagctttacctcctaagagggatctctctcgctacatcaaatggcccaaatccatccgtcttcaagggcaaaagaggatcctgaagcagaggttgaaggtccctccagctcttaaccaattcaccaagactcttgacaagaatcttgctaccagcctcttcaaggtccttctgaagtacaggccagaagacaaagctgccaagaaggagcgtcttgtaaagaaggcccaagctcaagctgagggaaagccttctgagtctaagaagcccattgtagtcaaataccgcctcaaccatgtgaccta

SEQ ID NO: 161445 - DNA, 453 bp, Arabidopsis thaliana columbia
  unsure (1)..(453): unsure at all n locations
gataaagtgagtgaaaaaatggcaacggtcacgattctctcacccaaatcgattccaaaggtcactgattccaaattcggagctagggtttctgatcagatcgtcaatgtcgtaaaatgcggcanatccggccggagattgaagttagcgaagctggtctcagcggctggattgtcacagatcgaaccagacatcaacgaagacccgattggtcaattcgagactaatagcattgaaatggaagatttcaagtatggatattacgatggagctcatacttactatgaaggagaagttcaaaagggaacattttggggagcaattgctgatgacatttgctgctgtggatcaaactaatgggtttcaaggtttgatctcttgtatgtttcttcctgctatagctcttgggatgtattttgatgctccgggtgagtacttgttcataggtgcagg

SEQ ID NO: 161446 - DNA, 409 bp, Arabidopsis thaliana columbia
  unsure (1)..(409): unsure at all n locations
cccgggcggacccacgcgtataaacctagtnaaaaaatgatatcggcctttatactcacacccaaaacgattccaaagggcggtgattctaaattcggagcgggggcttctgatcagatcgtcaatgtctaaaaatgcgtcaaatccggccggagattgaagttagcgaagctggtctcagcggctgtattgtcacagatcgaaccagacatcaacgaagaccctattggtcaattcgagactaatagcattgaaatggaagatttcaagtatggatattacgatggagctcatacttactatgacatgataagtttaaaagggaacattttgtgtagcaattgctgatgacattgttgctgttgatcaaactaatggtattctagggtttgttctcttttttgaaatt

SEQ ID NO: 161447 - DNA, 346 bp, Arabidopsis thaliana columbia
ggtgacacctttcaggaattaccttcagctttactactacgccttacttagcctcaaaagaggtcgattttctatggtacgcgggtaggcatgcatctgctcatatcattgtcctctccagctattcgccttttgtgaagtataccccgcaatgtcactgtcttagtgaagagcttacaagagttgatagggagaaaacaccttggctaattgttttgatgcacgtcccaatatacaacagtaatgaagcacatttcatgtatggtgaaagcatgctagcagctttttaggagatgttttgttcaacactaagttgatgtaatctttgctgggcattttcatgcct

SEQ ID NO: 161448 - DNA, 413 bp, Arabidopsis thaliana columbia
caaagggcaggttccagcaaatgggaccccaaccaaagagatggagtttccaggccaggtccttaggttcgaagacaacttcgatgctcctagcattctaaatgtcttggccactcctcccgccaggaagtccataactgtttccggtcttcccgaaaagttcctttttcaggttaattacctcctagggaaccaggcttacttcggggagactgcctttaaggaaggctttgccaccattgcatgggcaccagcaaccattctggagtcatcatttaaggaagtgggggggaaaccctacttttacttgcctgggtggccaagaacggctgttggagacaaaggtgggaagcttcagctgttcccagcacccgggaatggagggaagctttacatttgcaaagcccaagctg

SEQ ID NO: 161449 - DNA, 341 bp, Arabidopsis thaliana columbia
tttccggggcggccccagccgtccgtaaaacccaaatctaataactccttttaattttttttaataagggcctaagtaacctaagccacggttgcattccattttttaaccggccttaaggcctaaaccatcaattattccgccacggtcggaatccaaactgcggctgtggcttaaccgaagcttccagggaagtcttttttaaggaactttggagccggggccgtagcggttggagtttaattggcttgggccggaaacgccatggcattagaagtcttttgggggggaggggatgggccgttggctttatttccaaccgcctttctttttgctaagtg

SEQ ID NO: 161450 - DNA, 424 bp, Arabidopsis thaliana columbia
tccggatccgcagttccggcccagccgtccgggatgatgaacctcaaagggtttgcagaccgattgtcacagccttcacgggctgttttaatatcctgcaaggttaagggaatccaattcgataaggccttgatttcctgggcgaaccgtcaccatttttctcctgaatccaaagattttaacccattggggaaggttccagcttttgttgatggcaggcttaagctctttgaagagaacccattcctgttttttttttcctcggggtttccaagggtggctgaccatgggtttccaaatgacctttccaaaaaagccaagattcactcagttttggatgggcttaccaccaatttacgtcggggggcacctggatttgtcctgaatagggtcctaggcccagctctcggccttcctttgaatc

SEQ ID NO: 161451 - DNA, 392 bp, Arabidopsis thaliana columbia
cttggtacacctccacaaatggtccaccacctcctcttaaacccccaaaaaccccgaattggcctaggaaggctcctgccgggaaacccactggtcctaccgccccacttaagctgggggttggcgcagacttatggggcctagttaacgtggtggtgggttctccaccaaagactcctggtggtccacttcttaaaggcctggctaatctggaagctgcggttggcctctgcaccgttcttaaagccaaggcctgggggattaatctcaaggttcctatggacctaacctggctgtggaactatgggggcaggaaagttcctaagggttcccaaggttctggaagattggggactttaaaagagaaaaatcccttgggttggctaggtttt

SEQ ID NO: 161452 - DNA, 374 bp, Arabidopsis thaliana columbia
  unsure (1)..(374): unsure at all n locations
gaatnncgggttggccccaggcgtccgttcttttttttaaggttggaaaaccaaaaatttctatttggtcggaaaaatcctgggggaaccggaggaaccttaaaaaaatgggggccattgagctttaaaccaacatggttggatgtggctggacttgcccaataagtggaataattggggattaacggaccgccgttttggcctgggaactaaccggtgccgtacctattcgtgggtttggcggcgatgttaggcctaatagcctcggttttacttatcctagccggtttttactggggctggttaacctccggggttaactccggcaaaggagtcgtcagggaaaaaaaaagccgtcctggagggaaggcggt

SEQ ID NO: 161453 - DNA, 209 bp, Arabidopsis thaliana columbia
ggctggcggtggttccctaggtccccaaagactaggaagggcgtaccaggcgacaaattgcttcggggagttgaaattaagcttagatccggggattcccaaataggtcaaccttttgaactgcctgctgattccatgagcaggcaagagacaccggcgaccatgaacttgcaaaacaactactggggtttttcattgaacagggcaaa

SEQ ID NO: 161454 - DNA, 473 bp, Arabidopsis thaliana columbia
gggcccggatttccggggtggaccacacccgtccggtggaacctttaaaccgggggggggggaaggaattggcgccttcgggaccgtccgtgacggaggttccgttgaaaggatcggcggaaaaccactccaggagctggaggagcgggacccatgttttcgttgacgccattggccaccacttccaaaaggtcgtggttaacaaaggcaaacatgactctaacgggtctttcaggagtggggcctccccatttgttggaaggaaggggttgtccaaggagaagaggaagattgtggttgagattaaaccattgccgaaaggaggactggttggtcacgtgttggaccttctaaaagattttgatataatctacaaatttattcccaattctgaggttagctgcgtctgcaaattcactttgttttggaagaggcgcaccgttgcctttcccgaaccaagcggttccttgaat

SEQ ID NO: 161455 - DNA, 460 bp, Arabidopsis thaliana columbia
cgggtcgggatttccggggcggaccacacgcgtccaagaagaagtaagggcttcctttatgttttcttttgccgttggggttacctccccggttaaagccaccatggtggttcaattaactggttggaagcaatccgtttttttccgggtaacccgaaaggccaacaacacctttacttccataacaggcattgggggaggagttagctgcttgaaggtggggccaccaatcggaaggaaaaagttggggactttattttacctccctgaccttactgacgtggaatgggctaaggaagttgactaccttctccgaaccaaagggattcctggggtggaattcgagtgggagcacggttttgggtcccgggagcccggaaccactcccggttcctacattggacggtcctggccaatggggaagcttccattgttcggatgcaccgactccgttcaaggg

SEQ ID NO: 161456 - DNA, 333 bp, Arabidopsis thaliana columbia
tttggcacattggctgttggggtagaacctgctcctggaagaagtaaaggccaaaccagctttttaagaaaccacctggctttagcgtgaagaggggtccaatggagctccccaatcttttggtcgccttaacttactcaacctggggttttggaggggggggaaggatgttccattggggttttgaagaagaggaggaggggttttgaatctcattttaaatttgggtggcaaaaaggcagggggcttcggaaactttatttgtctttgcttgaaggggccaggggtcctactgttagtcctcctcatggtaatcccaaggaggatgttgtt

SEQ ID NO: 161457 - DNA, 435 bp, Arabidopsis thaliana columbia
gttcgccccacccttccggagaaccctattttcaaatgggggccgaaattggaaagatggaggaggaggaggcgcgaccttcaaccgaagagaccaagattgtgcgaccttcaaccgagaagaacaagtttgtgcgatcttccaccgaacctggtagggaagaaaatcctaacaaggattccgttaccatctttgaaagcggggcgatccacttgcaaattttggaacgctttaaccaaaaatcggtttctgggtaaagcaccggcccattttttggggtttttgacaatggatccaaaggcctgtccagttagattccatctccgccgcaccaggggggaaaaagaagccccgttggttctttctttaaagcaggtggattggcttaatcaagccaggatatctaagagggttcactgcaacggcttgttgttt

SEQ ID NO: 161458 - DNA, 426 bp, Arabidopsis thaliana columbia
aaccaataaaaggttcaccttatccaagaggttccttcagtggtggtcctcaaaaaggtggtttagccggtaaccaagtggagggaaataaatccaccccaaaaatgtttatggtaacttacacggcggagcttattaatccagttccaccacaccgtattttttttgccggaggaacacgtaagaaaccttccgttcaacagacgagtaattttccgccgaccacttttggttacttattaatcggttccggggacttaagccgacaaatttgttttgcctgttgaggtccttctaccggggggggattttgtcggatataaaattctttttttttttgtcggtatttttggttagtcttttatttctttatatggtattgggttttggttatccttaatttttcatcctgtattttcatttttt

SEQ ID NO: 161459 - DNA, 416 bp, Arabidopsis thaliana columbia
gggtcgggatttccggggtggccccacccgtccaagcttttttttgtttatggccacgttggtttttgaggcgactttgttttgtttcgccaccgccgagtggttgcaaaacggggattcctttccgtttaggttccaggcccaaccggaggctgttatttttttttgcggggccaaaacccagccgattccggggattccgggggggtttttgccattggctggcaaaggagttggggtttggactactcctacctttgatcttggcaaatttttggcctgtttgcacggccttgatgggggaggggggaccaacttaaccgcagttatccaaatcgcccagttggcttttaagcttcgccaaaccaagattcaacgccaaaggattttggttttggctggaagtccattcaagt

SEQ ID NO: 161460 - DNA, 313 bp, Arabidopsis thaliana columbia
gggaattccggggcggccccacccgtccgttacccccaagaccccttatgggtttttcctttcccgatccgtccaatctgctggccagggatgtttgttgctctacgcgtggtttaattttgccggttccaccagcgtccaggaggaagatttgaagcagttccgtcattggggaagcagagatcccggtcatcctttgaatttcgggacccctgaatttgaagtaattactggcccttttgaccaagaaatcgttaatgctgtgggtttagcccttgctgaaaagcttggcctgctaaattaaacaaacctg

SEQ ID NO: 161461 - DNA, 442 bp, Arabidopsis thaliana columbia
atgagctggaaaccaccgccgtccaaatcctaggccagccccgccatgtcctatcctttcttggcttaactaccaggtttgggaagaagtttcaaaggggggaggagatgaagttaaaatcctctgtttttaaggaaaatctggatttaatcagacccactattaaaaaaggcttttcctttaaacttttttttaatcagttggctgcctggccttggcaggagtttcaaagatccaagctgggacctgctcaaaactgtcctgctcctttaaagggtggccccaaaaccactgaacctccagttccagccccaaaaaatgggaaggaagatggttttgttagccctgtgaaagaccagggccattggggttctggttggccatttagcccacctggagcttttgaagcagcttaccatcaagcttttggaaaaggaatttt

SEQ ID NO: 161462 - DNA, 427 bp, Arabidopsis thaliana columbia
gggtctggatttccgggtccgaccacacccgtccggggttatcctgggcaactctgaaaggagggctttcctaaaggaataaaccaagtcggcgggggccaaggttgcctatgcactggctaaaggttggaaaggaatggctggggtgggggaaactctggaggagcgggaagctggtccgcccttggttgttggggttgcccaaaccaaggttttggccgtccggtggccaaacgggccaaaggtggcattagcctatgacccagggtgggccattggacccggaaaggccgttggcccaccccaagctcaaaaagtccacaatgagctgaggaaatggctggccaaaaacgtaagggctgttgtcgttgttccaacccgaataatttatggaggatcctccaatgggggtaactgcaaggagcta

SEQ ID NO: 161463 - DNA, 391 bp, Arabidopsis thaliana columbia
gggtcgggaattccggggcggaccaacccttccgcaaaaccgtccaaagtccttaggaccttttttggagaatccaccgccctacctaacgggggaataccccggaaactacggttgggccaccgttggactttgggttgacccggaaccattcgttaaaaaccgggggctggaagtaatcaacagcaaatgggctttgtggggggctctgggatgcacattccttaagattttttccaagaacggggttaaatccggagaacccgggtggttaagaggcaggttctaaaattttttaaaaaggaggtcttgattacctggaaaaccctaactggatccacgcgcaaagatttttacccatctgggctgtcaaagttgggctaatggggtt

SEQ ID NO: 161464 - DNA, 445 bp, Arabidopsis thaliana columbia
cgtccgttcagggttcccaccagcaccagatccggagtcccttagtcctcccccatatccgtttccgaggggcttattttccggtttggcgtttttgcccttaatgtccttaaacaaacttttaaaacctttcgagtaaccgtccattgcagcggccaaaggctggctcccattggcgtatttttgcgctttcttagactcccatgtattaagagaatcttgcttccatcttggttttgaaggtccaggttcctccaaagggttggaaaccactgaagtttagtagttgagcccaccgaattcggtggaagcttccagtttggctttctgctcagttgtaaatttaggcaatctttgtccaccaatgcctttcatgacctggggttaatctccaaatgtagtggggcctagatgccatcccaaattaaagtcaagtgcccggtcg

SEQ ID NO: 161465 - DNA, 391 bp, Arabidopsis thaliana columbia
gcttaaccatattacttttataatccacagtgttttcgggggccggccaccattccggcgggaaaggcgttgttcaaacttgtcccggtaccatttgttgcagtcagtccggttcctgtggtcccaccggggactactgttttccgaccaacaactgtaaaagcaattgttggggaagggggcctagcggcccaggggggagcgcgtctaacgtcccccccacctaccttttttttattccggcccaaattaatggggttttgaaagccggaagtgctttttgctccacttggattgctgttaagccgtccccttggcggaccaggtttggttggaccgctttttgcgggccggcaggacctcttgtacaagctttttgcggcaggggttt

SEQ ID NO: 161466 - DNA, 458 bp, Arabidopsis thaliana columbia
gaagccggggccgccccacccttccgattaatactcctgcccctgattttttttctttttcaaaaagccaccttcaaggccggactgtgtttaatatccaaaggaggggaatttgaaaaatttgtcccgaaccctttattaaaggaaatggctgaccaattcgccagtaaaaatctagtaccctttgttccaattttttcgtgtattttaacccaaaaaaaaattcttggaggtgagggtccaggatttttccaaccttctggttcatctgcaggaaaatctggttctcctccaaagtcaaaccttggtattggttgccaggaaaagctttgtaaaaaacatccttcatggtcccaaataggttttgatgcacctactaaagctttggaggatgaccatttgttaaccttaattatcccattccaaggaccatggaacttttcatttttttaagcaat

SEQ ID NO: 161467 - DNA, 464 bp, Arabidopsis thaliana columbia
  unsure (1)..(464): unsure at all n locations
gggaatnccggggcgcgcccacagcgcgtcgcgttcctttcctttaatggtggttacacgaaatgtttcctttatgggcaccttcagttttccagcattcctccttggccggccaaacggttttaaagccctccaacgaactcctccgcagggtgggggtttccgggggtggccgggtgcccttccgtggtcccgccaggtttactcctaaaagcttctggtccggcccaacccgtcccaagtccttaggaccatcctgggggattccaccgtcctacctaaccggggattcccccggggcctccggttgggccaccgttggactttcggttgaccgggagccattcgttaagaaccgggggctggaagtattccacagcagatgggctttgtggggggctttcggatgcccattccctgggattttttccaggaacggggttaattccggagaagccgtgtgg

SEQ ID NO: 161468 - DNA, 432 bp, Arabidopsis thaliana columbia
  unsure (1)..(432): unsure at all n locations
ggaatnccggggccgacccacccttccaaaaaacccggccttgtgaccaggcctttctttatcttgtcagtcccaaaaagtaggggcgggtcagtttttgacctcggggcgcctgtttaacccggtggtccattctttaaagctgttttcgccaaacctttcccaaccaaagttgggggtcctccatttccttccggtggcctacctgtaccagatacctcaacccaaccaggaaactttcaattgcctttaaagaataattttaccatccacccattgtaaccaacaaaaccttcagttaaagccaaaaattctgttaaaaaaatctccaccgtaaagtcttttatctccaaaaaagcttgtccctatttccaaaacaatccccttttaaaacctttttacctcctttccaacctaatcaccgttttttcc

SEQ ID NO: 161469 - DNA, 427 bp, Arabidopsis thaliana columbia
gaattccggggccgcccacacccttccgccaaccctaattcccccaaattgggttttcttttttcgccaatttcctccccaacggaggaaatccatttatgcctctataccggaaaaaaacctttaaaccagtaatggctttgctaaaccccaaaaaccggattcaggacccctatgtggccccaattttaaacccgtttctcttagtcccagaaatcgttgaaccaatcttaaaccccttttttcttataaccggtaccaaaaaccgtgtttgggtaagaatctttgttgctgaccataagttcctaccaaaaattggtcctcattttgaccctccacctggtaaaacaatttcttttgacccaaaaccaagatttgttgttcctcaaaacaaacctggcctccatccaattgtttgtttaacccc

SEQ ID NO: 161470 - DNA, 386 bp, Arabidopsis thaliana columbia
ttcaaatctttttgggtttcgacgaatccgtctatttccccggattcggggccgggtatttttagcggatggggaagaagagaaattcaccagccccaggcctcgatggggtggtccggcctgtttaccctttttttcgaaccgccgttaactttttatttaagctttatcctcagcctttgaatcatcagaggttttcttttcaagccggggaacgccatggttgggaaaaactgtcccatgggttttggggccaccaggagggggggtcaggagggccccctttggtttttgccaattttttccaaaacaagctcgaatgctgcttaaacaagcctccattttccccaagagcgccccccccgcacccaacattgcttgttacg

SEQ ID NO: 161471 - DNA, 376 bp, Arabidopsis thaliana columbia
ggccgacccagccttccttaggaagtttttccagactgtttttccccttttttcttaaaacccggatcaacctgaaaggcgggagccttttctttcataagggcaggattctccattaaggccggtgcctccttcggatccaaaacccttcaacctgggcctgatttaatgggacctgtttccaattccttctaaaggggtatcctcaccattttcagtggaaaagcaccgtgtttccctattcctatcttgcccttaaacctaacctccattggctccggcattcaccatggttggtccgtaattatctttaaaaccacaccggttggtttttacccccattgttctccccaggtttttgttattaaccattgtc

SEQ ID NO: 161472 - DNA, 408 bp, Arabidopsis thaliana columbia
cgtccggttttccaaaaccaggattgtggtggacctcttcttgagaagagctgaaagggctgggtgagaagcctttgttttaactgtggacacccaaaggttgggccgaaaagagtttgttttaaaaaccaaattaattttgcctccaaacctgccattgaaaaactttgaaggacttgccctcggaaggatggacaaggccaatgactttggctgggtttaatatgtggctggtaaaatggaccgtcccttaagctggaaggatgtccaggggttccagacattaaccaagttgccaatttttgtaaaaggtgtttttacaggaaaggatgcagggttggcgtttaaagctggtgcagccggattatattgttaaaaccatggagctggccagctggactttgtcca

SEQ ID NO: 161473 - DNA, 353 bp, Arabidopsis thaliana columbia
  unsure (1)..(353): unsure at all n locations
gggnngggaattccggggcggaccacacccttccgaggacccttggccggacccgtggccctcttctaatctaactaacacccccggaaagggcggggacttttaccgccgttgttgtttcttaaataaggggtccccgggtggttcccacctttagctccaattaaagccggttaacagcccggttcgattccggacccaaaaaagcttctcccaaaagggctaaaacggttttttaaaaccggcctttttggtccccaggcccaaaataacccgatattttggacggtcaacttgtcggggcctccgggtccaacctcttgggtttaggcaaaccggcggggtatttccaa

SEQ ID NO: 161474 - DNA, 406 bp, Arabidopsis thaliana columbia
gccaaggccaagcctagttgggttttatcaaaagaggaaggggccaaagcctttagacccaactggcccggttctgggttattttccaaatccgtctgccttttgttgcgtgcccctaaccgggggggctgggggattaacgtttggtcgatctttgggcttaatcgcggtttgttgcccgggggactagcgtttgctggttccaaagggggggttgcccccatgccggggttgttggcttttgagttagctgtttttaagaccagagggaactcgaccgcccctgggtttttcaggtcagagaccacccagggtcttttccagaaggaggggctcgggagggtaccggaaaagatggtccctttaaagatgcaccaaactggggatccggggcttacatttttgg

SEQ ID NO: 161475 - DNA, 454 bp, Arabidopsis thaliana columbia
gtcgggatttccggggcggcccacacccgtccgaaaggaaccatatcccaaagattccctccattgctgtggaaaaacctcggtccagatggccgggttttgcaaaataatcggttgggtttttaaccacaaagctttgaaggaaatttggctctgcctaattcctttaaaatggcaacaccttgcgttgttgccaccggcagggtttttgtttaaacagttcattcaacaaaatttccagggcccggtttccaggggcatcctgggaaaaatgctttcgaggggggatcatttaaaattccacactttgaggacccgacccaggtgactcatcccgccgcaaatcatttattcagggaagctaggaagccactgaccagaccaaagtctaagaaagtgctgagcaatctaatttacaactttaagcctccttactggggttccccagggtttg

SEQ ID NO: 161476 - DNA, 405 bp, Arabidopsis thaliana columbia
gtccgccccacccgtccgatgcgacaccattaaattatgtggggaataggccatttgtcccattggggccagtttttagggtgggaaaggcaggcttggccgcaaattttagattggccgggcaaaagcgggacccggggggggctaagcctaattctccggccacccgacctttagctagagaaggcaaagccgggaaaatggccagagtttccatcggtcctggtccgggggggaagccaaaggattttttggctgcagctaaactttcccacgcagcaggaagaaaggccaaagtcccaactttccttgtcccggctcctcaaaagggggggttggatgggtttgctctcccggtccctggagcaggtggaaggccatgtccccagttctttgaagaagctg

SEQ ID NO: 161477 - DNA, 420 bp, Arabidopsis thaliana columbia
  unsure (1)..(420): unsure at all n locations
gggaatnccggggcggccccaggcgtccgaagcaaagtaccaaattccataaccacatttggttttatgaaggaaccattcttgaaggccaccttttccataactaccatttttttgggggtcgtttgggccgaaccctccttagttggtcctgccaaccatgtcaaggactttgtaggccgtttacttggtccgggtaaaacgtcccaaatggtacctgcaattcccgggacaggagggggttttttttcgaacagggaaaaaatctgccctttggacatcttccagtaaaacaatccgttggactggggcctaccaataaaatttaagtccaggttatggttggttaaggaaatgaatagtttcaccatcgagttggaggctccgaactggttttggggtcctaaagaatccaagggg

SEQ ID NO: 161478 - DNA, 352 bp, Arabidopsis thaliana columbia
  unsure (1)..(352): unsure at all n locations
gggattnccggggcggccccacccgtccgaccagacctagatccagttttttcaacaaaataatagcgtctcaataaacccccttggtctgtttccctggaaatctagttccttccttccacgaaattgagagagggcttttggtcccacattggtcaggctggtttccaggtcggaaatgctggctgggggctgtcctgccttgaacatggcttccagcctgttggccagttgccgggggccaagactgttggtgggggtgacgttgctttcaacaccttttttagtgaacccgttgctggtaagcacgcccaccgtgctgccttggtggacctggagccacctgtattcg

SEQ ID NO: 161479 - DNA, 448 bp, Arabidopsis thaliana columbia
  unsure (1)..(448): unsure at all n locations
gaatnccgggtcggccccacccgtccggaggaaaatccgattcatcagggttggtttcttctttttttaaagctaacccctcttaaggcaatggttcttaatgggcttcaagcaccacacctcctggggtggttattccgtttagaaggaagttggttggggaagagtttaaggggcgggctcgtgaccccgaaaggaaggaatcggtccgtcctaattttcggcccaaaggtcctcctgtgcaaagggcccctttgaggcttaaagattttcttgtgaccctagattctcgtctggccaggacacaggtcgttccaccggtggcgcctttaagtcagcaggctggttttttctgccgcgttggggatggggtggttaaagatccggcaacctcctgggtccacttaattgggaaaaaccttcaaagggctttggggttgtctttgcg

SEQ ID NO: 161480 - DNA, 425 bp, Arabidopsis thaliana columbia
ggcggcccggcgtccgccgtttggcaaaggtggggatcctgtttggttcccggaaaccgcttggtccgctatcaggaactggttcagtccgaattgggcaaccgtttgggccttttttttttcgtccctaagcaaatcttggtggaagtgggagtttgcatagtttttttggcccccggaggccagtcgtggaaaaagtttaccgaaatcccctgtcaggatggttcaccgaccaaactttttttcttaataaggaatttggcttcttctaatttggttttatttaatttcccaaacttaaactccatctggggggtcttttttgtggcggccgcctggttctttaagttttccgccaatggcgtggccggcaccagccgcaaagggcgtccaagaagatgttcattttggttccaaatcaggtc

SEQ ID NO: 161481 - DNA, 444 bp, Arabidopsis thaliana columbia
  unsure (1)..(444): unsure at all n locations
cgggnccggatttccggggcggccccacgcgtccggggaaaaaaaaaccaagggcacctaaggccgtctggttcttaaactcggccttaccaccggcggtatcttccggggtaaggaaactccactttttttaaacacccaaccgtccaaattccttttctttaacaaaaaccgaattccgggccgggaaaccagattcttcggccgccgttgttgatgccccggccacaaaggaagttcccgtgggtttaacccccccgcggttggacccaaacacaccgcttccgatcttggttggaagcaccggtggtcttttccgtaaggggcaggtggaagagtcttccgttttaacggggaactaaccgaaggaccaattctttgggatgccgccgggaggggcagggttcatgaaagaaggcccgattcttttgaagctggcgagga

SEQ ID NO: 161482 - DNA, 440 bp, Arabidopsis thaliana columbia
  unsure (1)..(440): unsure at all n locations
gttttggttaaggctggcgtcatggacaattcccttttggggggcaaacccaccaaagaccttatggttaggaagggatgggcaccagggggggcaaccttggcaggagcttcaactgtccaatccggaggctgcaggtcccctgagattttaactggctgccaagaccttgccaggcaaaaaaaagtcccattattctaaaaagatttggcttgggatggcgaaggcagggccaggtccagggggggtcccaaggtttcctggaaagggggaaaaacttggttggtttcaatctatcctaatttaaacccaccaaggattctatctctctctatcaaggaaagtcctggcnnaaaaaaaaaaaaaaaaaaaaataaaaataaaaaaaaaaaaaaaaaaaaaaaaaaataaaaaaaaaatataagggggcggccgtttta

SEQ ID NO: 161483 - DNA, 409 bp, Arabidopsis thaliana columbia
cccatgcaaggtttgagaccggcctgccaaatgagcaaggccgagtgttaccagcaaacctgggggggccagatcttttttgggactgggactggccaagacccaaaaaaggattttaccggttccaaggttcggccgcagcggccgtggtccggggttgggcctttgcccaaatcgcaaccataatctggatggaaacggcaggccctgttctaaatgaatgcacccaattcgccgaaggtttcaagtccaagacaccggaggtattgctggcttacaatttttggccgtccttaaactggaacgcttccggtttgacggaccagcaaatggtggagtcaattccggggatggctaggctcggtttttgttggcagttaataacgctggcggttttccatgcggatgc

SEQ ID NO: 161484 - DNA, 374 bp, Arabidopsis thaliana columbia
tcctcttttggcaaccaaccgtaaacccctacttattagtccattttggcgggggggttaaagtgggcttccttggcctgggctggcttgatgggggccggcccattcacagcaaccgcgcttttgagtggtggccccgccaacggcaccctgccagggggcttggcctactggccccgaggtgctccacttccccaagggtgctgcaccggcgttcctaaccttaaaaccttggccagtccatccccaaaccgtcagcaggctggccgttgccttcattctgccgttaaagccgtgggtccgggtctaaacactgccggtgcagttgaacttcttagcgcatgcaaggccatttttccttacaaaatcagggc

SEQ ID NO: 161485 - DNA, 401 bp, Arabidopsis thaliana columbia
tttaaaatcgccgatttggcagtaaggagcctaaattttggggcccgtttgctcctaccgcacctttggaaggaccttcaagggcccacgtcttccttacaagaaggagcgcctggattctgaatggaacctggtggggaagtttggcctgcgtaccaggcgtgagctctggaaagggcagtcctcttttagccgtttccgtaatgctgctagagatcttttgacttttgatgagaaaagtccaagaaggatctttgaaggggaggctttgctccgtaggatgaaccgttccggcctttttgttaggagccagaacaagctcgtttccgtcttggctttgactgttgagaacttttttgggcgtcgccttaaaactatggggtccaagtctggtttggcta

SEQ ID NO: 161486 - DNA, 456 bp, Arabidopsis thaliana columbia
cggaattccggggccgcccacacccgtccgtttaaacgttttacttggggctgaactacttaacctaaagggccgcctaaccaagggttgtgtcttcccttgccttggccggtaaggccgccaagctttcccccggggattttgaagtccttggaggcggccgggtgccattgaggaagactgtggccaagccaaagggcccttcaggcagcccttggtccggttctgcccgggtcaggtccttgggtccattctttggcaattaacctagctaccttaccggaaggttcccgggggcctccggttgggccaccgccggactttaagttgaccccgagccattcgcagggaaccgtgacctagaagttttccccagcaggtgggccttgctcggagccctaggctgcgtcttccctgagctttgggctagaaacggagtcaagttcggaaaggcgg

SEQ ID NO: 161487 - DNA, 289 bp, Arabidopsis thaliana columbia
gaatcccggggccgcccacacccgtccgcccacccttccgggaggccatggaagaggatttttcctgagtagggtccgaaaggcatttttggaaaaattggggtcccaggattaaatttttggaacctttgggggtttccctttaattttgggcttacttcaatcatttcctcaagtacctgccaaagaaaaaggggggcttgtattttttctagaattgccctccttttttcgtttttttccgaaaacctaaccctttgtaatggtttttttacctttggagattttt

SEQ ID NO: 161488 - DNA, 442 bp, Arabidopsis thaliana columbia
cggggcggccccagccgtccggaggttggcgcgaccttccgcggttgttgaagttgttttttccataaggggtcctcggtgggttccgggtttccttcccggttaaggtgggttaacagccgggttcggtttcggaaggaaaaaggcagttcccaaaaggagggccaaaaggacggggcctccggcccggcctttttgttccccaggcgccttttttcctgactggctggatggttcctgggtgggagattccggttttgttcccttcggtttaggcaaaccggccgggttttttaaattcgttttcgtttaactagaccagattctggctaaaaacttggccggggacgtgttcggaccccgtccggaagctgccgacgccaattcgacgccgtttaagccgtccagggaggggttcggattccaaagtttcagggattgc

SEQ ID NO: 161489 - DNA, 458 bp, Arabidopsis thaliana columbia
  unsure (1)..(458): unsure at all n locations
cgggnctggatttccggggccgccccacccgtccgaatttttttccttggagagctttttcttggtttggccggaaaagaaaacgggaggccaccaggttccgttttcgttcttgccgaacttgccaaaggcggctttgggtttaggtggggcggcaacggccctaaactcgtcgttctccactgttgatggggccaaaagacctgttttgttcaaccgattcaggggggtgtggaaccaaaccgccggcaaagggcctaattctttgttcccgtttttccaaaccccgaacatttcccattttcttccaaaacctcaaactttttcctccaaattgggtactaaggttctccaaatggttaatccaaccctcggggttctttttcgccctgaggttccccgtttcccgtccattttccaacctttgggtcttaattccgataagaaggtccttccat

SEQ ID NO: 161490 - DNA, 435 bp, Arabidopsis thaliana columbia
  unsure (1)..(435): unsure at all n locations
ccggncgggatttccgggtcggccccacccgtccgggaagtcctcggagtaaagcggtgggggccttgaccttccttctaactagttctacaactatggcttcggtaatctttccaccttggcttaggggccttttaatgggaccagtagttccggtggttgcagtggccatgtcaaagcctttacttaagggggtcctggttccaataactctgggcctggggttaaatccttttgcaaagcctggggccactctttttaaacctgtgatgccgttggtggctttggtttgcacttcgttgggcatgggaggcccactttcaattaatcgcagccagatcctgccagctgaaggtctgggatggatggttccaatggttccattccatgccgtaccattggccttaggatttgggtcctttaagatcccaggct

SEQ ID NO: 161491 - DNA, 419 bp, Arabidopsis thaliana columbia
  unsure (1)..(419): unsure at all n locations
gaatnccgggttggccccacccgtccgggctttttggttggatccgggggtcccatgttttttttttaaacaaacaaatgctcctgttcccaggttcaaaacatgcatgggtttttactgggaccagtttccacctacctcaattattaaaccaaaattgtggcccgggaactggaggggttggtcccttggttttggagatccttttccttacaaaccagttgaagatcttgcttttgcggccgcccggttttaccaccgagggggaccgttccaaaacttttccttgtttaacgggggaccaaactttgttggaccaagtggaggaccattaatctctactagttttgattttgaggctccaattgatgagtttggcctccttagccacccaaattggggccacttacaagttctac

SEQ ID NO: 161492 - DNA, 374 bp, Arabidopsis thaliana columbia
  unsure (1)..(374): unsure at all n locations
gggannnccggggcggccccagccgtccgagtttgcttagaaccaagtaaccctcaccgtttttttattctttcccattttctggactccactgggatgtaccaccaaaggaggttttgaatgggggtagacccaaccagcctcaaaagtgaagagcctattcctaacctttccaattttggaatctttccctcctccgtggtttttgcaaccaccgtgtaaatggcagttttggaacacaccaccttgaactccagtccacggaccaaaaacctcccaagttttttgctcgtcccatttgggggtaaagcggccaataattgtccgagttctgatccatttttgcccttactttgccaaacaataccctgccg

SEQ ID NO: 161493 - DNA, 460 bp, Arabidopsis thaliana columbia
  unsure (1)..(460): unsure at all n locations
caggncggaattccggggcggccccagccgtccggcctttttttttataaacttttggctgttttttttttctttctttccatcccaactccaaggtttaactttttttttaagctaaattttcctccaaggcaattgtttccgcccattttttgggaaggaaacagtttccgtttttttcctaaactccgagttttttaactgttttggccttggttccacctaaccccgggggcaaggctaaaaaggtggggggagttttcaacctggctttaggggcgggaaaggcacctccggccccaccggttggtccggccctgggttttaagggggttaccattttggctttttgcaaggtttttattgctggaactgctgttaaagctggttttttttttcctgtggaaaccacggttctcgtggttatgagctttacgttttttttaaagaccccgcttgt

SEQ ID NO: 161494 - DNA, 398 bp, Arabidopsis thaliana columbia
ggaattccggggccgaccacacccttccgaaaatttattcctggggaactaggaatatttttacgttgcctgggcaataatccgtgcaggggcactttttgggtgatgtggacggcacccttttaaccgcctcccaaattctcggccataccggaggtgtttggcccaagatcgccaaatttcccctgttaaagcccgaaaaattcaggggattcatgaaggacttccaggggcccggtttccttgccccaaccggactttttttcggggccaaaaattccatgggtttccaaggtgaccatggagcttttttccaaggaaaaaaggaccctgaaggtgttcctttttatataccaaacaagtcttgggtctttggcttttacgataaacaaatgcct

SEQ ID NO: 161495 - DNA, 413 bp, Arabidopsis thaliana columbia
gaattccgggtccgaccacagccttccgattaattttcccagagccaaccaaacttgtcttttcctggcttcggcacccgctggaatcttgggttccttttccagggatccgatggattcatcttggtttaggaatggcctaaggaattggtaatcaaaaagtggatttttacctagtggttcaatgccattaaaccaagtcttttcccagggagtggttttttttggcaaaaaatttgaattcttaaaatccaaagcgatttttttcaacaaggaaactggctaaaaggttccagtttttgtttttccccaaggcccacctggagctgtgcttattcttttgaagcaaattggtaaaactattccggttcttactgaacaggttcgagttcctactgggagaattgttttgg

SEQ ID NO: 161496 - DNA, 330 bp, Arabidopsis thaliana columbia
cggggccgtcccagccttccgtcctctttggatcctggaagccgaaaaaattttatttattggtattcccatccaccgcttggtgggggtcttgttgaaccatccttaaaaacccatttttcttttctccgtcttttcttatttctaattgtccaatccgtggtcaccagccccaggaggggaaagagggggttcccagcccttggtaatggttggttgggcctttaggtaatgagtgtccaaaaagaagcctatttccccttgcccctgcttcttctttcttggtggtccctcctcctggctttttaaggtgggaggcccctttggcca

SEQ ID NO: 161497 - DNA, 416 bp, Arabidopsis thaliana columbia
gaaggccggggccgaccaacccttccggaagccaagggctttgtttaagaactttagtttaggcgaaaagggaggccccccagggggggatgcctgacccagtgggaccccacttgaggaccttgatcttcgtccttgaaatgtttggaagcttatttggattgtccaccggaaagactttcaaccagtttgaaatcaaccctgaaatgattggccactccctggctgagttttttttttaatacaacccgtccaaccacggaaggcctgtttttgttgctaccaacttttccagattcattccccttaagtgaaaagctttatttggggattgtgtttacttgttcgttttttgggatcctaagtccggggttcttttttgttttggaagctttttattaccattcctttaaaag

SEQ ID NO: 161498 - DNA, 439 bp, Arabidopsis thaliana columbia
gatttccgggtccgccccacccgtccggaaaaatgggcgatggagaccggagaagatgattggaaggttggctggggaagctccaaattcgcgaagcaaatgtttccgtttggaccgttaacttttaaagaggcattttttcctgcaggagccatctggttcaaccaagttattgtgccaaatgggctggaagctttttttgctaatcctaaaatggggattactccttaaccttttataaactccaattttgctcgtcggagcgtttcaaaccagtcaaccgcctttgccacaacttttgtttttgctttacaggagcttgccgaatggaatgtcctttccaaaaggaagttgggctttatcttaattatttgcgcttctggcaggactaacgctgagatgctccatgcgttaaaggaaaggtttgaaattaggccat

SEQ ID NO: 161499 - DNA, 424 bp, Arabidopsis thaliana columbia
ccgtccgccgaatattttaaaaagaccaaccccaaggtttgttttaaaaaaattaattgaatgtccgagggggagggcatgggtaaaacggtttttccggaaggcaaaagtatatttgccacctttattactttccaaacggggtcatttgttgcaaccggagctgaatttattgcaggggccataacttccaaaacctgggccggcccaccaaagcaccaacccgaggttttccgaattgaacttacccacccatggatctaccgatgcattatattcggttcccaaaacacactttacttccattaaaaccgccaattttttcggaaatgcaaattttacggtccagtcttttttttttttggtaacccatccgtcgtactccaaaactgtagcatctacccacggaacccaatgatttttt

SEQ ID NO: 161500 - DNA, 395 bp, Arabidopsis thaliana columbia
ggcggccaaggcgtccgatgttcctgaagctgttcttgttcctgcccttactgttgttcctgccaacggaattgctggggcagttgttgtcaaggttgccccaaagccaaaggccaaacctgccgaagggaaccctgcaaaaaagaagcctgattcaaccagggaaaatgagtctgatgataaaaataagtctgaaaaggatgatgcctctaaaaaaggaatggttgttgatgaaaatgcctcaattgttgccagggaggaggtttctggggttgaagaaaaggaggggactcctaaaaagcctgagccattcaacaggaagaggccaattgattcttgttccaaaccacccgtttttggaaggaaggcaaaaccagcagcatgcccagctttta

SEQ ID NO: 161501 - DNA, 385 bp, Arabidopsis thaliana columbia
ccagaggatccacttaaggctttcgtcttatgcaccagcaatttccgcggaaaaggccttccatgaccaactctaagtggctgggaccacaaccagggcctttgaacctgcttccatgatggcaaagggtgccccgcgccatggaaggtccttggctggctgttggatgtcccggggggttgtatcccccaaggttgtgaccgcaggggtgggcaccttcaagaccaagcgaccttttcagttggtggactggggccctactggtttcaagtgtggtttaaactcccagccaccaactgtggttccgggaggggatctggctaaagcccataagagcttttgtttgttctaaaacctaaccagggttgttgaggttttttcccgt

SEQ ID NO: 161502 - DNA, 396 bp, Arabidopsis thaliana columbia
gggcgggatttccggggccgcccacacccgtccggcaaaaaggctggagccacaaaaacctgagtttttcttctccgaaaccggatcgccgaatctaatattttcccatcgaagcagatgggaaacttttttattaacattggagtctgtaaccgggggccacccaaccaggctttgggcccagatctttgttgcagccctggatgcctgccttgaacaaaaccctgccagcaaagttgttggggggacttgccccaagaccaactgggccttggccttgggggggaccactaccaaggctcctgttgactccaaaaagtttgtccggaccaccttccgggccattggattggcctctaataattgtggccttgatgctaccaaatgcaaagtcct

SEQ ID NO: 161503 - DNA, 395 bp, Arabidopsis thaliana columbia
caaagtgcaggttccagcaaaatggaacccaagcaaagagattgagtatccaggacaagtccttaggttcgaagacaacttcgatgctactagcaatctcaatgtcatggtcactcctaccgacaagaagtccatcactgattacggttctcccgaagagttcctctctcaggttaattacctcctagggaaacaagcttacttcggtgagactgcctctgagggaggctttgacaacaatgcagtggcaacagcaaacattctggagtcatcatctcaggaagttggtgggaaaccctactattacttgtctgggttgacaagaacggctgatggagacgaaggtgggaagcatcagctgatcacagcaaccgggaatggagggaagctttaca

SEQ ID NO: 161504 - DNA, 333 bp, Arabidopsis thaliana columbia
ttcctttatataaagttggaaaaacaaaaaattcaaatttgttggaaaaaatctgagagaaacagaggaaacataaaaaaaatgaggccattgagcattaaaccaacatcgttagatgtagctagacatgccacatcagtagaatcatttgggaataaccgaccgccgatatcgtcgtggcactcaccggtgccgtacctattcgggggtcttgcggcgatgttaggcctcatagccttcgctttacttatcctagcctgcttttactggcgctttgtaacctccggggatgactccggcgaaagagttgacgaggaaaaaaaaagtcggtct

SEQ ID NO: 161505 - DNA, 391 bp, Arabidopsis thaliana columbia
ggcttgcggtggatacctaggtacccagagactaggaagggcgtagcaagcgacgaaatgcttcggggagttgaaaataagcatagatccggagattcccaaataggtcaaccttttgaactgcctgctgaatccatgagcaggcaagagacaacggcgaacatgaacttgcagaacaactactggtgtatttcattgaacagggcaaaaaggaatgctttgctacatgtctctttgtatgttatgacttaatccgaccagacgtggctctagaacttgcctggatcaacaatatgatggactttgccttcccgtatctcctccagtttatccgagagtactctggcaaagtggatgagctaataaaggacaagcttgaggcacaaaaaga

SEQ ID NO: 161506 - DNA, 343 bp, Arabidopsis thaliana columbia
atcaacgaaaccaaagatctctcttcaaagcttccaccatgtttctccgatcactcaatctctgtacaatactactcttcctagcgatttcatcacaagtttctcaatctctccacttcgaattgcaatctggtcgaacaaaatgtatatcggaggacataaaaagcatttcattgaccgtcgggaagtacaccgtcgttaaccctaacgaagctcatccttctcctcaatctcacaagatctccatcagagtgacatcgagttacgggaacacgtatcatcacgcggaagatgtagaatcgggacaattcgcgttcacggcggtggagtctggagattacat

SEQ ID NO: 161507 - DNA, 350 bp, Arabidopsis thaliana columbia
tgctgaagctcaaagtgtatgcagatcgaatgtcacagccatcacgtgctgttatcatattctgcaaggttaatggaatccaattcgatgaggtcttgatttccttggcgaagcgtcaacaattatctcctgaattcaaagatattaacccattggggaaagttccagctattgttgatggcaggcttaagctctttgagagtcacgcaatcctgatatatctatcctcggcgtttccaagtgttgctgatcattggtatccaaatgatctatccaaaagagccaagattcactcagttttggattggcatcacaccaatttacgtcggggtgcagctggatatgttctg

SEQ ID NO: 161508 - DNA, 397 bp, Arabidopsis thaliana columbia
  unsure (1)..(397): unsure at all n locations
gcaaaaaggctcgagccacagagatctgagtttctcttcttcgagatctgatcgccgaatctcataatctcccatcgaagcagaatggagacttttctattcacatctgagtctgtaaacgagggacacccagacaagctctgtgaccagatctctgatgcagtcctcgatgcctgccttgaacaagaccctgacagcaaagttgcttgtgagacatgcaccaagaccaacatggtcatggtctttggtgagatcactaccaaggctactgttgactacgagaagattgtccgtgacacctgtcgcgccattggatttgnctctgatgatgttggccttgatgctgacaaatgcaaagtcctagtcaacattgagcaacagagcccagacattgctc

SEQ ID NO: 161509 - DNA, 305 bp, Arabidopsis thaliana columbia
gtttacaagtacgtccacaagtatgtttttttcttcgatggatacagccctattgacaacgggaactattgttcagggagtggtgacttgcacaaggtaggattcaccgcattggcaatttgggcggtaactcttgccggaattcttgcctgaggtgctcttcttgggtacaacacaagtgctttggctcataaatattaaaagttgttagcgcttgtgtaatcaagttttttaaaatacttctgatgagttcttatttttttctaatgttgtaaaactcaaacatacctttttatttataagat

SEQ ID NO: 161510 - DNA, 333 bp, Arabidopsis thaliana columbia
gtagaaactttaaaacgagagagagagaaagaaatggcgacatcgggaaccgtacgtgacggaggttccgttgaaaggatcggcggagaaacactacaagagctggaagagcgagaaccatgtcttcgctgacgccattggccaccacatccaaaatgtcgttgttcacgaaggcgaacatgactctcacgggtctatcaggagttgggactacacatatgatggaaagaaggagatgttcaaagagaagagagagattgatgttgagaataaaacattgacgaaaagaggactggatggtcacgtgatggaccatctaaaagttttggattt

SEQ ID NO: 161511 - DNA, 405 bp, Arabidopsis thaliana columbia
agaagaagtaatggcttcctctatgctctcctctgccgctgtggttacctccccggctcaagccaccatggtcgctccattcactggtttgaagtcatccgcttctttcccggtcacccgcaaggccaacaacgacattacttccatcacaagcaatgggggaagagttagctgcatgaaggtgtggccaccaatcggaaagaagaagtttgagactctatcttacctccctgaccttactgacgtcgaattggctaaggaagttgactaccttctccgcaacaaatggattccttgggttgaattcgagttggagcacggatttgggtaccgtgagcacggaaacactcccggatactacgatggacggtactggacaatgtggaagcttccattgttcggatg

SEQ ID NO: 161512 - DNA, 326 bp, Arabidopsis thaliana columbia
aacccaccaaaggttcaccatatccaagaggtttctacttttgtaagacacaaaacggttggtgtagcccgtaaacaagtggagggtaatagatccgacccaaagatgtttattgtcacttacacggcggagcttaatcatccagatcctacacaccggaattcttttgccggaagcacacgtcagaaaccatcctatcaacagacgagtaaatcttccacaaccactattgctacttatacatcggctccggtgacttcagccgacgaatttgttttgcactgtgaggatcattaaacggcgggtgatcttgacggagaagaaaa

SEQ ID NO: 161513 - DNA, 327 bp, Arabidopsis thaliana columbia
gaccacgcgtccggaaggagaaaagatgatttaccgaaagtggtgtttgttttccggcccaccggttatcctcgggggagcggtaattgctgccgtggccgtcggattcgtcttgcaaaacgtaacgaaaggggagcagaagaagaatgtctcaacaaacaagtgagaagacaaatggagagatgctacaaaatgtggtgatcatgtgatttgatccaatttagttcttgcagtgtataagctcaataatgctttttgaagcttttgaatacacaaacctttgtggtgtttttagattctgggaactaataatgatatttaattttc

SEQ ID NO: 161514 - DNA, 413 bp, Arabidopsis thaliana columbia
ataaccccaagaacccttattggttcaaccgttaccgattcgttctatctgctggacatggatgtatgttgctctacgcgtggcttcatcttgccggctacgacagcgtccaggaggaagatttgaagcagttccgtcaatggggaagcaagacaccaggacatcctgagaatttcgagactcctggaattgaagtcactactggtcctcttggacaaggaatcgctaatgctgttggtttagctcttgctgagaagcattggctgctagattcaacaaacctgatgctgaagtagtcgaccactacacatatgcgatccttggagatggttgtcagatggagggtttttctaatgaagcttgctctctagctggccattggggacttggaaagctcattgctttctacgatg

SEQ ID NO: 161515 - DNA, 255 bp, Arabidopsis thaliana columbia
ccgccatcggtcgagaatccaacactgctgcgtgtgtgcatacaccgaacgcttacatgtgagagtctatctctaaatgacacttcgagagtccgcggcccgtagcgagctgcatgtttcatattgctttggtccggaacacgccattggcatatagaagtctctcttgggatggaggggatgggtcgttagctttttattcccaacgacttctttatagctaaaggagagaagattgtgttcaagaacaacgct

SEQ ID NO: 161516 - DNA, 430 bp, Arabidopsis thaliana columbia
cctccctctaaaattccccggcgactcagtttttcggaaatcgtagaataaatcagattcttggtctttagtatgaaacaatgaatttgatctcaagaacattgacaagagcagtgtcttcgtcactataccactcaaaagcagcgaagctccccactcaaaaatggataatctcgcagcaaatccgtgttttctccgccacagtcatcagcggtggaggaaagaaacctctggcaaaagtatctgtgaaaccaccgctaaatgtagcgacggagaaagaatcgactccgccaaagaaaattgagtacaaaccggaaatttcaaactggttcaacctaatcggattcgttgaacaaccagttcaattcggtccttgttccgatggaaaattctgggctggaacagttatttctcagcggtctggttcaaa

SEQ ID NO: 161517 - DNA, 336 bp, Arabidopsis thaliana columbia
ctttgacaatggctgatggtgtagaagctgcagcaggaagaagtaaaagacaaaacagcttattaagaaaacaacttgctttagctgtaagaagtgttcaatggagctacgcaatcttctggtcgtcttcacttactcaacctggggttttggagtggggagaaggatgttacaatggagatatgaagaagaggaagaagagttatgaatctcattataaatatgggttgcaaaaaagcaaggagcttcggaaactttatttgtctatgcttgaaggagacaggggtcctactgttagtactactcatgataatctcaatgatgatgatgataatt

SEQ ID NO: 161518 - DNA, 324 bp, Arabidopsis thaliana columbia
gagaaccctaattttcaattgtggtcgaaaattggaagaatgaggaggaggaggtgcgatcttcaaccgaagagaacgagaatgtgcgatcttcaaccgaagagaacgagtttgtgcgatcttccaccgaagctggtaggggagaagatcctcacgaggattccgataacatctttgagagcggtgcgatccacttgcaaattatggaacgctttaaccaaagatcgggttctgggtaaagcagcggcgcagtttttggggtttatgacgatggattcaaaggtctgttcagttagattccatctccgtcgcagcaaggaggaa

SEQ ID NO: 161519 - DNA, 459 bp, Arabidopsis thaliana columbia
cggtccgacccaggcgtccgagtcagactactgtccctgagtttggcaccttttcaaaaagtcagcatcaaggacagactggttctaaaagcaaaagagtgggggttgaaagatatgtaccgaagcctatagtaaaggaaatggctgagcaaatcgtcagtaaaaatctagtaacctctgctccagatatgtcggagaatgtaaaccagaaagaaaatcgtggaggtgagggtacaggaattctccaaccttctggttcaactgcagggaaatctgggtctccttcaaagtcaagacatgggaatggtaggcagggaaagcatggtagagaacatgcatcatggcaccagagaggttctggagcacctactaaagctttggaggatggacaatttgtaacctcaaatcagcccatccgaggaacagtgaactatcactctagtaagcaaaccgaacaaa

SEQ ID NO: 161520 - DNA, 377 bp, Arabidopsis thaliana columbia
  unsure (1)..(377): unsure at all n locations
ccgggccgacccacgcttcctattaataacaccttcactatccaatatattatcntttaaaccctgagaaacaangacgtgaggtttcacaattttaaggggggttctaaccccatcaacattccttttccagactaaaccctcatcctttaacccccttcgtgatgtttcctttctcgaatctcccatatacactatggtaaataacctttgtttttcaccttacatattttagttcttaatacccttttccgttcaaactccttcttaccctacctattaattccctttcaattattgtattaacaccttctttttttcttaaacccttaaaccttttccaaaaaacaaaactcttgtattttatccttataatt

SEQ ID NO: 161521 - DNA, 352 bp, Arabidopsis thaliana columbia
ggccgacccacgcttccgcatcaccaaacatttcaccatctgcttttttttttggaatatgaatttgcctgtggagaggagttttaaaaccttgcctgctggggagactcttcctaggaatgaagttcttggtggttacatctttgtttgcaacattgatactatccaggaggatattaaacgtcacctttttgttttacctccaaaatacaaagactctgttcgagctataacacctgaattgcctctgtttttttacaactacaccactcaccatctttatggtttctttgaggcaacaacttttgtaggtactaatattgattctactgcttggtaagacaaaaatttc

SEQ ID NO: 161522 - DNA, 391 bp, Arabidopsis thaliana columbia
gggttatccttggtcactctgaaaggatgggcattccttaatgaatcaagcgagttggggggagacaaggttgcctatgcactggctcaaggtttgaaagtgattgcttgtgttggtgagactcttgaggagcgggaagctggatcgaccatggatgttgtggctgcccagaccaaggctattgccgatcgggtgacaaactggtcaaatgttgtcatagcctatgaaccagtgtgggccattggaaccggaaaggtcgttagcccagcccaagctcaagaagtacacgatgagctgaggaaatggctggccaagaacgtgagtgctgatgtcgttgctacaacccgcatcatttatggaggatccgtcaatggtggtaactgcaaggagc

SEQ ID NO: 161523 - DNA, 431 bp, Arabidopsis thaliana columbia
atcagcggtaccaacagcaacagaatctgaggcccctatttcttctccatatccgttttccaggatcataatttccggatttgcgtattggtccttaatgtacttcaacagacttctaaaacctttcgagtaaacgttcaatgcagcggtcaaaggcttgctaccaatggcgtaattttgcgcattcttagactcccatgtaataagagaatcttgcatccatcttggttttgaaggatcaggtttctccaaatggtttgaaaacactgaagtatagtagttgagcccaacgaaatcggtagaagctttcagttttgctttctgctcagttgtaaatttaggcaatctatgtccaacaatgtctttcatgatctggggataatctccaaatgtagttgtgtctagatgccatcccaaaataaagtcaagtg

SEQ ID NO: 161524 - DNA, 442 bp, Arabidopsis thaliana columbia
taggaagatgatccagactgtgtatacacattttaccttagaaccggatcgatctggaaagccggagccgattcgatcatcagggcaggaatctacgataaggacggtgactacatcggaatcaaaaaccttcaagcttgggctggattaatgggacctgattacaattacttcgagaggggtaatctcgacattttcagtggaagagcaccgtgtttacctagtccgatctgtgccttaaacctaacctccgatggctccggcgatcaccatggttggtacgttaattacgttgagatcacgacggctggtgttcacgcacagtgctcgacgcaggattttgggattgagcaatggctcgctactgatacttttccttatgagctcaccgccgaacggaacaattgtccggtcaagcttaaggatagggttagtcgggtcg

SEQ ID NO: 161525 - DNA, 427 bp, Arabidopsis thaliana columbia
tgtatacaagaacaggaatgtggttgagcagttcgtgagaagagctgagagggctgggttcgaggccattgctctcactgtaggcaccccaaggctaggccgcaaagagtctgatatcaagaacagattcactttgcctccaaacctgacattgaagaactttgaaggacttgacctcggaaagatggacgaggccaatgactctggcttggcttcatatgttgctggtcaaattgaccgtaccttaagctggaaggatgtccagtggctccagacaatcaccaagttgcccattcttgtcaaaggtgttcttacaggagaggatgcaaggatagcgattcaagctggtgcagccggaatcattgtataaaaccatggagctcgccagcttgactatgtcccagcaaccattttggcccttgaagag

SEQ ID NO: 161526 - DNA, 405 bp, Arabidopsis thaliana columbia
ccagaccgtcccaagtacttaggaccattctcggagaatacaccgtcctacctaaccggagaataccccggagactacggctgggacaccgttggactctcggctgacccggagacattcgctaagaaccgtgagcttgaagtaatccacagcagatgggctatgttgggtgctctcggatgcacattccctgagattctctccaagaacggtgttaaattcggagaagccgtgtggttcaaggcaggttctcagattttctcagaaggaggtcttgattacctcggaaaccctaacttgatccacgcgcaaagcattttagccatctgggctgttcaagttgtgctcatggggttcattgaaggctacagaatcggaggtggacctctcggagaagggcttgac

SEQ ID NO: 161527 - DNA, 453 bp, Arabidopsis thaliana columbia
agagaaccggacttgtgatcagggctcagcttaacgtgtcagtaccagaaagtagtcgccggtcagtgattggactcggggcggctggtttagccggtggttcattcgttaaagctgttttcgccgaagctattccgatcaaagttggtggtcctccacttccttccggtggcctacctggaacagataactcagaccaagcaggagacttttcattggcattgaaagatagattttacatacaaccattgtcaccaacagaagctgcagctagagccaaagattctgctaaagagatcatcaacgttaagtcatttatcgacaaaaaagcttggccctatgttcagaacgatctccgtttaagagcatcgtacctccgttacgatctcaacaccgttttctccgctaagcctaaggaagagaagcaaagccttaaagatctcaccgcaaagc

SEQ ID NO: 161528 - DNA, 348 bp, Arabidopsis thaliana columbia
actcctccgagggttgtgtatccggtggtggccgtgtgaccatgcttgtaccgtcaagtctactcctcaaagcatctggtacggaccagaccgtcccaagtacttaggaccattctcggagaatacaccgtcctacctaaccggagaataccccggagactacggctgggacaccgttggactctcggctgacccggagacattcgctaagaaccgtgagcttgaagtaatccacagcagatgggctatgttgggtgctctcggatgcacattccctgagattctctccaagaacggtgttaaattcggagaagccgtgtggttcaaggcaggttctcagattttctc

SEQ ID NO: 161529 - DNA, 372 bp, Arabidopsis thaliana columbia
aaaaaaaaccattttagttgaaatcaaaagccgttaaagctcttgtatagaataaaccaaaagccttcaagaaactccctatggaagccgtttcctgctgcttttagaagaagtagatgatataataagattttttagacgtacaaaatctacattttaaaggttctgaatcaatttcatccattattttggtttttcaagcaaagttatttggttttatgaacagtttcatcaacttcattcttgataaattggcatcgtaattttctaacctctcgatgtttattaagatacctacttttacttttcttaagattcatactgcttttagactttttttttcttgttgagtttgccaaacattcttttttt

SEQ ID NO: 161530 - DNA, 374 bp, Arabidopsis thaliana columbia
aacagatctagatccagtttttttcatcaaaaaagagcgtcttcataaacgcccttcgtcttcttgggtggaaatctagtttctttcggccacgaaaatgagagagtgcatttcgatccacattggtcaggctggtatccaggtcggaaatgcttgctgggagctgtactgtcttgaacatggcattcagcctgatggccagatgccgagtgacaagactgttggtggaggtgacgatgctttcaacaccttcttcagtgaaaccggtgcaggtaagcacgtcccacgtgctgtctttgttgatcttgagccaactgtgatcgacgaggtcaggactggtacttaccgtcagcttttcccccctgaacaactca

SEQ ID NO: 161531 - DNA, 406 bp, Arabidopsis thaliana columbia
gaagaaaattcgaatcatcagtgtttgtttcctccttttttaaagcttagcccttctcaggtcattgttgttcaatggcttcgagcagggcgactactggggttgataatacgtttagaaagaagtttgatgtggaagagtttaaggagcgtgctcgtgaacgcgaaaagaaggaatcggatcggtctaaatctcggtccaaaggtcctcctgtgcaaagagcccctttgaagcatagagattatcatgtagacctagaatctcgtctgggcaagacacaggtcgttacaccggtagcgcctctaagtcagcaggctggttatttctgtcgcgtttgtgattgtgttgttaaagattcggcaaactacttggatcacataaatgggaaaaaacatcaaagggcctt

SEQ ID NO: 161532 - DNA, 353 bp, Arabidopsis thaliana columbia
  unsure (1)..(353): unsure at all n locations
ccgaacgttatggcaaatggtgttaatccatgatttgttttccgaaaaacgcttccatcgctagcatgagcttgttcagttcgcagggggcgaacatctttncctttatattatcgtccctcagcaaatcattgttgaagttggagtatgcatagtttatatggccaccgaaggacattcgttgaagaattttcacgaaatcccctgtcaagattgctcaccgatcaaactttctttcttcataatgatatttgcttcttttcatttcgttttatctcatctcccaaactttaactccatctcggttgtctttcttgttgcggccgtcatgtcttttagttattcgacaattg

SEQ ID NO: 161533 - DNA, 327 bp, Arabidopsis thaliana columbia
ggttgattcggtggtttctgtgaaatccggttattgggttatgacaagaagcggttggttatgtaaggatttgaagctaagtggtggagatagatacaaggcttggattgagtacaacaacatttataaagtagcctctgttacgatgggtttagcgcatttgaagaaaccgaaccggccattgattgaagcaaaattcgatctttccaaggtcatacacgaggtaatgtataccggttttgctggttcgatgggtcgtggtgtccagcgtcactagatttgggactggactttccagaattaaaaaaacaggtttggtttggttcg

SEQ ID NO: 161534 - DNA, 452 bp, Arabidopsis thaliana columbia
ccaaccctaatttccccaaattgggtattactttttcgtcaatttacttcgcaatcggtgcagttcaattatgtctctgttacgggaagagatcattagatcagtagaggctttgctgaagctcagaaatcggaatcaggaaccctatgttgacccgaatctaaacccggttcttctagttccaggaatcgctggatcaattttaaacgccgttgatcatgagaacgggaacgaagaacgtgtttgggttaggatctttggtgctgatcatgagtttcgaacaaagatggggtctcgatttgatccttcaactggtaaaacgatatcttttgatccaaaaacgagttttgttgttccttaagacagagctgggctacatgcaattgatgtcttaaaccctgatatgattgttggccgggagtctgtgtactattttcaatgagatgattgtt

SEQ ID NO: 161535 - DNA, 322 bp, Arabidopsis thaliana columbia
caaggaaccatattccaaagatttcctccagagctgttgaaaaaactcggtccagatggtctggttatgcagaatcatcggttgggtatctcaccacaaagctttgaaggaaatattgctctgtctaatttctttaaaattgtcacaacatgcgttgatgacaacggcaaggtttatgtttcaacagttcaatcaacaaaatatccagtgaccggcttccagtggcatcctgagaaaaatgcattcgagtggggatcatctaaaattccacactctgaggacgcgatccaggtgactcagcacgccgcaaatcatctagtca

SEQ ID NO: 161536 - DNA, 461 bp, Arabidopsis thaliana columbia
ggcaatgtcaagtctagtttggatttatcaaaagaagaatgggacaaagtctttagaaccaactggaccggatcttggttaatatccaaatacgtctgccttttgatgcgtgacgctaagcgtgggggctcggtgattaacgtctcgtcgatctctgggcttcatcgcggtttgttgcgcggtggactagcgtatgcttgttccaaaggtggtgttgacaccatgacgaggatgatggctattgagttagctgtttataagatcagagtgaactcgatcgcacctgggattttcaggtcagagatcacacaaggtcttttccagaaagagtggctcgagaaggtaacggaaaagattgtaccattaaagatgcaacagactgtggatccggggcttacatctctcgttcgctatctcattcacgattctttccaatatgtcaccgggaatacatacatagt

SEQ ID NO: 161537 - DNA, 427 bp, Arabidopsis thaliana columbia
atgcgacgacattaaattatgttgagaataggacatctgtaccatttgagccagtatatagtgatgggggggcaagctttgtcgcagatgatagatttgacgtgtcaaagctggagcctgtggtggctaagcctaattctcctgacaaccgagctctagctagagaatgcaaagacgtgaaaattgacagagtatacatcggttcttgtactggtgggaagacagaggattttatggctgcagctaaacttttccacgcagcaggaagaaaggtcaaagttccaactttccttgtcccggctactcaaaaggtgtggatggatgtgtatgctctcccggtacctggagcaggtggaaagacatgtgcgcagatctttgaagaagctggctgtgacacaccagccagccctagctgtggtgcttgcct

SEQ ID NO: 161538 - DNA, 420 bp, Arabidopsis thaliana columbia
aagcaaagtaacaaattccataaacacaatttgctaattgaaagaaacaatcatgaaggccacgatatgcatcactaccatctttctgggggtcgctttggccgcaccctccctagctcgtcctgacaaccatgtcgaggactctgtaggccgtctacttcgtcctggtcaaacgtaccacatcgtacctgcgaatcccgagacaggaggaggtattttctcgaacagggaagaaatctgtcctcttgacatcttccagtcaaacaatccgcttgacttgggcctacccatcaaatttaagtccgagttatggtttgttaaggaaatgaatagtatcaccatcgagtttgaggctccgaactggtttttgtgtcctaaagaatccaaggggtggagagttgtgtactctgaagaattcaa

SEQ ID NO: 161539 - DNA, 287 bp, Arabidopsis thaliana columbia
gagaaaaaaaaaacaatggcaactcaagccttttgatcttcaactccgccataacaaccgcggcaacctccggcgtcaagaaactccactttttctcaacaacccaccgtcccaaatccctctccttaaccaaaaccgcaatccgggccgggaaaacagattcctccgccgccgctgttgcagcccccgccacgaaagaagctcccgtgggattcacgccaccgcagttagacccaaacacaccgtctccgatcttcgctggaagcaccggtggtcttttacgtaaa

SEQ ID NO: 161540 - DNA, 283 bp, Arabidopsis thaliana columbia
attcagatcgccgaatttgcagtaaggagactaaaatatggtgcacgtttgctactaccgcaactatggaaagaccttcaagggaccacgtcgtccttacaagaaggagcgtcttgattctgaattgaagctggttggtgagtatggtctgcgtaacaagcgtgagctctggagagtgcagtactctcttagccgtatccgtaatgctgctagagatcttttgactcttgatgagaagagtccaagaaggatctttgaaggtgaggctttgctccgtaggatg

SEQ ID NO: 161541 - DNA, 382 bp, Arabidopsis thaliana columbia
gttttggaacacaggatttggggttatagttttagtggttgcgagggttggtcattggtggtaccaatggtcaaaccctaaggctaacggcaagttacctccgggatcaatgggtttcccgatcatcggagagacattagatttctttaagccttatggattctacgagatctccccatatctcaagaaaaagatgttaaggtatgggccattatttcggacaaacattcttggagtaaaaaccgtggtatcgacggataaggatgttaacatggagattttaagacaagagaacaagtctttcattttaagttatccggatggtttaatgaagccattgggaaaagatagcttgttcttgaagattggaaacatccacaag

SEQ ID NO: 161542 - DNA, 263 bp, Arabidopsis thaliana columbia
cttaaacgttttactttgtgctgcactactcttcctcaatggccgcctcaacaatggctctgtcctcccctgccttcgccgggagggccttcaagctttcccccgcggcatctgaagtccttggaagcggccgtgtgacaatgaggaagactgttgccaagccaaagggcccatcaggcagcccatggtacggatctgaccgtgtcaagtacttgggtccattctctggcgaatcaccgagctaccttaccggaaagttcccc

SEQ ID NO: 161543 - DNA, 342 bp, Arabidopsis thaliana columbia
  unsure (1)..(342): unsure at all n locations
atcaggcacccaatggaacggatctttccttttcaagtactaagaacccattctcgagggagtgacccatctaccttgggggggagttccctgaacactacntttggtacacatatgttctatccgcttacccctaaacattcccaaggaaccgttagctaaaacttatccacagcaggttgaccattctcaaaaccctatgctgcgttttccctgatcttttggccagtaacggaaaaagtttgtagaggcagttttgttcaaggctggtccacagatcttcaaccaaggaggactcgattacttggaaaacccctatcttgtttcaccctcaaatcattt

SEQ ID NO: 161544 - DNA, 428 bp, Arabidopsis thaliana columbia
catggagatgcattgcatttgatgattgaagagcttcaagtgctttcaccattggtaacaacgcgtgagttctgtgtgctaagatattgtcagcaaatcgaacatggaacttgggcaatagtaaatgtctcatatgagtttcctcagtttatatctcaatctcggtcatatagatttccttctggttgcttgatccaagatatgtccaatggctattcaaaggttacttgggtggaacatggtgaattcgaggagcaagaaccgatacatgagatgtttaaagatatagttcataaaggattagcttttggagctgaacgttggattgctactctccaaagaatgtgtgagagattcacgaatctattggaacctgcaacatcatcccttgatcttggaggagtgattccatcgccagaagggaagag

SEQ ID NO: 161545 - DNA, 439 bp, Arabidopsis thaliana columbia
cccatgcaaggtatgagaactgcctgtcaaatgagcaaggccgagtgttagcagcaaaactgggtgtgacagatcttttctgggactgggacttgccgagaaccagagaaggattctaccggttccaaggctcggtcgcagcggccgtggtccgtggctgggcctttgcacagatcgcagacatcatctggatggaaacggcaagccctgatctcaatgaatgcacccaattcgccgaaggtatcaagtccaagacaccggaggtcatgctcgcctacaatctctcgccgtccttcaactgggacgcttccggtttgacggatcagcagatggttgagttcattccgcggattgctaggctcggatattgttggcagttcataacgcttgcgggtttccatgcggatgcctcttgggttgatacatttgcaaaggatta

SEQ ID NO: 161546 - DNA, 261 bp, Arabidopsis thaliana columbia
  unsure (1)..(261): unsure at all n locations
cccacgcttccggtaggacattgatttgaatttttctgagtagggttcgaaatgcaggtttggtttaatttgggttccaggatggaatatttggaaacttttggagttttcctttaatttttggcttacttcaatcattttctcaagtaactgtcagagaagagagagagcatgtaatatttctagaaatgccctccatttatcgttttattccgaaaatcttaccctatgtaattgntttttttaacttttgagattttt

SEQ ID NO: 161547 - DNA, 369 bp, Arabidopsis thaliana columbia
  unsure (1)..(369): unsure at all n locations
ttccgggncgcgcccaggcttccgattttgcttaaaaccaagtaaacctaaccgttatgttattctctcccattttcttgactccggtgggttgtaccaccaaaagaggatgtgattgtgtgtaaactcgatcagcctcgagagtagagagccttatcctcacctttccaattcttgaatcttttcctcctccgttgtttttgtcaccaccgtgtagatggcagttatcgaacacaccaactgtaactacagtacacggatcaaaaacctcccaagtatattgctcgttccatcttggggtaaagctgtcaataattgtccgagttctgatccatttctgcccatactttgccacacaatacgcgtccg

SEQ ID NO: 161548 - DNA, 387 bp, Arabidopsis thaliana columbia
ctctctcactaaatcctccatggttccttttttctctgcaaccaatgatcctcaggagcgggctcctcctcagtggacatggttccctcctttcaccaacaccaaccccttcgcctttccaaaccacccctttttcaccggacccaccgccgtcgcgccgccaaacaacatccatctttatcaagcagctcctccgcagcagccacaaacatctccagttcctcctcatccatctatttcccaccctccttactctgacatgatttgcacggcgattgcagcgttaaacgaaccagatgggtcaagcaagcaagctatttcgaggtacatagagagaatttacactgggattcctactgctcatggagctttgttgacacaccatct

SEQ ID NO: 161549 - DNA, 393 bp, Arabidopsis thaliana columbia
gtcttcttctctatcaactctttgcagctcattttcttcttctctacatcccaactccaaaggctcacattctctttcagctgggttatcctccaaagcaaatgtttccgtccaatttctgggaaagaaacagtctccgcttctctcctcaactccgagatttctcactgttatcgccatggctccacctaaacccggaggcaaagctaaaaaagttgtgggagttatcaaacttgctttagaggcgggaaaagcaactccggcaccaccggttggtccggcgcttggttctaagggagttaacattatggctttttgcaaggattataatgcaagaactgctgataaagctggttatatcattcctgttgaaatcactgtcttcgatgataa

SEQ ID NO: 161550 - DNA, 295 bp, Arabidopsis thaliana columbia
aaaatttatttctcgcggactaggaataagattatgatgtcttggcaatcatacgtggatgatgacattatgtgtgatggggaaggcaaccatctaaccgtctccgaaattctcggccatgacggcagtgtctggactaagagcgccaaatttcctcagttgaagccccaagaaatcaatggattcaagacggactttcaggagcccgggtttcttgccccaaccggactatttttcggtggcgaaaaatacatggttatccaaggtgaacaaggagctttgttccgaggcaaaa

SEQ ID NO: 161551 - DNA, 418 bp, Arabidopsis thaliana columbia
catttctctccttcgaagcttttttttggtgaggccagaaaagaaaacgggaagtgaacaggttgcgatttcgtttgtgacgaacttggcaaaggcggcttttgggttaggtgtggcggcgacggcactaaactcgtcgttctacactgttgatggtggctagagagctgttttgttcgatcgattcaggggagtgttggatcaaaccgtcggcgaagggactcatttcttgatcccgtatctgcagacgccgcacatatacgatattcttacgaaacctcacactttctcctccaaatctggtactaaggatcttcagatggttaatctcacccttcgtgttctttttcgccctgaggtttcgcgtctcccgtacattttccaaacaattgggtcttgaatacgatgagaaggttct

SEQ ID NO: 161552 - DNA, 357 bp, Arabidopsis thaliana columbia
ggagatggccgcaacatccgccgctgctgcagctgcttcttccatcatgggtactcgggtggctcccggtttccatcccggttcaggtgggttcacagccgtgttcggtttcggaaagaagaaggcagctcccaaaaagagtgccaaaaagacggtgactacggaccggcctctttggtacccaggcgccatttctcctgactggcttgatggttccttggttggagattacggttttgatcccttcggtttaggcaaaccggccgagtatcttcaattcgatatcgattcactagaccagaatctggctaagaacttggccggagacgtgatcggaacccgtacggaagctgccga

SEQ ID NO: 161553 - DNA, 355 bp, Arabidopsis thaliana columbia
gcgagttctctgagtaaagctgatgtggccatgagcattcttctcactagttctacaactattgcttctggaatctttacacctttggttagagggcttctaattggaacacaaattcctgtggatgcacttgccatgtcgaaatctatactttaggtgggacttgttccaatcactcttggccttgtgttaaatacttatgcgaagcctgtggtcactcttcttaaacctgtgatgccgtttgttgctatggtatgcactccgttgtgcattggaagcccactttcgattaatcgcagtcagattctgtcagctgaaggtcttggattgattgttccaattgttacattccatg

SEQ ID NO: 161554 - DNA, 397 bp, Arabidopsis thaliana columbia
ggctctttcgttagatactggagtaccatggaatatgtgtcaacaaacagatgctcctgatcccatgatcaacacatgcaatggtttctactgtgaccagtttacacctaactcaaataataaaccaaagatgtggaccgagaactggagtggatggttccttggttttggagatccttctccttacagaccagttgaagatcttgcatttgcggtcgcgcggttttaccaacgaggtggaacgttccagaactattacatgtatcacggtggaacaaactttgatagaacaagtggaggaccattaatctctactagttatgattatgatgctccaattgatgagtatggactacttagacaaccaaaatggggacacttacgagatctacacaag

SEQ ID NO: 161555 - DNA, 367 bp, Arabidopsis thaliana columbia
cataactctcccgagccaacccaacttgcctttccttgactctgcaaccgctggaagctctgcttcctttttcagggaggcgagggattcatctctgtttaggaattggctaaggaatttggaatcagagagtggaattttagctgatggttcaatgacattaaaccaagttcttatccagggagttgatatgtttggcaaaagaattggatttctcaaatccaaagcggatattttcgacaaggaaactggtcaaaaggttccaggtattgtatttgcacaaggaccagctgtagctgtgcttattctcttggagccagatggtgagacttatgcggttctcactgaacaggttcgggttcctact

SEQ ID NO: 161556 - DNA, 371 bp, Arabidopsis thaliana columbia
atgttcctgaagctgttcctgctcctgcccttactgttgttactgccaacggaaatgctggagcagctgttgtcaaggctgacacaaagccaaaggccaaacctgccgaagtgaagcctgcagaagagaagcctgaatcagacgaggaagatgagtctgatgatgaagatgagtctgaagaggatgatgactctgagaaaggaatggatgttgatgaagatgactcaaatgatgacgaggaggaggattctgaggatgaagaaaaggaggagactcctaagaagcctgagccaatcaacaagaagaggccaaatgaatctgtatccaaaacacccgtctctggaaagaaggcaaaaccagcagcagcacca

SEQ ID NO: 161557 - DNA, 220 bp, Arabidopsis thaliana columbia
ggaaaccgggccgccacgcgtccgaccggtccttgttacggcttaggtttactttttatcgttcgggcttacggcgggaggatcttggtccttttttacgtgaaccggcgttatctttggtggaaacattaacccagctgtgactttcggtctgttcttggcccgtaaggtctttttggtgcgagccttgggttacatgataactcatggtcttggaacc

SEQ ID NO: 161558 - DNA, 326 bp, Arabidopsis thaliana columbia
ccaaggatccacttcatgctttcgtcctatgcaccagtcatctccgcggagaaggccttccatgagcaactctcagttgctgagatcacgaacagtgcctttgaacctgcttccatgatggcaaagtgtgacccgcgacatggaaagtacatggcttgctgtttgatgtaccgtggtgatgtagtccccaaggatgtgaacgcagcggttggcaccatcaagaccaagcgaactattcagtttgttgactggtgtcctactggattcaagtgggggttcaactaccagccaccaactgttgttcctggaggtgatcttgctaaagt

SEQ ID NO: 161559 - DNA, 385 bp, Arabidopsis thaliana columbia
gaagccaatggctctgattaagaagctgaggtaagcgaaaagggaggcaccacagggggagaagccagaaccagtgagaacccacttgaggaacatgatcatcgtccctgaaatgattggaagcatcattggagtgtacaacggaaagactttcaaccaggttgagatcaagcctgagatgattggtcactacctggctgagttctctatctaatacaagccggtcaagcacggtaggcctggtgttggtgctacccactcttccagattcattccccttaagtgaaaagcttctattggggaatgtgtttacttgctcgttatatgtggatctaagtacgtggatcttttatgtttttgaagctttataatgacattactttag

SEQ ID NO: 161560 - DNA, 167 bp, Arabidopsis thaliana columbia
cgtccgttctgtcccctctatgataatggattatgtttggggattcgaagcggaggttgcgggggggcatacttgttggagctgagagaggttcaagctaacaaggcgcccttacactgcccgtgacgtggtggttctacgtggccatctaaagcaaggctttgctt

SEQ ID NO: 161561 - DNA, 156 bp, Arabidopsis thaliana columbia
gaaaaaatggcgatggagatcggagaagatgaatggaaggtttgctgtggaagctccgaattcgcgaagcagatgtctacgtctggaccgttaacttctcaagaagcaatatatactgcaagagacatctggttcaaccaagttaatgtgacagat

SEQ ID NO: 161562 - DNA, 359 bp, Arabidopsis thaliana columbia
ccggaagatatgaagagaacaacctcaaggtcgtggggaaaaaaattaattagctgctcgttggagatggcaagggtaaaactggtattgcgggcggcaaaagtttatttgacaacatcactactttccacacggcgtcatttgctgcgaccggagctggatttattgcaagggacatcacattcgaaaactgggccggtccagcgaagcaccaagccgtggttttccgcatcggagctgaccacgcagtgatctaccgttgcaatatattcggttaccaagacacactctacgtgcattcaaaccgccaattctttcgtgaatgcgatatctacggtacagtcgattttatttttggt

SEQ ID NO: 161563 - DNA, 414 bp, Arabidopsis thaliana columbia
ggaatacccgggccgaccaagccgtccgtttaccaggcgattatgaaatcttcgtatactttcccgggcctaacggaaacaagggggcgggcttaaagtccaagggggtcaaaacatcaactttggttttaaaatgagaggacaggttgggggggatttaaaggattggaaatgggggtaaggttaaacactctgaaactggggtggattggattaaggctgggagtttggttaacaattaaccgttttcgttttccaccgttccaaattcctgaaattcaaactggtttgggtttaactacggatcctggttatgtagttccagtggaaatcaacgggaaccatatgtaaaattttgttgagaagcacgttttgggtaaaagcgggtttaaaggaattggtttaataaatttt

SEQ ID NO: 161564 - DNA, 416 bp, Arabidopsis thaliana columbia
aatacggggccgcccccccgtccgagaccaagggctgccttaatgcttttttcctttcttatggtggcctttccggttagggccggtttggttgttcttttaaccggactaaagtcttccgttgccttccaagccacccgaagggttaacaccacctttacttccataacaggcaacggcggaggagttaattgcttgcaggggtggcctccgatgggaaagaaaaagttggggatttttttttaccttcctgaccttaccgattccgaatgggttaaggaggtggcctccttaatccgaaccagggggattcctggggtggaattcaagtgggagcacggtttggggtcccgggagcacggtacctaacccggttactatgatggccggtcctggacattggggaagtttccttt

SEQ ID NO: 161565 - DNA, 291 bp, Arabidopsis thaliana columbia
tttttgaaaaggcttttaatgaccaaagccaacaaagttcctttttttttatttaggctgggggagttaataacctgccaaggaaaataaaattgccgccttggttggacctataactgatgatttgggggtccacaaaattccacccttgaaagtgcctgccttggaggttcacaaaaagagcaagggctcgcattgggaaagctggaggtgaatgcttaacctttgaccagttcgttttaaaagctccattgggccagaacacggttttttttaaaggacctaaaaatt

SEQ ID NO: 161566 - DNA, 295 bp, Arabidopsis thaliana columbia
cgaagttggcgatgttgatgatgattaaaagaaaagggggggggagccaagacttcgtcggggggggggtccaacgttgtccataagtggcctaacggaaccagtctttatgtccaagcgaagcttgttcagttgggggggaaggatccaaaaccagcgttggagttgttttggttggcgattaaagccggggatagagttgttggggcttttaaagccatggccttgttattgaaccaccagaccagagttgaagaagccattgacgcttttaaatcttttaaagatctttgtt

SEQ ID NO: 161567 - DNA, 342 bp, Arabidopsis thaliana columbia
attggttccatctttcccaatccttcaccttatccgttcctctcaaatttagggttttcttttttctcgaaggcctcgcggttttctgaatcatctttatctggttggggggtttcgttggatttctgaagaagggggtttctggaaccagggagttcataattcgcgaccttgacctatcgaccttcattattttataaaaccgtgaatgagattatgatggagtcgaagggtggtaaaaggaagtccagcagtagtagttccttattttccgaagctcccctcggttccagcattgaagccgttcgtccaaccgggggaatcaagaaattcaaatttttt

SEQ ID NO: 161568 - DNA, 361 bp, Arabidopsis thaliana columbia
ttttggttaatggttttctttttattaaccaattcttaaccaggaaggagctatggttgacccggtggttgatccggagtccttgaaggagatcattaaggttggccgggggttccgttttttaatggggaacaggaactgggctctaataaggctccgatgggcagggaccgaggctggaccctatgatgctaaatcaaagaccgggggacctaagggttttatcaggaccgaagaaaagcccactcatggggccaccaggggttggaagatcgttttcaatctttgtgggggcgtgaaagctaagcttccaaaattaacatccgcagaccgtgttcagttggctgggggggaaccagtt

SEQ ID NO: 161569 - DNA, 427 bp, Arabidopsis thaliana columbia
ggccgccccacccgtccgaaccaccaaaccattaatttttccacattttgtgagaaaaaaccagaccaggttttttagggggttaatggcaatggcggtttccgaagctgtcttaatgggcctgggttcttcgttcttaaccggaggcaaaaaaggtgccaccgaattggcaagcggcttaggcactgaacctaaaaaggtgggcaggaaaactttaatggtcgttgttgcggttgttaagcctaaaaaatttggaatccttgccgttaaaggggggggcaccttctttgaccctgaatggttcgatggttcgttaccagaaaatttcgggttcgaccaattgggttgggggaaagacccggtttttttgaaatggtccaaaagggtctgcttattccatggccgttgggcaatggcagcggttttt

SEQ ID NO: 161570 - DNA, 334 bp, Arabidopsis thaliana columbia
ccggggccgaccacacccgtccggatttttgggtcctccgaaggaccttttggtttccggggtccaagaagaggaacacctttggttgcccaaaccgaagaaggaaatgttattcaggcagtaggggatcaaggtttgcaccgggctgaagtaaggttaaaaggccctggactcggaagagatgcggctttacaagcttttcgtaaaagcggtttacttttaagtttcgtccgagaggtaacccctatgccacataagggttgtggaccccctaaaaaaagacgttgttggaactaaaaaaaggctaaaagggtttcaagagaaataaacgatt

SEQ ID NO: 161571 - DNA, 395 bp, Arabidopsis thaliana columbia
ttcagttgggtcgggtcgaaaaaaaaactaaccgtttggtttggatccggggggaacttgaaggattggttgttcccatgaggaaggaagttgttttggttaggaagaaaattgattttgtcaacaaagaattaaagccattgggccttccagttcaaaaaagggaccgggggtccaaagaagcttttgaagctttcaacgaaaagaccagggggagggggcagttattaaccaggctattggagttggtgggggaaagcgaaaggttgggattgaagaacctggaaaagctaaccaggaccatagattttttccactgactttgaatccaagacaggccaagaactttttgggccaaagatcatttttgtggggtttaaactttacgtttaggt

SEQ ID NO: 161572 - DNA, 321 bp, Arabidopsis thaliana columbia
caattggggcaaaacaggaaatttggttggtttccgttgaaggctacaaagtcgaaggaaagggccaattggaggaggccgaggactggtttaaccccgggggcagtttgaaccaatggggttgggttaccaaccaaaaggaatttgttgagtggaaggtgaaggacctaaaaaccggaaaatgggttatgttctttatgttgggatttttggttaaagcaatcgtaactggaaggggaccaataaagaactttgttgacaatttggccaatcaagtaaaaaaaaacgaatgggctttggcaacaaattttgtttccggaa

SEQ ID NO: 161573 - DNA, 315 bp, Arabidopsis thaliana columbia
gggccatggattaatgggttcgtggtggccagtctttttttaataaacgttccaccttaaataacggattttttccaccagaggactgggttttggggggccattccaaaccatgggccatccatgaatccttccaaaagggatcaaatgttgcaggccttgcagaacacatgggacctgggttttttgatcacatattcaggactccaaccaggttttcaggggaaaggatcaaggggggcttcagttttttattcaaggctggttgttccaccatggataaaccacggtttttaatcccggggttggtttcca

SEQ ID NO: 161574 - DNA, 339 bp, Arabidopsis thaliana columbia
aaaaaccttattttttttttaaccgctttttttccttaaaacttacggcccttagttttggaattcccagcaatttttttccggttttttttttacgttccggcggggttaactaacgggggttggtttccgtcctttgttccgtgggggggaaggaaccatcggcggttgaagaaccgtcgcagggggggaggactgaagaaccccagatttcaaatttgaaagggaggcttttggatttcaatcttcctgggcctatgagggtaaaggccatttccgggcttttgggccatggggggactgggaccatgtgtcggtatttaaggcaaaaggatggaa

SEQ ID NO: 161575 - DNA, 384 bp, Arabidopsis thaliana columbia
aaggttttaatgggggttaccctggctgggactttgttaaacacagggaaggttttggggaaaaatcccaaactcgccaggattattaacctttgggttactagcctccttaagggcgcaacttttttcctgccctacgtggttttaaagtttttaatcggttttggccttgggctgtttcggatcataccttggataatcttccacctgaaaaagaagtttttttgcaaaaccgaaccgggggtcaaagaagctgggtccccgggggacttaagttttgcgactggggttcccggggccatgctaatcctaacaataacgttctgttattcagccatggctcctttaatcctaatattcggcataacctacttgggtttaggc

SEQ ID NO: 161576 - DNA, 388 bp, Arabidopsis thaliana columbia
attttattaattaaggagcctttaactggcgcatcattttaaccaaatgggcggcttggccaagggtttattcttttccggttttgaccggaagggccgttaggttttcccgggcggcctccaaagaattgggaaccggccgaataaccatgcgcaaggcttccaggccaaccggtccatccggcagccattggtacggatccgcccgagtaaggtactggggtccattttcgggggggcctcgaagctacctaactggagagttccctgttaataacggtgggaacattgccggtttatccgccgatcccaaaaccttggttgggaaccgtgggctagaagttatccccagaaatggggcaaggctcgaagccctaggctgggtttt

SEQ ID NO: 161577 - DNA, 330 bp, Arabidopsis thaliana columbia
gggcccggaattccggggcggaccacaggcgtccgtttttttttaatccttaacctaaggtggtggtggttttttggggggttggggttaatttttttgacatttgttttgccaagaggtccgaagccaaggaatttgttggggttggggaaaaaaaggagggccttgtgttcaaggaggttaaggggttaatggatgcttccaacgggactttgccagaaaagggggatcagttactccaaatgatggttgaactgaaattagaaaaggactttttaagatccaaatttgggggactaaaggttgaggtagcgcagggtaggtttttcc

SEQ ID NO: 161578 - DNA, 336 bp, Arabidopsis thaliana columbia
cggagggaagaaggatcaaaaaggccgttctacgactgattgcttttgttcaagcctataatcaggaaggagggcctaatcgacctcgttgcccccatgggtaaacacgtttccagcaaaaatggcgtcctaaccgagatcaaatcctttggcagggtcaaatggggttccggttttagaaagctcgacggaggacactttcagggccaatggatgcaaataccaatgatgccacctccaaacatgaccaaggggcttaattacctgaccagggaagacaaactgttgcgctggtttttagttaaacaccgggccatcaaaattggccagtcggaa

SEQ ID NO: 161579 - DNA, 349 bp, Arabidopsis thaliana columbia
gaacctttaaaccgggggggggggaaggaatgggcgccttcgggaccgtccgtgccggaggttccgttgaagggatcggcggggaaccattccaggggctggaggggcgggacccatgttttcgttgcccccattggccaccacatccaaaaggtcgtggttaacgaaggcgaccttgattttaacgggtttttcaggggtggggactccccttttgatggaaggaaggggttgttcaaggggaagggggggttggttgttgggattaaacctttgccgaaaggaggactggttggtaacgtgatggagcttttaaaagttttggatttcatttacgaatttattccca

SEQ ID NO: 161580 - DNA, 308 bp, Arabidopsis thaliana columbia
gggccgaccatcggcgttaaggagggggcttaaatctcggcccgccggccgacgtggttttccggttggaccaaaagggggtggtcattcggaaggtggttcaccaggctttttgcaaaaaaggagatccgttttctgagggtgggtctcaatcctgctggtaagacacctttcctttacaagctaaaactgggggggatcgtccccactattccacccatggggttcaccgttgggactgtggaatccaaaaccatcagcttaaccgggtggaatgtggggggtcaagacaggatccgtccattggg

SEQ ID NO: 161581 - DNA, 379 bp, Arabidopsis thaliana columbia
atttaataaaggggggcggtttcccctaacatggtaacggttaaggaattggtggccccttattttcagggggccaaaaggttcagcaggccttttgtcgcccaaggggccacgcccccgaaaccacttgtggttaaaaggaaggtggccttgaaaccttccccacccaaggggatcatggtttttccagggttcctggaatccgccccaccttataacaatcaggtccaagcccttgtggaccgaaacctgaaaggccttgagctgccggagccttttgttaccaaggagttggtttcgttggcggcctttgcatggtgggtttttcccattttcgtggcttacagagggtttttttttttttttgtgacaaagccaa

SEQ ID NO: 161582 - DNA, 389 bp, Arabidopsis thaliana columbia
gccaaagggggatctgttcctttgaggaaccacccccaaaaaaaaaaaaaaaggatgggcttcaccggttgaaagggggggggaggaaaaggcttcggggttttaaaccttgtgggccaaagccaaaggtttttttgcggaaaacctgccaatttttccgcccccggaggcacccggggccacctttgttttcaaaggcgtgccccgggtgggagtaatttttccccccagggtttccgcaaagaatcctaactttaaatccatccttatctgccaaaccttttacatcctaaaaaggcccccagggccgatcgcttaagccccaatcccgaccccggtttctttggttgggacgcggccaacggttttggacgtaccggttaaggggg

SEQ ID NO: 161583 - DNA, 397 bp, Arabidopsis thaliana columbia
agtttaaactggtttggttcaaaagccggaggagggggattttattggttaataggatattggttttgttggaggttaaacgaaagggagtcatcgttttcggggccttggtaggaccactcaaggttttccaccccaaggcttttttagaagccaaaatagattttacgtttaggctttacgccttggactgcccgggttccattgaccgccagggggtcaagcaaatgttgatcgcccttttttgcgaatttgaaatgaaactggctgttgaaaccatagagatattcctcgttaggacatttgaggatgcagacgtgatataagatggaaaaatggttaaattagaggggggggatttcgtaaccaaaaatccatcatggcttaagatcatgac

SEQ ID NO: 161584 - DNA, 440 bp, Arabidopsis thaliana columbia
cggccccgtggccaaggttccatggttcggttttgaccaggagtccactttacttaagcaaaccgtaaaatggcctttaggtgggcctgttggagcgttccttggtcctaagggtccttactactggggggttggggctgccaggattggggggcgtgccatttaaaatgctcattccaaagctggtttttttgctggaattaacattaggggtcctaagggggaagttttgcctggccagggggggttccaagttggcccaaccgtaggaattgatgcaggtgatcatgtttggggggctagatcccttttggggagaataacagaccaggctgtggtggtcctaccacttgatcccaaaccgttggagggtgactggaacggggttggttgcccaaccatttacagtcccaagagcttggaaaaggaagggggttttg

SEQ ID NO: 161585 - DNA, 406 bp, Arabidopsis thaliana columbia
gcccgaaattccgggttcgccccacccgtccgagctttacagggatctaatttgtttagactgcagtcccggggtttatttaatggcagcaccaaagatgttgaaaaaccagaccacctttttagggaaatttccaaggcctggaatcctgtttttgaccggagcttaaacaccctgttcctaacaaaaatggtccggggttggtcgttgcccctaaagtccttttttgatccaaaggttcctatcaattttccatttgggaagggtcctttgagccctggtttccgggggggaacatgcttttcgaagatttcctaccggggaagaacgctgcattgcctgcaaactttgggaagcgtgttgtccagttcaggcattcccattaaaggcagaaaaaagggaagat

SEQ ID NO: 161586 - DNA, 419 bp, Arabidopsis thaliana columbia
gcccggatttccggggtggccccacccgtccggtttcggttcctttttttggggccaacccattttttaagggtttttttgagttttaaggacttcgaacctcctttgtttttcctttggccaagagatctttttccgaggggttggtttccttcgtcggtttccaaacttttgcatggagaagcaaggggggttccaggaagggggggaccgaggccaaaataaaggtggccatcaaggggttcggtgggatgggtgggacctttttggggggtgggcatggtcgtagggactctcctttggaggtcgtggccattaacgccactgtgggggttaaacaggcataacatttcttaaattacgactaaactttgggaatcttggacgctgttgtcaaactttaaggagactaagttttt

SEQ ID NO: 161587 - DNA, 378 bp, Arabidopsis thaliana columbia
gcccggatttccggggtggccccacccgtccgtgggccaaagccgggggggtttttggtttacaaaggtcggagataataaccgtcgggggtttcggaggaattgaatctgccccgtgggatttagatgaagttaatgttttacccgtggatgccagcttcgtggatcgaatggccatcaaaggatggcttcgatttacttcctgcaaagttccggcggtggataggggttggcgtgctctggaatttttagggttggataatgagaaagcttctgctgaattcgatggatggaaagtggattggatcataactgattactggttgcctggaatgactggttatgagcttttaaggaagattaaggaatcgtccaatt

SEQ ID NO: 161588 - DNA, 396 bp, Arabidopsis thaliana columbia
gtttcttaacaggccggccaaaaaacatgcggccaaataccaataaggtccccgttcggaaccgggtaaggtggcggggaccaacgtttaaaacgtaccataacgggggaccttgaccaacaaacttggacgttaacaaccaaaacaggcggtaaccttataattttggtggattcccccaaacaggaaatttacgtaactgatccgtccatgtttacgggggcatgtccccgacccagccatggattcgggtgggatggggacgctccgttttttttcaatgacaacaccgtttttacgctcctggacggttccgaaaacaaatcccttgaattaacaccgttaagtaacggtggcggccgggtttccttttgggatcgtaaaagctcctccatt

SEQ ID NO: 161589 - DNA, 381 bp, Arabidopsis thaliana columbia
ccgggggaccgggccgggatttccggggtggccccaggcgtccgaaaaaaaacctcagggggccaattttaaagggcgttgtttccgcgcaacaccgccaggcgcttccttttcttcttccaatttaaacgggccgtggccgttgcttgggtttttaacctccacacatcctttccggttttttttccttccaaataaccgacttcttacaccagaccgggtcctctttggacctcccttcttcttccgggtttttttaaggcggccgatttggggatctccagggtcgttgttttaatgaacggggttggtaccggatcgatctggcctttgaccttgggtttggctggctgggccgtcgaattgatgcatacgggggct

SEQ ID NO: 161590 - DNA, 342 bp, Arabidopsis thaliana columbia
gaggaacaagggcttcctttaggctcttttccgttcctatggtggcctttccggttaaggccattatggtcgttcttttcaacggccttaagtcctccgttgctttcccagccacccgaagggttaacaccgcctttacttccataacaggcaacgggggagggagttaactgcttgcagggggggcctccgatgggaaagaaaaagtttgggacttttttttaccttcctgaccttaccgattccgaattggttaaggaagttgactaccttatccgcaccagggggattccttgggttgaattcaagtgggagcacggatttgggtaccgggggcccggt

SEQ ID NO: 161591 - DNA, 339 bp, Arabidopsis thaliana columbia
acaccaccaaatttaaaacgtttaacttggggcggaactactaaacctaaagggccgcttaaccaagggttttttcttcccttgctttggccggtagggccggaaggttttcccccgcggaatttgaagtccttggaggcggccgggtgccaatgaggaagactgtggccaagccaaagggcccataaggcagcccatggtccggatctgaccgggtaaaggccttgggtccattttttggcgaataaccgagctaccttaccggggggttccccggggactacggttgggacaccgccggactttaagttgaccccgggacattcgcagggaaccggg

SEQ ID NO: 161592 - DNA, 367 bp, Arabidopsis thaliana columbia
gggattaataaagggtccaaggccaattattaattttaacaccggggaccaaaggtggttggacccgagtaaccgggatttaaggggggcaggaccagttgtttggaacatggttcctacttttacaggaccagttaaggctggggttttggggctccttaacctaaaaggaaaactaaacgggatcgttttccgggtcccaccaccaaacgtttaaggggtggatttggtggggcaggtttaaaagaagacatttgttgaggaagtaaacgttgttttaaaagattttgcaaagaaagagcttaaagtgttactcgttgtttgcgataagccattagggtccgtggatttaagatgctcagatttt

SEQ ID NO: 161593 - DNA, 366 bp, Arabidopsis thaliana columbia
agggagggcgtaaccgccgggttttttttcctttttttaatggccaccgccatggccgccaggtccaccgtttctttccgggccggcttgttaccaaacggggacttggggctgggcccaaacccttcggccttgaagggaccagaattcctaaccaacctggcattcccaaacggggagagtccaggattcgtcgattccattaattcaggccttaaccagggggccatgcttttggtggttcccgccggtaaattcgttgtaggacttgggaccgaagcttcgatcaaccaaggacttaagggggttaagggaaggtattactaactaacttttagggctgttggaactggggcccaagacggg

SEQ ID NO: 161594 - DNA, 395 bp, Arabidopsis thaliana columbia
ggggccgccccacccgtccgagaaattggggggggggtggagggtctggcttcagttgaatcaaagatgggcccttttttgtgggttttttttttccggcttttttggttggaggttcctgacctttcaggagggctttttttaaattggccttaaatttttccgcccttcctccttttttggatcaatttttccgggaaaaagccccattttttaaacccggccttgtcctggtaatcaagtttgtggggtaagggatgaatttggggggggatctggggggaagtttccttttttttttcaaatggcggtaaaaaaaaagagtttttattagggaggagatggagattagattttttcgtttttgttggggggatttgggtaaccgcgaaccc

SEQ ID NO: 161595 - DNA, 360 bp, Arabidopsis thaliana columbia
ttcactcccttaacatttttaataatccataacatttcctttggcaacccaccgtaaaccactacctaagagatcaatttggctggggggatgaagtgggcttgcttggtctgggctggcttgattggggccggtccaataacagcgaacgcccttttgagtgggggcaccgtcaacggcaacctggcagggggcattgcctacttgacccggggggctccacttacccaggggggctgcaccggcgttactaaccttaaaaccttggccaggccaaccccaaaccgtaagcaggcttgccgtggctttaaatctgccgttaaagccgttggtcccggtttaaaaactgcccgggcagtt

SEQ ID NO: 161596 - DNA, 305 bp, Arabidopsis thaliana columbia
ggccggccttttttggaggaacaggagccttttggttaagcccaaagttaaccattttttcttttttggaaactttccggtggccctaccatttaggggccattaattggttcctttggtttttttaaaacccaaaaccaaagttgttcttaaaagggttgggaagcctaaaagcagggttggggttggcatttttggaacgtttggggggatgggtttaacaaaggcgaaggagctattcgtgggtcgggtggttttgatcggtttcgttgaatcgtggtttgggggggcgtggccggaaaagg

SEQ ID NO: 161597 - DNA, 419 bp, Arabidopsis thaliana columbia
tttttccaaatttaattttttccgaaacccttttttttttaaaattttggggaaaccatgtttgacgccaggcaccattttggggccggcgaatccggagtttccaagacctatcttaaataagccggtaccatccgaaaggggggtaacatggtaataaaaaaccgtccttgcagggtggtgggggtttcaatttccaaaactggcaggcacggtaaccccaaaggtaacttggtggttatggatattttaactgttaaaaagctggaaaatatggttccattttccaacaatggggaggttcaacatgtgaaccgggtggattaccagtggatggatttaactgaggagggtttcgggggccttttaactgacagggggggcaccaaggatgatctaaagcttccaaccgatgatgg

SEQ ID NO: 161598 - DNA, 398 bp, Arabidopsis thaliana columbia
gccggcggacccggcccggatttccggggtggcccacacccgtccgaatggttggatcatttggggggaaaaatattggttgtttaagggatgcttttttcggggccatggaaaccagttggtttaacgggggaaaaaacggcggttaggggattcccgtcaggaaaatcaagaccgccaggcctttcggaattaacggcagcttggacttgggggacggcgtcaacccttccggcagaaagggcaggggatccggggtttccaagtccgtcgccaggtttggagctaacgtcgatggatccagtcttatttacaacaggaccaaggggtcagcgaggggtgactggtccaagggaggagtaaccggattggcaattggggcggtaactttggccgga

SEQ ID NO: 161599 - DNA, 359 bp, Arabidopsis thaliana columbia
aaaatttggaggatgggaggagggggccattgttcaaggttccataaccggggaaggtggccaatcggtatcagacgttaacataagcgccatgggtccttaaacttaatggccagaggatccaaacctttaatcagttatggaactaggggttgccgggttagcaaatgggggggatgactttgcagttgggggggcctccttaattaaaagcccgtttagtagaaggaacctgaagatggtccttgttagggccgttggggatgatggaggataccaggccttatttgatattatccatatcttggtattttaaaggcagggtttctaacattattaaaaaattccagaaattcaac

SEQ ID NO: 161600 - DNA, 290 bp, Arabidopsis thaliana columbia
ccttggcccccaaacccaaaggccgttggattttaaatttaagttcctcaaccccagccattaaatcctgaaaggctggaagataaattcggccaaaagggcataaaattttgggaatcaaccaccattcctatggtggagcttaaggtcagaaagggaggttcattaaacctgagtttatcaaagcctcatgtcctttattataacccaaaggtttcctggaaggacaagggtttcggggaagtccttaccacatttaatggtgataagagcacaggtggggttggtgt

SEQ ID NO: 161601 - DNA, 393 bp, Arabidopsis thaliana columbia
ggacccggcccgaccaacccttccgatactaatccgggaataatggcccttttcttttttaaaaaaacctaacagggaaaggggggtttttgaacctccaaaaaccaacaggtaaaaacctgggaacccctgtaccaaaaatggacttggaacaaaacttccgaattccatagcctaagggttcggggaaaaatctccgccaaaatctatagcccaataaaaagaatcggcaccggaaattattccaagggggacccaccaaccacacaaggcgggaaactaccggaaaaaaataataaggccccggccaaagtaaaagtccacgacattttaacaccagatggggaggtacccaaggtaccatccccggatggtaatataacccaaatcact

SEQ ID NO: 161602 - DNA, 400 bp, Arabidopsis thaliana columbia
tttgccaccatggtgccgtttccttttttctaggaaggggtttttaaccctttgggtttttttacaagaaatcgtttccaacctgcttaaaaaccacttttaaggatgtggatgaataaatctgaaaattggccaaaaggggatggcccccttcccaaatgggggggattttccgggactttaacggattccttaaggtaaagagggtaactggaggcaggatcttgaggatcctaaaagctaagggcctggctcttgaaatccttgaggatcggacccatctaataaaaaaggttgtggccatccgtaaccatttgggggggaccaggaaggccagggtttccaagttaaggttcattttggttgaaagcaggattaaccgcctcgttcgttttacaag

SEQ ID NO: 161603 - DNA, 393 bp, Arabidopsis thaliana columbia
  unsure (1)..(393): unsure at all n locations
cgggncgggaatccccgggccgccccacccgtccgtttcttcttaacttttccttctcctttaaaatcaaaaaaatcgtttgggccaaattggacgtggcgttaattttttaagcaaaatttggcggaggaagatagccgtgaagttaaacggggcgccaaatttgaggaatcaggtcctttttggaaggtgaccaagattgacggcaggatctgttcgaaaggagatgccaaggcggcccctttggtgcttcctcccgcggcggaggaatccggttgaacggcggttggatggcctgtaagccatggtagcgggattggcaagccgatcaggagaaaccaggggaatcctggttttttaacctgcctgggtcgcatggatgaattttgcagc

SEQ ID NO: 161604 - DNA, 431 bp, Arabidopsis thaliana columbia
  unsure (1)..(431): unsure at all n locations
ggncgggaatccccgggccgcccacacccttccggggccgtccaggaggacaattttttttttttgtttgaaaaaatgaagcacaccatggggaggcttattggtaatttaaaaaggaactgccaaatttttgtcaggacttggttaaaccagcctgccaggaaacccagaaaaagaatggcagggcaaaaaagggttgtaaagattttccttggtccaatttttggacttttccgccttgtggggcttggtcagatttttaagtccaccatgaaggtcagaaccggtaagggattaatttttgagaagttcagggttgttggtttccaaaagaagtgggcgcttccaattggttttgctgtggaccatggttgaaggacccgatttttgaggggttttaaatcaattgtccagaggctgaaaacctacaa

SEQ ID NO: 161605 - DNA, 446 bp, Arabidopsis thaliana columbia
tttaccaggcgattatgaaattctttttactttccctggccttacggagacaatgaggccttcttcatttcccatggggtcaagacatctactctcgttctcaaatgagatgacaagttggaggagattccaaagaattgagaagggtgtcaagttcaacactctgaaacttgtgttgatttgtataatgcttgtagctttgttcacgatctaccgttttctttttccaccgttacaaattcctgaaattccaactagttttggtcttactactgatcctcgctatgtagctacagttgagatcaactggaaccatttgttaaattttgttgagaagcacttttttgtttgaagcgtgtttcatggtattgctcttataaatcttaacgataacaagattgatcgtttcaaggaggttactaaaatctactttgttcatgtatctt

SEQ ID NO: 161606 - DNA, 409 bp, Arabidopsis thaliana columbia
agaacaatggcttcctctatgctcttttcctttactatggtggcctctccggctggggccactatggtcgctcctttcaacggacttaagtcctccgctgccttcccagccacccgcaaggctaacaacgacattacttccatcacaagcaacggcggaagagttaactgcatgcaggtgtggcctccgattggaaagaagaagtttgagactctttcttaccttcctgaccttaccgattccgaattggctaaggaagttgactaccttatccgcaacaagtggattccttgcgttgaattcaagttggagcacggatttgtgtaccgtgagcacggtaactcacccggtttctatgatggacggtactggacaatgtggaagcttcccttgttcggttgcaccgact

SEQ ID NO: 161607 - DNA, 378 bp, Arabidopsis thaliana columbia
atattgaagaggcttttcatgagcaaagtcatcaaagctcctctttctctatctaggcttgcggagttcatgactggcaaggaagataagattgccgtcttggttggaactataactgatgatttgagggtacacgagattccagccatgaaagtgactgccttgaggttcacagagagagcaagggctcgcattgagaaagctggaggtgaatgcttaacctttgaccagctcgctctcagagctccattgggccagaacacggttcttcttagaggacctaagaattcacgtgaagcagtgaagcatttcggacctgctcctggtgtgccacacagtcactccaagccatatgttcgggccaagggaaggaagttc

SEQ ID NO: 161608 - DNA, 434 bp, Arabidopsis thaliana columbia
  unsure (1)..(434): unsure at all n locations
ngaagtttgcgatgatgatgatgattcaaataagaggttgtgagagacaagactcgtcgggggcggggtacaactttgtccataagttgcctcacggagacagtccttatgtccgagcgaagcatgttcagttggtggagaaagatgcagaagcagcgatggagttgttttggatagcgattaaagcgagagatagagttgatagtgctcttaaagacatggccttgttaatgaaacaccagaacagagctgaagaagccattgacgctattcaatcctttagagatctttgttcaagacaagctcaagagtcattagacaatgtcctcatcgatctatataagaaatgtgggagaatagaacagcaagttgggttattgaagcaaaagctttggatgatatatcaaggagaagcattcaatggcaaaccaaca

SEQ ID NO: 161609 - DNA, 297 bp, Arabidopsis thaliana columbia
gccccaccctcccgattggttcatcctttcccaatccttaaccttatccgtttctctaaaattaagggtttcctcttttctcgaaagcctggcggtttcctgaaccatctctatctggtttgaggggtttcgtttgatatctggagaaaggggtttctggaaacaaggagttcataattcgcgatcttgatctatcgatcttcatttatatataaaagcgtgaatgagattatgatggagtcgaaaggtggtaaaaagaagtccagcagtagtagttccttattttacgaagctccc

SEQ ID NO: 161610 - DNA, 198 bp, Arabidopsis thaliana columbia
ttctggttcatcgctctctttcttctacacatatcctaaacgagtaggagctatggctgcggggattgttgatgcggagtacttgaaagagatcactaaggctcgccgtgagctccgttctctcatcgcgaacaagaactgtgctcctatcatgctccgattggcatggcacgatgctggaacctatgatgctcaatc

SEQ ID NO: 161611 - DNA, 446 bp, Arabidopsis thaliana columbia
caacaaccaaacactcatttttccacatcttttgagaaaaaaacagagcaagtttattagagatctcatggcgatggcggtctccggagctgtcctcagtgggcttggttcttcgttcctcaccggaggcaagagaggtgccaccgcattggcaagcggcgtaggcactggagctcaaagagttggcaggaaaactcttattgtcgctgctgcggctgctcagcctaagaaatcttggatccctgccgttaaaggtggtggcaacttccttgaccctgaatggctcgatggctcgctaccaggagatttcgggttcgacccattgggtttggggaaagacccggcttttctgaaatggtacagagaggctgagctgatccatggccgatgggcgatggcagcggttcttgggatcttcgtcggccaggcctggagcggtgtggcat

SEQ ID NO: 161612 - DNA, 459 bp, Arabidopsis thaliana columbia
gaaaccggggccgacccacgcgtccggatttcttggtcctccgcaggtacttgtggtttccggggtacaagaagaggaagacccttggctgcccaaaccgcagcaggaaatgctattcgagcagtagtggatcaaggtatgcaacgagctgaagtaaggataaaaggccctggactcggaagagatgcggcattacgagctattcgtagaagcggtatacttttaagtttcgtacgagatgtaacccctatgccacataatggttgtagaccccctaaaaaaagacgtgtatagaactaaaaaaaggctaaaagggtttcaagagaaataaacgattcaacgatctgatcaaataaaattactatggttcgagagaaagtcaaagtatctactcggacactacagtggaagtgtgttgaatcaaaaagagacaagaagcgtctttattatggacgcttt

SEQ ID NO: 161613 - DNA, 456 bp, Arabidopsis thaliana columbia
ctcagctgggtcgtgtcgaagaagagactaagcgtcttgctttgatccgtgaggaacttgaaggattagctgatcccatgaggaaagaagttgctatggttaggaagaagattgattctgtcaacaaagaattaaagccattgggccatacagttcagaaaaaggaacgagagtccaaagaagctcttgaagcattcaacgaaaagaacagggagaaggtgcagctaatcaccaggctaatggagttggtgggagaaagcgaaaagatgagaatgaagaagctggaagagctaagcaagaacatagattctatacactgactttgaatccaagacagtacaagaacttcttgggccagagatcattctctgagtgttttaactctacgtttaggtttggtggtggtgaatgtaatttatattttataatcgtcgtgtgttatattactactacaat

SEQ ID NO: 161614 - DNA, 289 bp, Arabidopsis thaliana columbia
ccatttgggccacacaagttattttgttggtttccgttgaaggctacagagtcgcaggaaatgggccattggtagaggccgaggacttgctttaccccgttggcagcttctacccattgggtttggctaccgacccataggcattcgctgagttgatggtgaaggagctcaagaacggaagattggctatgttctctatgtcgggatctttagttcaagccatctttactggtaaggggccaaatgaaaacttttgttgactatttgtccgatccatttaacatggttc

SEQ ID NO: 161615 - DNA, 242 bp, Arabidopsis thaliana columbia
acgttccaccttcaataaccgaatatctccaccagaagactcggtattcgcgtgccactcccaaccattgtccatacatgaatacatacaaaatggatcaaatgatgcaagccttgcagaacacatgggaactcggatatctgatcacatattcatgactccaaacaagttttcagaggaaatgatcaagtgtgcatcagctatatattccaagctcgctgatccaccatcgataaaccacg

SEQ ID NO: 161616 - DNA, 459 bp, Arabidopsis thaliana columbia
ccttctcttcttcttcttcctcttcaaaaccttatctcttttctaaacgctcttcttccttaaaacttactgcccttagtcttcgaattcccagcaatctctctcccgtcttctctctacgttccggcagcgataactcacggcggctcgtctccgtactctgttccgtcgcggagaaagaaacatcggcggatgaagaaacgtcgcaggaggagaagactgaagaaacccagaattcaaatctgaaaaggaagctttttgtattcaatcttccttggtctatgagtgtaaatgacatttccgagctctttggacaatgtgggactgtgaacaatgtcgagattataaggcaaaaagatggaaagaaccgaggatttgcttttgtaactatggcttctggagaagaagctcaagcagctattgataagttcgatacttttcaagtgtcaggggggatca

SEQ ID NO: 161617 - DNA, 449 bp, Arabidopsis thaliana columbia
aatgtcttcattggtgttacccttgctgggactttgttcaacacagtgaaggatatcgcgaaaaatcccaaactcgacatgattattaaccttttggctactagcctccctaagagcgcaactttcttcctgacctacgttgctctcaagttctttatcggttatggccttgagctgtctcggatcatacctttgataatcttccacctgaaaaagaagtatctctgcaaaaccgaagcggaggtcaaagaagcttggtacccgggagacttaagctatgcgactagggttcccggagacatgctcatcctcacaatcacgttctgctattcagtcattgctcctcttatcctcatattcggcatcacctactttggtttaggctggctagtcctcaggaatcaggcgttgaaagtgtacgttccatcatacgagagctatggaagaat

SEQ ID NO: 161618 - DNA, 443 bp, Arabidopsis thaliana columbia
attttattaactaaagagccttttactggcgctacacttttaccaaaatggccgcttcgacaatggttcaatcctttcctgttttgaccggaaaggccgtttagctatccccggcggcctgctaagtatttggaaccggccgaatcaccatgcgcaaagcctccaagcccaccggtccatccggcagcccatggtacgtatccgcccgagtcaagtacttgtgtccatcctccggggagcctccgagctacctcactggagagttccccggtgattacgggtgggacactgccggtttatccgccgatcccgaaaccttcgtttggaaccgtgagctagaagttattccacaacagatgtgccatgctccgagccctaggctgcgttttccctgagctattggctaggaacggggtgaatgtcgtagaaacggtttggttcaa

SEQ ID NO: 161619 - DNA, 457 bp, Arabidopsis thaliana columbia
ctcttctttaatccctcacctcaagttgtcgtcgctctcttgagtgtctgggttcatctttctgacatctgctctgccaagatgtccgaagacaaggaatctgatgtggttggagaagaagaggagagccatgtgatcaaagaagataaagagttaaatgatgcctccaacgagactctgacagaaaatggtgatcagctactccaaatgattgctgaactgagattagaaaatgactttctcagatcccaatttgagggactcaaggatgaggtagcgcaaggtaggtctctccagaaagctgagcaagtggaagcggactctgctcagctgaaacaacttcaagaacaggtcgcatcattgagcagagaaattgatgtggaaaaacaaactcgagttgcagctgagcaagctcttgagcatctaagggaagcatactctgaggctgatgctaaat

SEQ ID NO: 161620 - DNA, 392 bp, Arabidopsis thaliana columbia
ttcttctttaatccctcacctaattttgttgtctttctctagagagactgggatgagggttgctgacatttgctctggcaagatgcccgaaaacaaggaatctgatgtggttggagaagaaaaggagagccatgtgttcaaagaagataaagagttaaatgatgcctccaacgagactctgacagaaaatggggatcagttactccaaatgattgctgaactgaaattagaaaatgactttctcagatcccaatttgaggtactcatggatgaggtagcgcaaggtaggtctttccagaaagcttagcaagtggaagcggactctgttcagttgaaatcaactttaagatcaggtcgcatcattgagcaaagatattgatgggtaaaaacaa

SEQ ID NO: 161621 - DNA, 270 bp, Arabidopsis thaliana columbia
ttgaatagggggccgacccatcttccgttaatacaactttagtaaccaaacttatttttttaaatggccaaacctctacacaggaaccgggtttcttttcctcagagcccccaaccccctcccatttatcaactccgccagacttcttgacgagatccaacctcatcctaaattagtcccaaccgtccaaatcccctctgtgtctccaacctaatctcaggaagatgttggaacctattacaacccattactatcaaccactaccacaac

SEQ ID NO: 161622 - DNA, 440 bp, Arabidopsis thaliana columbia
gaaactttaaaccgggagagagagaaggaattggcgacttcgggaacgtacgtgacggaggttccgttgaaaggatcggcggagaaacactacaagagctggaagagcgagaaccatgtcttcgctgacgccattggccaccacatccaaaatgtcgttgttcacgaaggcgaacatgactctcacgggtctatcaggagttgggactacacatatgatggaaagaaggagatgttcaaagagaagagagagatagatgatgagaataaaacattgacgaaaagaggactggatggtcacgtgatggagcatctcaaagtatttgatatcatctacgaatttattcccaaatctgaggatagctgcgtctgcaaaatcactatgatatgggagaagcgcaacgatgactttcccgaaccaagcggctacatgaaattcgt

SEQ ID NO: 161623 - DNA, 456 bp, Arabidopsis thaliana columbia
tttctttggacgaccatcggcgttaaggagagagcttagatctcgtgccgtcgtgcgacgttgttttccggcttgatcaaaatggggttgtcattcggaaagttgttcagcaggctctttgcgaagaaagagatgcgtattctgatggttggtctcgatgctgctggtaagacgactatcctctacaagctcaaacttggagagatcgtcaccactattccaaccattgggttcaacgttgagactgttgaatacaagaacatcagcttcaccgtgtgggatgttgggggtcaagacaagatccgtccattgtggagacattacttccagaacacacagggacttatctttgttgtggacagcaatgatcgtgaccgtgttgttgaagccagggacgagcttcacaggatgctgaatgaggatgaattgagggatgcagttctgcttgtatttgct

SEQ ID NO: 161624 - DNA, 445 bp, Arabidopsis thaliana columbia
cattcatcaaagagtgctgtttcccctcacattgtcacggttcaagaatttgtagaccccggttatcaggaggccaaaaagttcagcaagccatatgtcgaccaagtggccacgaccacgaaaccacatgttgataaaatgaaggttgccatgaaaccttacacaaccaaggtgatcatcgtttatacagagttccttgaatccgccacaacttatcacattcaggtccaagcccatgttgaacgaaaactgaaaagccatgagctgacggagccttttgctaccaatgagtttgtttcgtttgcggcctctgcattgttggtatttcccatcttcgatgcttacagagtgctctcttctctcttctgcacaaagacaaagaaacctgttaaacacccttatcaccatggtcgttgtaaggccataagggctcacactgacaagt

SEQ ID NO: 161625 - DNA, 443 bp, Arabidopsis thaliana columbia
gacaaagagagatctgatcctttgaagaaacaccacctaaaaaaaaaaaaaaagattggcatcagcggttgaaaaggtggtggaagagaaggcttcggtgatttcaagcttgttggacaaagccaaaggtttctttgcggagaagctggcgaatattccgaccccggaagcaaccgtggacgacgttgatttcaaaggcgtgacacgtgatggagtagattatcaccccaaggtctccgtcaagaatccttactttcaatccatccctatctgccagatcttttacatcctcaagagtgccacaaggacaatcgcgtcaggcacgataccggacccggtttctttggttgggagcggcacaacggttctggacgtaccggttaaggtggcttataacataccggttagtctgatgaaagatatgtgtacggactgggacattg

SEQ ID NO: 161626 - DNA, 428 bp, Arabidopsis thaliana columbia
cggaaggaagaaggatcaaaaatgccgctctacgactgtatgcttctgttcaagcctataatcaggaaggagggcctcatcgacctcgttgcgcgcattggtaaacacgtttacagcagaaatggcgtcctcaccgagatcaaatcctttggcaaggtcgaattgggttacggtattagaaagctcgacggaagacactatcagggacaattgatgcagataacaatgatgacaactccaaacatgaacaaggagcttcactacctgaacaaggaagacaaactgctgcgctggctcttagttaaacaccgtgacatcaagattggacagtcggaaaaggaagatagtctgactgtgcctaacagactcactagtgggagcttatatgatggatcctcctcggacgaaaatgacaacaacattttagg

SEQ ID NO: 161627 - DNA, 169 bp, Arabidopsis thaliana columbia
  unsure (1)..(169): unsure at all n locations
gacaaagagaggtctgagtctttcggaatgtcttgtctaaaaaaaaaaaaaaagcnttgtatgagcggttgaaaaggtggtggaaaaaaaggcttccgtaatttcaaacttgttggacaaagccaaaggtttctttgcggagaagctggcgaatattccgacccccgaa

SEQ ID NO: 161628 - DNA, 461 bp, Arabidopsis thaliana columbia
agctttacggggatctcatctgtctagactgcagtcccgtggtatatcttatggcagcaacaaagatgatgaagaagcagagcaactttctaaggaaatctccaaggactggaatactgtctttgaacggagcataaacaccctgttcctcacagaaatggtccgcggtttgtcgctgaccctcaagtacttctttgatccaaaagttactatcaattatccatttgagaagggtcctctgagccctcgcttccgtggtgaacatgctcttcgaagatatcctaccggggaagaacgctgcattgcctgcaaactctgtgaagctgtatgtccagctcaagcaatcacaatagaggcagaagagagggaagatggaagccgcaaaaccactaggtacgatatcgacatgacaaaatgcatctactgtggtttctgccaagaagcttgccccgttgatgcaa

SEQ ID NO: 161629 - DNA, 440 bp, Arabidopsis thaliana columbia
gtctcctaacaagcctgccaaaaaacatgcggccaaatacccatcaagtacccgttcggaaccgggtcaggttgcggtgacccacgtttcacacgttacatcacgtgtgaccctgaccaacagactttgacgctcaccacccacacaggcagttaccctatcacttctgtcgactacgccaaacaagagatctacgtcactgatccgtccatgtctacgtgtgcatgtacccgacccagccatggattcgggttggattgggacgctccgttttctttccatgacgacaccgtttttacgctccttgactgttccgtagacgaatcccctgtattcacaccgttaagtaacggtagcggacgtgtttccctctgtgatcgtcaaagctcctccatttgcaccttcttgtactcaaattgcagggccataagcctcataaa

SEQ ID NO: 161630 - DNA, 454 bp, Arabidopsis thaliana columbia
atggccagagacggtggtgtttcttgtttacgaaggtcggagatgatgagcgtcggtggtatcggaggaattgaatctgcgccgttggatttagatgaagttcatgtcttagccgttgatgacagtctcgttgatcgtattgtcatcgagagattgcttcgtattacttcctgcaaagttacggcggtagatagtggatggcgtgctctggaatttctagggttagataatgagaaagcttctgctgaattcgatagattgaaagttgatttgatcatcactgattactgtatgcctggaatgactggttatgagcttctcaagaagattaaggaatcgtccaatttcagagaagttccggttgtaatcatgtcgtcggagaatgtattgaccagaatcgacagatgccttgaggaaggtgctcaagatttcttattgaaaccggtgaaactcg

SEQ ID NO: 161631 - DNA, 477 bp, Arabidopsis thaliana columbia
gttcccgcctcgccccagccttaatttttgcaactttgccttcgccattgttactcacactgagaaagtccattctcacatggatgcaaaaactcccattttctctaactcgaggtacgaatgatctttctccattatctcttactcgaaaccctagcagcatcagtctgatggtgaaagctagtggagaaagctcagattcatcgactgatctcgacgttgttagtacgattcaaaatgtttgggataagtctgaagataggttaggtcttattggttggggttttgctggtattgtagctctttgggcatcattgaatctcatcacggcaatcgacaaattgcccgttatctcgagcggattcgaactagttggtatcttgttctccacgtggttcacatatcgatatctcttgttcaaaccggacagacaggagctttcgaaaattgtcaagaaatcagtagcggatttacttg

SEQ ID NO: 161632 - DNA, 397 bp, Arabidopsis thaliana columbia
agtttaaacttgctttgttcaaaagccggaagagggagaatatatttgctaataggatatttgatatgtttgatgttaaacgaaaaggagtcatcgatttcggggactttgtaagatcactcaatgttttccaccccaatgcttctctagaagacaaaatagattttacgtttaggctttacgacatggactgcacgggttacattgaacgacaagaggtcaagcaaatgttgatcgcgcttctctgcgaatctgaaatgaaactggctgttgaaaccatagagataatactcgataagacatttgaagatgcagacgtgaatcaagatggaaaaattgataaattagagtggagtgatttcgtaaacaaaaatccatcattgcttaagatcatgac

SEQ ID NO: 161633 - DNA, 460 bp, Arabidopsis thaliana columbia
gcttcggctactttctctgtggccaaaccatttcttcagggtttttctgagttctcaggactgcgaagctcctctgctcttcccttggccaagagatcttcttccgatgagtttgtttccttcgtcagtttccaaacttctgcaatgagaagcaatggtggatacaggaaaggggtgaccgaggccaagataaaggtagccatcaatgggttcggtaggattggtaggaacttcttgaggtgttggcatggtcgtaaggactctcctcttgatgtcgttgtcattaacgacactggtggtgttaaacaagcatcacatctcctcaaatacgactcaactcttggaatctttgacgctgatgtcaaaccttcaggagactcagctctctctgttgatggaaagatcatcaagattgtatctgatcgtaacccatctaatctccccctgggggaactaggca

SEQ ID NO: 161634 - DNA, 338 bp, Arabidopsis thaliana columbia
ggttgaaatatacttgttatgcaacactattttctgtttttaaggagcaagcattaaactgtgggggaaaagaagcattttggcttggacataagctcataagcaacttcaactttggcataacgaatagctacaagtggtgaatttttcagcttaaaaacattgctaggatgattgttgagaaggagaaatgcatcacccaagctttgtatcaagatctttctaagcctgagcttgaagcttttttagctgtgatttggaattacaaaatcatcctgtttgcttgcaatcaaagagttaatgaactggatggctccagaaacgttcaaaacttctga

SEQ ID NO: 161635 - DNA, 455 bp, Arabidopsis thaliana columbia
gaaccaacgaaaggtctttcctagtctagtcacttaacttctacggctgctgccatggcgggttctttctattccactgctcccacgacaccggttcttcgattcagagccaactactccaagcctctcctctctctcccagattcgggttggaggataatctctccggcgatatctccctctacacgcttaattgcgtgttcgttcaagacagacaagcttccgttcggtgccggcgtcaatctctccggtggccccgttgtcaagcgctctctacagaagagattggtgataaggtctgctactatggacgaaatcgaagcagagaagtctgctatggagactgatgttaaatcaaagatggagaagactattgaaacgcttcggacgagtttcaactccataaggactgggagatccaatgcagcgatgcttgacaagattgaggtggaata

SEQ ID NO: 161636 - DNA, 371 bp, Arabidopsis thaliana columbia
aaaaaaaacctcagagggccaaatctaaagggcgatgtttacgcgcaacaccgccacgcgcctcccggtcctcctccaatctcaacgcgccgtcgccgctgcctcggtctctcacctccacacatcccttcccgctctctctccctccacataaccgacttcctacaccagacctggtcctccttcgacctcccctcctcctcctggtctctctaaagcggccgaatttgtgatctccaaggtcgatgatctcatgaactgggctcgtaccggatcgatctggcctatgacctttggtctcgcttgctgcgccgccgaaatgatgcataccggggcggttcgcttcgatctcgatcgatttggttttattt

SEQ ID NO: 161637 - DNA, 393 bp, Arabidopsis thaliana columbia
cttcctttcaagaaaattggctgaatccattttttgttttctccagagcctgccctaaacaagagcagggggcatttttaatggggtttggccaacaaagatgaatcttaacctgttaaaaaaaaaatttttgatgcccgcaagcttatctttaatagagctgagcatttttccaaagaataccctgagaaggataccgagttgatcccttaaaatcggtaggctaagttgaaaggaggtttctacttttaccctgaggctaagttgttctttatcattcgtatccatggtatcaatgccattgacccaaaacccaataatgatttttcctcttctccctatgaaacaatactttaatggtgtttttcttaaggttgtcattgtaacatttaa

SEQ ID NO: 161638 - DNA, 447 bp, Arabidopsis thaliana columbia
acaccaacaaattttaaacgttttactttgtgctgcactactcaacctaaatggccgcctaaacaatggctctctcctcccctgccttcgccggtaaggccgtcaagctttcccccgcggcatctgaagtccttggaagcggccgtgtgacaatgaggaagactgttgccaagccaaagggcccatcaggcagcccatggtacggatctgaccgtgtcaagtacttgggtccattctctggcgaatcaccgagctaccttaccggagagttccccggagactacggatgggacaccgccggactttcagctgaccccgagacattcgcaaggaaccgtgaactagaagttatccacagcaggtgggccatgctcggagccctaggctgcgtcttccctgagcttttggctagaaacggagtcaagttcggagaggcggtttggttca

SEQ ID NO: 161639 - DNA, 457 bp, Arabidopsis thaliana columbia
gaagatgaataataacatggctagaacaagatacgatcgtattgagaataaccagtcaagcgctcagtgttccaaccaccatagtcccagacctggaaaaaaggaagacttcaaatctccttcttcttggggctctacctctacctactggctacatgcttgtaccttaccaaaccttctttgttcctatcccaacctaaagtggtggtatgaggtacaccacccaaggctccccttgacaacgacttaactaaaccagaacggctgatgactcttggacacccagaccagaacctcttcccatgtttaaagggagatccgacttacctagttgtagagaacgacaagactctagcgacatacggtatcaacgcagtgtgcactcatcttggatgtgttgtgccatggaacaaaactgaaaacaagtttctatgtccttgccatggatcccaataca

SEQ ID NO: 161640 - DNA, 327 bp, Arabidopsis thaliana columbia
atgaaagacagaccatctttggccaaaattttaaaccctgcgtggaaaaaactaaacatcccgggactgacaaactgatagaggctacttaaagaaacatgggattgattgtggctactacgtctgctattaacgggtgcagttttatagttactacgcctaacaacactagcttgatgaggggagcgcctttattatccttaggggctgagctggctctgactgatcctctcaaagtaatggatgactctgctaataaagtgtactacctgctggatagtcatcatgaaaatttcatgcgtaacaagtttgctaatccggaaaaca

SEQ ID NO: 161641 - DNA, 454 bp, Arabidopsis thaliana columbia
cggtatcataaagggtacaatgacgactactcactcttacaccggtgaccagaggttgctggacgcgagtcaccgtgatctaaggagagcaagagcagctgctttgaacattgttcctacttctacaggagcagctaaagctgtggctcttgtgctccctaacctcaaaggaaaactcaacgggatcgctctccgtgtaccaacaccaaacgtatcagtggttgatctcgttgtgcaggtctcaaagaagacatttgctgaggaagtcaacgctgctttcagagattctgcaaagaaagagcttaaaggtatactcgatgtctgcgatgagccactagtgtccgttgatttcagatgctcagatttttcaacgaccattgattcatcactcactatggttatgggagatgatatggttaaggtgattgcttggtatgataatgaatggggttac

SEQ ID NO: 161642 - DNA, 443 bp, Arabidopsis thaliana columbia
acgaagacacatagaggaagaagtcgccggttaagtgaaaagacgttgatggtgattatgaggaagatgaaagattcagtctggttcctcgtcgtaggcctcttctctttatctgttttggtctctcagtcgatcgcagggagagtcaaagctccattgttgcagagcaatactggtggattagttttcagcaaatcctccaattcgatctatgatacttctatgtacggacgcttgcagctcaacaatggccttgctcgaactccacaaatgggatggaatagctggaatttctttgcttgcaatatcaatgaaactgtcataaaggaaactgctgatgctttggtttcatctggcctggctgatttaggatccatacatgtcaattttgatgattgctggtccaatttgttacgcgattcaaagggtcaattgtttcctca

SEQ ID NO: 161643 - DNA, 427 bp, Arabidopsis thaliana columbia
ttggagggcgtaaccgtcgggtctttcttctttcttttaatcgccaccgccatggccgccaagtccaccgtctccttccgtgacggcatgttaccaaacggagacttcgagctaggaccaaaaccatcagacatgaaaggaacagaaatactaaacaaactagcaataccaaactgggaagtcacaggattcgtcgaatacattaaatcaggacataaacaaggagacatgcttctcgttgttcccgccggtaaattcgctgtaagacttgggaacgaagcatcgatcaaacaaagacttaaagtggttaaaggaatgtattactcactcacttttagtgctgctagaacttgtgcacaagacgagagacttaacatatctgtagcacctgactccggtgtgattccgattcagacggtttatagta

SEQ ID NO: 161644 - DNA, 459 bp, Arabidopsis thaliana columbia
cttctcccaatctcatcttctccgaaaacctttcttctctcaaatttctgtgaaaacatgtgtgacgacgagcaccactttgaggccagcgaatccggagcttccaagacctatcctcaatcagccggtaacatccgtaaaggtggtcacatcgtcatcaaaaaccgtccctgcaaggttgttgaggtttcgacttccaaaactggcaagcacggtcacgccaaatgtcactttgttgctattgatatcttcactgctaagaagcttgaagatattgttccatcttcccacaattgtgatgttccacatgtgaaccgtgttgattaccagttgattgatatcactgaggatggcttcgtgagccttctcactgacagtggtggcaccaaggatgatctcaagcttcccaccgatgatggtctcaccgcccagatgaggcttggattcgatgagggaaag

SEQ ID NO: 161645 - DNA, 462 bp, Arabidopsis thaliana columbia
gtagctttctctctctctctctctctctctctcgcgaagaagaagaagaagaaggagatcagggaactcgaagggtgtgtgtgtgtgtttgccttctcttgtcttttagttttttctctctttggctgtgatttcgtcggcgaagagagacatagatcggatatggcggctgataatacgggttcgaaatcgagctccgctgcggattcttacgttgggagcttgattagtttgacatctaagagtgagatcagatacgaagggatcctttacaatattaatacagatgaatccagtatcggacttcaaaacgttcgatcatttggaactgaaggaaggaaaaaagatggtccacaagttcctccaagtgacaaagtttacgagtccatattgttccgtggaactgatatcaaggatttgcaagtcaaagcttctccaccagttcagcctcctgcatctact

SEQ ID NO: 161646 - DNA, 457 bp, Arabidopsis thaliana columbia
ttcactcccttaacacttttaataatcaatcacatttcctttggcaaaccaacgtaaaacactaactaagagatcaatatggctggagtgatgaagttggcatgcatggtcttggcttgcatgattgtggccggtccaatcacagcgaacgcgcttatgagttgtggcaccgtcaacggcaacctggcagggtgcattgcctacttgacccgaggtgctccacttacccaagggtgctgcaacggcgttactaaccttaaaaacatggccagtacaaccccagaccgtcagcaagcttgccgttgccttcaatctgccgttaaagccgttggtcccggtctcaacactgcccgtgcagctggacttcctagcgcatgcaaagtcaatattccttacaaaatcagcgccagcaccaactgcaacaccgtgaggtgatgagcgacggtcaaatgaagct

SEQ ID NO: 161647 - DNA, 427 bp, Arabidopsis thaliana columbia
ctccgtccattttttgaggaacaagagccctttggctcatcccaaagtccaccatctcttcctctctggaaactctccgggggcgctaccatctaggagacattcattcgttcctctcgctctcttgaaacccaaaaccaaagctgctcctaaaaaggttgtgaagccccagagcaaggttgcggatggcatctttggaacgtctggtgggattggtttcacaaaggcgaatgagctattcgtgggtcgtgttgctatgatcggtttggctgcacagccgcttgctgaggcgttgccggcaaaagggttattagctcagctgaatcctgggacaggggtcccgatttacgaagcagagccatcgcttttgttcttgaacttgcacacttcgttgggagccatgggagctctcgaagtcagaggaaat

SEQ ID NO: 161648 - DNA, 463 bp, Arabidopsis thaliana columbia
gaagaacaatggcttcctctatgctctcttccgctactatggttgcctctccggctcaggccactatggtcgctcctttcaacggacttaagtcctccgctgccttcccagccacccgcaaggctaacaacgacattacttccatcacaagcaacggcggaagagttaactgcatgcaggtgtggcctccgattggaaagaagaagtttgagactctctcttaccttcctgaccttaccgattccgaattggctaaggaagttgactaccttatccgcaacaagtggattccttgtgttgaattcgagttggagcacggatttgtgtaccgtgagcacggtaactcacccggatactatgatggacggtactggacaatgtggaagcttcccttgttcggttgcaccgactccgctcaagtgttgaaggaagtggaagagtgcaagaaggagtaccccaatgc

SEQ ID NO: 161649 - DNA, 449 bp, Arabidopsis thaliana columbia
aatagttggatcatcttgtgagaaaaataatggctgcttcagggatgctatcttcggggacattgaaaccagctggtttcacggtggagaagacggcggctagaggattaccgtcaagaagatcaagaccgacaagcccttcggaattaacggcagcatggacttgagggacggcgtcgacgcctccggcagaaagggcaagggatacggtgtttacaagtacgtcgacaagtatggagctaacgtcgatggatacagtcctatttacaacgagaacgagtggtcagcgagtggtgacgtgtacaagggaggagtcaccggattggcaatttgggcggtaactctcgccggaattcttgccggaggtgctcttcttgtgtacaacacaagtgctttggctcagtaaatcttaaagttgttagcgcatgtgtaatcatgtttctataaat

SEQ ID NO: 161650 - DNA, 414 bp, Arabidopsis thaliana columbia
aatagttggatcatcttgttagattatatattttctgctccagggatgctatctggggagagattgaatccaactggggtaagggcgtataaaacggcgtctagagaattaccttaaagaagataaagaccgacaagcccttcggatttaacggcagcatgtacttgagggacggctttaacccctccgtcagaaagggcaggggattcggtgtttacaattccgtagacaagtatggacctaacgtctttggatacagttctatttacatcaagaacaaatgttcagcgagtgttgtcttgtacaaggatggatttacataattgccaattccattcggttacttttcacctgtattttttccgaaggtgtcttttttgctttcaacaaaagtttttttcctaataaaatttt

SEQ ID NO: 161651 - DNA, 492 bp, Arabidopsis thaliana columbia
gggatttccgggtccgccccacccgtccgcaattttagaaaatgggaggagggggccattgttcaaggctccttcaccagggaaggtagacattctgaaacagacgttcacatcagcgacaatggtccttcaacttcattgccagaagatccaaacctttcatcagataatgaactagaggatgacgagttagcagattggggtgatgactctgcagctggtggtgcctccctcactcaaagcccgcttagtagaaggaaactgaagatggtacttgataaggacgatgaggatgattgaagataacaagacttatatgattatatccatatctttgttatataaatgcaaggtatctcacaataataaaaaaatccagaaattcaactttcatgttacatttagtaatatactgtaattcattggaaaatagttggtgttttagtctttgttttgccatattgttgctctatgttttgacttgttatcaat

SEQ ID NO: 161652 - DNA, 461 bp, Arabidopsis thaliana columbia
gtgagaatctgccaccatgggtcgtttgcactttcgaggaaagggtatttcagccggtgcgttgccttacaagagagggtctccgagctggctcaagaccacctttcaggatgttgatgaatcaatctgcaaatttgccaaaaagggattgaccccttcccagattggtgtgattctccgtgactttcacggtatccctcaggtcaagagtgttactggaagcaagatcttgaggatactcaaagctcatggccttgctcctgagatccctgaggatctgtaccatctaattaagaaggctgttgccatccgtaaacatctcgagaggaacaggaaggacaaggattccaagttcaggctcatcttggttgagagcaggattcaccgcctcgctcgctattacaagaagaccaagaagctccctcccgtctggaagtacgaatccactaccgcgagcaccc

SEQ ID NO: 161653 - DNA, 452 bp, Arabidopsis thaliana columbia
ttggcgggtgaaataaactttaaggcatgggcttggttgcccatgaccgttccctttttccgggccgtggcaaaggttccctaaccaccgggggacgaaggctctccgtagtcagagcctccacgagcgacaacacacccagcttagaagtcaaggaacagagcagcaccacaatgaggagggacctcatgttcacggctgcagctgcagcggtttgttctttggctaaggtagccatggctgaagaagaagagcccaagcgagggacagaggcggccaaaaagaaatacgcacaagtttgtgtcacaatggcctacggccaagatctgccgctactgattcaacaacccaccttctgcatgtctatctctctctttcaatttcggtaaattttctcaattaagtttgggctgtaatcgtataattgatcatcaatttaccaaaagcccttt

SEQ ID NO: 161654 - DNA, 463 bp, Arabidopsis thaliana columbia
agaaatttgtgtgagagtagagagtcttgcttcagttgattcaaagatgggccctttttttttcgtttgctctttcctgctttttttgttggtagtttctgatctctcaggaaggctttttataaatttgccctcaatttctccgtccctactactctttttgatcaatttctacgggaaaaagcaccaatctttaaacccgggcatgtccttgtaatcgagtatgttgggtaagtgatgaatttgtggtgagatctggtgagaagtttcctcttttttctcagattgcggtaaaaaaaaagagtttttaataaggaagagattgagattagattttatcgcttttgtttgtgtgatatgggtaacgtgaacgcgagagaagaagcgattagtaacaacgcttctgctgttgaagacgaagacgctgagatttgttctcgggaagctatgtctgctgcttctg

SEQ ID NO: 161655 - DNA, 394 bp, Arabidopsis thaliana columbia
  unsure (1)..(394): unsure at all n locations
ccgcctttccttactctacaaattggcttcncttttctctttttctnggctcccaaaaccaaaagccgttggaagttcaatttcaggtcctcacacacanacaataaatactgaaaagcttgaagataaattcggacgaaaaggcataaaattctcggaatcaaacaacattcctatggtagagcttaaggtcagaaatggaagttcattaaaactgagtttatcagatgctcatgtacttccatataagccaaaggtttactgtaaagacgagggattcgaggaagtcctttacacatttgatggtgatgagagcataggtggggtttgttgttttattataaacggggaagaacctaaaggtgggctctcagtaattttaaaagaattgatt

SEQ ID NO: 161656 - DNA, 431 bp, Arabidopsis thaliana columbia
cttcttctttactttttcttcttcttttagatcaaagaaatcgttttgtgcagattggatcttgcgttaattttctaagcaaaatatggcgggagaagatagccgtgaagctcaacgaggcgacgaatatgaggaatcgagtcctctcttgaaggtgaacgagaatgacggcaagatctgctcgaaaagagatgccaaggcggcgccttttgtgcctcctcccgcggcggaggaatacggctggacggcggatggattgcctgtgagccatggtagcgtgattggcgagccgatcaggagaaaccagtggaattctggtctttttacctgtcttggtcgcaatgatgaattttgcagcagcgatctcgaagtttgtctttttggaagtgtggctccttgtgtgttgtatggaactaatgcagagagacttg

SEQ ID NO: 161657 - DNA, 435 bp, Arabidopsis thaliana columbia
gagcctcccaagaagacaattcttttttttgttttgaagaaatgaagcacaacatggttaggcccaatggtcacttgaaaaggcactggcagaattatgtcaagacatggttcaaccagcctgcctggaaaaccagaagaagaattgcgaggcaaaagaaggctgtgaagatcttccctcgtccaacttttggacctctccgccctgttgtgcatggtcagactcttaagtacaacatgaaggtcagaaccggtaaaggattcacttttgaaaagctcaaggctgctggtttcccaaagaagttggcgcctacaattggtattgctgttgaccatcgttgcaagaaccgatctttgaagggtcttcaaacaaatgtccataggctgaaaacctacaataccaagttagtcattttcccctgtcttgccctcaagg

SEQ ID NO: 161658 - DNA, 281 bp, Arabidopsis thaliana columbia
ttttgggacgggggttaaccaaccaaccttaattaaggggtggggggaggccaaacagacggaagctgtccttcctatggtttccaagaaggctgcccagcctgcaaggcccaaagaaaagcctaaaaaaaaggaggccccagtggcaaaggcccctaacctggctgaaaaggaaaaggccccaaagcccaaagccaagaccctttttgactggttaccaccaagccctatggttctagatgatgggaagaggctttactaaaccaccaaatttaacttcc

SEQ ID NO: 161659 - DNA, 346 bp, Arabidopsis thaliana columbia
tccaaccaaaaaaaggaaaccccaaatccaatgtttttatgggcttcctaaaccatggtttggtcctcccttgccttggccggaaaggttgtgaagcctgccgattaaaatgtcctgggaggcggccgtgtgaccatgaggaaaacggtggccaagccaaagggtccataaggcagccaatggtccggatctgcccgagtaaggtcctggggtccattctcgggcgagcccccgggctaccttaccggggggttcccgggtgactacggttgggccaccgttggtttttccgccgccccaaagaccttggccaggaaccgggagttaaaagttttccacagaagat

SEQ ID NO: 161660 - DNA, 224 bp, Arabidopsis thaliana columbia
cggtttggatttccgggtccgaccacacccgtccggtcacattactttgaagccgaagctgaagacttttaatggtttagggccggtccttccgggttatccggccaaacctaactttggaggggcctttttccggcgtaccgccggggccgtgtcggccattaccggagctttttccggggctggattagggaagaggccagctgattcgttggatccaggga

SEQ ID NO: 161661 - DNA, 363 bp, Arabidopsis thaliana columbia
tccgacaaaacaaaaaaaaagggtttccattgttttttaaggcgccatggtgggaccttaattaatcggcggttcccaagttccaataagtttcggttcctttccataagccaacacacattcctttttgggcctaaaataaggcacggttggggggggccgggtaacagccttggttccatccagggccaggttaataacaccagaaggggggctaggggttgggtgtgccgccaccgtttacgttcttgatgctgttggggaagctggaatcgtttggcctaactttggccgggctggttctggttcgagctgggctgggaaagtggggtctggttctgtggttcagctggcccagggttt

SEQ ID NO: 161662 - DNA, 421 bp, Arabidopsis thaliana columbia
tccagaagtggacgacaccatgggccccgaataagggggttaagggggcttaaaagaaaaagccggagaaggttcccacccaatggttggagagacgcccaaagcatttcggtttggggggcgctttgcctcctaagagggacctttttggttccataaagggcctaagtaaatccgttttaaaaggcagaagcgtttccttaagcaaaggtggagggttcctccagtttttaaccagttaaccaagacctttgttaggaatctggccaccagccttttaaggatttttttgaggtttaggccagaggccaaagccgtaatgaaggaacgctttttgaccaaggttaaagctgaggcaaaaggaaagcctgttgattccaagaagcccttggttgttaagtttggtttaaaccatgtgact

SEQ ID NO: 161663 - DNA, 245 bp, Arabidopsis thaliana columbia
ggattcccggggtggaccacacgcgtccggatatgggttaatccagagttggttttggataggccaaattcaagtccccaaagctaaaaggcaccctggccgaagtatataggacctccctcaaaagcaggggtccctttaaaaggcctctttttaacaaagggttatgcaaataggttggttagggaaccattaacggcttccttttaaaatcggcccaatggaccttcaagggtggttggacc

SEQ ID NO: 161664 - DNA, 295 bp, Arabidopsis thaliana columbia
cggttcggatttccgggttcgccccacccttccgtggaaaccgaaggccataggtttaaaagtaaaaggtttttccatattggagattattttggaaaattttaaccggaaaaccatgttggccagtttttaatccttatggtttacctggctggggggttgtgggaaatggtacctattaaccccatgtgtgtaagatggaaggagggggttgtccaaggggaggggggggttggttgttgggattaaacctttgccgaaaggaggcctggttggtcacgtgatggaccttttc

SEQ ID NO: 161665 - DNA, 390 bp, Arabidopsis thaliana columbia
agaagcttcccttgcccagggggccccagtttaggaagggtaaggatggcctggttgcccaaggaaggcgtcgttttgaccgtaaccattctggttttgggggtaaaaccaagcccgttttccacagaagggttaaaccacctaaaaaaatggggctggggtttaattgccaaagttgcaggcttttttggcaccgcccgtttaaaaggggcaggccctttgggaccgggggggccaggaggggaaggggaccatctttttttaaagtggtggttcaatcaatctactttttttggtttggttgggaccctgccctgcttaaatactgggatttacttggaatctaccagaatgggcccgggtttttaattaaaataggacttggccttt

SEQ ID NO: 161666 - DNA, 359 bp, Arabidopsis thaliana columbia
gtggaaatcggaagagtagcactggtgaactccggaaaaaaccatggaaggctcgtcgttttcgccaactttgttgaccaaaacaaagttttgggggttgcccctgttttggaagggatccaaatgaacttaaaaaggtggttttttaccgtttttgtaattgacataaaccggttgccaaaaaaaaaggctttgttcgaggcattggaaaaggctgttgtgaaaaacaggtggaagaaaagctaatggggtaggaagctattcgggcaaaaccgtagggttaaccttaacaactttgttaggttcaagaccatgttggccaaaatcaaaaaagctggtgttgtaaggcaagagcttgc

SEQ ID NO: 161667 - DNA, 363 bp, Arabidopsis thaliana columbia
gtttatccgccgaccaaaaaaccttggccagaaaccgggagctaaaagtaatcaacagaaaatgggccatgctggaagccctaggctgggttttccttgagctatgggttaggaccggagggaagttcggaaaaccggttgggttaaaggccggttaaaaaatcttaagcgacggaggatgggactactggggcaacccaggctgggtcaacgctaaaagaatttaagccattggggctactaaggtaatcctaagggaagctgtggaaggctacaaagtcgccgaaaatggtccatgggaagaagcaaaggactggttttaccaagggggaagtttgaaccaatggggcctggttactgacc

SEQ ID NO: 161668 - DNA, 281 bp, Arabidopsis thaliana columbia
cgtccgtttggttggtaaggttcttacgggaatgatgttcttattaaggggtcccaactttatcccgggggggaagaaggatctgtccactaaaagtgttaaaaggactgtattttggatgggtaagaggcaggagacaggggaggtggtccttgggggtaccactgttgttatggttgggctgaaccagttaataaccaaaattgctccattgactaatgagaaggaggtggttgttaaccccatccgggctttgaagtttctggggcttcctgtggttc

SEQ ID NO: 161669 - DNA, 332 bp, Arabidopsis thaliana columbia
  unsure (1)..(332): unsure at all n locations
ggggccgacccaggcttccgngaccccttgggaaaaaatcaaaaaggaccttttatttctccagaccggcttccaaagcaggcaagggtttttttttttcagctaaaaaggctcccttcttctttgaaggccaacccattggtgctgcggcagcggttccggcgccgggaaaaatcccttggtttgcatctaacttggcaggaccatcaggtcctggggtggcttttaagagtgggaccactggcctctaagcttttcctgctgaagcttttatgattcaggaccaagaggtccttgctgctgaaagggaccgacctttaatggctttcaag

SEQ ID NO: 161670 - DNA, 287 bp, Arabidopsis thaliana columbia
ttttaaatctttttggattcacaatccatcttttttaaagggccgggtcctggggtgggatcttttaagcttagctggggataagggctactgcaactactaatgcctgggcctggattttccgccctggtccttaaaagccaagattcctaaccggtttttccggtgggtggaaccgggactggccgtttccatggacgggttcatgggccaaaacgtcgcggttcaaggttgaggctaggaaaggagattggttgcccggttgggcatggcctgataatctaacc

SEQ ID NO: 161671 - DNA, 334 bp, Arabidopsis thaliana columbia
tggaaggccctagattttatggggagccatttgccgtttctttaagggaccaaaatggacgttgccggggtttccaagggttttagtggaaaagatcctctgtttggttcgggccacttttttgaggggattccaacccacttgtaagggatggaatcgttttttcaaggttgccaggggtttggcaggaaagcccatggaaaaagccgaaaagcagtttcaacctttaacgtggcccaagacctccaggattggccctttaaacgtaattttccatggaaccactcaatttttagaggttaaaaatgaggtaagttaactcgttcctaacttt

SEQ ID NO: 161672 - DNA, 282 bp, Arabidopsis thaliana columbia
cggatttccgggtccgcccacacccgtccgcaaatcctgaaattaaaaggaggatttgggttttctccgggggtgggggatccgccggagtcaaatttcgtagctggatttttcctccttttccccccaccaagctttccaaaaaagggaggggattcttgcaaaaccggaaaacggggaaggaatttccgaaattaaaaaatggtaaagtgttggattccggcaaaaagaaaaaatctgaaaaaaaattgataaaattcggggagtaacctaggtttttga

SEQ ID NO: 161673 - DNA, 371 bp, Arabidopsis thaliana columbia
cgaatttttaaatctttttggattccaatcaattctttttaaagggccgggttctggggcgggaccttttaagtttagctggggataaggctactgcaactactaatgcctgggcctggattttccgaccttgtccttaaaagccaaaattcctaaccggtttttccggtgggtggaaccgcaactggtggtttccatcgatcggttaatcggccaaaacgtcgtcgttaaaggtggaagctaaaaaaggagaagggttgcccggttgggcatcgcctgattatctaaccggcggtttggccggtgacattgggttggacccgttgggtttagcaaaggacccaaagaacttgaattggttcgtccagcca

SEQ ID NO: 161674 - DNA, 349 bp, Arabidopsis thaliana columbia
aaccgggcaaatgaggaggagaaccaccaggaggtggtatgggtttcctttatgctttcctccgccgttggggttacatccccggttaaggccaccatggtggttcaattaaccggttggaagtaatccgttgaattcccggcaacccgcaggaccaacagggccataatttccatggaaggcaacgggggaggagttagctgcttgaaggggtggccaccaatgggaaagaaaaagttgggaactttatttaacctccctgaccttagggacgtcaaatgggctaaggaagtggactaccttttccgaaccaggtggatccctggggtgaaatccaagttaaagcacg

SEQ ID NO: 161675 - DNA, 321 bp, Arabidopsis thaliana columbia
  unsure (1)..(321): unsure at all n locations
gganttccggggcggacccaggcgtccgttgaaacttggttcttttcctccttcctaaaacctttaacgcggttcaagacttccgttggttaaccgaaagagcttccaaaggttttattggaaaaataacttgggaccttagcattatctacaagtaatctttttggttaaaccggtggggattcctactggggattcaatttggaattggttccagccaaggctgaaggttaaactaaaaggagcgggtaaaaagcatgaaggacgcaccattggttggttcctttggcaaccctgattggtagggagctgaggagcgag

SEQ ID NO: 161676 - DNA, 396 bp, Arabidopsis thaliana columbia
ggatttccggtccgccccacgcgtccggggggttttttgagtaaagctgagggggccttgacctttctcttaactagttttacaactatggctttggtaatctttacaccttggttaaggggttttttaatgggaccagtagttccggtggttgcagtggccatgtcaaagtttatacttaagggggtcctggttccaataactttgggcctggggtaaaatactaatgcaaagcctggggtaattctttttaaaccggggatgccgttggtggctatggtttgcacttcgtggggcatggaaagcccactttcgattaatcgcattcagatcttgccagttgaaggtttgggtttgattgtaccaattgtaacattccttgccgaagaattggcc

SEQ ID NO: 161677 - DNA, 312 bp, Arabidopsis thaliana columbia
ttggatccggtggaggatgatccttgcttaccaactgaggaaaaggttccaatcctgatggcttttaaccggcccatttccaatcctgatgggctttattaatggggtccgaaggagtccaggattttatgggcccattttaaccatgtttttgcagttttttgggaactggaaaaagggtttcaggaggctttggaggaaattcctagaaaaaggggggcagggatggccaagtttatctgccaggaggtagaacctgtggatgactacaatgaatactgccactatgtggctggcctggttggttaaggt

SEQ ID NO: 161678 - DNA, 375 bp, Arabidopsis thaliana columbia
gaagacattaccgtggggaaaaaaaaaaaggtaggaccgggggagggaaggccttgtttgcgaaaccattcctataataagtggtttggggggttttggccgccgattaagcaggggttattttgggtttcgttgggtcaaccccgacccgatgggtttccgtgggcctccggggggtagaaaaatctgtttcccagatcttaggtcattctggtaacgttttttttttggttggtttaattaaccgttttggtaaaaggtttcaaaccgggggggagatgaagcttcgtttttggtttttaagggggattctggtttggtccagatccaccaccaggaagggcttttttaccaacctcggggttaatcaattgg

SEQ ID NO: 161679 - DNA, 380 bp, Arabidopsis thaliana columbia
tttaacccatccttctccttcctctaattttaaggtttcctcctcctggcccttccttactctttatatttttctaaatcctccgattggacccaccgttttaccagatctttgatctaaagggcttccaccggggttaaaggcctgaccgttggctccggcgagatgctaatggttttggtccttaccgaataaggcgtttttttggccgaagctccgggtttcctaaaggctccaggcggggctcccgttaacgtggaattcgttgtttttggtttggggggccaacctgttttcgtcggaaaactgggagacaacaggtccggccttatgtgggctgggattttggggaaaaccggggttgatgatcaggggattaa

SEQ ID NO: 161680 - DNA, 376 bp, Arabidopsis thaliana columbia
aggaagggtccattggggctccttaagggggattttcttaggctgggaggggtttcaacggggaagctttttaacaaaaccataatttttttaatgggccccgaggtttggtccaactttttaaccgctattgaatctgacctaagccggaaggaaatttccaaatttaaggggcctcctttgggccccggggtggggttggaggtggcctttcccgtcgggtgggggcagttccgatttttttccagggctttaagggccaacaattaaggggttttgtggtccagaggcctaaggaaccggaggattccttttcaaaagggggggaagggggggagggggatctaagggccgggttggggcgtttaatcacctg

SEQ ID NO: 161681 - DNA, 362 bp, Arabidopsis thaliana columbia
  unsure (1)..(362): unsure at all n locations
aaattnngggttggacccaggcgtccggggctttacgccaattaagggtaccgattttttgttttttttttaccgtggtggccctacgtagaacaatcggggccggaaaatcgggacctccggaccaggaccttgacaagacccgtaaacatttccacccccccaaacgagggaggcctaaccggttcctcgataaattccaacccggaggaaatcttcttcccggggacgggggaggtaattccggggggggtaaaaactccaagccgttggacataaacaaaattttcgttgccaaaggggaaaaaaagaaacccgccccgattaaaccttacactctgggacccaaaatttcagatggg

SEQ ID NO: 161682 - DNA, 393 bp, Arabidopsis thaliana columbia
taaagaaaacctgaatcgcatttctaactaaggcctggccaaggaggctcgggggcaaattttcttccctagggattccggattggccggtcctcggagcccggtttgctcctggccggacccgaacctaacctccaaacctgtaatcggtttccggagcaaccctgaaaatgggccgtttggtcggtggaccaatgatccaagctcgacgtccatcgttgttccgaatgtaaagtccgctaaggcaggtggtgctcgggttatcccactaatttacaacgaacctgataaagtgctcttcaaaaacctaaagtcggtcaccggggtaaattccactgggggttggcctaaaaaatataattatttgaagaccgccaaaaaaattttcactaa

SEQ ID NO: 161683 - DNA, 380 bp, Arabidopsis thaliana columbia
gccagagctggtcaacggccgaggggtttgtctcggggccgttgggatgctttggccggaggttttaaccaaaaccggaatattaaaggttccggaggggtccaaggctgggaaggagcagtttttggcttcgtcgtcaccatggttcgggaccaagtcaatatggtttaattccgtggggaccagacgggggcaggacatcaaaaccccagaaggggtgacccaagaccttatttttaagcattccagcttacctaagggggaagtgggttcccctgggggaatctttaacccgtttaactttgttcctacgcaggaggccaaggagaaggagctggcaaccggaaggttggcaatgttggcatctttagggttggggg

SEQ ID NO: 161684 - DNA, 359 bp, Arabidopsis thaliana columbia
acccgaagccaaagaaccaaattcgcagccattagtcgaaaagggctgaaatttcggggacttggtttccttcttttttttcctcggttttggcaatccgtggctccaacatgggtggcttaaaaggtcagatggtagctgttccaaaacctacttcccagttccaggagttttttttgaaccgaacccggtttgttggcattgccgttgttcccggtcttgttcccggttccggcagttgcaagattaaagcttttcgggctgttttttccggggttggacccgccttgcctcctgattcaagggaggctggccttcgtggaaacctgaaaaaggtggttctagcttacaggggaggc

SEQ ID NO: 161685 - DNA, 378 bp, Arabidopsis thaliana columbia
gccttaagggtcctggttgaggacttaataaaagcaatagagggctggacccttactttaaacgttttttggaaaagggttaaaaggaacccaatggggggttttcactggttggggacccacaccaccacccatgtgatttttacaactcctttactacgggttcagccttccatggttaagaaaggggtgaaggcaagggagctttcaaggaaaacaaaggggctgagaaggaaataatggcctaaaccatgggagggggttaaactttggttggcagccatggccataaaactggaaccacggttttgggggatgtcgaaaataagtaaggagcaacttttatggggtgaagaaaagatgaaaaggctcaccttt

SEQ ID NO: 161686 - DNA, 437 bp, Arabidopsis thaliana columbia
  unsure (1)..(437): unsure at all n locations
acgggncgggaattccgggtcggaccacaggcgtccgttttttttttttttttttttggcctctttttggatcaaaatttaaaatctagttaaaccagggggttgttggtgaggaaaacctaagggggccgggattccaaggtaaaggacatgtttaaggccgatttgggtggtttggaactcaagctcgccaaagttgaaatgcctggactaagggttggtcttaccgatttgggaccttttaagccattaaagggggctggaataaccggtttttttaacatgaccttccaaacggcctgactaatgaaaaccttaactgttttgggggctgaagcaaatgggggttcctgcaacattttttccattaaggacaaccccgccgaagccttggttggtaattccgccgttgttttggcctggaaaggggagacttt

SEQ ID NO: 161687 - DNA, 421 bp, Arabidopsis thaliana columbia
aaccaccaccataacaggaaggcgtccttttttttaggacccttggtccctgttcttttttccagtttaatggtaaaatccgctgccattttaacaccgcctaacttttttaagttttttccattcggggctctttttgggaatggaagaatcaagattagcatgggcccatccatcaaaatcggggaatcctaaagaggttggcatggggggggtggcccgtcctccaagggggggctttttgggacctttttaatctttaccggccccaaagctgggacctttagctatggcagctgcttggaagagagcaaatgtggacccagctttggtccaggaggtggcctttggcaaggttcttagggctaattggggccaagctcctgctcgtcaagctgttttaggggcaggaatccctaac

SEQ ID NO: 161688 - DNA, 232 bp, Arabidopsis thaliana columbia
aaaaactctggaattttccaggaccaaaggatttgccttctttaagggcggccatgacctcgggggttttaactggcagctccccaatggcgggttctggctcggaggagctaacccagaaggtgggttgggggaatcaataagtggggttgggccagaaaaaccagaggattttgccggggaccaaggctaaccgcgttgtgggggaggatgttgatggaccttcgggagg

SEQ ID NO: 161689 - DNA, 328 bp, Arabidopsis thaliana columbia
gacctgagtttttagcatgggcgaacctaacccctaaatccatcctttggatcctttccgctctcggggggaccgcctttgctgaagttttctccgaggagaaatccaaaaatggttggaaaaagagatgggtaaaacctgcctggaaaaaagatgttattcctgctggggatgggaaccccccagctggaaatggtcctggggatgctaccgataaaggtttccaacctggcggggcctccagatcctcccctttttcagctgaatcccctgggtttaccaccagggttaaaaccttagccttccaattctttgccaagcttgacca

SEQ ID NO: 161690 - DNA, 428 bp, Arabidopsis thaliana columbia
caaattaagaccatctcaataaatcttttaaaaccttttccaattttttagaaaaaccatgtttggctgggggggaggctggggttggggatctgcctgcaggtccggcattggttgcgggggttgcaaaaggtcccctgccttggagaccaccgcccccgagactttggtcctcggggttgttccggcgttgaactttcagtccagggtttccggcgggactttcgttgccgagattgttgcttgcaaatgcggttctgcctgcaggtgcacccctgtgccctgcaaatgaagaacttcttaacccctaagtctgtattacccctaaggttttgttaggttggctattatgtaataatgggctgatttttccggtggttttgccggcgacgtgggccttcctctcctccggggggggtttttatggg

SEQ ID NO: 161691 - DNA, 432 bp, Arabidopsis thaliana columbia
tacggtcggatttccgggttggccccacgcgtccgaaaaagggaaggggctgggggggaatgttttaaccaggcaacttaaaccccatgaatccaactttggacctttaacttaatcgaatttgggatggttggggggggttggattggcccctttctttccgccaggacagggggctttattggttgtgggagcgtaaaacccacctgtggtggctgttagggttggttcttcaagggtaaaaaccacatggctggggaaggtgactgcaaatcatcgcatggggtttggagctgactgggttgtttttttccaaactttggcaaagatcatggaaattccaaatggttggcccttataggaccccaagcgaggacaagaagtcaaaaccagtttcaaaatttcctggaccaattttttcccaagtaaatt

SEQ ID NO: 161692 - DNA, 426 bp, Arabidopsis thaliana columbia
aaccaccaaaaaaagggctggttttattttactcaccatggggggtttaataaaaaccatcttttttggcggattaatcttccttataattccgaccggtcctaaggggcccaactaacacttcttaacctctttaacaggcttccttggtttaaccactccaggcgttttttggggggctcaaagaccgattggtttaagtcaaaaccactcaaaggaccaccgaagctttgaagctggccgttgcagttaaggccaggagagctaaagaggctgtggtcaagggccgaccatcctaagaacccctagttgaagttttttccaccatcaacgaccagtttaaaaccgaggttgtcgttgttcccttaaccaaagtaggacgcggtaagaaggtagttttggtggcggcacccggggatcggggtt

SEQ ID NO: 161693 - DNA, 390 bp, Arabidopsis thaliana columbia
aaaggacggttggttgggtttttaaggttatttggagacctatcggtggaggaggcggttccggatttcagaaccgttgcccgccgtcgttgattccgttggacgccgtccagccgcggtttccgggtccgggaaaaggttcttccaccttagggaactggattccggggttcgaccggttggggggaccttaggaggggctaaaagggatttaaccaaacccggggttgatctaaggttttttaaaggggtggggcagattttgggggaggggcttcgaccccgggttatggaaggatggatggggaaggcgggcaggggtccacgttttgtggggggtggccgaagcaaaggggttaaggaaaagctaacctccggaactggggtggt

SEQ ID NO: 161694 - DNA, 368 bp, Arabidopsis thaliana columbia
aaacccttaagaattttaattttttaacaattccgaggttaacggtttttccggttccagtcctaatgggaaccacctaaaaggatccttccatgggggcggatttggcaaattttccaacggaggactggccggcctttacaacggcgggggatttttccgaggaccttttggagggaatcgattcctccaccaaccttttaatgggttccgagggaaacaatgtttggccggattgggagatagatccggggattctgggggaatattccggtggcggaggagatgaggaccaggaaagggggggtaccacttggccggcttcggaaccatcgaaaagggacgttggggtgggtaagcaaaagggg

SEQ ID NO: 161695 - DNA, 361 bp, Arabidopsis thaliana columbia
  unsure (1)..(361): unsure at all n locations
gggnntggaattccgggtccgaccacacccgtccgaaaggaccgtttccaattaaaagctttgtctgttttggaaggagtcctctaaaatcctggcggttgcacctgccatggtgggaccaactaagtttcaaaccataaggaagggtttccggggggattcagtggtttggttggggaagaccccattgatgaaaagacctggggggattcatgctgttaaaccggccattcaagctttcctaagcctccttccttttcttaaggggaaggtggggtggaccttaactaagggggcctggaaggaagccagtgataaggttgttaagtccagggtgtgggctcctgctcggtgaggttaa

SEQ ID NO: 161696 - DNA, 211 bp, Arabidopsis thaliana columbia
ttacaaaaaactctggaatttttcaggaccaaaggaaaaggccttctttaagggcggccatgacctcgggggttttaactggcagttccccaatggctggttctggctgggtggagcttaaccagaaggtgggttgggggaatccatcagtggggttgggccagaaaaaccagatgattatgccggggaccaaagctcaccgcgtggttgg

SEQ ID NO: 161697 - DNA, 354 bp, Arabidopsis thaliana columbia
cggatttccgggtccgccccacccgtccgtttgtttcggaggcaaaggaagcgttgttgacccgaaggggaaggaaatggctcgggcttgggacctcgccggttgcaaattttttgggccaattaaaccaggcggggacgtcaaaacaaatcctaccaatgggtggccggaggggttcatggcccgagtagcaggccggggttgggtttggggtgggcctcaacagggggaagggtgggcccataaagcattaggaggattggggcctaactggggtgggacctccaccctggaaagctaatggttgggggttcctgccgcaccggggccgttgtccgcaaagcaccagcttac

SEQ ID NO: 161698 - DNA, 375 bp, Arabidopsis thaliana columbia
gaaatttccaaagctgaggcatcctggaaccttggttggttggagcagattaccccaccagcggttaaaagcgattcctgggggtcctaactaaggccggttttaaagggcgatgagactttcctggccaggggatctaaagccgcccttaacatggaatctttgggccaaggggcctatgctttattaaagggaaaactggcaggaggcggccttggcaaccagaaaattttttgggttttcccgattaatctggtacccgggccaaccccattcgacctccttagtgttaccgtagggctggcgatttatggagcttcctttgccttatggggggcaggattaaccggacctgtgccacttaaaagcgctaaa

SEQ ID NO: 161699 - DNA, 417 bp, Arabidopsis thaliana columbia
gggatttccggggcggccccaggcgtccgttgggcccaaggggggaaattcggaaatggttggggccggagaaaaagggggcggttttggaaggctttcttggacccaaagaggaccttcctggttggattgcttttgaaggccatttttactcgccttggaggatccggcctggggtccgatgacctgtccgaccggttttccggtttggccttaaaagaggttttgaccagatggcccaggggggtggtggttgctggtacccggcgtttaaggcgtgcctgggccctttcattgaagcacgggtccctccccagggttcttaagggggggcagacccaattcgggggtttttttcaggactggctggctttggtggggagggaaggcagggaccggggggccttgggggtttta

SEQ ID NO: 161700 - DNA, 317 bp, Arabidopsis thaliana columbia
  unsure (1)..(317): unsure at all n locations
cggatttnnaggtccgaccacacccgtccgaccggccttgaacacaaaccggttaacaaatttttagcgagggaggactcgattcctggggaaaccctacttgggtccaccctaaaagcatttgggccattggggccactaaagtaatctggatgggagctgttgaaggctccaaagccccagaaaatggcccgttggaagaggccgaggacttgctttaccccgggggcagtttcaacccatgggttttggctaccgacccaaaggctttcgcggagttgaaggtgaaggacctcaagaccggaaaatgggttttt

SEQ ID NO: 161701 - DNA, 445 bp, Arabidopsis thaliana columbia
ggatttccggggcggaccacaggcgtccgtttttttgccacattaactactaatcttttttgcattcttctttttttttacacccgaccaaccccacttttattttatcaggaaggaagatgtttagcaaaggatcataacgtcaaaaacagtcaggaggctaaggatttttggccgaccaaatttccgatctggtttttaagctccaacacctaatccttgaacttggccgccgccgttctgccagggggtaagcttttaaggtcctacaggagactggcacctccttaaggaccttccacaggggggtggttgacctaatggaccgttggtgggacctctgggtttcgacggacgacaccagggccgaagcagccttaattaggagctggcttattttttaaatccgatttactaattctgagggctattattaatccgtttc

SEQ ID NO: 161702 - DNA, 397 bp, Arabidopsis thaliana columbia
cggggctttggcctggtgggctaaagggtgcttgttttaacctatggaaggctgattagttgatgccattagagcttccagtcctgataattccccagtaaaaggctttttaaacacactcaaaaaaagagatcggttgggccgaccccctttttatgggccgggtcctgggcaacacaaaactccggggcccgattaacttttttacaggtggatgggggattggggcctaattactgaagtaagaatccatcctttcaaagcttattttaaggggggcaatccgtttttacttttaacattttgttggtttccggtggggtaacgaaagggacatttaactctactccaccattttccaggataaaaaaggggggccaggaaagagttcaattga

SEQ ID NO: 161703 - DNA, 394 bp, Arabidopsis thaliana columbia
ggaattttgagttccgggccggaccaacgcgtccggaaaaagcaggaagaagtatgggtttcctttttgtcctcctccaccgttggggttacctcccgggttaaggcaaccatggtggttccattaaccggttggaagtaatccgtttttttccgggcaacccgaagggccaacaacgacattacttcaataacaggcaacggaggaggagttagctgcatgaagggggggccaccaatcggaaagaaaaagttgggaactttattttacctccctgaccttagggacgttgaatgggctaaggaagtggactaccttttccgaaccagggggattcctggggtggaattcaagtggaagcacggatttgtgtaccggaagcacggaaacactc

SEQ ID NO: 161704 - DNA, 303 bp, Arabidopsis thaliana columbia
accggtcggatttccgggtccgcccacccgtccgaggaggaggaggaggatgaggaaccggagctttctttatgaggaagaaccggtttaatttggccggaaaaaaataaagatgtgggggaattaatccttggatgaccatttattgtgcaaggtcgaaggaaacaacttaaaaaacgcggcctttttgggccaaaacggcagtttcggggttaaaagctaagctttccttaattggaagcctgcaagattggcaggattaaccaaaaactttgaaaaagccggccatttttgccccaaccg

SEQ ID NO: 161705 - DNA, 418 bp, Arabidopsis thaliana columbia
ccgtccggtgaccacaaaacccgttcgttgtttccttgaccattccgcctccttcctatgtgcaaagggttgggatggccaaaaagcattttctatggcctcaagaccagcatttttggcggcattttcaccaggaaggattggagggccaacctggttgggttaaaatgaatccagcccaaaccgcatggccttatggtttgccgccggttaacgggttgggaccgccgccgatgggtttttactccaccacccctaactgatttaatccatttggttggcttttttcttccatttatttcccgcccaaggtatatgtgttataaggcggttttctttgtattggtccctgaccttgcgtcctattattgacacctgagaacttttgcctttttggagtttggtgaaataatgaagt

SEQ ID NO: 161706 - DNA, 412 bp, Arabidopsis thaliana columbia
cgcatccgttaaaagcaggaactagaagctttcctcctttcctactctttacacattttttttttttttaaggagctagcaagggccaaactaataacttttttttttttactaacaatttaattaactttggttggcctaactaggccaaaagaggctgagtcccatccaaaaggttttggcccaggaggtctgaattcttcccaaggggggggccattgcccagggggatgttgcaccccaaagtttcttaggccatgcttgtttttttgccaaaagggttgggctaaatgcctttgggtccctccaggcccgtccggaaccaaacaagggggtccttgttccaccacctggaagactcaccaggggggaccaaaaggtccataaacaaaaccattggaggagaaacccc

SEQ ID NO: 161707 - DNA, 203 bp, Arabidopsis thaliana columbia
aaaaggaggaggggaaccaccaggaggaggtatgggtttcctttatgttctcctcaacggttggggttacttcccgggttaaggcaacaatggtggttcaattaacgggttggaagtaatccgtttttttccgggtaacccgaagggccaacaacgacattacttccataaaaggcaacggaggaggagttagctgaatgaag

SEQ ID NO: 161708 - DNA, 413 bp, Arabidopsis thaliana columbia
attcccgggcggaccacacccgtccggaaaacccaaaggaggaggagaaccaccaggttgaggtaagggcttcctttatgtcctcctcaaccgttggggttacctcccgggttaaggcaaccatggtggttccattaaccggttggaagtaatccgtttttttccgggtaacccgaagggccaacaccgactttacttccttaacaggcaacggaggaggagttagctgcttgaaggggtggccaccaatcggaaagaaaaagtttgggactttatcttacctccctgaccttagggacgttgaatgggttaaggaagtggactaccttttccgaaccaaggggatccctggggtggaattcaagtgggagcacggtttttggtaccgggagcacggaaccactcccggttcc

SEQ ID NO: 161709 - DNA, 391 bp, Arabidopsis thaliana columbia
cttctggactgtggttaaccaaccaaacttcactaaagggttgggtgatgtcaaacagactgaagctgtccctcctattgcttccaagaaagctgcccagcctgcaaagcccaaagaagagcctaagaaaaaggaagccccagtagcagaggcacctaagcttgctgaagaggaagaggcaccaaagcccaaagccaagaaccctcttgacttgctaccaccaagccctatggttctagatgattggaagaggctttactcaaacaccaaatctaacttccgcgaggttgctattaaaggattctgggacatgtatgacccagagggatactcactatggttctgtgactacaagtacaacgatgagaacatggtgtcatttgtcacgctc

SEQ ID NO: 161710 - DNA, 429 bp, Arabidopsis thaliana columbia
cacaaccaaaaaaaagaaaacacaaaaccaatgtttataatggcttcctcaaccatggctttgtcctcccctgccttcgccggaaaggctgtgaagcctgccgcatcagatgtcctcggaagcggccgtgtgaccatgaggaagactgtcgccaagccaaagggtccatcaggcagcccatggtacggatctgaccgagtcaagtacttgggtccattctccggcgagcccccgagctaccttaccggtgagttccccggtgactacggatgggacaccgttggtctatccgccgacccagagaccttcgccaggaaccgtgagctagaagttatccacagcagatgggccatgctcggagccctaggctgcgttttccctgagctattggctaggaacggagtgaagttcggaatagcggtttgtttc

SEQ ID NO: 161711 - DNA, 342 bp, Arabidopsis thaliana columbia
caatttctaaaaatcttaaaaactttttttcatttctctctaccgtgatcaaaatgcgaggcttttttaagactctcacgggaaagacaatcaccctcgaggtggaaagctccgacaccatcgacaacgttaaggccaagatccaggataaggagggcattcctccggatcagcagaggcttattttcgccggcaagcagctagaggatggccgtacgttggctgattacaatatccagaaggaatccaccctccacttggtcctcaggctccgtggtggtatgcaaattttcgttaaaaccctaacgggaaagacgattactcttgaggtggagagtcctg

SEQ ID NO: 161712 - DNA, 343 bp, Arabidopsis thaliana columbia
gcccatgactttggttcctacgctgaagactattgaggggccaggtccagtccttcctggttattcggccaaatctcactttcgtagggtctctctccggcgtagcgccgtggtcgtgtcggccattaccggagcttcttccggagctggaatagggaagggtacagttgattcgttagatacagagaaagccttggatttgagaggaattgagatcccgatttctgatttatggaaagataggaaggccgtggttgcatctgctcctgattttggatgtacggtctggcctaaacaagcagatgatcttgcaaaaaagaaggatgtgtcggatgcctctggg

SEQ ID NO: 161713 - DNA, 374 bp, Arabidopsis thaliana columbia
ggcggagaattggggatagataagcttcttcttccctcttctaaacttgggggatctgtcatcgatggcctctttgatgctcaacggggccattaccttccccaaaggtttaggttcccctggttccaatttgcatgccagatcgattcctgggccgaccttactttaagttacccgaccctcaaaacttaaactttgggggcttcttaatgccacagcagcagcgtgttgtttttccggccattggcgcaacctaggtttattcaagacaagaagggggcttactggttttacaggttcttatccatcgtatacgaccatgtcatcaatcctgggcattggaccgaggatttgagagacgccgcttttgagcc

SEQ ID NO: 161714 - DNA, 404 bp, Arabidopsis thaliana columbia
acaaaacaaaaaaaaatggcttccactgctctctcaagcgccatcgtcggaacttcattcatccgtcgttccccagctccaatcagtctccgttcccttccatcagccaacacacaatccctcttcggtctcaaatcaggcaccgctcgggggggacgtgtcacagccatggctacatacaaggtcaagttcatcacaccagaaggtgagctagaggttgagtgtgacgacgacgtctacgttcttgatgctgctgaggaagctggaatcgatttgccttactcttgccgggctggttcttgttcgagctgtgctggtaaagttgtgtctggatctgttgatcagcctgacccgagtttccttgatgttgaacagattggtgaagggtttgtttctacttgggc

SEQ ID NO: 161715 - DNA, 438 bp, Arabidopsis thaliana columbia
tccagaagtcgacgacaacaatggcaccgaagaagggtgttaaagtggcttcaaagaagaagccggagaaagttaccaacccattgtttgagagacgcccaaagcaattcggtattgggggcgctttgcctcctaagaaggatctttctcgttacatcaatggcctaagtcaatccgtcttcaaaggcagaagcgtatccttaagcagaggttgaaggttcctccagctcttaaccagttcaccaagacccttgataagaatctcgccaccagccttttaaagattcttctgaagtataggccagaggacaaagccgcaaagaaggaacgccttttgaacaaggctcaagctgaggcagaaggaaagcctgctgaatccaagaagcccattgttgttaagtatggctcaaccatgtgacttacctcatcgagcagaac

SEQ ID NO: 161716 - DNA, 394 bp, Arabidopsis thaliana columbia
agccacgcgccaggcgcatgagtttggttcatacacagctagctttggagaggccaaattcaagtccccaaagctcaaaagcacccttgacgaagtcatagtagcctcccttcaaagcaagtgttcccttcacaagtccttctctcacaaatggatatgtcaataggtttgctagtgaaacattcaccgcctccctttcacatcggccacattgatcttcaaaggctgatggaacaagattatgacatcggatctactattcgggaaaagattattcctcgggctgtctcatggtttactggtgaggctatggaagcagaggattttgaacccaatggcgatctgactatggtcctgtgactacaatgacaacgatgagaacatggtgtcattt

SEQ ID NO: 161717 - DNA, 148 bp, Arabidopsis thaliana columbia
aaattggggtagacacgaatcaatcttccattgttagacgaagcacagatcttcactctttcacaagtttcagagcataaggaagctcatgactgttggaggggcatcaatggaagggtttacaaggggaccaagtttcttgaagacc

SEQ ID NO: 161718 - DNA, 435 bp, Arabidopsis thaliana columbia
atgaaaacgaaagtcatatgtttaaaagtaaaaagtattttcatatttgagaataattttgaaaaatataaacggaaaaacatgatagtcagatattaatccttatggtataactagctagtgggatgttggaaattgtaactaataaacacatgtgtgtaagatggaaagaaggagatgttcaaagagaagagagagatagatgatgagaataaaacattgacgaaaagaggactggatggtcacgtgatggagcatctcaaagtatttgatatcatctacgaatttattcccaaatctgaggatagctgcgtctgcaaaatcactatgatatgggagaagcgcaacgatgactttcccgaaccaagcggctacatgaaattcgtcaagcaaatggttgttgacattgaaggccacgtcaacaaagcttaacca

SEQ ID NO: 161719 - DNA, 434 bp, Arabidopsis thaliana columbia
  unsure (1)..(434): unsure at all n locations
caccgcgtcgcnngtttttttttagaatacacttcaatatnaatacgaactttattataagaggagtacgctaacggcaagagtagagcagagaaaaataattgattgtgacagtgattatataacaaggcaacacctcaaaaacaatatggtgattaaaaaacatctgcttaatctttttgttttcacaggcatcattctcttcaatagggtgtacccctttgacgaacatgcctctccttagnccttcttcggactcaaccctaacgcggtgtattnttccggagctgagccaacagaattggctcttggccacgggcacaagaaagtggtctgagcttgcgttacacgttctccgggtttgccgccccatgtttttagacaagtgttttgcaacgcacgtgcgtaggaaaaggacacgtgccatgggtttt

SEQ ID NO: 161720 - DNA, 403 bp, Arabidopsis thaliana columbia
  unsure (1)..(403): unsure at all n locations
agaagcataccttgcacaaggtgacgcagtataagaaaggtaaagatagccttgctgcccaaggaaggcgtcgttatgatcgtaaacagtctgtttatggaggtcagaccaagcccgtcttccacaagaaggctaagacaactaagaagattgtgctgaggcttcaatgccaaagctgcaagcatttctcgcaacgcccgattaagaggtgcaagcactttgagatcggtggagacaagaagggaaagggaacatctctcttttaagttgtggtttcatctatctacttttttttgttttgnttgggacctgtcctgcttcaatactgggatatactttgaatctaccagaaatggtcctggtttttaatttaaataggactgggtcttaaataactattaat

SEQ ID NO: 161721 - DNA, 136 bp, Arabidopsis thaliana columbia
gttgagatcggaagagtagcacttgtgaactacggtttaagatcatggaaagctcgtcgttatcgagaacctttcttaacaaaacagggctttagaaaattccctccatattgataggaaccagccgaacattaaa

SEQ ID NO: 161722 - DNA, 331 bp, Arabidopsis thaliana columbia
ttttcaatctctcttgattccaatccattctttttaaagtgccgggttctcgggtcggatgggctaagtctagctagggataagggctactgtcactactcatgcctcggcctcgattttccgaccttgtacttcaaagccaagattcctcaccggttcttccggtaggttgaaccgcgacttgtcgtttacatcgatcggttcatcggccaaaacgtcgtcgttcaaggttgaagctaagaaaggagaatggtttgcccggtttggcattgcctgattatctcaccggcagtcttgcccgtgacaatgggtttgaccccgtgggtttatc

SEQ ID NO: 161723 - DNA, 435 bp, Arabidopsis thaliana columbia
agaaaacaagaactctgtatttgaagtataccgtgagatgggttgattgggacagctcggttttgcccgctaaggtttatattttggatgttacaaattcttgggaaagatcaaaaggagatagccaagaacatatttgccatgtggaatacgaggtgaaaccgtgcaaaaccaatggcgatggatgcgttgacgttaaaaaaaagagcttagtgatgccatttgatgggtatattgtctacggggtagctcaccagcacgctggtggtatcggtggtgctctataccgagagaacggtgaagggatatgcgcttcaatgccgaagtatggcaatggagatgaacctggaaacgaagctggttacattgttggaatgtcgtcttgttatccagctgatccagtgaaagtgagctatggagagacattgactttgg

SEQ ID NO: 161724 - DNA, 324 bp, Arabidopsis thaliana columbia
caaatactgaaaataaaaagaagaagtttgttttctacggtggtgggtgattcgccgggggcaatttcgaagctagaggggtcctccttttccccccgacgagctgtgcgagagagggaggggaatcatgcaaaaacggagaacggtgaaggaatctacgaagataataaatggtaaaggtatggattccggcgaaaagaagagatctgagaagagattgatgaagttcgaggagttacctaggtatttgaaagataactagttcatacacaatcaatatcgatgtttgtggtcaatcataaaaacttttcttatctctttctt

SEQ ID NO: 161725 - DNA, 420 bp, Arabidopsis thaliana columbia
gcgtccaattttaaatctcttggattcacaatccattctttttaaagtgccgggttctcgggtcggagcggctaagtttagctagggagaaggctactgtcactactcatgcctcggcctcgattttccgaccttgtacttcaaagccaagattcctcaccggttcttccggtaggttgaaccgcgacttgtcgtttacatcgatcggttcatcggccaaaacgtcgtcgttcaaggttgaagctaagaaaggagaatggttgcccggtttggcatcgcctgattatctcaccggcagtcttgccggtgacaatgggtttgacccgttgggtctagcagaggatccagagaacttgaaatggttcgtccaggcagagctggtcaacggacgatgggctatgctcggtgtcgctgggatgc

SEQ ID NO: 161726 - DNA, 441 bp, Arabidopsis thaliana columbia
  unsure (1)..(441): unsure at all n locations
cggaancccgggccggcccacgcttacacttgatactgttgaggatgttactatctttttttctgatgaaaaggttcccatcctgatagcttttctctcaaacatatacgggccttattaacattattcatgtggtacaaaggagtacaaaattctaatggaccaatttcaccatgtttctgcagcttttttggaacttgaaaaagggtatcaagaggctatcaaggaaattactagaaaaatggttccagggatggccaattttatctgccaaaaggtaaaaactgttgatgactactatgaatactcccactattttgctgggctttttggtttaggtttgccaaaactcttcctcgcttcaggatcataagttttttacaccaaatttgtaggctatttccaattcaatgggtttatttctgcataaaacaaacattt

SEQ ID NO: 161727 - DNA, 431 bp, Arabidopsis thaliana columbia
gcagacattagcgttgagaaaaaaaaaaaagtaagaccgagagagagaaagccatgtctgcgaaaacaatcctatcatcagtagtttggggggttctcgtcgccgcatcagcagcggctaatatcggattcgatgagtcaaacccgatccgaatggtctccgatggtctccgggaggtagaagaatctgtttcccagatcttaggtcaatctcgtcacgttctctctttcgctcgcttcactcaccgatatggtaaaaagtatcagaacgtggaggagatgaagcttcgattctcgattttcaaggagaatcttgatttgatcagatccaccaacaagaaaggcttatcttacaaactcggtgttaatcaatttgctgatttgacatggcaagagtttcaaaggaccaagcttggtgctgctcaaaactgc

SEQ ID NO: 161728 - DNA, 384 bp, Arabidopsis thaliana columbia
tttaacccatccttctccttcctctaatttttttgtttcctgcccctggcccttccttactctgggtatttttctaaattctccgatttgatccaacgatttcacagatctctgatctaaatggcatccaacggtgataaaggactgatcgttagcttcggcgagatgctaatcgatttcgtccctaccgaatcaggcgtctctctcgccgaagctcctggattcctcaaagctccaggcggtgctcccgctaacgtcgcaatcgctgtttctcgtctcggtggacgatctgctttcgtcggaaaacttggagacgacgagttcggtcatatgtcggctgggattttgaggaagaacggtgttgctgatcaggggattaacttc

SEQ ID NO: 161729 - DNA, 442 bp, Arabidopsis thaliana columbia
gcttccaaaatttaaaaccatctcaataaatctcctctttttttttccaattttctagaaaaaacatggctggcttttttggaagctggggtggtaaatctgcctgcaagtgcggcaatggttgcggaggttgcaaaaggtaccctgacttgtataacaccgccaccgagactcttgtcctcggtgttgctccggcgatgaactctcagtacgaggcttccggcgagactttcgttgccaagaatgatgcttgcaaatgcggatctgactgcaagtgcaacccttgtacctgcaaatgaagaacttcataaaccctaagtctgtaataaccctaatgttatgttaggtttgcttatatgtaataattggctgatttttccggtagttttgccggcgacgttggtctttctcttcttctgtgtgtgtttttatggtttggtca

SEQ ID NO: 161730 - DNA, 397 bp, Arabidopsis thaliana columbia
aaccgcagacaaagaaacaaattcgcagacaatagtctaaaatggctgaaatctcggcgacttcgggtccttcttcttcttcctctggtctcgtcatccgtagctcccacaatggtagcttaaaatgtcagaatgtagctgttccaaaaactacttcccagttccaagagttatctctgaaacgaagccagcttgttggcaatgccgttgttaccggtcatgttaccggatcccgcagctgcaagaatcaagctattcgagctgttctatccggtgatggaaccgccttgactactgattcaaaggaggctggacttcgtggaaaactgaaaaaggtcgttctagcttacagtggaggcttagacacctctgtcattgtgccatggcttaaggagaa

SEQ ID NO: 161731 - DNA, 431 bp, Arabidopsis thaliana columbia
  unsure (1)..(431): unsure at all n locations
caaaattcccggggggacccaaacatncgtttctctctctctctttttctgcctttttttttattcaaatctcaaatctacctcaagcaggtctttaatcatcgaggggacctcaaaaaacccccaatacaaggtcaaagacatgtctcaagccgatttcggtcgtctcaaactcaagctcgccgaagttaaaattcctgaactcatggcttgtcataccaaattcgaaccttctcagccattcaaaggcgctaaaatcaccgaatctcttaacataaccatccaaaccgccgtactcatcaaaaccctaactgctctcggtgctaaaatcaaatggtgttcctgcaacatcttttccactcaaaaccacgccgccgaaaccatcgctcgttactccgccgctgtttttccctgaaaaggtgaaacttttc

SEQ ID NO: 161732 - DNA, 324 bp, Arabidopsis thaliana columbia
ggggccggcccacgcgtccgaatcaacatataaatgcattgcaccttttattaccagtgtgaggtatatcaaaaccgtcggcctcttttaattcatgcacgcgatcattccaaactgaactaaaaagcccaactaccactcacctaccttcttgacaaacaaactttttttaaccaatccaccctttttttcgggaacccaaaaaccgtttccttcaatccaaaaacactcaacatatcacccaagccctaaaacttctccttcaacctaaagtcaaaacaaccactcatgctatgggcaatcaacgaccattttcataaaccc

SEQ ID NO: 161733 - DNA, 434 bp, Arabidopsis thaliana columbia
  unsure (1)..(434): unsure at all n locations
aaaccggggccggcccacccttccgattctgagtttttagcattggcaaacctaatctccttaatccatctctttgattcttttcgcggtgatgtttatcgtctctggggaggttatcttcnaggagaaatcctaagatggatgcgagaagagatgggtaaaatctgactggaagaaagatgataatactgctcgggaatggaaacacacagctgcaaatcggtctgcttatgctaacgataaaggtatccaaactagcaaggactacatattctacgctatatcaactgaatcccctgagtccagcaacatggttatgaccttagccttccaattctctgtcatgcatgaccagaaccttgactgtggtggtggctacatgaatttcctaagcaataatgttgaccagactaaattctgaggatacactcctt

SEQ ID NO: 161734 - DNA, 94 bp, Arabidopsis thaliana columbia
accaggcgtccttaaattaatacatcttcataaatcttctcatatcttttccaattttctagaaaaaacatgtctaggtggtttttaaactttt

SEQ ID NO: 161735 - DNA, 214 bp, Arabidopsis thaliana columbia
  unsure (1)..(214): unsure at all n locations
tctctcantaatgctttttataaatttcccctcaatttctccttccctactactctttttgaccattttctccggtaaaaatcaccaatctttaaacccttccatttccttataatcaagtattttttctaatttataaatttttcgtaacacctccttaaaacttccctcttttctctcacattccattaaaaaaaaaaactttttaataatt

SEQ ID NO: 161736 - DNA, 393 bp, Arabidopsis thaliana columbia
cacccagagaaaatccattctcacgtcgattcaaaaactcccattgtctctaactcaaggtcccaatgatctttctccattatctcttactcgaaaccctaccagcatcagtctgatggtgaaagctagtgtagaaagctcagattcatcgactgatctcgacgttgttagtacaattcaaaatgtttgggataagtctgaaaataggttaggtcttattggtttgggttttgctggtattgtagctctttggccatcattgaatctcatcacggcaatcaacaaattgcccgttatctcgagcggattcaaactagttggtatcttgttctccacgtggttcacatatcgatatctcttgttcaaaccgaacagacaggacctttctaaaat

SEQ ID NO: 161737 - DNA, 347 bp, Arabidopsis thaliana columbia
aaaacctttagaattttcatttttttacgattccgatgttaactgtttctccggctccagtactcgtgggaaacaactcaaaggatgcttacatggcggcagatttcgcagattttacgacggaagacttgccggactttacgacggtcggggatttttccgatgatcttcttgatggaatcgattactacgacgatcttttcattggtttcgatggagacgatgttttgccggatttggagatagattcggagattcttggggaatattccggtagcggaagagatgaggaacaagaaatggagggtaacacttcgacggcttcggagacatcggaaagagacgtt

SEQ ID NO: 161738 - DNA, 426 bp, Arabidopsis thaliana columbia
agaagatcgtttacgattcaaagctttttctttttttgaatgagtactctcaaatcgggggcgtttcatctgacaaggggggatcaactcaccttcagaacataaggaaaggtttacgaggtgattcagttgttttgatggggaagaacacaatgatgaagagatctgtgaggattcatgctgataaaactggcaatcaagctttcctcagtctccttcctcttcttcaggggaatgttgggttgatcttcactaagggtgacttgaaggaagtcagtgaagaggttgctaagtacaaggttggagctcctgctcgtgtaggtttagtcgctccaattgatgtggtcgtgcaaccaggcaacactgttcttgacccttaacagacctccttcttccaggtgcttaacattccaaccaaaatcaaca

SEQ ID NO: 161739 - DNA, 431 bp, Arabidopsis thaliana columbia
ctccatttctctatctttctctctcgctgcttctcgaatcttctgtatcatcttctgcttcttcaagtgaaaaatggccgatggtgaggatattcagccacttgtctgtgacaatggaactggaatggtgaaggctggttttgctggtgatgatgccccgagagcagtgttcccaagtattgttggtcgtcctaggcacactggtgtcatggttggtatgggtcagaaagatgcttacgttggtgatgaagctcagtccaagagaggtatcctcactctgaagtatccaatcgaacatggtattgtaagtaactgggatgacatggaaaagatatggcatcacactttctacaacgagcttcgtgttgcccctgaggagcacccagttttactcacaaaggcacctcttaaccctaaagctaacagggaga

SEQ ID NO: 161740 - DNA, 440 bp, Arabidopsis thaliana columbia
gtttcgccgctcaggtttcgtgaaatgtatatttatcttgagcaatgtctccagctaaagtggatgtcaccaagaaagccgaccgtaaggctaaggctttgaaagctgcgaaagcagtgaaatctggccaaatcgttaaaaagcctgcgaagaagatcaggacaaaggttactttccacaggccaaagacattgaccgttcctagaaagcctatagtcccaaagatcagtgcttcttcaaggaacaaatttgttcattaccagttcctaatggtcctttttactattgattctgccatttaaatgattgttgacattctctctcttttttttttgttgatcatcttttctgtctagtaaatttccatatatgctttttttttatttatattatatttatttctctatatatttaaattttttttttatgctctttttttt

SEQ ID NO: 161741 - DNA, 449 bp, Arabidopsis thaliana columbia
ccgggcccacccgaccaaaaaaattttttaaaagagcttggaagacccatggcgatgtctaatgtccagcctatgctactccgcctcgtatcactcttcttcttaccggctttgcgtggcgccatagatttcgaatactgcgccaaaaatggaaacgattacggaaccgtcactagcattggggtctctccatctgtggggcctcacgaaaacccaaccatcactataaatttattcggttctgcaagcaaaaacatccccgcgggaacccttgtgtacgtagcctttagagatggggaatttaccggccttttaaaaacttacaacctttgtgatgtgagtgcatgtaacaatgaagctgagattgaagctggcaccaactttgagttaactctttccgacgttctttatgttggttatgatgaggaaatcaagtactcggtatcttt

SEQ ID NO: 161742 - DNA, 256 bp, Arabidopsis thaliana columbia
  unsure (1)..(256): unsure at all n locations
ttatactttccttttccagggatctaaaaccgnccttctcattgaattttttgttcaaaatttctatgcttttataaatggaaaactttcaagaagcggacattttaaaacaaaaattttttttttattcccactaatcttttaaccgtgacaaacacaatcaatctccttattgttaccgtttgtctttcgaattatgaagctttttttaacttaatggaagcaggaataaccttaccttattattttttttata

SEQ ID NO: 161743 - DNA, 413 bp, Arabidopsis thaliana columbia
gtaatttccaaagctgatgcattcttgaaacctggtttgctagagcagattaacacaacagctgagaaaagcgattacttgggggactcactaaggacggatataaaaggcgatgagactttccttgacgagggatctaaagccgtccttcacattgaatctcttggtcaagggggctatgctttaataaatggaaaacttgcaggaagcggacatggcaaacagaagatttctttggatataccgattaatcttgtaaccgggacgaacacaaccgatctccttagtgttaccgaagggctggcgaattatggagctttctttgacttagtgggagcaggaataaccggacctgcgacacttaaaagcgctaaaggtggtagctcaattgattgggcttaacagcaatggac

SEQ ID NO: 161744 - DNA, 425 bp, Arabidopsis thaliana columbia
gaaagaatagtgaccagtcgtggaccaggaaccaccattgaattctccatcacgcttatagagcagttgtttgggaaagaaaaagctgatgaagtctccagtatcttgctgcttcgtcctaaccctggtgaggagtttacttttactgagcttaaccaaacaaactggtcatttgaagatacaccacagattctcgtacccattgcagaggagtcagaggaaattgaagctatagcgcttgtagatatcctgaggcgggcaaaagcaaatgtagtgattgctgcagttggtaacaagtttgaagttgaaggatctcgcaaagctaagctagtagcagaagttcttcttgatgaggttgcagagaagtcgtttgatctgattgggttacctggcggtcttaacggtgctcaaagattcgcaggctg

SEQ ID NO: 161745 - DNA, 414 bp, Arabidopsis thaliana columbia
  unsure (1)..(414): unsure at all n locations
cccacgcgtccgaccggccttgaaccaaaccggttcacagatttttatcgatggaggactcgattacttgggagaccctatcttggtccacgctgagagcattttggccatttgggccactcaagttatcttgatgggagctgttgaaggctacagagtcgcaggaaatgggccgttgggagaggccgaggacttgctttaccccggtggcagcttcgacccattgggtcttgctaccgacccagaggctttcgcggagttgaaggtgaaggagctcaagaacggaagattggctttntttcttttgtttcttccttttctctcctttttttttgctttctctgttttttttgtgtgtttttttctctcttcttttcttttcaatgcattggttttgtttttatatttcctcta

SEQ ID NO: 161746 - DNA, 432 bp, Arabidopsis thaliana columbia
gagccttgggttgatactaagagtaaaaaattttatattaatactaaagttcagaattatcaaaaaattgataaaataacgcagacggatcttgctaataaaaaaagaaacttttttgattggatgggaatgaatgaagaaatactaaatcagcgtataacaaattttgaattttttttctttccggaatttttcttattttctagtacatataaaatgaaaccatgggtcataccaatcaaattacttcttttaaattttaatgaaaacataaatgttaataaaaagatcattcgaaagaaaaaaggttttataccatcaaatgaaaaagaatcccttcgattttataatctgaataaagaataaaaagaatcggccggtcaaggtgaacttgaatcttttatagaacaataagaatttcccgaagcagtt

SEQ ID NO: 161747 - DNA, 314 bp, Arabidopsis thaliana columbia
  unsure (1)..(314): unsure at all n locations
tttttctgacacattaactacttatccttcttgcattcttctctctctctacacccgagcaaacacacttataatatagcaggaaagaagatgtctagcagaagatcatcacgttcaagacagtcaggaagctcaagaatctctgacgatcagatttccgatcttgtttctaagctccaacacctaatccctgaacttcgccgccgccgttctgacaaggtgncagtttctaaggtactacaagagacttgcaactacatcaggaacttacacagtgaggttgttgaccttattgacccgtttgaagaaacttt

SEQ ID NO: 161748 - DNA, 435 bp, Arabidopsis thaliana columbia
ccgggcttttgccttgttggctagagggtgcttgtcttcacctattgaaagctgtatagctgatgccattagagcttccagtactgataattacccagtagaaagcatcttaaacacactcgagaagagagatcggattggtcgaaccccttcttattggtcgagtactgggcaacacaaaactacggtgcccgaatcacttctttacaagttgattggtgatttgtgtctaattactgaagtcagcatccatcctttccaagcttattttcagcgcgggcatccgatatactcttaacattatgttcgtttccggttgggtcacgaaaaggacaattcacctcactacaacatttcacaggataaaaaaggtgagccaggaaagagttcaattgaaagcaactatgtatggacttacacttcacaagagttttc

SEQ ID NO: 161749 - DNA, 362 bp, Arabidopsis thaliana columbia
ggaaacaacaagaagaagtaagggcttcctctatgttctcctccaccgctgtggttacctccccggctcaagccaccatggtcgctccattcaccggcttgaagtcatccgcttctttcccggtcacccgcaaggccaacaacgacattacttccatcacaagcaacggaggaagagttagctgcatgaaggtgtggccaccaatcggaaagaagaagtttgagactctatcttacctccctgaccttagtgacgttgaattggctaaggaagttgactaccttctccgcaacaaggggattccttgggttgaattcgagttggagcacggatttgtgtacccggagcccggaaacactccc

SEQ ID NO: 161750 - DNA, 431 bp, Arabidopsis thaliana columbia
ttagcgagtagaatcaactatcaagcatgggcttcgttgaccatgaccgttaccttcttcccggccgtcgccaaggttccctcagccaccggcggacgaaggctctccgtagtcagagcctccacgagcgacaacacacccagcttagaagtcaaggaacagagcagcaccacattgaggagggacctcatgttcacggctgcagctgcagcggtttgttctttggctaaggtagccatggctgaagaagaagagcccaagcgagggacagaggcggccaagaagaaatacgcacaagtttgtgtcacaatgcctacggccaagatctgccgttactgtatcaacaacccaccttctgcatgtctatctctctctttcaatttcggtaaattttctcaattaagtttggcctgtaatcgaatatttgatca

SEQ ID NO: 161751 - DNA, 442 bp, Arabidopsis thaliana columbia
  unsure (1)..(442): unsure at all n locations
aagaagaggaagaagaagaagaagcagagacttctttttgatgaagaaacagcctcatctcgccggagaagaataaagatgtcgtggcaatcatacgtcgatgaccatctcatgtgcgaggtcgaaggcaaccaccttacacacgccgncatttttggccaatacggcagtgtctgggctcaaagctcagctttccctcagttgaagcctgcagagatagcaggaatcaacaaagactttgaagaagccggacattttgccccaaccgggctattccttggcggtgagaagtacatggttgtccaaggtgaggctggagccgtcatccgagggaaaaagggacctggtggagtcactatcaagaagactactcaagctctagtctttggtatctatgatgaaccgatgaccggagggcattgcaacttgtgcgtggagaggc

SEQ ID NO: 161752 - DNA, 443 bp, Arabidopsis thaliana columbia
ttcgacccacacgtccggtgaaccaagacccgttcgctgcttccctgaccattccgcctccttcctatgtgcaaatggctgagatggacaaaaagcaatatctattgactcaagagcagcaattatggcagcaatatcagcaagaaggaatgagaggtcaagctagtttggctaaaatgaatacagcccaaaccgcaatgccttatggtatgccgccggttaacgggatgggaccgtcgccgatgggttattactacaacaacccttactgattttattcatttggttggcttttttcttacatatattttccgaccaatgtagatgtgttataatgcggtttttcttgaatttgttcctgatcttgcgtcctattattgaacctgtgagacttttgccttttttgagtattgatgaataatgaagttatacatctgttgttt

SEQ ID NO: 161753 - DNA, 470 bp, Arabidopsis thaliana columbia
tccggatttccagttccgacccacgcgcccgaaatctctcaaagtaagaactaagagctttactacagtcctactctctacacatcttctctctctctcaagagctagtcatggccaaactcataacttcttttctcttactcacaattttattcactttcgtttgtctcactatgtcaaaagaagctgagtaccatccagaaagttatggaccaggaagtctgaaatcataccaatgtggaggacaatgcacaaggagatgtagcaccacaaagtatcataagccatgcatgttcttctgccaaaagtgttgtgctaaatgcctttgtgtccctccaggcacgtacggcaacaaacaagtgtgtccttgttacaacaactggaagactcaacaaggtggaccaaaatgtccataaacaaaaacattgagagagaaaccccaatctgtttcctattttatttaattattt

SEQ ID NO: 161754 - DNA, 436 bp, Arabidopsis thaliana columbia
caaaagaagaagagaaacaccaggaagaagtattggcttcctctatgttctcctccaccgctgtggttacctccccggctcaagccaccatggtcgctccattcaccggcttgaagtcatccgcttctttcccggtcacccgcagggccaacaacgacattacttccatcacaagcaacggaggaagagttagctgcatgaaggtgtggccaccaatcggaaagaagaagtttgagactctatcttacctccctgaccttagtgacgttgaattggctaaggaagttgactaccttctccgcaacaaggggattccttgtgttgaattcgagttggagcacggatttgtgtaccgggagcacggaaacactcccggatactatgatggacgatactggacaatgtggaagcttccattgttcggatgcaccgactc

SEQ ID NO: 161755 - DNA, 403 bp, Arabidopsis thaliana columbia
gaaaaaccaaaagatgaagagaaacatcatgatgaagtaatggcttcctctatgttctcctccaccgctgtggttacctccccggctcaagccaccatggtcgctccattcaccggcttgaagtcatccgcttttttcccggtcacccgcaaggccaacaacgacattacttccatcacaagcaacggaggaagagttagctgcatgaaggtgtggccaccaatcggaaagaagaagtttgagactctatcttacctccctgaccttagtgacgttgaattggctaaggaagttgactaccttctccgcaacaagtggattccttgtgttgaattcgagttggagcacggatttgtgtaccgtgagcacggaaacactcccggatactatgatggacgatact

SEQ ID NO: 161756 - DNA, 389 bp, Arabidopsis thaliana columbia
ggcgtctcttctcggaagatctccttcttcaatcttgacctgccctcgtatttcttctccttcctcaacatcttcaatgtcccatctctgcttcggaccagagaaactttctggaagaatccaattcaatccaaagaagaacagatctcgttaccatgtctctgttatgaatgtcgctacagagatcaactctgtggaacaagcaaagaagattgattcaaaggaaagtgcaagacctgtttatccgtttgctgctatagttggacaagatgagatgaagctatgccttttgttaaatgtgattgacccgaagataggtggtgtgatgataatgggagatagaggaactggtaaatcaacaactgttagatctttagttgatttgcttc

SEQ ID NO: 161757 - DNA, 332 bp, Arabidopsis thaliana columbia
aattaaaaaagggactcagatcgcacgaatggtgcagaatacgcatcgtggacaccgccgacgagtttccttattggcggagcaatccttttatccgccgccggctatgttagatccgacgcctcggaccaccgtaacagggaaggagacaccgtccctttctaccccaacaaggtaggcccatttcccactccaggtgggacgtatggaaatttggatctaccctactgtatcccacagggtgtgaatgagacgaaggatgctctaggagcggtggtaaacggcgatcgcctagttagcgctccatacaagctaaacttcagagatgaaaa

SEQ ID NO: 161758 - DNA, 420 bp, Arabidopsis thaliana columbia
caaatcagagaattgggtatcaaacaccggttagtccgatgtgaatgcagttacttggggagtgttcccagctaaggaggttattcaaccgacgatcgtggatccagccagtttcaaagtctggaaagacgaagcgtttgagatttggtcaagaagctgggctaacttgtacccagaagatgacccttctagaaagttgctcgaggaggtgaagaacagctactatttggtaagcttagtggacaacaattacatcaatggggatatcttctctgcctttgcttgatctccgagaaaaccaccggcgaagaggaaacattcgatttcgagatttgttttgcaccttttaagagtatttttgattcgtaataaccttactttgttgaatcaacaaaaacatcagtttgtttgcaatgaaaa

SEQ ID NO: 161759 - DNA, 458 bp, Arabidopsis thaliana columbia
cccacgcgtccgagaaacgttagatttctttatacgcgcaaactgaaagagctttgatcgatcgatttggaggattcgtagaagatatgtcgagtatatacagaactgtttcgagaaaagagaaaccgagacgtcatcatggattgacgacacagaagaagcaggagattaaggaagcttttgagctatttgacactgatggttctggtaccattgatgctaaagagcttaatgttgctatgagggcgcttggttttgaaatgacggaagagcaaatcaacaaaatgatagctgatgtggataaagatggaagtggagctatagattttgatgagtttgttcatatgatgactgctaagattggtgaaagagacacaaaagaagagctcactaaagcattccagatcattgatcttgacaaaaatgggaagatatctccggatgatatcaaacgcatg

SEQ ID NO: 161760 - DNA, 354 bp, Arabidopsis thaliana columbia
  unsure (1)..(354): unsure at all n locations
gtaaagacgataatatnttttaagcgcacttttttttttttcttggttgagctgcatattcttgaaagaggtattgaattcagaggattagatggcccaatgggtttatcatcaagagacaggtctggttaagaattcagtaaaaaaccagattattgatgcctgaagctctctaaaagtgttgggnntttttatttggtaaaggtgaggctgatgtctctaaaagctggaaacctggtgctgaatatggtagctgaaagtcatgtcaccctcttggatctttggtggaatccaactaccgaagattacgcgattgatcgtgcacatcgtattgtacaaactcgtacagttact

SEQ ID NO: 161761 - DNA, 409 bp, Arabidopsis thaliana columbia
  unsure (1)..(409): unsure at all n locations
caaccgaaaaaaaagaaaccacattttcaagtgttctaatggctgcctcaaccatggatttgccctcccctgccttcgccggaagggttgttaaacctgccggatcagatgtcctcggatgcgcccgcgtgaccatgaggaaaactgtcgccaagccaaagggtccatcaggcaccccatgtntcccctctgaccaagtcaagaacttgggtccattctccggggagcccccgagctaccttaccggtgagatccccggcgactacggatgggacaccgctggtctatccgccgacccagagaccttcgccaggaaccgtgagctagaagttatccacagcagaggggccatgctcggagccctaggctgcgtgttccctgacctattggctaggaacgaagtgaagtt

SEQ ID NO: 161762 - DNA, 370 bp, Arabidopsis thaliana columbia
  unsure (1)..(370): unsure at all n locations
acctacgctttcgttcaagaaaaccaaagcagcagtttttgtcctttttttcaacaaagcaccccatggaagatgaggtgaagaagacggaggcgtctagtttggtggggaagctagagacagacgtggagatcaaggcttcggctgataagtttcaccacatgttcgctgggaaaccacaccatgtcttctttgcnngtccaggcaacattcagggatgtgatctgcactaaggcgactggggcacagccggctctatcgtcttctggaattacgtacatgatggggaggcaatggtggttaaggagaggatcgaggcggtggatccagataagaacttgatcacgtctagggttatagaaggtgattt

SEQ ID NO: 161763 - DNA, 371 bp, Arabidopsis thaliana columbia
gcttctctctctggtagccatggcttcggctactttttttgtggccaaaccatctcttcagggtttttctgagttctcaggacttcaaaactcctctgctcttccctttgccaagagatcttcttccgatgagtttgtttccttcgtcagtttccaaacttctgcaatgagaagcaatggtggatccaggaaaggggtgaccgaggccaaaataaaggtagccatcaatgggttcggtaggattggtaggaacttcttgaggtgttggcatgcgtcgaaggactctcctcttgatgtcgtggtcattaacgacactggtggtgttaaacaagcatcacatctcctcaaatacgactcaactcttggaatct

SEQ ID NO: 161764 - DNA, 342 bp, Arabidopsis thaliana columbia
  unsure (1)..(342): unsure at all n locations
gatttgggaagnttcgaccgatctgggggttttagggacaaaacccaactgctaggcaatggcgccacctccaggacggaactccggcaccagcactcttgctctggttgctcgagcttcggctttcgggtggggcctcatctacggcaacataaagctcaaggctaaaaagagtgttgtngnnttcgcagattaaggccgatgcaaaggctcatcacaaaaccaactcttcttctccttctcaataagattatgaagccaagggatggtttactctaaatgcagttcatatcctcctaaagctaaaacaccctgggggacattattaccaccttccggtta

SEQ ID NO: 161765 - DNA, 433 bp, Arabidopsis thaliana columbia
  unsure (1)..(433): unsure at all n locations
agaaaacaagaactttgnatttgaagtatactttgatttgttttgattgggacagctcggttttgcccgctaaggtttatattttcgaggttacagattcttgggaaagatcaaagggagatagccagaaccatatttgccatgtggaatacgaggtgaaaccgtgcaaaaccaatggcgatttatncattgacgttaccaaaaagagcttaatgatgccatttgatgggtatattgtctacggggtagctcaccaccacgctggtggtatcgggggtgctctataccaagagaacggtgaagggatatgcgcttcaatgccgaactatggcacaggagatgaacctggaaacgaacctggatacattgttggaatgccgtcttgttatccagctgatccagagaaagtgagctatggagagacattgacttt

SEQ ID NO: 161766 - DNA, 455 bp, Arabidopsis thaliana columbia
  unsure (1)..(455): unsure at all n locations
cggaancccgggccgttcttgcttccgagcaagtcagggactatcgaaagctttttttgttccttctgagctacctaaggggaactatgatggtttgagtaccggtcaagcacctggtgaagatagtgaagtgattctatacccgtaggctattttcagagatcctttccgtggaggcaatnacattttggttatgggtgggcnnggacaccagctggtgagccatttccaacaaacaaacgtgctaaagctgctgagatcttcagaaacaagaaggtctttggcgaggttccatggttcggaattgaacatgagtacactttacttaagcaaaacgtcaaatggcctttaggttggcctgttggagcgtcccttggtccttagggtcctaactactgtggagttggagctgacatgatttgggggcgtgacatttcatatgctcatatcaaagt

SEQ ID NO: 161767 - DNA, 398 bp, Arabidopsis thaliana columbia
  unsure (1)..(398): unsure at all n locations
tcgttctatcgtccgaaatttcaggacccaaaactcttcttttaattttggaccgaaccatgtttctttccgtgacaatagcctcactctgggggggagtcgtctcagttggtgactggaacatttggaaccaactcagtggactcggttaatcgtcaagccaaaatggttncgtttctaaaggtataaaaacnnacctgaatggatactgtgaaagctgtaggatcaacgtggaagttcacatcatcagaaagttcgttgtggggcctaaagagtgtgtatcgcacattaaggattacattgacgtcttcgcagttcaaggatgacttgtcgagaaccgtagatgaggtcattcttaattttggaagcatgtgctgaatcaagtttaagtgtgacgg

SEQ ID NO: 161768 - DNA, 419 bp, Arabidopsis thaliana columbia
  unsure (1)..(419): unsure at all n locations
ttctaaaaatggctcaccaacactctttcctcctcttatgcttctccctctcaatctcttatttactatcttccgcccaaaccgaagccacctcaatcgagagattagtgccaagagacctctacaacaaaattttcatccacaaggacaataccgcttgtcccgcaaatggtttctacacttcccaatcatttgtccaagcgacgaggcggtttccgagattcgggagcgtaggaagccccgtgacacaacgactcgaagtggctgcatttttggctcagatttcacacgagacgaccggaggatgggcaacggcaccagacggaccgtacgcttggggattatgctttaaagaagaagtgagtccacaaagcacttattgtgattcttctgatacacagnggccttgtttccttaac

SEQ ID NO: 161769 - DNA, 450 bp, Arabidopsis thaliana columbia
ggtgctgcaggaatgatttctaaccatctttttttcaaacttgcttcaggggaagtatttggtccagatcaacccattgcattgaaactgctaggatcagagagatcaattcaagctcttgaaggtgttgcaatggaactggaggattcattgttcccattgttgagagaagttgatataggaccagatccaaatgaagtgttccaagatgtggagtgggctattctgattggagcaaaacctcgaggccctggaatggaacgtgctgacttgttggacatcaatggccaaatctttgctgagcagggcaaagctctgaacaaagctgcctctcctaacgtcaaggttcttgtagtgggaaacccttgcaacaccaatgccttgatttgtcttaaaaatgctcccaacattcctgcaaagaacttccatgccctcacgaggttagacgaa

SEQ ID NO: 161770 - DNA, 281 bp, Arabidopsis thaliana columbia
  unsure (1)..(281): unsure at all n locations
tttaaccacctcttttttttttttgcttcaggggaggaattggggccggatcaacccatggaatggaaccttgtaggttctgagtgaccaatccaagctcttgacggccttgtaatgtaactggaggattcattgactccatttttgatggaggtgggtatgtnnncatatccaaattatttgttccaagatctgtagagaccctttctaattgtagcaaaacctataggccctgaaatgtatctgcctgtcttgatggacactcaatggccaaatatttc

SEQ ID NO: 161771 - DNA, 424 bp, Arabidopsis thaliana columbia
  unsure (1)..(424): unsure at all n locations
ggccgacccacgcttttgttttgttggataccantacaatcacccaattttgtttttttgcctataaatgatggggactgggagaagcttcctttctatcgggtccttcataccacctacattttgtatccgatggctttagcggttgcttatatactcaatgggtggctttccattcattcttcgtgtaatggttctatatattagtatgggtttatcatttaacttggatagtgaactcaacttgttatgtatggtgaaatcaagtttggtacacaggcgatttgtttaataacaactggggggttgcagctttagcattctgggaaggatggcccaacaatcaccatgcttttgagttcttatcttgacacggtttataatggtggcaactttgatatgacttggttcgtctttaagtccc

SEQ ID NO: 161772 - DNA, 452 bp, Arabidopsis thaliana columbia
ccgggccgccccacgcgtccgatgggtttatcagattaactgtgcgttgatttcaagagaaggaactactgtaaccgaagaggacattaaagcgtttggtaggaagaatttggcagctttcaaggtgccaaagagagtgttcatcactgataacctccccaaaactgcctctggtaagattcagcgccgtttcgtcgcaccccatttccttgagaagccctgaaacacacagaaaacaccatcttgctcgaaaatcatcggtgatgagtcctagttttcacttttcacgcaaatggatatgcgttctctattattggttcttggtttaaaagttactttttatatgtttcatggtggtaaaggttttagattaaatcacaaaagtggaaataaaagtcgatatgtgattaaaaaaaaaactttgttttctttttatcttttttttcttttta

SEQ ID NO: 161773 - DNA, 352 bp, Arabidopsis thaliana columbia
gcaaacctgaccgttgggaaaaaaaaaaacgtccgcccttgagagagaacgccatgtctgccaaaacaatcctatcttgagccgattaggagcttctctaagccacatcaccagggggtaatatgggaatacgcaaggcaaacccaacccgaagggttatgggggggcatcggggggagcaggaatcggctacccagatcttagaacaatctcttgaggaactcactatcgctcgctaaactaacgcgctggagaaaaaggatcacaacgtgggggagatcaaccttcgattctcgatttccaaggagaatgtcgattggctcagacccaccaccacgaagggctattctta

SEQ ID NO: 161774 - DNA, 375 bp, Arabidopsis thaliana columbia
  unsure (1)..(375): unsure at all n locations
tataaacacnattagctaaaagaaattattttttttgatggccaccttatccatcactaccatttttctagcgggcggtgtggccgcaccctccctagctggtcctgacatccatgtcgaggactctgtaggccgactacttcgacctggcaaaacgnaccacatcgaacccggtgaggacgggacaggaggaggtattttttcgaccagtgaagaaatttgtcctcttgacattttccagtcaaacaaaccgtttgacttgggcctacccatcaaattaaagtccgtgttttggttggctaaggaaatgattagtatcaccatcgagttgggggctccgaactgggttttgggtccaaaagaatccaaggtgtg

SEQ ID NO: 161775 - DNA, 374 bp, Arabidopsis thaliana columbia
  unsure (1)..(374): unsure at all n locations
gagttgcttggactagnttccatggttcggttttgatttagagtacactttacttcatcaaaacgtcaaatggcctttaggttggcctgttggagcgttccctgggcctaaaggtccttactactgtggagttggagctgacaagatttgggggcgtgacatttcagatgctcattacaaaggnngtttatatgccggaattaacattagtggcactaatggcgaagttatgcctggacagggggagttccaaagatgcccgaccgtaggaattgatgcaggtgatcatgattggggtgctaaaaacctttttgagagaattacagaacaggctggggttgttctaacacttgatcccaaaccgatatagggtg

SEQ ID NO: 161776 - DNA, 421 bp, Arabidopsis thaliana columbia
  unsure (1)..(421): unsure at all n locations
gccggaattatctacgactttgtcttcatctttgaaaatgcccacgagcaattgcctaccaccgattactgaagacgtcaaattcaacgttgttaatctgatgaatttttcgggatttgcttttttaatttgcatcgtaatgggtttttggccgttggatcatttttagatgaatctttgagccanggatggatcatttatgtgtctttgggtttgttgttggagttgtaatatctctggaaggcttttgtgcaattgtattgttcggtttaataactataattgagaaaaccagggaatgtgaatcatgaaaatgaatttttttgttattgtttattttacttaaagagccctaactaatttagatcatattttacgagacatggaaattttaatgaataataaacattgtgattgtttt

SEQ ID NO: 161777 - DNA, 447 bp, Arabidopsis thaliana columbia
cagaaaaggagagaaaaattaaaaaagtcttttttttctctttttcttcttcgcctcccatattctccgatcaaaaatatatttctctctcactttccttggttttctcggcggcttcttcttctcctatttctccctcaaatcgttttctccagttttcttgggataaatcttcctgctttctgcagacgccatgtcggacaaaggtcgtcccttgccaaaatttggtgaatgggatgtgaatgatccagcatcagcagaaggttttacagtgatattcaacaaagctagggatgagaaaaagaccggtggcaaaccgggatcacccggtaaatccagtgagggtcatgttaaatctggaggaggagatcctagtaaacctcagcctaaaaaatggctctgctgcatgcaagctccagctgtggactcttgacagacacaaagatg

SEQ ID NO: 161778 - DNA, 277 bp, Arabidopsis thaliana columbia
accgtttggcacaacaccaaagaccatgattttattttttaccaggggggatgtgggataattagacctttggtacaagttctcgcgggcccaaactttgaataagagggggtggtcgcatataatgtagaactgggggagttcgaaaagacccatttcttgctctcggtttggttggacattacccgccacctggtgtgtaacactcgactgtcaatgaacacccccggaaaccggtttcatacgagacaaacgttgagaaagctgctgttcactg

SEQ ID NO: 161779 - DNA, 416 bp, Arabidopsis thaliana columbia
  unsure (1)..(416): unsure at all n locations
aatgccttgnaagagagaacacagtcttttctaactttcttcaatctcgttgccgcgggataattatctaattcctgggatatatctctccttctgcgggggcgacaagaagctacaagaataaaaagtctgttttctttcttttcaagaaaccactcacttcgaaaagggctcgttgnncctctaacgttaagatcgtatctgctttcgtctctcgtgaactctccaatgctatcttccgacgaggttatgcggccacggcggcgcaagggagcgttctgagcggtggaagaagtggagctgtagtttcggctgcgatgaagaaaaagggagtggaatatttaacccatatgatttcttggtttccagatcccaaaaccggatattacagacccgaaaccggttccaacgagatt

SEQ ID NO: 161780 - DNA, 351 bp, Arabidopsis thaliana columbia
ggctaaggaggtggacgaccttatccgcaacatgtggtttccttgggtcgaattcgagttggagcacgaatttgagataccgcgagcacggtaacacacccggatactatgatggacggtactgaacaatgtggaagctatccttgtacagtggaacctactcctttcaagtgctgaaggaaggggaaaagcccaagaaggagtgcctcctggccttcattgggaccataaaggtggacaccaccggtcaagtccagtgcatcagtgtcattgcctacaggcctccaagctttaccggctgatttgccttggcttttggttaaacctaaaaatttgaacccccatcattga

SEQ ID NO: 161781 - DNA, 448 bp, Arabidopsis thaliana columbia
  unsure (1)..(448): unsure at all n locations
gaccgtatgacggttncgcttgccatttcttttccatcgctcccatctacaatgaccgagaacgcctccagatatacctttctgatgcgggtattctagccgactgttttggtctttaccgttacgctgctgcacaagggatggcctcgatgatctgcctctacggagtaccgtttttgaannnnaatgcgttcctcgttttgatcacttacttgcagaacactcatccctggttgcctcactacgattaatcagagtgggactggctcaggggagctttggctaccgtagacagagactacggaatcttgaacaaggggttccacaacattacagacacacacgtggctcataacctgttctcgacaatgccgcattataacgcaatggaagcttcaaaggcgataaagccaattctgggagactattaccagttcgatggaacacc

SEQ ID NO: 161782 - DNA, 434 bp, Arabidopsis thaliana columbia
cgtttccaacagccaagagaagcagaagctttatgattctctgtaatctaaaaaatgggaaaggtccacggttcattggctcgtgccggtaaggtgagaggtcagacacctaaagtggctaagcaggacaagaagaagaagcctcgtggtcgtgctcataagcgtctgtaacacaaccgccgtttcgtcaccgccgttgttggttttggcatgaagagaggaccaaactcatcagagaagtagatagaagaaggttttacccttttcagattttatgggatgtttttgatattgggtcattagttggcccaaactcatcgatatcaaagtggtttaaccttggttatctacaaatcagaggatgttgtgtcaattttctggtcaattggattcttgtttctcctcagattagacttaagttcttgaattattga

SEQ ID NO: 161783 - DNA, 397 bp, Arabidopsis thaliana columbia
  unsure (1)..(397): unsure at all n locations
cccacgcgtccgganctaatggngataactcaatcccattcattatcctttaaagctggcctcttttgggtggggctgaatcaattgggggaagtcaagaggagaagtgacaatggatgcgtttagaagacaagcgagtaagcttagagaccaagtcgcaaagcagcacctggctgtgataaagcaatttnnngggactggttatgaaagctcagatgaaatggtgattgatgagcttgaaatgcaaaggcatcatcaactcgttaaactttaccgctctacttgttctgcaaaggagttccagagagatattgttaaagcagctgaggcatttaccacgatcgggctcaaacacattgaagcaggaaccaagttgttctgaagactgatgtaggtt

SEQ ID NO: 161784 - DNA, 451 bp, Arabidopsis thaliana columbia
gagaaaggaagacgaaggaaggagaatagtatatgaagaagaaagggagagtcttgtgatatctacgtagaaggaagatggccttatctcaagtgtctgcgtctctcgccttttctcttcccaattctggtgccctaaagctagccacaatcacaaacccaacttctacatgtcgggtgcagggcccgcaacttgctggaatccgatccaccttcgcttctggttctcctctcttgccattgaagttgagtatgacccgtagaggaggaaacagagcagcatcagtttccataagaagtgagcaaagtacagaaggaagcagtggtttggatatatggcttggtcgtggcgccatggttggttttgcagttgccattactgttgagatttccactggaaaaggacttcttgagaattttggagtagcaagtccattgcctacggttgcttt

SEQ ID NO: 161785 - DNA, 445 bp, Arabidopsis thaliana columbia
  unsure (1)..(445): unsure at all n locations
ggaatcccgnctcgcccacgcgtccgaaagaagaaanacgcaaagaaccttttttttttctagatagagatggaagggaagagggggttgttctagcgggggctaacaagctcccggtgaggcaaccgttagggccatcggctcagacggacaatgactacaaggtgccaccaccagctccattttactagccgggcgatttgnnttcgtggaccttttacagagccggaatcgccgtgttcatagccaccttcctgtttctatacataacagttttgacaggtatgggagtgaagagagcaccaaacatgtgtgccttcgttggaatccaaggtattgcttgggctttcgggggcacaatctttgcccttgtttactgtactgttggaatctttggtgggcaaataaacccatcggtgacatttgttctgttcttggctagtaa

SEQ ID NO: 161786 - DNA, 428 bp, Arabidopsis thaliana columbia
  unsure (1)..(428): unsure at all n locations
cgggccgccttgtctttcggtttttgtagagcagacccaccatttttgtttgctgtacgacctaccacgcctgggccgggttcttcactagcagaggcaccatgattggatgctccacgacccactacgcctaagccgccttctccaagatcagacctgccaagattggtggctccnagacccacttcgccgaggttgnnntttcacaagatcggtttcttctagggctgtgcagcggcggaagattgttaatagtccagagccaactctttcggttcatcatgcttttgcaacaaagatttaaggagcttacatagtgttacatggcaaggtagagttctagagctctcaaaggttctgtcatgacttaaggtgtgttgagaggattacagtgctatgcgccttttgttaaatgcaatgaagtaaca

SEQ ID NO: 161787 - DNA, 454 bp, Arabidopsis thaliana columbia
ctctactgcctttttaccacagagaagagtgtgtattcgtcggtgtgctagtctcactgacactacatccgatcgtcgccggggacattttataagtgtggagtttacttcagctttattattcaggaattgatggatcagtacgagaaagttgagaagattggtgaaggaacttacggtgtggttaataaggcacgtgacaaagtgactaatgagacaattgctttgaagaagatcaggctagagcaggaggatgaaggtgttcctagcacagcaatcagagaaatctccctcttgaaggaaatgcagcacagcaacattgtcaaattgcaggatgtggtgcacagcgagaaacgtttgtatctggtttttgagtatcttgacttggatctcaaaaagcacaaggattcttactctgatttttcaaggatctacatttgatcaaaacatattt

SEQ ID NO: 161788 - DNA, 460 bp, Arabidopsis thaliana columbia
  unsure (1)..(460): unsure at all n locations
gacccacgcattcgcgatcccattttttttcaggaagtaataggtttctttttgaatgggactacatatgctgggctaagaggaagaacaactggagctcctcagaatcactggtttggacctgcgggggacccgagaggggccgggatagggacaccagaggctataaagctggtntggtcatgccacagagaagtcnnctacgattatggtccggttccacaaggttgggaacttcctccatctacttagaagtggggtgtccactaataattaataaactaagatcttagtgtgctgttgcatcaaataaatatgagttttgtagttttatctctacgagtagtttccgtgtgagggaataagagcttgaaacatgaagtttttaacgacgtggacttagtcaaggggttgagggattaagacagagagagaactattgtaaaacttcattccacca

SEQ ID NO: 161789 - DNA, 441 bp, Arabidopsis thaliana columbia
  unsure (1)..(441): unsure at all n locations
ggagttcattttggacatggtacgaggaaatgtaatcctagaatggcaccttatatttctgcaaagcgtaaaggtattcatattataaatctgactagaactgctcgtttttttatcagaagcttgtgatttagtttttgatgcggcaagtaggggaaaacaattcttaattgttttnccaaaaaataaagcagctgatttagtgtcgcgggctgcaatacgggctcggggtcattatgttaataaaaaatggctcggcggcatgttaacaaattggtccactaccgaaaaaagacttcataagtttagggacttgagaactgaacaaaagacagagggattcaaccgtcttccgaaaagggatgcagctgtgttgaagagacaattatctcgcttggaaacatatctaggcgggattaaatatatgacgggattgcctga

SEQ ID NO: 161790 - DNA, 326 bp, Arabidopsis thaliana columbia
  unsure (1)..(326): unsure at all n locations
gacaaaaagaccaatggcagcgagtgcattttcaatggcgagccagctaaggagcagcttgtcctccgcttctatttctcagcgtctcgccgtcccgaagggcatttccggggctcctttcggtgttactccgaccaaaagagtctcttccttcactgtccgagctgtaaaatccgccgncccaacattccaagtggttcaaccaagcaacggtgatccattcatcggaagtttggaaactccggtgacatcaagcccattgatcgcggggtacctttccaacctccctggataccgaaccgccgataaccctctcctccgtggtg

SEQ ID NO: 161791 - DNA, 440 bp, Arabidopsis thaliana columbia
  unsure (1)..(440): unsure at all n locations
tgaaattgtntttcagaacaatgagaagtcattgcagtcttggcatcttgatggatatgacttctgggtcgttggatttggttctggacaatggacacctgcaaaaagatcacttcacaatcttgttgatgctctgaccagacacacaactcaggtctacccagagtcttggacaacnnncttagtgtctttagacaatcaagggatgtggaatatgagatcagcgatatgggaaagacaatatccaggacaacagttttatctcaaagtatggaattcagtccagagtcttgccaatgaatacaatcctcctgacaatcttcaactttgtggcaaatctgttggacgacatgtttagagaaaatcctcttacagtttcctctgttcttttctaaaagtgatttactttaaggctttttcgatttcaattggttgaggtt

SEQ ID NO: 161792 - DNA, 431 bp, Arabidopsis thaliana columbia
  unsure (1)..(431): unsure at all n locations
gaccccgcgtccgttaagccgtaaacagctcagttgagtgacatgtagattgatgaatgcgaggagaccacgctccacgaggtcaacattgaggatgagatgaggaggaaggcacaagctcaaagagaggcttatgatgatgacgatgaagatgatgaccatccgggtggtgctcaaagggtgcaatgtgctcagcnnnnngtaactccttagagagactttgacccacatgggttggggctccaaccaatttgtctctggctttttcattctaagtgaattggagtctttatgggagtttggtccgcgttaagaatttgcccacttcggtggaacatcgaaacttgttttctctttttcctctgactttaaaaattaaggccttattacattttagcaaaatagattggggttatccccattgaaactta

SEQ ID NO: 161793 - DNA, 414 bp, Arabidopsis thaliana columbia
  unsure (1)..(414): unsure at all n locations
ggggtactgtcnggttaaccagtcatttcatataaccgttgaggcttttaaatggatcgtgggagtttgtacttacttatgaggataaggaaggagattggatgcttgttggtgatgttccatggagaatgttcatcaactcggtgaaaaggttacgcgtgatgaaaacctctttttatannnactcgctgcactaaatcaagaaccaaactagagacagcgaaagcagccggtttagatctcttttcgacgttacggcgttacaggttttatattttggggttttgcaagtctgagatacttctgaagcaagcataagctagattgatcttatatccagtttgtgaattttcttggctcttataatggtttttactggttttctttagtttttttttttgcgtgcttttaatt

SEQ ID NO: 161794 - DNA, 422 bp, Arabidopsis thaliana columbia
  unsure (1)..(422): unsure at all n locations
aaagaagaagagaaacatcatgaggtagtaatttttttctctatgctctcctcccccgctgtggttacatccccggttgaggccaccatggtcgctccattcaccggtttgaagtcatccgttgcattcccggtcacccgcatgaccaacagggacataacttccatggcaagcaacggtttttcnnnttagttgcatgaaggtgtggccaccaattggaaagaagaagtttgagactctatcttacctccctgaccttagtgacgtcgaattggctaaggaagttgactaccttctccgcaacaagtggataccttgcgtggaattcgagttagagcacggatttgtgttccgggagcacggaaacactcccggatactacgatggacggtactggacaatgtggaaccttccattgttcg

SEQ ID NO: 161795 - DNA, 406 bp, Arabidopsis thaliana columbia
tttatggagaagaacactgtttggaaacagtttaaatctgtaagaaagagctgattaaattagcagaggcgcttacgaaatctggttctacaaagaaactgcataagaaatctgtgtccttctttttctgaaagtaagtagaaacactaacttacttgttactgtaacacgcatcgcctaaagctacatgtatgtgtatatagatatagcttaaagtttgctaataaaaaaaaaaaaataattaattaattataccttaaaaataataaattgattttaagtaaattaatagcattaattaaaaaaatgagtaataattataaaataaaggggggggccgttttaggggttccaagtttactgcccggtgcttgcaacgaaataattttttttaggtggccctaaa

SEQ ID NO: 161796 - DNA, 459 bp, Arabidopsis thaliana columbia
  unsure (1)..(459): unsure at all n locations
gccggccacgcgtacgagcatacctagattttnccttcttgcgatcttttgcatttagggccacacatgcatctctggccgtgtgaagaatcccggggggacagcaactgcaccctaagagtgccatccactctttccctgctcaatgctcctccaagaggctaaaagtcgctgaattctccggtctgcgtatgagtaggnccggaggggaagcatctttcttcgatgctgtagctgcacaaatcatccctaaggctgtgacaacatcaactcctgttagaggacagacagcggccaaactgaaagtcgcgattaacggttttggagggatcggtaggaactttcttaggtgttggcatggtccgaaagactcttctttcgaagttgtggtacttaacgacagtggtggtgtcaagaatgcatcccacttgctaaagtttgactccatgcttggaacct

SEQ ID NO: 161797 - DNA, 408 bp, Arabidopsis thaliana columbia
  unsure (1)..(408): unsure at all n locations
ccggggccgaccacaagcgtccggatctctcttncttatacatccatattactctttgatgcctcgccgggacgacctgggcctgtcactcctcctggggagggccaccgtctccgctgccgcattagccgacgatgaagcagattgtgacaacacattcttccttagaaccggatcaaccttcaaagccggtacagatgggggcataagcgctagagtctacgacaaatacggggactacatcgggatccgaaacctaaaagcatgggggggtttaatgggaccaggttacaactactacgaggggggtaatctcgacattttcagtgggaaagcaccatgttttccgagcccagtctgttaattaaatctgacctttgacggatccggggaccaccacggtgggta

SEQ ID NO: 161798 - DNA, 130 bp, Arabidopsis thaliana columbia
  unsure (1)..(130): unsure at all n locations
cgaaagaaaaaatgttgaagctgntttaaacgatagttttctctgttttgccgttaacgttgtacataccgcggttaaaatgttggacggggtgggcggaaacaatggaggatatgggaatggaaggtag

SEQ ID NO: 161799 - DNA, 398 bp, Arabidopsis thaliana columbia
cccaatggaaaatgggggtaattcttcgggattttaacggaattccacaggtgaaaggggttcctggaggcaggattttaaaaattttgaaggctaatggtttggcccctgaaatccctgaggatctgtttaactggatcaaaaaggctgttgttttccgaaggctttttggggggaccaggaaagataaggtttccaaattcaggctgtttttggtgaagggcaaaatccatcgcttggctggttcctccaagaggaccaagaagctccaacccgtttggaagtccaagtttccaactgcaagcccttttggggcttgggaagaataaagttgatcatgtccttcaagaaggaccatttaattgtctgaatggcaactaaaagtttttttttttttg

SEQ ID NO: 161800 - DNA, 450 bp, Arabidopsis thaliana columbia
aataccggggcggacccacgcgtccgaaacaaaaagggtttggcaaaagcttcctttattggggttgttttggctccggaccatgggggcttttccagaaaatgcaaagggacctgttggcccgccgtcaaccaaactaagccgggcaggtttccttgagggtttttaatttggaccggttcctggggattaccaggtcgaaggggcgattaaggaaactggtcggggcccagccttatgggacatttactgtggaagatttccaaaggggggcattaccgataccggcgatgtggccgtggattttttccatggttttagggaagatttccacctaatgaagaatttaaccccagccccctttagatggtttatggaatggccaagaatttttcttaatggaagaaaggagaagggagtgagtcaagctggggggcaattttaccacga

SEQ ID NO: 161801 - DNA, 388 bp, Arabidopsis thaliana columbia
  unsure (1)..(388): unsure at all n locations
gggnccggaatnccggggcggaccacacccgtccgaaccaccacaaccactaatttttcaacattttgggggaaaaaaccagaccaggggtgtttagggatctaatggcgagggcggcttccggggctgtcctaagggggctgggtttttcgttcctaaccggaggcaaaagaggggccaccgaattggcaggcggggtaggcactggagctaaaagggtgggcaggaaaactttaatggtcgttgttgcggttgttaagcctaagaaatttgggatccttgccgttaaaggggggggcaacttccttgaccttgaatggttcgatggttcgttaccagaagatttcgggttcgacccattgggtttggggaaagacccggttttttt

SEQ ID NO: 161802 - DNA, 402 bp, Arabidopsis thaliana columbia
aaaccggggccgacccacccgtccgaagtccattaaataactgttcctaaaaaaactgtggttggcccttaaatgaaggactggggggggggaaaagctgtttaattcaccattattcccagcacaactggacctgccagggttgccggaagggtgcttccagttttaaacggaaggttgcctggaaggtttttccgggtccaacccgtggatgtttaagtggtggcccttactgccagactcaagaaagctgttccctacaatgaaatcaaaagggctatcaaggaggaatccgaaggcaaactcaagggaatccttggatccaccggggatgatgttgcttaaactgacttcgttggcaacaccaggtcaggcttttttgaccccagggttggaattgct

SEQ ID NO: 161803 - DNA, 468 bp, Arabidopsis thaliana columbia
cggggcggaccacacccgtccaaaaccaagggttacatttttgttgccgaatgtttcctttgtgatcctacctgccacctatgggtaaggggaggttttccattaccattggggccattggtcatgttgattttggaaaatcgcccacaccgggccacttgatctataaccttgggggttttgacaagcttgtaatcaaagggttctagaaggaggctgttgaaataaacaaaaggtccttaaagtccccatggttgtgggccaaactataaggccggccgtgggcggggtttacccatcaatatggctttttggaggttcgggcccaccaagtcctacttgccagtcattgatgccccaggccatcgggatttcataaagaccatgattcctggaacctcccaggctgattgggctgttctaatcattgactccacccctggaggttttggggctggtttttttaag

SEQ ID NO: 161804 - DNA, 358 bp, Arabidopsis thaliana columbia
cgtccgcgaaactccaacgaatttttgggggattttcccaagggctttggcaccatcaatgagttggaatttaatgggggctttcaagggctggctttttttttcgccttcgcttttttttaaaggcgattggggtttttcccccaaaccctttttaacggggccttttcctttggaaaattttaaagctccgattccgttgccaatggaatcggcccttaaaaaaggagctggtacccccaaaaccggccgggattttcctgggcaccgactcggcgtaaagatctacggtgcccaagtggctaaacctggggctatcattgttcgtcaccgtggccctaagttccatgctgggaaa

SEQ ID NO: 161805 - DNA, 420 bp, Arabidopsis thaliana columbia
  unsure (1)..(420): unsure at all n locations
cccgnnttggaataccggggcggcccacaggcgtccgaccaaccaaggggggggggaaaaccggcccccccctctccttggttttttttggctccacagcctaaaaatcaaatcctcctttttttttccaccattttggttggaccttaaaggaaaatttaggctggaagttccaaagcttttttccttaaaatcctacggtttaaggtaaatctttttcctttcaccgccaagggattcgtttagtcctcaaagggttaacccaagaaggatgaaggtggttgggaaaaagtctgggcctcaggtcctttaagattggttttaccgggggatcgagatacctttagtattaattactttagccaggctttgttcccaactagtcataacggtggagggctttggcctcgcaggtttttt

SEQ ID NO: 161806 - DNA, 314 bp, Arabidopsis thaliana columbia
caatttcaaacccttaatcttgtaatggctttggggaagaagttttcgacccttatgagggattttaaggtccagaacctggtttttaacatctttgttggtgggagggggaatcgtttaattcgtccctccaaggggtgggaccagtttaagggtcaaactctttttttttttaaggcggggtccactgggaggtgtttcggttttaggcttaatgaaatgatcgcgtcctttgtaaccttgggggggagaaaggcaggccacctttttggaagagctttggatgcgagggaatccgaattcttttgggggaa

SEQ ID NO: 161807 - DNA, 401 bp, Arabidopsis thaliana columbia
  unsure (1)..(401): unsure at all n locations
aaatnccggggccgaccacacccgtccgcggccccttggttgaccaatcaaggattcctaaatctctgggggattcaaccatttggctgggccccatcgtttggggtggcaaatccgttggcagggctgttaataaggctggttgggctaagttaatgggcctggcaggggaaccaaccattcagggggaagagcaaaaaaaactggatgggctctttaaggatgccttggccaccccttgggttagcaggggtggaccttttgttcttgtttcggaggaggatgaggaacctccgtttggggggccatccaaccgtggaaggacctgggttgtttttgatccgctggatggatcttcaaccattgactggggggtttccattgccccaatttttggaatt

SEQ ID NO: 161808 - DNA, 303 bp, Arabidopsis thaliana columbia
aaaaattttaattttcatttcaatgggggtttcccgtgttgttcccccccaccgcaaagggggtgggatttccgaaatggagacaaccaatcggggcgatccaccgtaaattaagaactgaatggttttcttggtcttgggttaaaccaatcgggggaatcggggggggggcgaatttgatttccggtgcgaagtttggtccaattttttttttggattcgtgggggatcaacgggggggggaaaggagaaattttcaaaccggttaaagccgccgttgttgaaggtggaaataccgttgggg

SEQ ID NO: 161809 - DNA, 349 bp, Arabidopsis thaliana columbia
ccgggccggccccaggcgtcggcaaaaccccctaaaaaggtaaggaaaggggtctaatttccttaagttcccggccccatccggggtttgacgggcttaaagttggccgccggttaaaaccctaaaccattatccaccatcggtggatccatttccgccaccggggcgccacctaagctggtttggaagtcctttttgagggatttcggggtaatcgcatgggcaccagcagcttcaatggtttaagctggaaatgcgagggccagggaggtttttttaggatccgccaacggttcccttgttttcggaccatttgaattaacgggggctaaaggggggaggatcgggt

SEQ ID NO: 161810 - DNA, 348 bp, Arabidopsis thaliana columbia
gaccaaccggccgaccaacaccaaatttaaaacgtttaactttgtgttgaattattaaacctaaagggccgcttaaacaaggggtttttcttcccttgccttggccggtaaggccgcaaagctttcccccgcggaatttgaagtcctgggaagcggccgggtgccaatgaggaaaactgtggccaagccaaagggcccatcaggcagccaatggtccggatctgcccgggtaaagtcctggggtccatcttttggcaaataaccgacctacctaaccggaaggttccccggggactacggttggaacaccgccggactttaagttgaccccgagacattcccagggaa

SEQ ID NO: 161811 - DNA, 424 bp, Arabidopsis thaliana columbia
  unsure (1)..(424): unsure at all n locations
cggggnggaccaagccgtccgaggttggtccccaaaaaaaaaaaaaaaccccaaaaggtttcatgggccgcttcaacaagggttttttcttcccttgctttggccggaagggttggaaacctttcccccggggattttgaagtcctgggaggcggccgggtgccattgaggaaaacggtggccaacccaaagggtccataaggcagccaatggtccggatccgcccgagtaaagtcctggggtccattttttggcaggtaaccgggctaccttaccggaaggttccccggaaactacggtggggacaccgttggactttaagttgatcccgaaacattcgcagggaaccgggagctaaaagttttccacagcaggggggttttgctcggagccctaggctgggttttccctgggcttttggtta

SEQ ID NO: 161812 - DNA, 417 bp, Arabidopsis thaliana columbia
cgggcccggaattccggggcggacccagccgtccgaaaccataaaatctaaaaaggaagaacctaaggctaactacgatttttttggggaatatgacgactttttttgttccgatggataacggaaattttatgaaaatcgcagaaaaggaatcacaaagaccactgtcccaatatgtaactggaacttaaatggtggcaataaagtccaaagagggggtttggagggcttttgatttggggggttaatatggatcaaccttaaaatccaagaccatcagaggagtgaaggctatgggtaagcatttttttttgggggccagcggaaaaataagcgactttaaggagattctccgtaatctggatgagctaaccctgaatgataccatggggaatgatggtaacttttggggaccaa

SEQ ID NO: 161813 - DNA, 367 bp, Arabidopsis thaliana columbia
ggcggaccacccgtccggggaaaacaagttttccaaactggttaaatcaaatttgcaagggaccgttaaccctcagggggaaaggttaagggaattggcaaaaagagaaggcctttggaactaatttgttcctgtaaatagggctgttagagttagaaaagaactggcggttcccgaaattaaacataacctttgggccaagttttttgatcaatggtttggggggggcctaacaaacctggagtttggttacctttgggggatcatgggtcgttctgtttgggctccacaggggtttaactgtggggcaccaaatcctggaaacatggaggggatactgcggtttggtaccaaagaacaaattttt

SEQ ID NO: 161814 - DNA, 355 bp, Arabidopsis thaliana columbia
  unsure (1)..(355): unsure at all n locations
ggcggaccagccgtccgaaccgggcaaangaggaggggaaccaccatgttttggtatgggtttccttaatgctctcgggggccgttggggttacatccccggttaaggcaaccatggtcgttcaattaaccggttggaagtaatccgttgaattcccggtaacccgcaggaccaacagggccataatttccatcgaaggcaacgggggaggagttagctgcttaaaggggtggccaccaattgaaaagaaaaagttggggactttattttacctccttgaccttagtgacgtcaaattggttaaggaagttgactaccttttccgaaccagggggattccttgggttgaattcaa

SEQ ID NO: 161815 - DNA, 435 bp, Arabidopsis thaliana columbia
cgtccgaaatacctggaatcttttaatccatcttaagattggcttaaaaaggaaatcaatttttcggccaaatggggaattttaaagggttctggggggaagtttactgggggcaaaaaagattttaagccgttccaccgaagcagtttggggggacccaaaggggtttttggcatggtccttaggaaggggccagaagaaaggatccttagggccactttaatcctggacccaacctttttttaaggctttgttcagtaaatctgaaattgagttggggttggaccatccgagggggggcttaccgttccctggcatggaagatccgttcataattgggctttttcggctccatggaccatgatccacctttttgtttttccgggttagatttagccttaatccattgtaataggctttttctttttttttctg

SEQ ID NO: 161816 - DNA, 394 bp, Arabidopsis thaliana columbia
cgggcggaccacccgtccggttggttggagagtaaaaggaccaaagatttttaaggaggtgagcgaaaaaggcaaaaccggccttggaaaaaattccttggatcctccaccagttctttttttggacatgggtgagctaaaatcctggtttttttacaaagttttaatggttgagttaatggttccactctttttcttttacgtaaccgtggttcctgtaatgggccacaaaaggcaaaccggcccttgggacggcgtgggttaactgggattcgttggggctttcgggggtttgatcttggtcctggtttactgaaccgccggtttttttgggggtaacattaacccagttgggactttcggtttgtttttggcccgtagggtctttttgggg

SEQ ID NO: 161817 - DNA, 362 bp, Arabidopsis thaliana columbia
cgggcggacccaggcgtccgagtggttgggttttccgaaccaatgccacttaaggttttggaaataacaaggaatttaaggggcaggcgcggggaaaattttgtggaagcgggataagcttacctttgaaggtttaaagaatttttacgtcaactttaaaaaagaaaagtggaagctggaaacattttgtgttttttacaagacttttgcaataattaaaagggtaattttggggaacaccaggcttaaggttgatgggttaacaaacaaaatgagaagccgggacaacacagtttttgcaattaacggagacatggaccagaccaccagggccatattaatgggagagtttaggtttggtt

SEQ ID NO: 161818 - DNA, 372 bp, Arabidopsis thaliana columbia
ttcgggccacataacttatcaaccattcctccttttttggccaaccggttttaaggccttcaaggggcctattcaaaaaggtgggcgtttgggccggggcccgtttaaccatgcttggtcccgtaaggtttactcccaaaggattttgttttggcccagaccgtccaaggtccttgggaccattttgggggaacacaccgttttacttaactggagaataccccggggactccggttgggacaccgttggactttgggttgacccggagacattcgttaagaaccgggggcttgaagtaatccacagcaaatgggctttgttgggtgctttcggatgcacattccttgaaattttttccaagaacggggtta

SEQ ID NO: 161819 - DNA, 440 bp, Arabidopsis thaliana columbia
cggggcggaccacacccgtccgtttagttttttggtcccgaccatttttttcttagaaccttggttgaggcttttgattggtgggaagggcctaaaaaggataaccgccgtttcttccatgtggcttaccgcgtgggggatctggaccgccccattgagttttacactgaggttttgggtttgaagctgttgaggaaaagagatttccttggggggaagaattctaatgcttttttgggtttgggacctgaaccatttaacttggtgggggagctaacatttaactatggggtaggctaatatgatatgggaactggctttgggctttttgccatttaaactaaagatgtttccaaactggttgagaacgtccgtgccaagggtggaaatgtgactggggaacctggtccagtcaaagggggaggcagtgtcattgcttt

SEQ ID NO: 161820 - DNA, 411 bp, Arabidopsis thaliana columbia
gggcggaccacacccgtccggaacactttcaatttttgaagttgaaaaactattatgtgttacaaacaatggtaatgtctggaggttgggggcaaccccgaaggctgcaagcccctggcttagtccggcaaatgcaaaatttatcgatccccttcctattttaaacaacaactttggcaatcaattgattaattcgaaggtaaaccgtttgttggagaaaaaaatccttcgaacttttaaaaagccacttgactttttaaaggacttgcctccttttccaaagttcgatttaaaaaactgccctgtttttggcaaaaagtttaaccgtgttaaagctggaaagcctcctgtgcggatagatttcaaatcccgttccaaacttgaaaagccacctgccaataaaaggaatga

SEQ ID NO: 161821 - DNA, 408 bp, Arabidopsis thaliana columbia
cggggcggaccaaggcgtccgtaataaaaggttggggaaaccatatggccttcttattatttcagttaaggctaattccaggagggaggaattttaaagagttttgagtaaccaaatggagtttaattccaaggatcctaatgcaaccgggatgggcagaataaagggggaaaggggtcaggttcgaaaggggatgatggaaaatttggttaaagtttgggttagaggggagcgttgggggttgttagttgttaaaaccgaaattttgcagggcaccacttttcgtttaaaaaagcaggctcgtcgttccagaaccatattgtgggggggaaatgtcaagctaccaatggctctgatcctgtgcctagcttgggtggggaacatcgcgatggcctttgtttgccatgg

SEQ ID NO: 161822 - DNA, 445 bp, Arabidopsis thaliana columbia
gggcggaccaacgcgtccgtttttttttttaagggagatctgcacttatttaaaattacaaccaactgggttcctaatggttttggttcgggggtaaatctaaattttaaaattaattttaaccctcctaaaatttttttacatttacttcttccgaccatccaaaaacttccgccgttccggttaatgggcaataataaccggaccaacaaacggaatcggtaaagctttcgcctttaagttagcccaaaagggtttaaacctaatactcgtggttggaaacccaaccaggctaaaagatgtttttgattccatcagatctaagtttagtcaaactcaaatcttgaccgtggggatggatttttttggagatattgatgaaggtgtgaaacggtttaagggggagtttgaaggattagatgttgggattttgattaataatgct

SEQ ID NO: 161823 - DNA, 307 bp, Arabidopsis thaliana columbia
ttttaccaggcaaagtccatgagggggaataggcgaaatctcggattggggacctcctcctggcctctgggggtggcagaagaacccacggccatcaaccatcgtcgaaaggagaggcctaaaggcgtaaatggtcttgccaagaccataatccgcaaccgtcggggccaacctgctgaggttaactggattggaggcaaagtcagttcttggaaaaatgaaaatggaaaggagttccttgttataagtagcaaggctttattccaccctccaacaccaattcggggaggaattccagaattgtttc

SEQ ID NO: 161824 - DNA, 283 bp, Arabidopsis thaliana columbia
cggggcggaccacacccgtccggacttttttttggagggaatggattttaacattaccataactcggcctaggttcgaggggctaaacagggatttgttaaggaggggtttggacccagggaaaaagtgtttgagggatcctaaaatggccaagaccagggttaatgaggtggtcctggtggggggctttccaaggattccaaaagggcacaagttttggcaggactttttaattggaaaagagctctgtaaaagcataaacccggccgaggtttttgttaac

SEQ ID NO: 161825 - DNA, 433 bp, Arabidopsis thaliana columbia
tgggcggaccacacccgtccgattggattccatattggtaccaattaaggttttttttatggggttggaagaaatatgggaagggggatgggggaaccatatttgggaccttggggataccccgaccgccaccccaggtggttggccacgcccaaaggtccttaatccggcacctttccgggggcagggccaggagacgggcaggctttcacgccttaccccccgtaaatttggaggggggggcttttttggggaccaataagagctccatggtggtgggggatcagggttcaaggttaaccgggtttcctgggaaccaaacggccaccattggaccacaggcggcccctttcaatttaccgatgggaaccgcttttaggggcgttcattcatacggccgggtattgattggggggtttaccaatgcaaattt

SEQ ID NO: 161826 - DNA, 425 bp, Arabidopsis thaliana columbia
gggcggacaacccgtccgattggtcttacttgggggaggggatccccattacctttaaataaacagcctgggatatccaacctacgggctttaaaatggtttcaactttaatgggaacctaaacatcaatccaagagatgttcaggcaagggagtgagcagttaacagttttgttcagggggagggtttttttgctttgttccacaggtgagggaatggccgagatggagttaacagaaccagagggcaccatgaccgatcttgtgtaagagtcccagcattaccaaaatgcaccggttgttgaaaaaggtgactccaaggttgaggaagaaggtgaatcccaccaggaagaagagtcctgggggaaatttattattaaaaaccgttggaaaaaataaattaagtcgttggctactttttttttt

SEQ ID NO: 161827 - DNA, 402 bp, Arabidopsis thaliana columbia
tggaaaaccggggccgacccacccgtccgaaaccacctcctttttgggaccttttttgttattttccagcggcggcaaaaccaacactgtgaaatgcaccaactgcggacccgcgatggtttttgactcgggttttaggtggatcacatggccggagggaggccaggcttaaaccttgggggttggttgaagatgggaaaggaggaatgggttttgtcagaagcaaattaaattcgaggttaaatgattatgtaggaccttccatgttggctttttttctttaacatgttttttgattggaaggattggtgtgtaggcatttggggttttttatttggggcactttttcaaaaaatatttaatatttatttattattaattggggcggccgttttagaggtt

SEQ ID NO: 161828 - DNA, 346 bp, Arabidopsis thaliana columbia
aatcttttaagagggaggagttaactcgccacgtggttggaccgggggccaaaagggactcgggggggcaaactttttaataattaaggccaaccgaagaatttatttggggggcaggaatccggtccacgtagaacccggggaaattttacagattttaactccaggcgggggcggattcggttccaccatataaccaattaatctcctcctaataggtcttttttggaacttaattactccttcattaaacggttaatccaaataagtggttaatgggcctggtggtggttccggggccttttagccggattttctttggaggttgggccattttcagggaaat

SEQ ID NO: 161829 - DNA, 339 bp, Arabidopsis thaliana columbia
gggcggaccaacgcgtccgaaagggctgaaagatggaccggggttccttttcaaatattggggggaaccggcttcgtgggcggagcggtcgttttttttttccgcaaaccccccgaaaggggtttccccgccggaaaacacatggtccccgataggccgttttcggtaaacaccaggctgttgtgggccaccgggactgcgtttccagagcctggcttaaatcggatggctgatcccgccggaaggattgaagcatgggcttggttgaggggcggattagggttcttggttggtctcggtcggctcgctgttttgaacgacaaagcttttaaggttcca

SEQ ID NO: 161830 - DNA, 235 bp, Arabidopsis thaliana columbia
accaacgcgtccgtttttcgatttcgaattttcacatctttcgtttttaagtattttcgcccaaattcaataaggccatgggagccgttattgaattccgcttaaaattttgcttttccggctccatttccggtaaaatcaagttctgtgggcggccatcggatggcttcccctggattaagtccctgcttaagattgggctcctttcctcctttttaatctataagggcaatta

SEQ ID NO: 161831 - DNA, 355 bp, Arabidopsis thaliana columbia
  unsure (1)..(355): unsure at all n locations
gccggacccacccttccnaggaagggcaaaccaaaaaccgtttaaaatttatacaatccttccttccaaacggagggggttcccttccggggttcccataaaggttaaccctaaagggatcgaagtcaaaggacctcccggaaagcttgttcgcaatttaaagcttttaaacctcgatttccagctgttcaaggatccaaaaactggaaagaaaaaccttaaaatcgattcgtggtttggaccacccaaaaccagcccctccattagaaccgttcttagcaccgccgtaacctggacctccggggttcccagaggtttcctgtccaagatgaggttggtgacccccaattttcca

SEQ ID NO: 161832 - DNA, 301 bp, Arabidopsis thaliana columbia
ggggcggaccaagccgtccggaggaggagaaccaccaggaggttttaatgtcttcttctaggctctcctccgcggtggggggtccatccccggttaaggcaaccatgttccttcaattaaccggttggaagtaatccgttgaattcccggcaacccgcaggaccaacagggccataatttccattgtaggcaacgggggaggagtaagctgcatgaaggggtggccaccaattgaaaagaaaaagtttgggactttatttaacctccttgaccttagggacttctaattgcttaaggaagt

SEQ ID NO: 161833 - DNA, 434 bp, Arabidopsis thaliana columbia
ccggggcggaccaagccttccaatcagaaaccaggtggaacctttaataccttttttgagggaaggaaatggcaccggggggagggtccttttcggaggttccgtggaaaggatcggcggaaaaccactccaagagctggaagagcgagacccatgttttcgttgccgccattggccaccacatccaaattgtcttttttaacaaaggcaaacatgactttaacggttttttaaggagttgggactccccatatgatggaaggaaggagtttttcaaggggaagggggggttagttgttgggattaaacctttgccaaaaagaggactggttgttcacttgatggaccatttaaaagaattggatttcatttacgaattatttcccaaatctgaggttggttgcttttgcaaaataacttttatttgggagaag

SEQ ID NO: 161834 - DNA, 320 bp, Arabidopsis thaliana columbia
ggattaatagcttgggaggaggaggccttttcatttgttttggaggagagttattccggcggctccgtgttcttttttgccctttttgagggttcctccaacattgcccttgccgcttttacgggttttattttgggattttatggccccaaggccaattgctttgtcgacgactccgccgttttttaagttttggggtcagaggaccaaaggggtttagtaaacgtgtgccagccagggaccacctggttagcagccggttcctgtttgtactcaggctcggcaattttggtttttactttaggcaagggcgttttttc

SEQ ID NO: 161835 - DNA, 391 bp, Arabidopsis thaliana columbia
  unsure (1)..(391): unsure at all n locations
ccggaatnccggggccgaccacacccgtccgttcggagaaccgttggtttcacagaaggcaggttttttgacccgttgggactagcgtttgacccggggaaaaaggttaactttaagttagttgaaatcaaacatgctcgttaagccatggtgggattttggggtttggcggttaaggcggttgcaaccggtaagggaccgttaaacaactgggcgattaaccttagggcccaacttaaaaccaccataatggatccctttttttcctcctgatgggggggcttttagcttttactggggtaatgtaaggatgggggggctttaagcttttactggggtaatgtaaggatgtaacgccgtatttttaaagaaaatttggcacctttgtgtt

SEQ ID NO: 161836 - DNA, 314 bp, Arabidopsis thaliana columbia
ggaaaacgggacggaccaaggcgtccggttatgataatggaaaataaagtacctggatattcaacaacggtaaaataatgtggtggatgtgtaacttgaaataaaggaagttccaggtaacccgattaactggaatccgatggatcctgagttaatgggtgtggaagtaagaaagagagttgaaaaaggagagcaggttcttgttattgcaattaaaataaaaatggttgactttccttggggggcaaaaaaagataaagtttgtggaacaatgtatttctaaaaggttttgcaggaagttttaaaagcttttt

SEQ ID NO: 161837 - DNA, 408 bp, Arabidopsis thaliana columbia
gaatcccggggccgacccacccttccaaaaccaaaagaaagtttttgaaaataaaaattgaccactaccaggatccaaaaaagggtaaaggatgtttaaatccaatcgaccaataattgttttttcccccgatggtaactttttccaagtaaagtttcccttaaaacccgtccaaaggggtaacgccgccgccgaattccgcggaacaaatactgccgtcttccccgtcaaaaaaaaatcaacccttaacttccaggattccaaatcagcagggaaaatagtgggccttgttaataacattgatttgccctgtgctgaactgaaagcaaatgctctttttttgttaaacaaggcaaggttagagggtcaaagccccaggtttacgttggaggacccagttcctgttga

SEQ ID NO: 161838 - DNA, 332 bp, Arabidopsis thaliana columbia
  unsure (1)..(332): unsure at all n locations
ccgaaannccggggcggacccacgcgtccgcccacgcgtccgaaaaaccaaaactggtttcttgatattaaaatcaaaggcttttttatcaggcttagggaaaggtcacatttttgggaggaaccatgggttcgtcccaggcaacccgttgggaaatccaccgggggtaaggttcccaggaggcagttggccaccaaggcgggggggaattcagccccacccaccgggggggtcaggaggcctaaccgttcccgtccaggacccgtggttcttggggggattctgaggtcccagaagagtcctgaatggtggatccgaaggcttcctttcca

SEQ ID NO: 161839 - DNA, 276 bp, Arabidopsis thaliana columbia
gggggttaccaaatttttttcaaagtatcaccacacggccaacttcaagaccagtgttttttttaactgttgctaaggaccaaccaatttttaaaattaatgttttccagggtaaaaggaagttttttaggaataccaagttttttgtaacctcccgtttaaatggattcccccctcccccacgtggagttcaccaaactaaatctaaatttgcaattattcccaatgaaatcttattttcaagtgctgttgccaaggccccaggaaaaaaccaag

SEQ ID NO: 161840 - DNA, 426 bp, Arabidopsis thaliana columbia
cggggccgaccacacccgtccgtttttttttttttaatttccgcttttcccgttgggtttccgccttggtttttcctggcatgtcccgaggaattccttaacattctttccttttccttttttaaattcctaaccacctaaaatttttaataaccaaatccacttttgcttggtggggagaatctgttaaagaattttggtggtggtggggtccagattgggaaaatttcctttttttcaggttttttttgaataattaatgggggggattttcggatcgggaagggctgcaagaggtggttttaacggcggggttgagataattttttgtcttttcctggggggggggccggggttccggcctcggcggtttttaaacccctacctttccaaatcttgggaaattagaaaaaaaaaggttggatt

SEQ ID NO: 161841 - DNA, 363 bp, Arabidopsis thaliana columbia
  unsure (1)..(363): unsure at all n locations
cccgaaatnccggggcggaccacacccgtccggaccaagggcttccttaatgctctcttccgttacaatggtggcctttccggttaaggccggtatgggggttcttttaaacggacttaagtcctccgttgccttcccagccacccgcagggttaccaccgccattacttccataacaggcaacgggggaggagttaactgcatccaggggtggcctccgatgggaaagaaaaagtttgggacttttttttaccttcctgaccttaccgattccgaatgggttaaggaggtggactaccttatccgaaccagggggattccttgggttgaattcaagttggagcccggatttgggtaccgggg

SEQ ID NO: 161842 - DNA, 397 bp, Arabidopsis thaliana columbia
cggggcggaccaaggcgtccgacctgttgaagtttttaatcaggtagtggtgttaaatgttaaagttgccaaccaaggtgggaccaaggtccacaccaatgggtttaatgcggaaaaaaatttccttaaatttgaggcaggggcaatgcgtgactgtgaccttttttttgttcgccatgggattgtagggaacccagggcctgtaaccgggccgggccaattaacgggatccaaacttgttccgggttaaaatggttggccattagttcgacccggggcgaagtttttaagaagggcccttttcttgaaccataatttttgggttacccgttccgccccaaacgagaagtttcctgggggagaattcccaaaccaaaaccaacggcctggggaaggt

SEQ ID NO: 161843 - DNA, 406 bp, Arabidopsis thaliana columbia
ccccatcgcagatgggtgtcattcttcgtgactctcacggaattccacaggtgaaaagtgttactggaagcaagattctcagaattttgaaagctcatggtcttgcacctgagatccctgaggatctgtatcacttgatcaagaaagctgttgctatccgcaagcattttgagaggaacaggaaagataaggattccaaattcaggctgattcttgtagagagcagaatccatcgtcttgctcgttactacaagaagaccaagaagctcccacccgtctggaagtacgagtctacaactgcaagcactcttgtggcttgagaagaatagagttgatcatgtccttcaagaaggaccatttcattgtctgcattgcaactcaaagctcttcttcttttgaacctatg

SEQ ID NO: 161844 - DNA, 214 bp, Arabidopsis thaliana columbia
cgggccgaccacgcttcctacactccaactctacacacccttttttgtattttgggaagcccaccttcccacggttccgggctttaatacccgggcactcgtgctaacccaacaccattacacccttcttttgttgtttattacttattctttccaccaaaaattcctgttttttttactttaccttcacccattgtttattcattcacaccta

SEQ ID NO: 161845 - DNA, 450 bp, Arabidopsis thaliana columbia
caacaaccaaacactcatttctccacatcttgagagaaaaaaacagagcaggtttattagagatctcatggcgatggcggtctccggagctgtcctcagtgggcttggttcttcgttcctcaccggaggcaagagaggtgccaccgcattggcaagcggcgtaggcactggagctcaaagagttggcaggaaaactcttattgtcgctgctgcggctgctcagcctaagaaatcttggatccctgccgttaaaggtggtggcaacttccttgaccctgaatggctcgatggctcgctaccaggagatttcgggttcgacccattgggtttggggaaagacccggcttttctgaaatggtacagagaggctgagctgatccatggccgatgggcgatggcagcggttcttgggatcttcgtcggccaggcctggagcggtgtggcatggtt

SEQ ID NO: 161846 - DNA, 385 bp, Arabidopsis thaliana columbia
agaacaatggcttcctctatgctctcttccgctactatggttgcctctccggctcaggccagtatggtcgctcctttcaacggacttaagtcctccgttgccttcccagccacccgcaaggctaacaacgacattacttccataacaagcaacggcggaagagttaactgcatgcaggtgtggcctccgattggaaagaagaagtttgagactctcttttaccttcctgaccttaccgattccgaattggctaaggaagttgactaccttatccgcaacaggtggattccttgtgttgaattcgagttggagcacggatttgtgtaccgtgagcacggtaactcacccggatactatgatggacggtactggacaatgtggaagc

SEQ ID NO: 161847 - DNA, 283 bp, Arabidopsis thaliana columbia
cgaaactccaacgaattctctggtgattttaccaatggcgatggcaacatcgatgagtttgaatctaattggggcattcaaaggcttgtctctttcttcgacttcgtcttttcttagaggcgatttgagtttttcccccaaaacctctttcacggtgactcttcctctggaaaatcttcaagctccgattccgttgacaattgaatcggcccataagaaaggagctggtagcaccaagaacggtcgtgattctcctgggcaacgactcggcgtcaagatctac

SEQ ID NO: 161848 - DNA, 457 bp, Arabidopsis thaliana columbia
aaacaaaaatggttttgcaaaagcttcctctcattgggctgcttttgctcctgaccatcgtcgcctctccagcaaatgcagatggacctgtttgcccgccgtcgaacaaactaagccgggcaagtttccctgaaggttttttatttggcacggttactgcggcataccaggtcgaaggtgcgattaatgaaacttgtcgtggaccagccttatgggacatctactgtagaagatatccagagaggtgcaataacgataacggcgatgtggccgttgatttcttccatcgttataaggaagatatccaactaatgaagaatctaaacacagacgcctttagaatgtctatcgcatggccaagaatatttcctcatgggagaaaggagaaaggagtgagtcaagctggtgtgcaattttaccacgacctcatcgacgagctcataaaaaatggtataac

SEQ ID NO: 161849 - DNA, 507 bp, Arabidopsis thaliana columbia
  unsure (1)..(507): unsure at all n locations
cggtggggacttgaagagttagcggcgttcnttactatccatacgcttgtcgttatctctcgaggagatgtctgctcttctcttcctacatcatcttggtgtctatctgtgactcgagaaaattctaccagaccagcgcttccggggagacggttggttgtaatatctccgtaagaacccgacaccacatatgtggcttgtctgtaggagatcagagtccgagtcaccgggacgcttgtattctttcttcacgaacacagttcaagttattcgtatggatcaacaaggtgtgtgcactattttacatcttgcccattgtgctcagcggtgctgtggattgcttcgcaactacaagaggtctgcaaaacaagatagaacttgtaccgatcgatcttaaaaacaggcctgcttggtataaggagaaagtttactcggctaacaaggtgcctgcattagagcacaataaccgagtattgggagagagcctggatctgattaagtacattg

SEQ ID NO: 161850 - DNA, 457 bp, Arabidopsis thaliana columbia
cagtccactcaatcactgctactcagaagactgttgatgggccttcaatgaaggactggagaggtggaagagctgcttcattcaacattattcccagcagcactggagctgccaaggctgtcggaaaggtgcttccagctcttaacggaaagttgactggaatgtctttccgtgtcccaaccgttgatgtctcagttgttgaccttactgtcagactcgagaaagctgctacctacgatgaaatcaaaaaggctatcaaggaggaatccgaaggcaaactcaagggaatccttggatacaccgaggatgatgttgtctcaactgacttcgttggcgacaacaggtcgagcatttttgacgccaaggctggaattgcattgagcgacaagtttgtgaaattggtgtcatggtacgacaacgaatggggttacagttcccgtgtggtcgacttgatcgt

SEQ ID NO: 161851 - DNA, 311 bp, Arabidopsis thaliana columbia
caaactcaacgaataacgtgttaatttgtccaacgcttttgaacccaaatggccgcctgaacataatgggggcattcaagggcttgcgtcttttttccccttcatcttttcttagaggcgattggagtttttcccccaaaacctctttcacggtgactcttcctctggaaaaaataaaagctccgattcccctatcaatcgaatctgcccatataaaaggagctggtcccaccaataacggtcgtgattttcctgttcaccgactgtgcctcaagatctacggttaccacaccgctaaacctggagctatc

SEQ ID NO: 161852 - DNA, 447 bp, Arabidopsis thaliana columbia
acaacaacaaatcttaaacgttttactttgtgctgcactactcaacctcaatggccgcctcaacaatggctctctcctcccctgccttcgccggtaaggccgtcaagctttcccccgcggcatctgaagtccttggaagcggccgtgtgacaatgaggaagactgttgccaagccaaagggcccatcaggcagcccatggtacggatctgaccgtgtcaagtacttgggtccattctctggcgaatcaccgagctaccttaccggagagttccccggagactacggatgggacaccgccggactttcagctgaccccgagacattcgcaaggaaccgtgaactagaagttatccacagcaggtgggccatgctcggagccctaggctgcgtcttccctgagcttttggctaaaacggagtcaagttcggagaggcggtttgttcaag

SEQ ID NO: 161853 - DNA, 453 bp, Arabidopsis thaliana columbia
atcgcaatgggtgcgtacaaatacgtgtcggacctatggaggaagaagcagtcggatgtgatgaggtttcttcagagggttaggtgttgggagtatcgccagcagccttccattgttcgtcttgttcgtcccactcgtcccgacaaggctcgtcgtctcggctacaaggccaagcaggggtttgttgtctaccgggttcgagtcagacgtggtggacgcaagaagccagtgcctaagggtatcgtgtacggtaaacccaccaaccagggagtgacccagctcaaattccagcgtagtaagaaatcttgtgcttgggaacgtgctggtcgcaaactgggaggccttagggttgttaactcctactggctcaatgaggactctacctacaagtactacgagattatccttgtagaccctgcacacaatgccgtccgaaatgatccaaggatcaac

SEQ ID NO: 161854 - DNA, 405 bp, Arabidopsis thaliana columbia
aagttagtcaccaaaaaaaaaaaaaaaccacaaaaggtttcaatggccgcctccacaatggctctttcctcccctgccttcgccggaaaggctgtgaacctttcccccgcggcatctgaagtcctcggaagcggccgtgtgacaatgaggaagactgttgccaagccaaagggtccatcaggcagcccatggtacggatccgaccgagtcaagtacttgggtccattctctggcgagtcaccgagctaccttaccggagagttccccggagactacggatgggacaccgctggactttcagctgatcccgagacattcgcaaggaaccgggagctagaagttatccacagcaggtgggctatgcttgggagccctaggcctgcgtcttccctgagcttttggcta

SEQ ID NO: 161855 - DNA, 455 bp, Arabidopsis thaliana columbia
cggacgcgtgggtgaacaatcaaagtatccagaatctcgtggtgatttcaccattttgcttagtcacatcgttttgggttgcaaattcgtttgcagtgctgttaataaggctggtttggctaagttaattggacttgcaggggaaacaaacattcagggtgaagagcaaaagaaacttgatgtgctctctaatgatgtctttgtcaacgctttggttagcagtggtagaacttctgttcttgtctcggaggaagatgaggaagctacgtttgtggagccatccaagcgtggaaagtactgtgttgtttttgatccgcttgatggatcttcaaacattgactgtggtgtttccattggcacaatttttggaatttacacgttggaccacactgatgagccaaccactgcagatgttctgaaacctgggaatgaaatggtggctgcaggttattgtt

SEQ ID NO: 161856 - DNA, 453 bp, Arabidopsis thaliana columbia
caaaactctgaatttcgatttcaatggagtcacgcgtgctgttacgcgccaccgcgaatgtcgttggaattccgaaattgagacgaccaatcggagcgatccaccgtcaattcagcactgcatcgtcttcctcgttctcggttaaaccaatcggaggaatcggagagggagcgaatctgatctccggtcgtcagcttcgtccaattcttcttctcgattcgtcggcgatcaacggaggagagaaaagagaaattctcaaaccggttaaagccgccgctgctgaaggtggagataccgctggggatgctaaagttggattcctcgccaagtatccatggctagtcactggattcttcttcttcatgtggtacttcttgaatgtgattttcaacatccttaacaggaagatctataattacttcccttatccctattttgtatcggtgatacact

SEQ ID NO: 161857 - DNA, 458 bp, Arabidopsis thaliana columbia
acaaaccaccccaaaaggttaagaaggtggctttagtttcatcagctcccgaccccatccgttgtttcaccggcctaaagctggccgccagttcaaaacctaaaacattatccaccatcagtagatccacttccgccaccagggcgccacctaagctggctttgaaggcctctttgaaggatttcggtgtcatcgcagtggcaacagcagcttctatcgttttagctggaaatgcgatggccatggaggttcttttaggatccgacgacggttcccttgctttcgtaccatctgaattcacgggggctaaaggagagaagatcgtgttcaagaacaacgcagggttcccacataacgtggtgtacgacgaagacaagatccctagtggtgtggacgcaagcaagatctctatggatgagacagcgcttctaaatggtgcaggggagacttacgaggtt

SEQ ID NO: 161858 - DNA, 367 bp, Arabidopsis thaliana columbia
gacaaacaaagagggagggaaaaccagacacacactcttctctgttttttttggctccacaaacttaaaatcaaagcctcctttttctctacaacatctttgtttgatcttcaaagaagatttaagcttgacgttacaaagcttctctccttcagatcctactgtttaaaggtaatctttttccctccaacgccaagggattcccttagtactcacaaggctaaaccaagaaagatgaaggttgttgcgaagaagtctcgggctcaagtacttttagatttgttttaccgggtgatcgagataactctagttataattactctagccaagctctgttaccaactagtcatcacggtggagagctctg

SEQ ID NO: 161859 - DNA, 362 bp, Arabidopsis thaliana columbia
cgatttcgaacccctaatcttgagatggcatcggagaagaagctctcgaaccctatgagggatattaaggtccagaagctggttcttaacatctctgttggtgagagtggggatcgtctaactcgtgcctccaaggtgtgggaacagctcaggggtcaaactcctgtcttttctaaggcgaggtacactgtgaggtctttcggtatcaggcgtaatgaaaagattgcgtgctatgtcaccgtgagaggtgagaaggcaatgcatcttcttgagagtggcttgaaagtgaaggaatacgagctgttgaggaggaacttcagtgacactggctgctttggattcggtatccaggagcacattga

SEQ ID NO: 161860 - DNA, 418 bp, Arabidopsis thaliana columbia
cttgacccacaccgaaggaaaaggagaggaggagggactttttttcttgggcattcccaagttttcttttttcttcctcttaacactttttttgtgggtatttccctaaaaagaaaactttatttttgttcttagtaaatctgcttttaaattttataaaaatgggaaactgtttgatgggaggaaacaccgttgagaaaatggttaaagaagaagaagtattgaagaaagaatccaagagaaaagatcgtaaagtaaagatagttttgagaagagatgagttagagaaactcattctttttcagctaaatgccaatggtaacgtcgacggcaagggagaaacaactttggcttcttttggtgactttctaagggagttagaggcggagagatctgcgggagaagcggctgcaaaggc

SEQ ID NO: 161861 - DNA, 393 bp, Arabidopsis thaliana columbia
aaaccatcagatcttaagaggaagaacctaaagctcactacgatatttttcgagaatatgacgactttttctgttccgattgataacggagattctatgaagatcgcagaagaagaatcacaaagaacactgtccccatatgttactggaacttcaattgttgcaatcaagtacaaagatggggttttgatggcttctgatatgggaggttcatatggatcaaccttaagatacaagaacatcgagagagtgaaggctattggtaagcattctcttcttggtgccagcggagaaatcagcgactttcaggagattctccgttatcttgatgagctcaccctgaatgataacatgtgggatgatggtaactctttgggaccaaaagagattcac

SEQ ID NO: 161862 - DNA, 446 bp, Arabidopsis thaliana columbia
caataactggaatcttttcattcatcttcagatttgcttaaaaaagaaatcaaattttcagacaaatagagaattataaatggctctggtgagaagtctactgggtgcaaaaaagattctaagccgttccaccgcagcagtctcggcggcaccaaaagggtttcttgcagtgtacgtaggagagagccagaagaaaagatacttagtgccactctcatacttgaaccaaccttcttttcaagctctgctcagtaaatctgaagatgagtttgggtttgatcatccgatggggggcttaacgataccttgtcatgaagatacgttcatcaatgtgacttctcggctccaatgatcatgatccaacattttgtttttccgagttagatatagacttaattcattgtaaatagcttttttctctttcttcttgaaagagtacttgttct

SEQ ID NO: 161863 - DNA, 459 bp, Arabidopsis thaliana columbia
gctagctagagagtaaaaagaacaaagatgtcgaaggaagtgagcgaagaaggcaaaacccaccatggaaaagactacgtggatcctccaccagctccttttttcgacatgggtgagctcaaatcctggtctttctacagagctctcatcgctgagttcatcgctacactcctcttcctctacgtcaccgtcgctactgtcatcggccacaagaagcaaaccggtccttgtgacggcgttggtttacttggtatcgcttgggctttcggtggtatgatcttcgtcctcgtctactgcaccgccggtatctctggtggtcacattaacccagctgtgactttcggtctgttcttggcccgtaaggtctctttggtgcgagctcttggttacatgatagctcagtgtcttggagccatttgtggtgtgggtttcgtgaaagctttcatgaaaactccttac

SEQ ID NO: 161864 - DNA, 447 bp, Arabidopsis thaliana columbia
tggaaaacgagttctccaaacttgctcaatcagatatgcgatggaccgttcaccctcaggaggaaaagttaaaggaaatggcaaagagagaaggcctatggaacttatttgttcctgtagatagtgctgctagagctagaagagaactggcggctaccgagaataaacataacctctcgggcaagtcttttgatcaattgtttggtgagggcctcacgaacctggagtatggttacctttgtgagatcatgggtcgttctgtttgggctccacaggtgtttaactgtggtgcaccagatactggaaacatggaggtgatactgcggtatggtaacaaaagaacaaatttctgaatggcttattccgttgctcgagggaagaattcgttctggatttgctatgactgagccacaagttgcatcgtctgatgcaaccaatattgaatgc

SEQ ID NO: 161865 - DNA, 417 bp, Arabidopsis thaliana columbia
aaacgagcaaaagatgaagagaaacaccaggaggtagtattggcttcctctatgctctcctccgccgctgtggttacatccccggctcaggccaccatggtcgctccattcaccggcttgaagtcatccgctgcattcccggtcacccgcaagaccaacaaggacatcacttccatcgcaagcaacgggggaagagttagctgcatgaaggtgtggccaccaattggaaagaagaagtttgggactctatcttacctccctgaccttagtgacgtcgaattggctaaggaagttgactacctttttcgcaacaggtggattccttgtgttgaattcgagttaaagcacggatttgtgtaccgtgagcacggaaacactcccggttctaccatggacggttctggacaatgtggaagc

SEQ ID NO: 161866 - DNA, 355 bp, Arabidopsis thaliana columbia
aaagaaacgtattgcaagaaacagcggagtttgtatccttaatgtgcgagatatctaatggcggaaaaggaagatagtgtgaagcttctagggatttgggcaaccccttttagtcgtcgagtcgagatggctctcaaactcaaaggcgtgccttacaaatacttgaaagaagatttgcccaacaagacccctttgcttttggagctaaacccgcttcacaagaaagttccggtttttgtccacaatgacaaaatattactcgagtcacatttgattctctaatacttcgatcagacgtggattaacagtcctattttttctcaagatctttactagaaggccatggttttatttt

SEQ ID NO: 161867 - DNA, 313 bp, Arabidopsis thaliana columbia
gaaaaagataaagctggatcacttttccatttctcaccgaacggattttccgcgggtttcaagatacttgtggagggcccaatcaaattctcctgaatcctgtggtgattttaccattttgcttcgccacatcctcttgggtaccaaataccttttccgcgctgttaatatggctgagccggctaaactaattttacttccaggggaaacaaacatccatggtgctgagcaaacaaaacttgatttgctctctaatgaggttctttgtaaacattttgtttagcactggtcgaacttctgttctggtgttgca

SEQ ID NO: 161868 - DNA, 450 bp, Arabidopsis thaliana columbia
tttagcttttttgtaccgtacatcttcttcccagaaacatggctgaggcttctgatttgttggaatggcctaagaaggataaccgtcgttttctccatgttgtctaccgcgttggtgatcttgatcgcaccattgagttttacactgaggtctttggtatgaagctgttgaggaaaagagatatccctgaggagaagtattctaatgcttttcttggttttggacctgaaacatctaactttgttgtggagctcacatataactatggtgttagctcatatgatattggaactggctttgggcattttgccatttcaactcaagatgtttccaaactggttgagaacgtccgtgccaagggtggaaatgtgactagggaacctggtccagtcaaaggtggaggcagtgtcattgcgtttgtgaaggaccctgatggctacacttttgagc

SEQ ID NO: 161869 - DNA, 409 bp, Arabidopsis thaliana columbia
ggacactttcgatttctgaagttgagagacgactatggcgacgaacaatggtgatgtcttgatgttggaggcgaccccggaggctgcgaggccctgggctagtgcggcgaatgcagaagttatcgatgcgcttccttatatagacgacgactatggcaatccattgattaagtcggaggtagaccgtttggtggaggaagagatgcgtcggagctctaagaagccagctgactttctaaaggacttgcctcctcttccgaagttcgattttaagaactgccctgttcttggcaaagagtatgagcgtgttagagctgggaagcctcctgtgcggatagatttcgaatcccgatacaaacttgaaatgccacctgccaataagaggaatgatgatgctgcctggaagcag

SEQ ID NO: 161870 - DNA, 390 bp, Arabidopsis thaliana columbia
tcatcagaggtttgtgaaaacatatggccgagctattcattcagctcaagcttattccatgaatgatgaattttcaagagttctgagtcaacagatggagttttattccaatgatcctaatgcagacaggatgagcagaatcaaaggtgaaatgagtcaggttcgaaatgtgatgattgagaatattgataaagttttggatagaggggagcgtttggagttgctagttgataaaaccgaaaatatgcaaggcaacacttttcgtttcagaaagcaagctcgtcgttacagaaccattatgtggtggagaaatgtcaagcttacaattgctctgatacttgtactagctttggttgtgtacatcgcgatggcctttgtttgccatgggcc

SEQ ID NO: 161871 - DNA, 390 bp, Arabidopsis thaliana columbia
agtgggtgtgttctccgtaacaatgccaccagaggttgttgagatcacagggaagttcatgagcaagccagtgagaatcttggtgaagcgtgatgagcttacccttgaaggtatcaagcagttctacgtcaacgttgagaaagaagagtggaagctcgagacactctgtgatctctacgagactcttgccatcactcagagtgtcatcttcgtgaacaccaggcgtaaggttgattggctcacagacaaaatgagaagccgtgaccacacagtttctgcaactaacggagacatggaccagaacaccagggacatcatcatgagagagttcaggtctggttcctcccgtgttctaatcaccactgacctcttagctggtggtattgatgt

SEQ ID NO: 161872 - DNA, 408 bp, Arabidopsis thaliana columbia
gccacatcagctatccaacaatcctccttcgccggccaaacggttctcaagccctccagcgacctcatccaaaaggtgggcgtcttgggcggtggccgtgtgaccatgcgtcgtaccgtcaagtctactccccaaagcatctggtatggaccagaccgtcccaagtacttgggaccattctcggagaacacaccgtcttacttaactggagaataccccggagactacggctgggacaccgttggactctcggctgacccggagacattcgctaagaaccgtgagcttgaagtaatccacagcagatgggctatgttgggtgctctcggatgcacattccctgaaattctctccaagaacggtgttaaattcggagaagccgtgtggttcaaggcaggctctcagatt

SEQ ID NO: 161873 - DNA, 205 bp, Arabidopsis thaliana columbia
attaactaaagagccttttacttgttccactttctaaccaaagtggccgcctggacaatggctctatacctctcgggcttggaccgcaaaggcctataagctatccccggcggccttcgatgtatttggaaccggccgaatcaccatgcgcaaagcctccaagcccaccggtccatccggcagcccatggtacggatccgaccga

SEQ ID NO: 161874 - DNA, 240 bp, Arabidopsis thaliana columbia
ggggccgacccacgcgtccttttgagagcttttgtgccctctattttttttttgagagctactttcccccagtgggtgcgtttaacaatattgtgggttctataaaacaccatttttttacacattgaggctaaaagagagatggctgaagatcaaagttcaagttctgacctgttctttaaacctgaaattttaaacttatatagaggatccaatcaatctattgaatcttttgtagag

SEQ ID NO: 161875 - DNA, 425 bp, Arabidopsis thaliana columbia
gactcttttttggagggtatggatttctacactaccatcactcgtgctaggttcgaggagctcaacatggatttgtttaggaagtgtatggagccagtggagaagtgtttgagggatgctaagatggacaagagcagtgttcatgatgttgttcttgttggtggctctacaaggattcccaaagtgcagcagcttttgcaagacttcttcaatgggaaagagctctgtaaaagcattaacccggacgaggctgttgcttacggagcagctgtgcaagctgcaatcttgagcggtgaagggaatgagaaggtccaggacttgttacttcttgatgtcactcctctgtccttgggtttggaaactgccggtggtgttatgactgttttgattccgaggaacaccacaattccgaccaagaaagagca

SEQ ID NO: 161876 - DNA, 454 bp, Arabidopsis thaliana columbia
atttgattccatatttgtcacaattcaggctatttctaatgggtttgaagaaatatgggaaaggagattggagaaacatatctgggaactttgtgataacgcgaacgccaacacaagtagctagccacgcccaaaagtacttcatccggcaactttccggcggcaaggacaagagacgagcaagcattcacgacataaccaccgtaaatctcgaagaggaggcttctttggagaccaataagagctccattgttgttggagatcagcgttcaaggctaaccgcgtttccttggaaccaaacggacaacaatggaacacaggcagacgctttcaatataacgattggaaacgctattagtggcgttcattcatacggccaggttatgattggagggtataacaatgcagattcttgctatgacgcccaaaacacaatgtttcaactatagctaat

SEQ ID NO: 161877 - DNA, 457 bp, Arabidopsis thaliana columbia
actcgtcctactttgtggagtggatccccaacaacgtgaaatcaacagtctgtgatatcccacctactggtctgaagatggcttccactttcattggaaactcaacatcgatccaagagatgttcaggcgagtgagtgagcagttcacagctatgttcaggaggaaggctttcttgcattggtccacaggtgagggaatggacgagatggagttcacagaagcagagagcaacatgaacgatcttgtgtcagagtaccagcaataccaagatgcaacggctgatgaagaaggtgactacgaggatgaggaagaaggtgaataccaacaggaagaagagtactgagagtaatttagttataaaaaccgcttgaaaaaatcaatttagtcgtttgctactttttttcttaaaaaaaaaaatgagaacctcaactaccagttgcaggtttatttctatgc

SEQ ID NO: 161878 - DNA, 454 bp, Arabidopsis thaliana columbia
ctttcttctctaatggagatctgcacttacttcaaatcacaacccacttggctcctcattctcttcgttctggggtcaatctcaatcttcaaattcatcttcaccctcctcagatctttctacatctacttcctccgaccatccaaaaacctccgccgatacggttcatgggcaatcatcaccggaccaacagacggaatcggtaaagctttcgcctttcagttagcccagaaaggtcttaaccttatactcgttgctcgtaacccagacaagctcaaagatgtctctgattccatcagatctaagtttagtcaaactcagatcttgaccgttgtgatggatttctctggagatattgatgaaggtgtgaaacggattaaggagagtattgaaggattagatgttgggattttgattaataatgctggcatgtcttatccttatgctaagtatt

SEQ ID NO: 161879 - DNA, 443 bp, Arabidopsis thaliana columbia
ataaaataaaagagagagaaggaattttcaataattttcaacaagcaaagttcatgatggggaataagcgaaatctcggatttgtgatcttcttctgggctctggtggttgcagtagtagccacggccatcgagcatcgtcgcaatgagaggactaaaggcgtcaatggtcttgacaagatcatcatccgcgaccgtcgtggccgatctgctgaggtttacttgtatggaggtcaagtcagttcttggaaaaatgagaatggagaggagttacttgttatgagtagcaaggctatattccagcctccaacaccgattcgtggaggaattccagtattgtttccgcaatacagtaacaccggtccacttccctcacatggatttgtaagacagaagttctgggaggttgaaactaaaccacctcctttgccatcactttttact

SEQ ID NO: 161880 - DNA, 409 bp, Arabidopsis thaliana columbia
aagcggccgtgtgacaatgaggattactgtttccaagccaaagggcccatcaggcggcccatggtacggatctgacggggtcaagtacttggatccattctctggcgaatcaccgagctaccttaccggagagttccccggagactacggatgggacaccgccggactttcagctgaccccgagacattcgcaaggaaccgtgaactagaagttatccacagcaggtgggccatgctcggagccctaggctgcgtcttccctgagcttttggctagaaacggagtcaagttcggagaggcggtttggttcaaggccggttcacagatttttaacgatggagggctcgatttcttgggaaaccctagcttggttcacgctcagagcattttggccatttgggccacacaa

SEQ ID NO: 161881 - DNA, 438 bp, Arabidopsis thaliana columbia
  unsure (1)..(438): unsure at all n locations
catcctctcagagagaagagttcactcgccacgtggattgaacggtggccaaaatggactccgtggagcaaactatctcatcactaaagacaaacgaagaatctatcttggaggcaagaatacggtacacgtagaagccggtgaaatcttacagattcttactccaggcggtggcggattcggctccaacatataaacaattcatctcctcctcataagtctcttctcgaacttcattactccttcatttaacgtataatccaaattagtngnttatgtgtcttgttgttgtttcggggtctcttagccggatattctttggaggtttggccattttcagtgaaataaggatcagattcttgattcattagaaacaaggtaataaattgtcttggtgaataagttttagttgttgttgtatgtacttatgtatcacta

SEQ ID NO: 161882 - DNA, 345 bp, Arabidopsis thaliana columbia
ggccgaccacgcgtccggagagagagagactcaatagttcacgcgcgatcattgttctccgccggaaacaacaaaggcggcgacgggaacactcaaatcgttcacggcactcctacaatcattaacggagcaaacaatacttgtctctaatgtaccgttataactttatatcccttaactacagacctttttctaagtaaccgcaaccaaagcccaatccaaattctccaaccgaaaacttcgtggagcctgaatcggtggtgaaccaacgggtggtgcaacttgcagagactttagcccaaggaggaatcgagacgattcttatccagctgttagatggacagt

SEQ ID NO: 161883 - DNA, 449 bp, Arabidopsis thaliana columbia
  unsure (1)..(449): unsure at all n locations
cgcccnaatcccgggcgccacgcgtccgaaaggctggaagatgagcgggttgcgttacgaatcatgggtggaaacggcgtcttgcccgatccgtcggttcttctctccgcaacgcgccggaatgggtctccccgtcggcaaacacatcgtccccgataagccgttatcggtaaacgacgagctgatgtgggacaacgggactgcgtttccagagccttgcatagatcggattgctgataccgtcggaaagtatgaagcattggcatggttgagtggcggattagggttctttgttggtctcggcctgctcgctgttttgaacgacaaagcttctaaggttccatttacaccgagagtgtatccatatgacaacctgagagttgagcttggaggagagccatagagacccatctaagtgatctgctcataaaaacaggaagcgtgttttt

SEQ ID NO: 161884 - DNA, 247 bp, Arabidopsis thaliana columbia
aaaaattatattcaagagaaaatgtgtaaaattgaatttcatctccgatcaggtaaggaaactgttaagctcaacacggggggggccataccacaacaagccagtctatggaaccgaaacagctacaagaccagctaccaactccgagctcatggcatgtgccaaggttgtagctgaagttgttcaagccgcatctcgtaactatatatacaaactttccaaggttaaagtctccggagcctttttt

SEQ ID NO: 161885 - DNA, 414 bp, Arabidopsis thaliana columbia
agggagagcaaaacaaagatcggttaagatgttgacgattctttcttccgaaacgagggacgtccccgacagggtggccatcggggttcacgctaaagtgatcgaagtcgaaggacctcgcgggaagcttgttcgcgatttcaagcatctaaacctcgatttccagctgatcaaggatccagagactggaaagaagaagcttaagatcgattcgtggtttggaacacgcaaaaccagcgcctccatcagaaccgttcttagccacgtcgataacttgatctccggggttaccagaggtttccgttacaagatgaggttcgtgtacccccattttcccatcaacgcctccatcggcggtgacggaaagtttattgagaaccgtaacttccttttctagaagaaagtgaggaaggt

SEQ ID NO: 161886 - DNA, 404 bp, Arabidopsis thaliana columbia
gaagaagagaaacaacaggaagttttaatgtgtttcctctatgctctcctccgccgctgtgggtacatccccgggtggggccacgatggtcgctccattcaccggcttgaagtcatccgttgcattcccggtcacccgcaagaccaacaaggacatcacttccatcgcaagcaacgggggaagagttagctgcatgaaggtgtggccaccaattggaaagaagaagtttgagactctatcttacctccctgaccttagtgacgtcgaattggctaaggaagttgactaccttctccgcaacaaggggattccttgtgttgaattcgagttagagcacggatttgtgtacccgtgagcacggaaacactcccggttactactatggacggtactggacaatgtgg

SEQ ID NO: 161887 - DNA, 359 bp, Arabidopsis thaliana columbia
ctcggagaagcgtttgtatccaggaggcaagttctttgacccgttaggactagcgtctgacccggtgaagaaggctcagcttcagctagctgagatcaaacatgctcgtttagccatggttggattcttgggttttgcggttcaggcggctgcaaccggtaaaggaccgctcaacaactgggcgactcaccttagtgacccacttcacaccaccattatcgataccttctcttcctcctgatgtggtggcttttagcttctactggtgtcatgtaatgatgtggtggcttttagcttctactggtgtcatgtaatgatgtaacgtcgttattttaaagaaaatttggcaccttttgtat

SEQ ID NO: 161888 - DNA, 438 bp, Arabidopsis thaliana columbia
atctttccatctagcagcacataccggagctcaagcttttccgacggtggtaataataacccgtcggactccgtcgtcaccgtcgacgaacgaaaacgtaaaagaatgttatcgaacagagaatctgcacgtaggtcaaggatgcgtaaacagaaacacgttgatgatctaacggctcagatcaatcagctatcaaacgacaaccgtcagatcttgaacagcctcaccgtaacatctcagctttacatgaagatccaagccgagaactctgttctcaccgctcagatggaggagcttagcaccagactccaatctctcaacgagatcgttgatcttgttcaatccaacggtgcaggatttggtgttgaccagatcgacggctgtggttttgatgatcgtacggttgggatcgacggttatacgatgatatgaatatga

SEQ ID NO: 161889 - DNA, 418 bp, Arabidopsis thaliana columbia
ggaatcatagcctcggaggaagaggacgtgtcatttgctgtggaggagagttactccggcggctacgtcttcgtgtttgaccctcttgatggttcctccaacattgacgctgccgtctctactggttctatcttcggtatctatagccccaatgacgaatgcattgtcgacgactccgacgatatctcagttcttgggtcagaagaacaaaggtgtatagtaaacgtgtgccagccagggaacaacttgttagcagccggctactgtatgtactcaagctcggtcatcttcgttcttactctaggcaaaggcgttttctccttcacgctcgatccaatgtacggtgagtttgtcctcacgcaagaaaccattgagatccccaaagccgggagaatctactctttcaacgaagggaatt

SEQ ID NO: 161890 - DNA, 279 bp, Arabidopsis thaliana columbia
ggccggcccacgcgtccggtaattatatccttcaagtaagacgacctttttttttttttggaggaaagtaactccaacggcgacgtctccacttttgaccgggttgaggcaaccctcaacataaactcttccaacaatactggttctatcttcggaatctatagccccaagaaccaatgcattgtccaccactccaactatatctcatctcttgggtcaaaaaaacaaagttgaatagtaaacttgtgccaaccatggaacaccttgttatcatccggt

SEQ ID NO: 161891 - DNA, 390 bp, Arabidopsis thaliana columbia
  unsure (1)..(390): unsure at all n locations
gaaccccgggccgacccacgcttccgancagaaaacaattaaaaactttatatcgtttttagagaaagaaanggcaacatgggaaacgtacattacggaggggccggggaaagaatcctctaaaaaacactacaagagctggaagagcgagaaccatgttttcgctgacgccattggccaccacatccaaaatgtcttttttcacaaaggcaaacatgactctcacgggtctatcaggagttgggactacacatattatgtaaagaaggagatgttcaaagagaaaatagagattgatgatgagaataaaacatttacaaaaagaggactgtatggtcacttgatggaccttctcaaagtatttgatatcatcttactaatttattccca

SEQ ID NO: 161892 - DNA, 424 bp, Arabidopsis thaliana columbia
tcttcttcttcttcatttccgtcttttccgctaggtttccgcctctgttttttcttgcattttccccagaattccttcacattctctccttttcctctttttaattcctcaccacctcaaattcttcataaacaaatccacttctgcatggttgggagaatctgttagagaatttttgttgttgttgggttcagatttggaaaatttcctttttttcgagtttcttctgaattattcatcgtggagattctcggatcgggaagggctgcaagaggtggttttcacggcggggatagattcatcttctgtcttctcctgagggggtagccgaggctccggcctcggcggtttttaaacccctacctttacaaattctgggaaattagaaaaaaaaaggttggatttttcagtttttgctctgttc

SEQ ID NO: 161893 - DNA, 429 bp, Arabidopsis thaliana columbia
gttatgattatgggagatagaggtactggattttctacaactgttagatcattagttgatgtgttacctgagattaatgtaggtgcaggtgacccgtataactcggatccgatagatcctgagtttatgggtgttgaagtaagagagagagttgagaaaggagagcaagttcctgttattgcgactaagattaatatggttgatcttcctttgggtgcaacagaagatagagtttgtggaaccatcgatatcgaaaaggctttgacagaaggtgtaaaagcctttgagcctggtttgttggctaaagctaatagagggattctttatgttgatgaagttaatctcttggatgatcatttggttgatgtctctttggattcaagctgcttttggttggaatacggtttggtagagaagggtttttttttt

SEQ ID NO: 161894 - DNA, 432 bp, Arabidopsis thaliana columbia
aatcgctatagggtctttgccgatactatgtgtgcctctccggctcaggccactggggtggctcctttcaacggacttaggtcctccggtgccttcccagccacccgcaaggttaacaacgacattacttccatcacaagcaacgggggaagagttaactgcatgcaggtgtggcctccgattggaaagaagaagtttgagactctttcttaccttcctgaccttaccgattccgaattggctaaggaagtggactaccttatccgcaacaagtggattccttgtgttgaattcgagttggagcacggatttgtgtaccgtgagcacggtaactcacccggatactatgatggacggtactgcacaatgtggaagcttcccttgttcggttgcaccgactccgctcaagtgttgaaggaagtggaagagggc

SEQ ID NO: 161895 - DNA, 422 bp, Arabidopsis thaliana columbia
cccacgcgtccgagaaaacaaaactcgcttcctgataatcaaatcaaaagcttctctatcaagcttatcgaaaagtcacatcttttggaagaaacaatggctcgtaccaagcaaaccgttaggaaatccaccggaggtaaagctcccaggaagcagcttgccaccaaggcggcgaggaaatcagcaccaaccaccggaggagtcaagaagcctcaccgttaccgtccaggaaccgtcgctcttcgtgagattcgtaagtaccagaagagtactgaattgttgatccgcaagcttcccttccagcgtctcgttcgggaaatagctcaggacttcaagacggatctgaggtttcagagtcacgcggtgttagctcttcaagaggcggctgaggcatacctagttggacttttcgaggatactaa

SEQ ID NO: 161896 - DNA, 256 bp, Arabidopsis thaliana columbia
cacaacaactttaccattaaaacctttaggaaatccacggagtttaaaagtcataacaagtatcttgccaccttccctctaaatggattcccccctgccccccgtggagttacacaaattgacactaactttccaatacacgccaattgaattatatctcgcagtcctgtagacaagctcacttgaaaaacccaagacttccctattactgtctcatgtgcattgtccatggatactttaaaccaaatcttccatt

SEQ ID NO: 161897 - DNA, 447 bp, Arabidopsis thaliana columbia
aaaacgagagagagtttttgaagattaagaatgaacactcacaggatccagaaaagggtaaaagatggcgagatacgatcgagcaatcactgttttttcccccgatggccacctattccatgtagagtatgccctacaagccgcccgaaagggaaactccgccatagaattccgggggacagatactgtcgacctcgccaaataaatgaaatccacccttaagctccaggattccagatcagcaaggaagatagtgagccttgataatcacattgcattggcctgtgctggactgaaagcagatgctcgtgtcttgataaacaaggcgaggatagagtgtcaaagccacaggcttacgttggaggacccagttactgttgagtacattactcggtacatagcagggcttcaacagaagtatactcaaagtggtggtgtgaggccttt

SEQ ID NO: 161898 - DNA, 372 bp, Arabidopsis thaliana columbia
ccccacccgtccgagagagttttgtgacctcaaaaaaataaaaaaggttatagttaatgggattcggcttagagagtatcaaatcaatctccggcggatggggcgcggcggcccgttcctgtgacgcttgtaaatcagttaccgccgccgtgttctgtcgagttgactcagctttcttatgcatagcatgtgacacaagaatccattccttcactcgccacaagcgcgtgtgggtttgtgaagtttgtgaacaagctcccgccgccgtcacttgcaaagccgacgccgccgttctttgcgtcagttgtgatgccgatattcactctgctaatcctctcgctagcccgcacgaacgtgtccccgtcgaaactt

SEQ ID NO: 161899 - DNA, 410 bp, Arabidopsis thaliana columbia
  unsure (1)..(410): unsure at all n locations
cccgtccgacttattcttcttcttctttctctttctaatatctttttgctcttcccaattttctcatcgatcactgaatcttcttcttcttcttcttccttctctcaagaacagattttttttaaacgagcttgatcaataaattctctcaagatctatggcggaagagcatcgatgtcagacaccagaaagcaaccggctctgggttaacaactggggcttcctcggcagctccgccaccatgaatctctgttctaattgttacggcgacctttgtttcaaccaccaccaccaatcctcctccatcaaatccaccgttgaatcttccctctctgtatctcctccgacgncatcatcatcggagatctcttttccgatcatccctcctttccttaaaaagccatcagtca

SEQ ID NO: 161900 - DNA, 454 bp, Arabidopsis thaliana columbia
agaaaacctcacaacaggagtaagaagaatgttgctctcagctatcttgagaaacgaagttggttggttcgatgaggatgaacacaactcaagcctgatcgctgcacgtttagctactgatgcagcagatgttaaatccgttatagccgagagaatctcagtaattctacaaaacatgacttcacttctcacatccttcatagtcgccttcatagtagaatggagagtctcacttctcatcttaggcacattcccacttctagtcctcgctaactttgctcagcaactatctctgaagggttttgctggagacacagttaaggctcatgcaaagacttcaatgattgctggtgaaggagtcagtaacattagaaccgtagcagctttcaatgcacagagcaagattctctctttgttctgtcatgagcttcgggtacctcaaaaaagaagctta

SEQ ID NO: 161901 - DNA, 325 bp, Arabidopsis thaliana columbia
gaccggaacggaatggccggaccgacccgtccgttctttcgtttttaaaaaaaaacctaacaaccttttttctttcttcctcgtgcaacaacaagggagttctggggagttgcggggacaccaaaaaacgctactaaggtgactcctgaagaagacagccttggccacatttttcaggcttaacttgactgcacagtgaaatctggagaatctggggttttgggtgggactggtggtggggctaaacttggtattggaacaattttaaaagaaaaggtccctgaaaataacttggaataggtttttggaaaaaaggttggggttt

SEQ ID NO: 161902 - DNA, 457 bp, Arabidopsis thaliana columbia
  unsure (1)..(457): unsure at all n locations
cgggaattaccggggtggcccacacgcgtccgaacaaattttaaaagagggatttacaggaaacaaattggtgaaaatctgttgtattggagctggatatgtaggaggaccaacaatggcagtgattgcattgaaatgtccagatattgaagtggcagttgttgatatctctgttcctagaatcaacgcttggaacagtgatcagcttccgatttacgagccaggtcttgacgatatcgttaagcaatgcagaggaaagaatcttttcttcagtactgatgtggagaaacatgttagagaagctgatattgcctttgnctctgttaacacaccgactaaaacgactggtcttggagctgggaaagctgctgatctcacttattgggagagtgctgctcgtatgatcgcggatgtatcggtttctgacaagattgttgttgagaaatcgactgttccg

SEQ ID NO: 161903 - DNA, 410 bp, Arabidopsis thaliana columbia
ggaaaaaagacaaatcaaagagagacgtttttttcgcatcaatggcagaagaaaagagcttcaagtatgtgatcgtcggaggtggtgtcgccgccggatacgcggcgagagagttcttcaaccaaggtgtcaagcctggtgaacttgctatcatttccagggaacaagttcctccatatgagcgtcctgcacttagcaagggatatatccacctcgaaaataaagctacacttccgaatttctatgttgctgctggaattgggggagagagacagttccctcaatggtacaaagagaaaggtattgagctattttgggcacagagattgtcaaagcagatcttgctgcgaagacacttgtcagtgggactggacaagtcttcaagtaccaaactttgctagctgcaactg

SEQ ID NO: 161904 - DNA, 168 bp, Arabidopsis thaliana columbia
aaaggtcaaagttccaactttccttgtcccggttactcaaaaggtgtggatggatgtgtatgctctcccggcacctggagcaggtggaaagacatgtgcgcagatctttgaaaaaacttgcttggaacaaacaaccaaccctaactggggggcttgccttgggggccc

SEQ ID NO: 161905 - DNA, 333 bp, Arabidopsis thaliana columbia
aaacccgggccgacccacgcttccgaaaggtcaaagttccaactttccttgttttttttactcaaaaggtgtggatgaatgtggttgctttttttgaacctggggcgggtgaaaaaacatgtgcccaaatctttgaagaagctggctgagacacaccacccagccttagctgaggcgcttgccttggtggcccagcagacacctaccctcgcttgaatgaaccttaattttgtgtgtaaacgacaaatattatcttccccccccctttgggccacaaagaagggcaaatttacttaccgtctccttacactgttgctccctgtactataacac

SEQ ID NO: 161906 - DNA, 449 bp, Arabidopsis thaliana columbia
gcaggattcaggagattaaaaccttaaattaaaacaatacaaactccaaattcaccggaggaaataacttaaaacttgaatctgaaaagatgagctgcaatggttgccgtgttctccggaaaggttgcagcgagaattgtatcctccggccatgtattcaatggattgaaaccgccgatgctcaaggccacgccaccgtcttcgtcgctaaattcttcggccgggctggtctaatgtcctttatctccgctgttccggattctcaacgtcctgctttgtttcagtcgttgctctacgaagcttgtggaagaactgtcaatccagttaacggagcaatcggaatgttatggactggaaactggaatatctgtcaagcggctgttgaaacagtgcttcgcggcggttctttaagaccgatcccggagcttttcattcacggcggcggtttc

SEQ ID NO: 161907 - DNA, 449 bp, Arabidopsis thaliana columbia
ttaacatagccttggcaaaccatacccaaaccatcttcatcatcatctttgggggacagaagaaaagagttgaggaacagagaaaatggcagcacaagcacttgggtcttcttcacttacctcctctgttcagacagctagacagatatttggctcaaaaccagttgcgtctgcctaacagaagaagagttcctttgttgttaaagctgctgcaactccacctgtcaagcaaggagccaacagaccattgtggtttgcttcatcgcagagtctctcttacttggatggcagcttacctggtgactatggattcgaccctcttggtctttcagacccagaaggtactggaggattcattgagccaagatggctagcatacggagagatcatcaacggacggttcgccatgttgggtgcagctggagctattgctcctgagattttaggaa

SEQ ID NO: 161908 - DNA, 107 bp, Arabidopsis thaliana columbia
aaaaaagaacaatggcagagagtgcatctccattgtcgagccagctaaggagcagcttctcctccgcttttttttctaagcgtttggccgacccgaagggcatttcc

SEQ ID NO: 161909 - DNA, 458 bp, Arabidopsis thaliana columbia
gatttaataggcaagaggatccaatatgattttcctggattcttaccaaacaaacgccagcaccgtatggcaggattagctgtgatagagattgctcaaaaagtttccaaagcttggcgcatagagtggaggaattcaaccaaaggcactacaaaaaatggaaagaaaaaccgggggagagagagaaccaacattcttagccagaatagaggtggtgctgggtgtagtagtagcagtttcagtgaaacttcaactggatatgcctcactagaagatagatcatcaggccgctctatcttgtcttggcaagacgtttattcccctgctgtcagatggagacaaatttcagagccttgtgacccagtggtgtgggttaacaaactaagtgaagagtttaattctgggtttggttctcatacaccaatggtactcggtcaagctaaagtagtacgctattt

SEQ ID NO: 161910 - DNA, 344 bp, Arabidopsis thaliana columbia
cacaaaacaaatcccaaagcttcagaggatgtatgaagaagagggggagaaacaatggcgtggacgactttttcaatcgcaacaacaatccgttcctcttctcctttcacttccgcttccactcatcacttcctttccaaacccaccgcaatcgaattcccatttggtctcagctcttcttctagccaccgggcaatcaacctccgtcctatctccgccgtcgaagctccggagaaaatcgagaaaatcggatccgaaatctcctccttaaccctcgaagaagctcgtatcctcgtcgactatctccaagacaaattcggtgtctccccactctccttagcccc

SEQ ID NO: 161911 - DNA, 457 bp, Arabidopsis thaliana columbia
aaatttttcactcagactaagacagagtcagaaacattggcgaaatctccagaaacagagcatccgaacaaagtctttggttggggtgctagagacaaatccggggttctctctccttttcacttctctagaagagacaatggtgaaaatgatgtgacagtgaagatcttgttctgtggagtttgccacactgatttacacaccatcaaaaacgactggggatactcgtattacccagtagttccagggcatgaaatcgttgggatcgctacaaaagttggtaagaacgtgactaaattcaaagaaggagatcgtgtcggagtaggagtgatcagtggctcgtgccaatcttgcgaatcttgtgaccaagatcttgaaaactactgtcctcaaatgtctttcacatacaatgcgattggatccgatggaaccaagaattacggtggctattcggaga

SEQ ID NO: 161912 - DNA, 410 bp, Arabidopsis thaliana columbia
aaaaaccggggcggcccacacgcgtccgcaaacgcttactgtcaataaaaaacaggctttttttttcggttatactccagaagcacgagggggggacacacaacttggacttggggaagttccaacaaacctggtgcgatacaaactgtcaaattttatccactggacatgggttaaactcgttggaccgggaatatttggcccagaggcgttaggcacactgatctgcacaccggcaaaaacaactggggatcttccagtgacccatgagtttcactggagaaacccgttccgatcgttacaaatgtcgacaagatcgtgactaaatccaaagacggtgaccgtttcggagcaccagtgatcagtggctatgtccactcttgtgaatcttgtcaccaggatctttaaaa

SEQ ID NO: 161913 - DNA, 321 bp, Arabidopsis thaliana columbia
aaaacggtcggcccacgcgtccgaagggaaccgtgggctagaagtaatccacagtggttgggctatgctcggagccctaggctgggtcttccctgagcttttggctaggaacggagtcaagttcggagaggcggtttggttcaaggccggttaacagatctttagcgatggaggactcgattacttgggaaaccctagctgggtccacgctcagagcattttggccatttgggccactcaagttatcttgatgggagctgttgaaggctacagagtctcaggaaatgggccgtaggaagaggccgaggacttgtttaaccc

SEQ ID NO: 161914 - DNA, 433 bp, Arabidopsis thaliana columbia
cacgcgtccgtgaaagaagagttgttgaataccttgaaaatgaatcaaagaaaccattgttagaagaaggagcaaatgagagtaaaaagaagaagaagaagaattcattttggaaattcttgggtgatccatatgtcttgggacgagagctctttgtgatagaaaagtttggtctcgttcaatatatgatcctcaaaaccttttgtgccttcttgacatttttgttggagcttcttggtgtctatggtgatggtgaattcaaatggtattacggatatccatacatagtggtggtgctaaacttcagccaaatgtgggctctgttttgcttggttcagttctataatgtcactcatgaacggcttaaagaaataaaaccgttggctaagttcattagctttaaggctatcgtgtttgcgacttggtggcaagg

SEQ ID NO: 161915 - DNA, 382 bp, Arabidopsis thaliana columbia
ggataaggaaggtattcctccgaatcagtttttgcttatcttcgccgaaaagcagtgcggcgatggccgaacgttggcgggttacaatatccagaaggaatccaccctccacttggttctcaggctccggggtggtatgcagattttcgttaaaaccctaacgggaaagacgattactcttgaggtggagagctctgacaccattgacaacgtcaaggccaagatccaagataaggagggtattcctccggaccagcagaggttgatcttcgccggaaagcaacttgaggacggcagaactttggcggattacaacatccagaaggagtttacccttcatttggtcttgcgtctgcgtggaggtatgcaaatctttttaaag

SEQ ID NO: 161916 - DNA, 455 bp, Arabidopsis thaliana columbia
aaaggaacttaaatcaaaatacttaatagcttggcgatacatttatacaaaacttttaccccgagcacacgcaatggagccgtagacagtcaagtgaaatccaatccacgaaataatttgatctgtgggcagcatcattgtggtaaaggtcgtaatgccagaggaataattaccgcaaggcatagagggggaggtcataagcgtttataccgtaaaatagattttcgacgaaatgcaaaagacatatatggtagaatcgtaaccatagaatacgaccctaatcgaaatgcatacattggtctaatacactatggggatggtgagaagagatatattttacatcccagaggggctataattggagataccattgtttttggtacagaagttcctataaaaatgggaaatgccctacctttgaccgatatgcccttaggcacggccatacataatat

SEQ ID NO: 161917 - DNA, 279 bp, Arabidopsis thaliana columbia
aaaaccggggccgccccacgcgtccgaagaaatggcgtttgtggcttcttaaactatgtgtatctcttctccctcttctagggattgtccagcaaagtcttcactttcctctccatctgtttctttccttcgaacccttacttctccttccgcatctgcttttctccgttccggatttgctcgacgctcttccctaagctccacttcttgtcggagcttggctgtcaaagcccaggccgatgatcttccactggttggaaacaaggttcctgatttgga

SEQ ID NO: 161918 - DNA, 432 bp, Arabidopsis thaliana columbia
ttctgttttaaagataatttggttctctcaatttcattcttaaaccctagttcttcgattttttccgatctacgacaatggcggacgctgaaacctttgctttccaagctgagatcaaccagttgctttccctcatcatcaataccttttactctaacaaggagatcttcctccgtgaactcatcagtaactcttctgatgctttggacaagattagattcgagtccttgacggacaagagcaagctcgatggtcagcctgagctcttcattcacatcattcccgacaagactaacaacaccttgaccattattgatagtggtattggcatgaccaaggctgatttggtcaacaaccttggaacaattgcaagatctggaaccaaggaattcatggaagcactggctgctggagctgatgttagcatgattg

SEQ ID NO: 161919 - DNA, 476 bp, Arabidopsis thaliana columbia
cgggcccgccccacgcgcccgcccgttgggtccgacaccaaaaaacatgattttatggtctcccaggggggaagtgtcattatttaacctttgggacaagttctcgccggaccaaactttgaatcagagggtctcgtcacagctgatattgatcttggggatatagcaagagccaagttatacttcgattcggttggacattactcgagaccagatgttttacactggaccgtaaatgagcacccgaggaaatcggttacattcgtgacgaaggtggagaaagctgaggatgactcaaacaaatagtaagagacttgaagttcgtatctgctggagttatgtcaatcgtatggagtcaagtccaaaatgttctgttgcgttttcattttatgtccaagtttatttatctttctcttcaatgggaagatctatggagtcaagtaataatggtaagacttatgttgttgaataaaacg

SEQ ID NO: 161920 - DNA, 440 bp, Arabidopsis thaliana columbia
aaaccatcagatcttaagaagaagaacttttttctcactacgatatttttcgagaataggacgactttttctgttccgatggataacggagattctatgaagatcgcagaagaagaatcacaaagaacactgtacccatatgttactggaacttcaatggttgcaatcaagtacaaagatggggttttgatggcttctgatatgggaggttcatatggatcaaccttaagatacaagaacatcgagagagtgaaggctattggtaagcattctcttcttggtgccagcggagaaatcagcgactttcaggagattctccgttatcttgatgagctcaccctgaatgataacatgtgggatgatggtaactctttgggaccaaaagagattcacaactatctgacccgtgtgatgtacaaccgtcgcaacaagtttaaccc

SEQ ID NO: 161921 - DNA, 318 bp, Arabidopsis thaliana columbia
aagaagaagtaatggcttcctctatgcttctttttgccgctggggttacctccccggctgaggccaccatggtcgttccattcactggtttgaagtcatccgcttctttcccggtcacccgcaaggccaacaacgacattacttccatcacaagcaatgggggaagagttagctgcatgaaggtgtggccaccaatcggaaagaagaagtttgagactctatcttacctccctgaccttactgacgtcgaattggctaaggaagttgactacctttttcggaacaaaagggattccttgggttgaattccagttggag

SEQ ID NO: 161922 - DNA, 409 bp, Arabidopsis thaliana columbia
aaaccggggccgccccacgcgtccggttttctttagatctgttaataatcccatcttttttttggcctagtcactagtggtgttatctctctgtgtggaataaaaagcagggttttttaatcactcggattgttttaagatatggcaactttgaacccttttgatttgttggatgatgatgctgaggatccaagccagctcgttgttgccatcaaaaagattgataagttcactaaatcttgacaggttcctagcttgcctgttaagtcagttcctaagctttcatcgaagcccacttttcctggttaagctgttagaacggcaagtagtgatgctccacctaacaatggaccgcctgaaggctttaaccgtgttccttacagatacaacctttctaatgttgacaaat

SEQ ID NO: 161923 - DNA, 484 bp, Arabidopsis thaliana columbia
aaaccggggccgaccacacgcgtccgcgtacatgaaattagttcaaaagcttcacgtgttggatccgttacagaaacctaaacaagatgcggacgctcttcgtacttgtcctcaatggttaggtcctcaaatcgaagtgatccgttacgcaacgaaatcgatcgagcgtgagattaactccgtcaacgataatccgttgatcgatgtttcgaggaacaaggcgattcacggtggtaacttccaaggaacaccaatcggagtttcaatggataacacgagattggcgatagcagcgattggtaaactcatgtttgctcaattctcagagcttgtgaatgatttctacaacaatggtttaccctcgaatctaaccgcttcgaggaatccaagtttggattatggattcaagggagctgagattgcaatggcttcttattgttcagagcttcaatacttagctaatcctgtgactagccatgttcaa

SEQ ID NO: 161924 - DNA, 467 bp, Arabidopsis thaliana columbia
aaaaaccggggccgccccacgcgtccgcacaataaggatctcacatttctgtaattttcctttgaaattttcgcaaaccctaaaaagagggggaaacataaaaatctccattgaaacagattggattgagcaagagaaagagatcatgtatttttaaaaagagagagaaatcctctgatctcctctctgattcgatcgagatcgcatcatttccctaatgatttcaaaaacctaaaacgatctcttcttttttttcgcttcgatctccattgaaaaggatgatttcaaatccaagtttattatcgtacacttgcattgcgaaaggaaccgaagttctcgcggagttcgtttcaaggcaagagccaggaatctaagctatagttttacgatgcatcgagaacacgcttcctcatcatccaatgttttcttatacagttcacatgatgacgtttacattctcaatcgac

SEQ ID NO: 161925 - DNA, 441 bp, Arabidopsis thaliana columbia
ggccgccccacgcgtccgtttatctcctttcctttcattgtagttaacgaaaagattacgataatggcaacatcagctatccagcaatcctccttcgccggccaaacgggttttaagcccttcaacgaactccttcggaagggtggggtatccggggggggccgggtgaccatgcgtcggaccggcaagtctactcctcaaagcatttggtacggaccagaccgtcccaagtacttaggaccattctcggagaatacaccggcctacctaaccggagaataccccggagactacggctgggacaccgctggactctcggctgacccggagacattcgctaagaaccgggagcttgaagtaatccacagcagatgggctatgttgggtgctctcggatgcacattccctgagattctctccaagaacggtgttaaattcgga

SEQ ID NO: 161926 - DNA, 446 bp, Arabidopsis thaliana columbia
atctccttcttcttctccttctaaaatcttttttttcaggcgtaacgaatcgaatcataaacacttacgcagaaacaaaaactaaactttggatcttttaaccgaccatagagattcgggggttcttcttagtttcgacagattcttgatccgttttagttgttacgctcatctttgcttttatacatcagacccttctcttctcttccttctttatctaagaaacattagggttctttgaaatcttgctaaaaaaaatgggtgttgagaaaatggggtgtttagcttctcgtacgggtcgtcagtttcagagatacaacaaaggtcgtcgtcaagtcgttggatgtgttccttacagattcaagctatctaatgatggtaaaataagtgatgaagtagaagttcttgttatctcttcccaaaaaggccacgccttaatgttcccc

SEQ ID NO: 161927 - DNA, 436 bp, Arabidopsis thaliana columbia
gaaaataaagcaacagttatggccgttggtcttcaaaacaccccatggaagatgagggggggatttctgagtgcgtctgggggggtggctaaactacagacagacgtggaaatcaaggcttcggttgataagtttcaccacatgttcgttgggaaaccacaccatgtctccaaagcaagtccagccaacattcagggatgtgatctgcacgaaggcgactggggcacaggcggctctatcgtcttctggaattacgtacatgatggggaggcaaaggtggcaaaggaaaggatcgaggcgttggacgccagataagaacttgatcacgtttagggttatagaaggagatctgatgaaagagtccaagagctttttgttcaccatccagtggacccctaatcctgaaggccctgaaagtattgggcactgccacctt

SEQ ID NO: 161928 - DNA, 331 bp, Arabidopsis thaliana columbia
aaaaaaaaaaacacaaaaatgttcaatggtttctaacatggctttcctccctgtttgccgaaaggtggaaccttcccctgggatagaagtccttggagcgccggtgacaatgaggaagactgtgccaagcaaagggccataggcaccatggtacggatccgaccgagtcaagacttgggccattcttggcgagtacccagctccttaccgaagtccctggagactacggtgggacacagctggctatccgtgccccagaattcgcaggaaccgggctgaagtttcccagaggtggccatgctcggagccctaggctggtcttcctgagctt

SEQ ID NO: 161929 - DNA, 451 bp, Arabidopsis thaliana columbia
cccactccgaaaaaccttcccaatccgatttatacaacggtggaaacgccgccggagcaggaatgtcagccaccgcagcatcaagctacgcgatggcattagcagacgtcgcgaaaagaaacgacacaatggaattaacagtcacagacatcgagaagctcgaacaagtcttctcagatccacaagtactaaactttttcgcgaatccaacaatcaccgtcgagaagaaacgtcaagtcatcgacgacatagtgaaatcgtcgtcttttcaatctcacacatctaacttcctcaacgtcctcgtcgacgcgaatcggatcaatatcgtgacggagatcgttaaggagtttgagttggtttacaataagctaacggatacacaattggcggaggttaggtcggtggtgaaattggaagcgccgcaattagctcaaatggcgaaacaggttca

SEQ ID NO: 161930 - DNA, 459 bp, Arabidopsis thaliana columbia
aaaaaagaaaaggccgttccggtcaccacagagcccaagggggaagagaaagcagttccgggggagaccaagaaagaagagaaggcaaccgcctctactcaggtcaagagggcctcaaaatttattaaagatatatttgtctcagtcaccactagcgagaagaagaaggaagaagagaaaccagcagtagtaacaatcgagaaggctttcgcagctgatcaagaagaagaaacaaaaaccgttgaagcagtcgaagaatcaatcgtctccatcactcttccagagacagctgcatacgtagagccagaagaagtctcaatctggggaatcccacttctagaggacgaaagatccgacgtgatcctcctcaaattcctccgggcacgtgacttcaaggtcaaagaagccttcacgatgctgaaaaacaccgtccaatggcgcaaagagaacaagatcgac

SEQ ID NO: 161931 - DNA, 484 bp, Arabidopsis thaliana columbia
gggccggaaataccggggcggaccacacgcgtccgaacgcgtgctgttacgcgccaccgcgaatgtttttggaattccgaaattgagacgaccaatcggggcgatccaccgtcaattcagcactgcatcgtcttcctcgttctcggttaaaccaatcggaggaatcggagagggagcgaatctgatctccggtcgtcagcttcgtccaattcttcttctcgattcgtcggcgatcaacgggggagagaaaagagaaattctcaaaccggttaaagccgccgctgctgaaggtggagataccgctggggatgctaaagttggattcctcgccaagtatccatggctagtcactggattcttcttcttcatgtggtacttcttgaatgtgattttcaacatccttaacaagaagatctataattacttcccttatccctattttgaatcggggatacacttgttcgggggagtggtttactgcttg

SEQ ID NO: 161932 - DNA, 462 bp, Arabidopsis thaliana columbia
ttgagctacctaagtggaactatgatggttcgagtaccggtcaagcacctggtgaagatagtgaagtgattctatacccgcaggctatcttcagagatcctttccgtggaggcaataacatcttggttatctgtgatacttggacaccagctggtgagccaattccaacaaacaaacgtgctaaagctgctgagatcttcagtaacaagaaggtctctggcgaggttccatggttcggcattgaacaagagtacactttacttcagcaaaacgtcaaatggcctttaggttggcctgttggagcgttccctggtcctaagggtccttactactgtggagttggagctgacaagatttgggggcgtgacatttcagatgctcattacaaagcttgtttatatgctggaattaacattagtggtactaatggtgaagttatgcctggacagtgggagttccaag

SEQ ID NO: 161933 - DNA, 457 bp, Arabidopsis thaliana columbia
aatttcctttggcaaaccaccgtaaaacactaactaagagatcaatatggctggagtgatgaagttggcatgcatggtcttggcttgcatgattgtggccggtccaatcacagcgaacgcgcttatgagttgtggcaccgtcaacggcaacctggcagggtgcattgcctacttgacccgaggtgctccacttacccaagggtgctgcaacggcgttactaaccttaaaaacatggccagtacaaccccagaccgtcagcaagcttgccgttgccttcaatctgccgctaaagccgttggtcccggtctaaacactgcccgtgcagctggacttcctagcgcatgcaaagtcaatattccttacaaaatcagcgccagcaccaactgcaacaccgtgaggtgatgagcgacggtcaaatgaagctactagcggatgtttcgaatattatataatcga

SEQ ID NO: 161934 - DNA, 455 bp, Arabidopsis thaliana columbia
cggccgcgtgggtttaaataaaaatacttaatagcatggcgatacatttatacaaaacttctaccccgagcacacgcaatggagccgtagacagtcaagtgaaatccaatccacgaaataatttgatctgtgggcagcatcattgtggtaaaggtcgtaatgccagaggaataattaccgcagggcatagagggggaggtcataagcgtttataccgtaaaatagattttcgacgaaatgcaaaagacatatatggtagaatcgtaaccatagaatacgaccctaatcgaaatgcatacatttgtctcatacactatggggatggtgagaagagatatattttacatcccagaggggctataattggagataccattgtttctggtacagaagttcctataaaaatgggaaatgccctacctttgaccgatatgcccttaggcacggccatacat

SEQ ID NO: 161935 - DNA, 445 bp, Arabidopsis thaliana columbia
gggagaaagagagaaagagagacagtgttattggcgtacagggcgtgtttcctacaccagagcgcattggcttcatcagccgcacgatcatcatcttcctcctcatcccagcgtcacgtgtcgttctccaaacctgttcagatcatctgtaaagctcaacagtctcatgaagacgataactccgccgtctcccgccgtcttgctctaactctcctcgtcggcgccgctgctgttggttccaaagaatctcctgctgatgccgcctacggtgaagctgcaaacgtgtttgggaagccaaagacgaacacagactttttgccatacaatggagatgggttcaaagtgcaggttccagcaaaatggaacccaagcaaagagattgagtatccaggacaagtccttaggttcgaagacaacttcgatgctactagcaatctcaatggca

SEQ ID NO: 161936 - DNA, 263 bp, Arabidopsis thaliana columbia
aaaaaccgggccgacccacgcgaacagtaaattctttcattgttaaacaaattttttttttgttgtttgcgaagaccaccaaggggggggcttacttaaagacgtggcgggccaaattcaagagaagaacagacggaaagacctactacaggtcacggatccgccttatcacccaagacaagaacaagtccattactcttaagtatcgcctcgttgccccctttaccaaaaaaaacataatgccacacattgcatttgcaacc

SEQ ID NO: 161937 - DNA, 403 bp, Arabidopsis thaliana columbia
cggacgcgtgggcaaaaaactcttgaatttttcaagaacaaaagaaaaagacatctttaatggcggccatgaactcgagtgttctcacttgcagctacccaattgctggctctggctcggtagagcttaaccagaaagttggtttggtgaattcatcagttgggtttggtcagaagaaacagatgattatgcctgtgatcaaagctcaacgcgttgttggtgatgatgttgatggatctaatggaagacgatcagccatggttttcttagcagctacactcttctccactgctgctgtttctgcttctgctaatgctggcgtcattgacgaatacctcgagaggagcaaaaccaacaaagaacttaatgataagaagagattggcaacaagtggagcaaactt

SEQ ID NO: 161938 - DNA, 435 bp, Arabidopsis thaliana columbia
aactttctctctcttgcttctacgcttctttttgtggcgtagattgttatagagagggaaaccaaaaaagggaatctcaaaagctcgagttcacagatttgacccgagtctttaatccaatctgctggttcgttttccacattcaaactcgactcttgaatatcaaatcagaagtctttgctatggctgctaccgctgctgcttctgttgtccgttacgcacctgaggatcatactcttcccaagccctggaaaggccttatcgatgatagaactggttacttgtacttttggaatcctgagaccaatgttactcagtacgagaaaccaaccccctctttacctcctaagttttctcccgccgtttctgttagctcttccgttcaggttcaacaaactgatgcctatgctcctcccaaggatgacgataagtact

SEQ ID NO: 161939 - DNA, 453 bp, Arabidopsis thaliana columbia
ggcaaattcctagtggctcatggcgtcatcatctgatcacacggcgaagataatcgacggcaaggcgattgctcataccatcagatcagagatcgccgaggaagttcgcggtctatctgagaaacacggcaaggtcccaggactagctgtagttattgttgggagccgaaaggattcacagacctatgtgaatacgaagaggaaagcgtgcgctgaggttgggattaagtcatttgacgtgggcctaccagaggaagtttctgaagctgatcttattagcaaagttcatgaactaaattcaaatccggatgtccatggcatattagttcaactcccattgccgaaacatattaatgaggagcatatattgggtgcaatcagcattgataaagatgtcgatggcttccatcctttgaatattggtaagctagccatgaaaggcagagaacccct

SEQ ID NO: 161940 - DNA, 307 bp, Arabidopsis thaliana columbia
gtttgatcatcttgggagaaaaataatggctgcttcagtgatgctatcttcggggacattgaaaccagctggtttcacggtggagaagacggcggctagaggattaccgtcgctcacaagagctcgtccctccttcaaaattgtcgccaggggcgtcaagaagatcaagaccgacaagcccttcggaattaacggcagcatggacttgagggacggggtgtacacctccggcagaaagggcaagggatacgcggtttacacgtgcgcgtacacgtgtggggctaacgcggctgggtacacacctctt

SEQ ID NO: 161941 - DNA, 467 bp, Arabidopsis thaliana columbia
gtccgttctgaattataacggttccccggaaaatcaatggaagagatcgccgttatcaagattcagacggcatttagaggatatatggcaagaagagcattgcgtgcgttgagaggtcttgtgaggctaaaatctttagtccaggggaaatgtgtgagacgtcaagccacatctacattgcaaagcatgcaaacactagctagagtacaatatcagattcgtgagagaaggctccgattgtctgaggataaacaggctttaacacgacagctccaacaaaaacacaataaagactttgataagactggagaaaattggaatgatagtacattgtcgcgggagaaagttgaagcaaacatgttgaacaagcaagtagcaacaatgagaagagaaaaagcgcttgcatatgcattcagtcaccagaatacatggaaaaactcaactaaaatgggttctcaaacattcat

SEQ ID NO: 161942 - DNA, 449 bp, Arabidopsis thaliana columbia
ttgttttaaaccctaaaaactccaaccttttttttctgtgtaacaacaacaacaacagtgcgggaagaatctaacatcgagggggttgaaatccaaaacaaactcgaagttgctcctgcatggatttccgttcatccatctcaaaaatctgtcgctgtcgctgtcggctcggatcttcgtattttcgatcttatagagaattgcccagttagtttggtggatgaatctgatgggcctatccgtaaggaatccattagagctattcgtttcattacaagtggcaagctctttgtgtccgcaggcgatgacaagcttgtcaagatttggtccgcagattcttggcgctgtcttaacacagtatgttctgagaaaagagttagcgcagttgctataagtagtgatgactcacatgtttgctatgcggacaagtttggtgtttgatgggtgat

SEQ ID NO: 161943 - DNA, 441 bp, Arabidopsis thaliana columbia
aagaaaagttcaactttaccatgggggcaatgggccatgtggattctggaaaatcgaccacaactggtcacttgatctataagcttggtggtattgacaagcgtgtcatcgagaggttcgagaaggaggctgctgagatgaacaagaggtccttcaagtacgcatgggtgttggacaaacttaaggccgagcgtgagcgtggtattaccatcgatattgctctatggaagttcgagaccaccaagtactactgcacagtcattgatgccccaggacatcgtgatttcatcaagaacatgattactggtacctcccaggctgattgcgctgttcttatcattgactccaccactggaggttttgaggctggtatctctaaagatggtcagacccgtgagcacgctcttcttgctttcacccttggtgtcaagcagatgattt

SEQ ID NO: 161944 - DNA, 464 bp, Arabidopsis thaliana columbia
aattgtcggctgggccccgtcattatgtgcaaaaaagcagctcgtgctggcttggcacagtctctctttgaacgacttgtgactcttggtattaaaccaatcagattgcaggttcaatatcgtatgcatccagctttgtccgagtttccatccaacagcttctatgaaggaactctacagaatggagtcacaattattgaaaggcaaacaacagggattgatttcccgtggcctgttcctaaccggcccatgtttttctatgttcagctgggacaagaggagatcagtgctagtggaacatcatatcttaatagaactgaggctgctaatgtggagaaacttgtgactgctttcttaaagagtggagttgtccccagtcagattggagttataactccatatgagggacagagggcatacatggttaattacatggcaagaaatggttctctccgacagcaact

SEQ ID NO: 161945 - DNA, 451 bp, Arabidopsis thaliana columbia
cgaggacagaaagcagaggggggcatgaatgatctttttcagagaagagaggacaaaaactccgttggtggactacctaaagcccatcatggccgacggagacaccggttttggcggcaccaccgccaccgtcaaactttgcaagcttttcgttgaaagaggcgccgttggggtccacatcgaggaccagtcctccgtcaccaaaaagtgtggccacatggccggaaaggtcctcgtggcagtcagcgaacacatcaaccgccttgtcgcggttcggctccagttcaacgtgatgggtacagagaccgtccttgttgctagaacagatgcggtcgcagctactctgatccaggcgaacattgacgcgagggaccaccagttcatcctcggtgccactaacccgagccttagaggcaagagtttgtcctcgcttctggctgagggaatgact

SEQ ID NO: 161946 - DNA, 427 bp, Arabidopsis thaliana columbia
cgagcaaaacactgtttgaaacaaacaacaaattttttttttgctctaatctaacaacaatggggggtggataaaaaccatctctttctgctgattcatcttccttatcattccgatctgttctcaagtgcccaactaacacttcctcacctccttaacgagcttcctttgtttcaccactccaagcgttttttcgtgagctcagagaccgtatcgattcagtcaaaaacactcaaaagatcaccgaagctatgaagcttgtcgctgcagctaaagtcaggagagctcaagaagctgttgtcaatggacgaccattctcagaaaccctagttgaagttctttacaacatcaacgaacagtttcaaaccgatgttgtcgatgttcccttaaccaaagtcagaccggttaagaaaggaggttctcgttg

SEQ ID NO: 161947 - DNA, 193 bp, Arabidopsis thaliana columbia
tttgaacgactggggacgcgggcactaaaaaaaaaacaaaaagctaccaaaacatccggtgaccgcccctttgtccccagttccacacaacaccgtctatgaaggaactctacaacgggggaccgtccctaagctaccggttcctccagtgaccatccttaaggtacccgttccaccagcgactgaacctaat

SEQ ID NO: 161948 - DNA, 453 bp, Arabidopsis thaliana columbia
tatatagccgtaattgcaccttatcattttctaggatcgaaggagtacgccaggcgggggttgcaaaattgcggaatgtgactcttcttcatcattggcaattttattccatggagactactaacagtagtcggattgtgccatgtgtgttccacgtcttttgtttatttttcatccccgaatctccaagatggctggcgaagttaggtcgtgataaagaatgccgatcttcgttgcaacgccttaggggatctgacgtcgatatttctcgtgaagcaaacacaattagagataccattgacatgacagaaaacggtggtgaaactaaaatgtctgaattgtttcaaagacgatacgcatttccggtaattatcggagttggttaaagtttttgcaacaattgtgtgggagctccggtgttacctattatgctagtagccttttcaacaaagg

SEQ ID NO: 161949 - DNA, 390 bp, Arabidopsis thaliana columbia
  unsure (1)..(390): unsure at all n locations
atctcgcgtacgccgaaccttagcaactaatggaatccacgaggaaatctaagaaaatggtggggtgaccaacgaaccggggcacgagcacaaaaacgaggaagaggccggagctaacaaggatgaggacaccggagctcaggtcgatccgatcgttaggcttgaggaggttgccgtaactaccggggaggaagacaaagatgccggcctggaccggaaaacgaaccgtaatcgagtcgataaggatgctattcattggtaggagagaggttctggaccggngaagnnncaaaagcataagaacactgggaagattcgactagttatgaggcaatctaaaactttgaagatctgcgctaaaaacttcgttaaatcgggcatgagtgttca

SEQ ID NO: 161950 - DNA, 350 bp, Arabidopsis thaliana columbia
cccacgcgtccgaggaagcaagggacttggaatttacaggaacacagctaaagctgtcatgtgtggacttctaccaaagtctccaacatttacagctagtagaacaaacggtggtcttatatgggttagtgaatggaactcgatgcaacaatccgtttcgtcagcgtttttagcctcgcttttcagggattacatgctcacttcccgtatccataaaatatcttgcgacgggaaaatcttcaaagcaacagagcttagagatttcgccaaatcgcaggctgattacatgctggggaagaatccgttgggaacgagcttcgtggtgggttatggagacaaatacccacaat

SEQ ID NO: 161951 - DNA, 408 bp, Arabidopsis thaliana columbia
atccatctgctgaagaaggtggtgaggatgaaggtgttgatgactctactcaaaaggtggtggacattgtcgacaccttcagacttcaggagcaaccaacttatgacaagaagggattcatcgcttacattaagaaatacattaagcttttgacacccaagctcagcgaagaagatcaagctgtcttcaagaagggtattgagggagctaccaagtttttgctccccaggctcagtgacttccaattctttgttggggagggtatgcatgatgccagcactttggtctttgcttactacaaggagggttcaactaacccaacatttttgtacttcgttcatggtttgaaggaggtcaagtgctgagagagaagctttcgttgggtactgtggtcggtcgcagcgactc

SEQ ID NO: 161952 - DNA, 335 bp, Arabidopsis thaliana columbia
ctttttggcagaaaggaggctcgattgcattatgtttgtaggatacatttccaaccgtggatgtagctttaaccaattaggggacattgagcggaaatccaaccccactcactaccgtgaacccggactctataccacggtctattaagagagtgagactcagaatgctgttggaaatccattagagctctatatgatcggatgcaagtgcattgtagcttatgtcatgaacaaggagcactcagattcatatgtgttggatatggcagaaggtcaaccctaaaaaatagacagaggctttcaaacgttttctgggacaattgcccaatacaaat

SEQ ID NO: 161953 - DNA, 193 bp, Arabidopsis thaliana columbia
aaaagctctctcatctctctcgtccgtctcctctttctccatagtttaaagcttcgtcgttccgtcaccagaatttcaactactttgagttgattctcgttggatttctcacgatgggagacagcgggaagcttgaggcaacgatagatcggcttctgaatgaagagaagcagatgagactcgccgaaaacgt

SEQ ID NO: 161954 - DNA, 257 bp, Arabidopsis thaliana columbia
gttagttacttattagttatttaatttctttttgtgggtttttttttggtttcttaaatcaaattaggaattagttagaagataaatcccagggaaaaaatattacgttgaaattggggggaaatggggtatagtctttatagataagactcttcaacgattccactttatttttcggtgggattgttggttgatgaagaaaaaaaaatagtttgtaattacaggtttaaatatgtagagaaaaaatgacgaatttg

SEQ ID NO: 161955 - DNA, 469 bp, Arabidopsis thaliana columbia
ggaacgtgtgtattgagaggatgtgtaccaaagaagttacttgggtatgcatccaaatacagtctgagtttgaagacagtcatggatttggttggaagtatgagactgagccttctcatgattggactactttgattgctaacaagaatgctgagttacagcggttgactggtatttataagaatatactgagcaaagctaatgtcaagttgattgaaggtcggggaaaggttatagacccacacactgttgatgtagatgggaaaatctatactacgaggaatattctgattgcagttggtggacgtcctttcattcctgacattccaggaaaggagtttgctattgattctgatgccgcgcttgatttgccttccaagcctaagaaaattgcaatagttggtggtggctacatagccctggagtttgcggggatcttcaatggtcttaactgggaagttcatgtatt

SEQ ID NO: 161956 - DNA, 455 bp, Arabidopsis thaliana columbia
cagatcttagctaaattgagacaagctcaaaatgagtaagcttcagagtgaggccgttcgtgaagccatcactactatcacagggaaatccgaggcaaagaaacgtaactttgtcgagactattgagctccagatcggtctgaagaactatgaccctcaaaaggacaagcgtttcaggggatctgtcaagttaccacatatcccccgtcctaaaatgaagatctgcatgctcggagatgcccagcatgttgaagaggctgagaagatggggttggaaaaacatgatgttgagtctttaaaaaagcttaacaagaacaagaaactcgtcaagaagcttgcaaagaaataccatgctttcttggcctttgagtctgtcattaagcagattcctcgtcttcttggtcctggtcttaacaaggcaggaaaattcccaactctgtgagccaccaggaatc

SEQ ID NO: 161957 - DNA, 362 bp, Arabidopsis thaliana columbia
gaaagagaaagcagtgtcgatcttttgatcagattcttgagaagcatgttcaagaaagtctcgaaacgaactaaaaaagcatcgcgacggattttgccagctgccatgtctcctcgactcgtgtcttttgcagtagatgggatattgttattaggttcactttccattacaagagcatttcttgaggtaatatgcaatctaggaggaactgtgtttacggtgattctgctgatacggttgttctgggcggcagcttcgttcttccagacttatgggaactcttttggaccaaacccggtaaattaaaaccttgtttactcccatttgggtgggagatgttgaactcatgtttggtacgtcaa

SEQ ID NO: 161958 - DNA, 314 bp, Arabidopsis thaliana columbia
aatatttctaatctattacaagtaacatgatcggccaacttatgaacctcaaggccacggagctctgtctcggcctccccggcggcgctgaagcagttgagagtcctgccaaatcggcggtgggaagcaagagaggcttctccgaaaccgttgatctcatgctcaatcttaaatctaacaaagaaggctccgttgatctcaaaaacgtttctgttgtccccaaggagaagactacccttaaagatccttctaagcctcctgttaaagcacaagtggtggtatggccacctgagaggaactacaggaagaacatg

SEQ ID NO: 161959 - DNA, 285 bp, Arabidopsis thaliana columbia
ggaggacggtaccaaggaggaggaggacgataccataggaggcggtgggcgacaaggaggagggggaagtgggggaagttactgccgccacggttgttgctctagaggtttcaacggttgctcaagatgttgatacaatgctgcagaatttttttaaacttaccccggtctctaaatcattttataaacctatcaccaccatgcatgtattgcattatgcatgtatgattttaagaaacccatggtgcttttgtattgaactgtcttaagtttttgaggcttttt

SEQ ID NO: 161960 - DNA, 174 bp, Arabidopsis thaliana columbia
atctctttgggatgctacagggaactagatttgttttatatgcaaacggtagagaatccatcagtgttacaatccaggaagtgacaccaacatctgttggggctattatagctctttatgaaagagctgttggtttatatgcctcaattgtgaccataaatgttcaccaccaac

SEQ ID NO: 161961 - DNA, 484 bp, Arabidopsis thaliana columbia
atcagatctaaagaagagcgtcttcataaacgcccttcgtcttcttccctgcaaatgtattttctagatctttctttcgtccgcgaaacgacaatgagagagtgcatttcgatccacattggtcaggctggtattcaagtcggaaatgcttgctgggagctttactgtcttgaacatggcattcagcctgatggccagatgcctggtgacaagactgttggtggaggtgatgatgctttcaacaccttcttcagtgaaaccggtgcaggtaagcacgtcccacgtgctgtctttgttgatcttgagccaactgtgatcgacgaggtcaggactggtacttaccgtcagcttttccaccctgaacaactcatcagtggtaaagaagacgctgctaacaattccgcccgtggtcattacaccattgggaaagagattgttgatctctgcttggaccggatcagaaagctcgctgataactgtactg

SEQ ID NO: 161962 - DNA, 424 bp, Arabidopsis thaliana columbia
aagttggaaacttgggactaaatgattggcgtcttggggtgtgtcggaaaggctgggtactccctttaacttcggggcagtttcaagatcgtctgctccgttggcatcaagcccatccacgttcaagactgttgctctcttctctaagaaaaagccagctcctgctaagtccaaggctgtctctgagactagcgatgagctcgccaagtggtatggtcctgacaggagaattttcttgcctgatggtcttttggatagatcagagatcccagagtacttaaaacggtgaagttgctggagattatggttatgacccatttggtcttggaaagaagcctgagaactttgctaaataccaagcttttgaattgatccatgcgagatgggctatgttaggagcagctggtttcatcattcttgaagc

SEQ ID NO: 161963 - DNA, 335 bp, Arabidopsis thaliana columbia
cccacagggccagcgagtcttaaactttatcaccgccttcatattaataattgcttcctttacctcaattcttttgtccaccatcaccattaggattcccagaattcaaccttcatcccaaattacttcgaggagatccacaattaaaccctaaatataataaaaagtttataaccaaatatgaagaactttaacattttttccaaacccttctataaagataatgataaaatcccatgaatacccctcttccttacattatcatatttccgatgtcaactccattcctaatcttaaccattgtttttgccatagctcttatcaaatttcccatt

SEQ ID NO: 161964 - DNA, 458 bp, Arabidopsis thaliana columbia
actttctgcgctttaatttgaacttgtggatagagaaaagggttagatacagagagatagcgaaagagaagaagaagaagaggtctatcgacagaccaaacttcgtcaagagatccgttaaaaggatccatttggagctccgattcgagctagagtcaataatgagcggaagacagagatctgttgcagcggcggtgcatcaccagaggcagctctccgataaccctttcgatatgtcttcatccaatggcagatggcttcaatccactggtcttcagcattttcagtcatccgccaatgattatggatactatgctggtgggcaaggaggtggtggtcaagcatcaagaggataccagaatgctcagagaggaaacgagttctttggggaaccaactactcctcaatacggagctcgtcctaccaaccaaaggaagaacaatgttgaatctgagttt

SEQ ID NO: 161965 - DNA, 451 bp, Arabidopsis thaliana columbia
gttatgattatgggagatagaggaactggataatttacaactgttagatcattagttgagctgttacctgagattaatgtagttgcaggtgacccgtataactcggatccgatagatcctgagtttatgggtgttgaagtaagagagagagttgagaaaggagagcacgttcctgttattgcgactaagattaatatggttgatcttcctttgggtgcaacagaagatagagtttgtggaaccatcgatatcgaaaaggctttgacagaaggtgtaaaagcctttgagcctggtttgttggctaaagctaatagagggattctttatgttgatgaagttaattttttggatgatcatttggttgatgttcttttggattcagctgcttctggttggaatacggttgagagagaagggatttcgtttttttacccggcgaggtttattttga

SEQ ID NO: 161966 - DNA, 388 bp, Arabidopsis thaliana columbia
atttgatctccgcaacaacgagcgtggtgttttgctccttaaggttccccggccgcctaaatttttaccttagggggcgtggcggtaaacctaatcccattccctcgtctccatttcttcatggtgggttttgcgcccctaacttcccgtggttcgcaacaatccatttcactcaccgttcctgagctgactcaacaaatgtgggactccaaaaacatgatgtgtgcagctgatccacgttacggacgttacctcacagcctctgttattttcagaggacagatgagcacaaaagaagtcgacgtgcaattcctaatcatacagaacacgaactcgtcttacttcgttgagtggatcctaaacaacgtgaaatccatcgtttgttatt

SEQ ID NO: 161967 - DNA, 411 bp, Arabidopsis thaliana columbia
  unsure (1)..(411): unsure at all n locations
ccgnaaaaacaaaaattaaatcccaatctttatttatcgccaaagaacaacaaaacccgcaccggtttaaatattaaatccgccctgccaaattctaaaaaanttcttaccttcctccacaaaactcttcaacaatcacaattccaaaaatcttctaaaaaaaaaatatcaccatctcaccaaccaaaacccacacctttcattgttcatctctgccacacttcctcactcccacttgcccatcctcttctccccacctattttgtataacactacttcttcccaatgccaaatcctgaacccttttttgttcaattcaatattcccaaaaacccactcccaaaatctattaatactttactttcctcaccaaattcaaattacttttctttcccaaaacaatttattacc

SEQ ID NO: 161968 - DNA, 462 bp, Arabidopsis thaliana columbia
aattcttcgataaggattttactttttagtttaagaaaaaaaaaaacctcctctgggttggggatcctttaaggaaggggacgaaatgccaacggaatcgtacgaagccgccattaaaggactcaatgatcttctcagtacgaaagcggatctcggaaacgtcgccgccgcgaagatcaaagcgttgacggcggagctaaaggagcttgactcaagcaattcagacgcaattgaacgaatcaagaccggttttactcaattcaaaaccgagaaatatttgaagaatagtactttgttcaatcatcttgccaagactcagaccccaaagtttctggtgtttgcttgctctgattctcgagtttgtccatctcacattttgaatttccaacctggtgaggcttttgttgtcagaaacatagccaatatggttccacctttgaccaaaaaagacactttggagtt

SEQ ID NO: 161969 - DNA, 449 bp, Arabidopsis thaliana columbia
tgaagtccttggaagcggccgtgtgacaattaggaagactgttgccaagccaaagggcccatcaggcagcccatggtacggatctgaccgtgtcaagtacttgggtccattctctggcgaatcaccgagctaccttaccggagagttccccggagactacggatgggacaccgccggactttcagctgaccccgagacattcgcagggaaccgtgaactagaagttatccacagcaggtgggccatgctcggagccctaggctgcgtcttccctgagcttttggctagaaacggagtcaagttcggagaggcggtttggttcaaggccggttcacagatcttcagcgatggagggctcgattacttgggaaaccctagcttggttcacgctcagagcattttggccatttgggccacacaagttattttgatgggagccgttgaaggct

SEQ ID NO: 161970 - DNA, 200 bp, Arabidopsis thaliana columbia
  unsure (1)..(200): unsure at all n locations
ggcgancaaagaaaacaaaaanccgatggggaggaagttgggatcgccggagtccgaagagtcggcccgggagggatttaatcctgagagtccggacaaggatccggttgcgatggtggagatgagagaacacattgttcgtgagaaatggatccatatcgagaaggctaaaattttacttgagaaggttaaaaggtatt

SEQ ID NO: 161971 - DNA, 301 bp, Arabidopsis thaliana columbia
  unsure (1)..(301): unsure at all n locations
aaccggacctcctaagactagctggggataattgctactgtcactactcatccctaancctggattttccgaccttgtccttcaaagccaaaattccttaccggtttttccggttggttgaaccgcaacttttctttaacatcgatcaggttatcaagccaaacgtcgtcgttcaaggttgaagctaataaaggagaatggtggccccttttggcatcccctgaatatctcaccggaaacattcccgttaacaatggttttgacccgctgggtctagcacaggatccaaaaaactggaaat

SEQ ID NO: 161972 - DNA, 412 bp, Arabidopsis thaliana columbia
gcggaaagaggaggagaaagcggttcaaagcgtggcggtgaccgtggtgacttcgggcgtggattcggcggtggacgtggaggtggccgtggccgtgatcgtggtccaagaggccgtggaagacgtggaggccgtgcctcggaagaaacgaaatgggttccagtgaccaaactaggtcgtctagtggctgacaataaaataacgaagctggagcagatctatcttcattctctcccagtaaaggagtaccaaatcatagatcatcttgttggtcctacgttgaaagacgaggttatgaagatcatgcctgttcagaaacaaaccagagctggtcaaaggactagattcaaggcctttgttgttgttggtgatggaaatggtcatgttggtttgggtgtcaagtgttttaagg

SEQ ID NO: 161973 - DNA, 268 bp, Arabidopsis thaliana columbia
  unsure (1)..(268): unsure at all n locations
gggccggaccaaagcgnccnaaatgagagagaagagttcgagagttatctttgtgaaacgaaacaccaanggccggctcagcattccattgccctacgcgatctgctcctcctcctaaatctccggctttcaatgccgttctgatccagatctcgtcggttctcccgtcggtggatcatctcgccgtcgtgtccatgcttccgccgggatttctatcttatttatcggggttgcttgattattttctaggatctatagatttttttct

SEQ ID NO: 161974 - DNA, 390 bp, Arabidopsis thaliana columbia
caaagcaaaaacatggatcgtggcacgtcgtcgttttggcttctcacatgggtgtgtacgttgtccattctccaaagctcctttgctcaacttgttccagcaatcatgacattcggggactctgtagttgatgtcggcaacaacaactatcttccgacccttttcagagctgattatcctccttatggccgtgatttcgctaaccacaaagccaccggtcgtttctgcaacggcaaattagccactgatataactgctgggactttaggcttcactaagtacccaccagcttatctaagtcctgaagcttctggtaagaatcttctcattggcgctaatttcgtttctggagcttcaggttatgatgacaaagctggtttttttaatcac

SEQ ID NO: 161975 - DNA, 335 bp, Arabidopsis thaliana columbia
  unsure (1)..(335): unsure at all n locations
accaacgcgnccgnncaaacccatnctnccttaaggcccacgttttcagaccggaccncccaaaacgagccggggccaaagcaaaaaaccgcgacaccacccaaaaaacggaaacgggnnccccacctaacaaaggaggaaccatgttctgggctgatcccaccggatcgaaaaacattaactcgaggctggataaaaggccaaacgcttacggtgaattctccaagcctcgagcttttttgcctaaaaggggaccaaaaggagtcccaatgaccgcccccgtaaaacaagccacctaacggtcgaaaggacagcgtacaagtgaaaccattcct

SEQ ID NO: 161976 - DNA, 329 bp, Arabidopsis thaliana columbia
gtggtgtcactcttttttttcagaaaatgttttctatacgttaagcttatgcttatttgcagcattataccagccggttatgagtagaccggctaagtttgaagatgactttaggatcgcatgggccgatactcatattactcaaattgacggaggcggagcccttcaacttaaattggaccctaactgaagaaggggatttactttcaagaatcaaggttgaagctgccaagggagaatggaaatccaactgggcctcgcgctgattatctcaccggcggacttgccggtgacaatgggttggacccggtgggtttagcagaggatcc

SEQ ID NO: 161977 - DNA, 455 bp, Arabidopsis thaliana columbia
  unsure (1)..(455): unsure at all n locations
gcttgtcaagaacccgaatccagttcctattcctttcatcgatgtcaactacctggtcgagagcgatgggaggaaactggtttctggtttgatcccggatgctggaacactcaaggctcatggagaagaaactgtgaagataccattgacgttgatctatgatgacatcaagagcacttacaacgatatcaaccccgggatgatcataccttacagaatcaaggttgatctgattgtgatgtgccagtattgggaagactgacattgccgctggagaaatgtggagagatcccaattccaaagaaacctgatgttgatatcgagaagattaagttccagaagttctctttggaggaaaccgtggcgattctccatgtgaggctttagaacatgaatgatttcgactgggggctcaatgacttggacttggaagttnggctgggtgatgtaagcat

SEQ ID NO: 161978 - DNA, 415 bp, Arabidopsis thaliana columbia
ggttggaattggtgcttatcttgcccgcctaggtatgcggtgcatacagagacttgatcagccgatcatcttgactggcttctttacactcaacaaagttacttgggcgtgaggtctatagctctcacatgcaactgggtggcccgaaaatcatgggcacaaatggtgttgttcatcttacagtctcagatgatcttgaaggcgtatcagcaattctaaactggctcagctacattcctgcttacgtgggtggtcctcttcctgttcttgcccctttagatccaccggagagaattggggagtatgtcccagagaactcttgcgacccacgagcggctatagctggggtcaaagacaataccggtaaatggcttggaggtatctttgataaaaatagtttcattgagacttttga

SEQ ID NO: 161979 - DNA, 445 bp, Arabidopsis thaliana columbia
ttcttctggaatcaagggaaaaagatagattcgcaacagaatttgttcacagttctcggggcgatttatggtcttgttctcttcgtggggataaacaactgcacttcagctttacagtattttgagacagagcgtaatgttatgtaccgcgaaagatttgcaggaatgtactctgcgtttgcctatgcattggctcaagttgtgactgagataccttacatattcatccaaagtgcagagtttgtgatcgtaatatatcctatgattggtttctacgcgtctttctctaaagtgttttggagtctctatgcaatgttctgcaacttactctgcttcaactacctcgcaatgttcctcatctccatcactccaaacttcatggtcgcagctattctccagtctcttttcttcacgacattcaacattttcgccggattcttgatcc

SEQ ID NO: 161980 - DNA, 397 bp, Arabidopsis thaliana columbia
cacatggggagacgagagaaagagtgaattagagacagagataatggcgtccagggcgtgtttcctacaccagagcgcattggcttcatcagccgcacgatcatgatcttcctgctcatcccagcgtgacgtgtcgttttccaaacctgttcagatcatctgtaaagctcaacagtctcatgaagacgataactccgccgtctcccgccgtgtggctctaactctcctggtcggcgccgttgctgttggttccaaagtatctcctgctgatgccgcctacggtgaagctgcaaacgtgtttgggaagccaaagacgaacacagacttgttgccatacaatggagatgggttcaaagggcaggttccagcaaaatggaacccaagcaaagagattgag

SEQ ID NO: 161981 - DNA, 440 bp, Arabidopsis thaliana columbia
cataatctcatctcccacccctaaaaccaccagaaaaccctctttccctttctccttcgtctcccgggctaaataccaaatcactcgatcgtctcaagacgaaaattcgccaaatggtaaacccaattcgccattctcgtcgcaggtagccttagcagctattctactatcttcaatttcatcttcgccgctagctttagctgtagtggacgaaccagcttctccgtctgtcgttatagaatctcaagctgtgaagccatcgacgccatcgccattgttcattcagaacgggatacttaaggctcctagtcctaaatcatcggatctcccagaaggatcacagtggcgatacagcgagtttcttaacgctgtgaagaaagggaaagtcgagagagttagattcagcaaagatggttctgttgttcagcttactgccgtcg

SEQ ID NO: 161982 - DNA, 418 bp, Arabidopsis thaliana columbia
gcatgggattaatcaaagacaaagaaaacgaaaatgttggcaatatttcagaaagcttttgctcacccaccggaagaactcaacagtccggcttctcatttctccggcaaaactcctaaacttcccggcgaaactctttccgacttcctttttcatcaccaaaacaatgctttctctatgaacttcggcgactccgccgtcttagcttacgctcgccaagaaaccttttttcgtcaaaggttgttctgtggactagatgggatctactgtatgtttctagggagattgaataatctctgtacattgaatcgacaatacggtttatctgggaagaactcaaacgaggcaatgtttgtgatcgaagcttatcgaacactttcgtgaacggggtccttacccagcagatcaagttcttaga

SEQ ID NO: 161983 - DNA, 395 bp, Arabidopsis thaliana columbia
aaaacaaagactcgagttgatatgtctagtactaaagatatgtcaactgtccaaaacgcaactccttttaacggcgttgccccatccaccaccgtgcgagttacaatcgtccaatcctccaccgtctataacgatactcctgccactatagacaaagcggagaagtatattgtggaggcggcaagcaagggagcagagctagtgttgttcccggaggggtttatcggtggctatcctcgaggttttaggttcggtttagcggttggcgttcataacgaagaagggcgtgatgagtttcggaagtaccatgcttctgctattcatgttccgggccctgaagtagcaagattggctgacgtggctaggaaaaaccatgtgtacttggtaatgggagc

SEQ ID NO: 161984 - DNA, 408 bp, Arabidopsis thaliana columbia
gacgacgatacactctttcactgacttacccctacctcaaaatcaccttcttcttcatcgtctcagctcaggaatggctaactacctgtttttgaatttgagatctgtttttgtttctagaagaaaacagctggttttcaccgtctctgatcctctgatcggatttttgtttgtttttgtttgcatcagatttgatcggaatctaatgggtaaaaccaccgggaacagagattggactcagatctacgctatttacggaatcgaacaatggcagacactcgtcttccttctcttccatgctttcttcttctctcttctctctcttctcttcctcatctacttcgatcagatttgcttcttccttgattccttcttcctttccggcgccgccagattaggccggggttt

SEQ ID NO: 161985 - DNA, 486 bp, Arabidopsis thaliana columbia
  unsure (1)..(486): unsure at all n locations
tctttctgacacattaactacttatccttcttgcattcttctctctctctacacccaaacaaacacacttataatatatcaagaaagaagatgtctagcagaagatcatcacgttcaagacagtcaggaagctcaagaatctctgacgatcagatttccgatcttgtttttaagctccaacacctaatccctgaacttcgccgccgccgttctgacaaggtgtcagcatctaaggtactacaagagacttgcaactacatcaggaacttacacagagaggttgatgacctcagtgaccgtttgtcggaactcttggcttcgacggacgacaacagcgccgaagcagccatcattaggagctggcttaattattaaatccgcattacttaatctgagagctattaatcatccgtttccggccaccaaatttatcttattatgggtatcgnctgtttacttctacatcatatattatgagatatagct

SEQ ID NO: 161986 - DNA, 288 bp, Arabidopsis thaliana columbia
cacatggggagacgagagaaagtgtgaatgtgagacagagataatggcgtccagtgcgtgtttcctacaccagagcgcattggcttcatcagccgcacgatcatcatcttcctcctcatcccagcgtgacgtgtcgttttccaaacctgttcagatcatctgtaaagctcaacagtctcatgaagacgataactccgccgtctcccgccgttttgctctcactctcctcgtcggcgccgttgctgttggttccaaagtatttcctgctgatgccgcctacggtgaagc

SEQ ID NO: 161987 - DNA, 273 bp, Arabidopsis thaliana columbia
caaacagagagcgagtcacgcgccgagttttcctcactggttctcaataaatctctctctctttcttctctatcgctttcatttttctcctccagatctcgattccaatctctctccctctctacttccttcaacagaaatggaaacgttcctatttacctctgaatccgtcaatgaaggacacccagacaagctttgtgaccagatttctgatgcgatccttgatgcttgcttagagcaagatcctgaaagcaaagtggcgtgtgagacatg

SEQ ID NO: 161988 - DNA, 339 bp, Arabidopsis thaliana columbia
cccaagtcttacatatggccaatcgaaagccaatacttgcttccccgtacatcttttgttcaagatgctcacaaagcaggattagaagtatatgcatcaggttttggaaacgattttgatcttgcatacaactacagttttgatccattggccgagtacttatctttcatggacaatggagatttctccgtggatggcttgctttctgatttcccactaacagcatcttcagctgttgactgcttctcccatcttggaagtaatgcttcatcacaagtggattttcttgttatatccaaaaatggagcaagtggagactaccctggctgtactgacttg

SEQ ID NO: 161989 - DNA, 349 bp, Arabidopsis thaliana columbia
cagatgcttcttcgaaatacgatttctatcaatttatctttgatttctgggaaggcaaaccacacggtcgtgtcatgagctttgatcctaccacacgtgccacacgtgttcttctcaaagacctctacttcgctaatggcatatcaatgtcccctgatcaaacacatttcgtcttctgcgaaaccatcatgagaagatgcagtaagttttatattagtgaggagcgtgttgaggtatttattcagggcttaccaggttatccagataacattcggtacgacggagatggacattactggattgcattgatttcggaagtaacaacgtcatggaaactttcgatgaaata

SEQ ID NO: 161990 - DNA, 460 bp, Arabidopsis thaliana columbia
ccttctggccgatcttcggagtatattacagggttcttaacggatctctaaatcttctgatttaagaagatgcttcctctatcgctgcttaaaactgctcaagggcatcctatgctcgtggagcttaagaatggagagacatacaatgggcatttggtgaattgtgatacttggatgaacatccatctgcgtgaagtcatatgtacatcaaaggacggagatagattttggaggatgccggaatgttatatccggggtaacacaatcaagtaccttcgaagttccggatgaggtgattgataaagtacaggaggagaagacacgcacagatggaaaaccaccaggtgttggaccgtgaaaaggtactggtgttgatgaatgaggagccagaggcagaggcagaggaacttcaatggggaagatgggtggcaacagaagagcaggtcccggccgtggttga

SEQ ID NO: 161991 - DNA, 455 bp, Arabidopsis thaliana columbia
cgtcggaagaagaaatcgccatggtagccgcaacagtaaacctcgcgaacatgacatggacgtcgttaaattcaaatccagcaatctctttctccatgttaagcggaatcagaaacttgggcatgttacctttcaggagatgtctaaagccgacagttatcggaatcgcgtcgtggccaccactccgttgttcttctgttaaggctatgtcttcatcatcgtcttcgtctggatcgacattggaggagactgttaaaacgactgtggcagagaaccctgtcgttgtttactccaaaacctggtgctcatactcgtctcaagtgaagtccttgttcaagagtcttcaagttgagccactggttgttgaattggatcaacttggttcaaaagggtcgcagctgcagaatgtgttggagaaaattactggacaatacactgttcccaatgttttcatc

SEQ ID NO: 161992 - DNA, 311 bp, Arabidopsis thaliana columbia
accagaataagttggctcaggatatattgattttctgccgggagaagcttccggcgtatggggtccaaaagtcaggggtgttggggccgttaccaaagacagcaactggaaaaattcagaagcatattctgaggaccaaggccaaagagatgggaccagtaccaagaagcaggttttaggaagtgataaagctttaagaacaacattttgaaaataatgtgttgtatgtttttgcggaactttgcctggtgtgtaaactttcaaatgataaccctatcgttgttttctccaaaacctggggctcatactcg

SEQ ID NO: 161993 - DNA, 277 bp, Arabidopsis thaliana columbia
cgtccgcccacgcgtccgtcaattccatggcagcactaatgaacatttccacactgctctcgggaacagcaacccatctgcacttcgtgaaactgtggtggaggttcccaacgtctcttggaatgatattggaggtcttgagaatgtcaagagagagctccaggagactgttcaatacccagtcgagcacccagagaagtttgagaaattcgggatgtctccatcaaagggagtccttttctacggtcctcctggatgtgggaaaacccttttggcc

SEQ ID NO: 161994 - DNA, 379 bp, Arabidopsis thaliana columbia
cggaaccggaattaacccggcaaggagttttggagttgccgtaatctacaacaagagcaggccatgggatgaccactggatgtttggggttggaccattcattggagctgcgatagctgcattctaccaccaattcgttctgagagcttcaggttctaagtcttttggatcattcagaagtgctgccaacgtctaaacacatcaaaccagatttctcaagaataaatgaagttgagatctctctgtacaaatttaaatcaagcactggcagtttcaattcccttttttaatattggggtttccaattggctctttggggaattttcttcgggggaaatggtttttctttcggttttaaaccaagtggttgggattttta

SEQ ID NO: 161995 - DNA, 413 bp, Arabidopsis thaliana columbia
gaaaaaaaatggctgcttcatcttcctctttcactctctgtaatcacaccacacttggtactctccctctgagaaagaccctggtcaccaaaacccaattttcagttcccacaaaatcatcagaatctaacttttttggctccacactcactcactcatcgtatatctccccagtctcttcctcttctctcaaaggcttaatctttgccaaggttaacaggggtcaggctgcaccagacttcacactaaaggatcaaaacggaaagccggtgagcctcaaaaagtataaagggaagcctgttgttctctacttctaccctgcagatgaaacccctggctgcaccaagcaggcttgtgctttcagagactcttatgagaaattcaagaaagctggtgcagaggtcattggcatt

SEQ ID NO: 161996 - DNA, 387 bp, Arabidopsis thaliana columbia
gagacaaattccgtggttgggttgggttcattgtccccatctctaatcgaataacagccggttgtgacattcttctcatgccgtcgagattcgagccctgtggtttaaatcagctatacgcaatgagatacggaaccattccagttgttcatggcactggaggactcagagatacggttgagaatttcaacccttatgcagaaggtggagctggtactggtacagggtgggtcttcactcccttgtcgaaagatagcatggtctcggccttgaggttggctgcagcaacgtacagagagtttaaacagtcatgggaaggattgatgagaagaggaatgacccgaaactactcttgggaaaacgctgccgttcaatatgagcaagttt

SEQ ID NO: 161997 - DNA, 225 bp, Arabidopsis thaliana columbia
  unsure (1)..(225): unsure at all n locations
cgcgtccgnccaaaccatcactgcttactgttataagttcaagggctggcacattctaccggggtcgggcaccttttaaaccgggcttgagtaaanttgtaaacaaattgcataagggccaagttctatgcattgttgaagccatgaagttaatgaatcaaatagagtctgaccataccgtaaccctaatcgatattgccgcataagacggcaagcctgtcagcc

SEQ ID NO: 161998 - DNA, 493 bp, Arabidopsis thaliana columbia
cttcatcgttaacccgacagaaaaacaagagaaagtcacattcatatcaaaccctccagacaatgttttcacttggaagatacttcgtttctctaccttggaagataaattctattactctgatgattttcttgttggagaccgatactggagactaggatttaacccgaaaggatctggtggaggaagaccacatgcacttccaatcttcctatatgctcaaggccataaggcaaacgcagttgttacaaacacttgggggagcggttaatctgcggttaaagaatcaacgaagctccaaccacaaacaattatattctgcagcttggtacccgattcgaagcgattatggtgggggagtgaacaatataatattgatgtcagagctaaaagatgcatcaaaagggtttatggggaatgatgccattatctttgaagctgaaatggttaagggtcttgtgacaaacatagtctccgtttaaatatcactact

SEQ ID NO: 161999 - DNA, 430 bp, Arabidopsis thaliana columbia
ttccgcccatctctgctctcttttattttctcagaaagtttttttttttttttccgaatggcgttaatctcattggggttcccattgatagcaatggcgacggctttcgctcccactaagctcactgccacggttcctctgcatggatcccatgagaatcgtcttttgctcccgatccgatgggctcctccttcttctttcctcggatccacccgttccctctcccttggcagactcaatcactccaacgccacccgtcgatctcccgtcgtctttgtccaggaagttgtcaaggagaagcaatccaccaataataccagcctgttgataaccaaagaggaaggattggcgttgtatgaagatttgatcttggtagatctttcgaagacatgtgggctcaaatgttttaccgaggcaagatgtttggttt

SEQ ID NO: 162000 - DNA, 383 bp, Arabidopsis thaliana columbia
aacgctagggtacaaatggtatgccacgccctatcatttcctgcgagataaaggcggagtctctctccagttattttgctcatccatcgattcttagagttcaaaatggttgatcaagttcagcaccccactattgcgcagaaagctgccgggcagttcatgcgttcaagtgtttccaaggacgttcaagtgggttaccagaggccttctatgtatcaaagacatgcaacctacggaaactactccaatgctgcatttcaatttcctccgacatcccggatgttggcaacaactgcttctcccgtgtttgtccaaaccccaggagagagggggttcactaactttgccttggactttctgatgggtggggtttttgttgccgt

SEQ ID NO: 162001 - DNA, 355 bp, Arabidopsis thaliana columbia
ccaatctccagaaaaggggagaagcaaaaatggtttctctgaagctccagaagcggctcgccgcatcagtgatgaagtgcgggaagggcaaagtttggctcgatcccaacgaaagctccgacatctccatggccaattcccgccaaaacatcaggaagcttgtgaaggatggtttcatcatcaggaagccaaccaagattcactctcgttccagagctcgcaaaatgaagattgccaagatgaagggtcgtcactctggatacggtaagaggaagggtacccgtgaagctaggttgccaacaaaggtactgtggatgcgtaggatgcgtgtttttaggcgtctgttgaagaattc

SEQ ID NO: 162002 - DNA, 379 bp, Arabidopsis thaliana columbia
caaaaatggttttgcaaaagcttcctttcattgggctgcttttgctcctgaccatggtcgcctttccagcaaatgcagatggacctgtttgcccgccgtcgaacaaactaagccgggcaagtttccctgaaggttttttatttggcacggttactgcggcataccaggtcgaaggtgcgattaatgaaacttgtcgtggaccagccttatgggacatctactgtagaagatatccagagaggtgcaataacgataacggcgatgtggccgttgatttcttccatcgttataaggaaggattccaactaatgaagaatctaaaccccagccgcttttagaatgtctatcgcatggccaagaatatttcctcatgggagaa

SEQ ID NO: 162003 - DNA, 413 bp, Arabidopsis thaliana columbia
cctaaagaaaatcaaagcagcagttatggccgacgtagcaacaaagcaccccatggaagatgaggtgaagaagacggaggcgtttagtttggtggggaagctagagacagacgtggagatcaaggcttcggctgataagtttaaccacatgttcgttgggaaaccacaccatgtttccaaagcaagtccaggcaacattcagggatgtgatctgcacgaaggcgactggggcacagtcggttctatcgtcttctggaattacgtacatgatggggaggcaaaggtgggcgaaggagaggatcgaggcggtggagccagataagaacttgatcacgtttagggttatagaaggtgatctgatgaaagagtacaagagcttcttgctcaccatccaggtgacccctaagcctgga

SEQ ID NO: 162004 - DNA, 331 bp, Arabidopsis thaliana columbia
gttaaaccagagtaaagcttgaatctttgtactaaaagaatggcgtctttgggtgtgtcggaaatgcttggtactccccttaacttcagggcagtttcaagatcgtctgctccgttggcatcaagcccatccacgttcaagactgttgctctcttctctaagaaaaagccagctcctgctaagtccaaggctgtctctgagactagcgatgagctcgccaagtggtatggtcctgacaggagaattttcttgcctgatggtcttttggatagatcagagatcccagagtacttaaacggtgaagttgctggagattatggttatgacccat

SEQ ID NO: 162005 - DNA, 345 bp, Arabidopsis thaliana columbia
ggagggtacaaatgggataacaatgaaaaacatctgaggcctgagacctgctacagtcctcccacagttagtggatgcttccaccttaaagagagaggtagcagaaggtgttgatctaatggttgtaagggagcttacaggaggtatttactttggagagccaaggggcataaagaccaatgaaaatggcgaggaagttgggtttaatactgaggtttatgctgctcacgagattgatagaattgctcgtgttgccttcgagactgctcggaaacggcgtggcaagctgtgttctgttgacaaagctaatgttttggaagcctaatttttatggaggaaacgagt

SEQ ID NO: 162006 - DNA, 399 bp, Arabidopsis thaliana columbia
gtagttaaacaaagattacgattatggccacatcagctatccaacaatcctccttcgccggccaaacggttcttaagccctccagcgacctcatccaaaaggtgggcgtcttgggcgggggccgtgtgaccatgcgtcgtaccgtcaagtctactccccaaagcatctggtatggaccagaccgtcccaagtacttgggaccattctcggagaacacaccgtcttacttaactggagaataccccggagactacggctgggacaccgttggactctcggttgacccggagacattcgctaagaaccgtgagcttgaagtaatccacagcagatgggcttatgttgggtgctctcggatgcacattccctgaaattctctccaagaacggtgttaaattc

SEQ ID NO: 162007 - DNA, 348 bp, Arabidopsis thaliana columbia
gaaattaaaagtgttcttgttgctgtagaacacaaacagaccaaacaaaaaatcaattgaggagtctttcagtcgttaggggaagcaaatagagaaatggctagctttactgcctccgtttccaccgtctccgccgttcgtccggctttccttctcaagcctaccgtcgccatctctgctcctgttcttggtttgcctccaatgggtaagaagaagggaggagtgagatgtttaatggagacaaagcatggtaccgtttcagtcatgggggctggagttttcgctcggtaaccattttttttaaaccggtgtgcttgagttatcctcccaatggctttttctttcttg

SEQ ID NO: 162008 - DNA, 341 bp, Arabidopsis thaliana columbia
  unsure (1)..(341): unsure at all n locations
gggaannccggggcggaccaaggcgtccgattaattggccaaaggttaggggggattggttggggttttggcatgggccaaggcgaagccctttggtttcctgggtttttttggccggtaattccagtatttttccattttccatatcggaaagggggaatgggggatgaacttttccaaagggggtggtccaaaggcggaggggttattaggacaccagggggggacgttttactccaaacacggtaccacagccgtttttgggttccgaaattttttccatgactgggtcgcaaagtggggggatgcgtctttgttgttagagacagcagggggggtgg

SEQ ID NO: 162009 - DNA, 418 bp, Arabidopsis thaliana columbia
  unsure (1)..(418): unsure at all n locations
aaaccgggccgccaacccgtccggaaattgncctggttacttggttttggattagcccataaataaggggggtatctggcgtttattttctaaggggaaaaggccaagttccagtattaagggttaaacccagaatttccaccaacagccaccttcttgtggtgggggtacccaaacatgggaccaccaaaggattaataaattttggcaccagagggaaaacagaattgggggctccggcaaaaaccaccagtaactttctggtaagaccttgaggaatggcattaccaacatgggaggaaacagaccagattttgttccggaagaagttgaaacaccaagcacctccaacagattaaggggcttaagggggttggaccaaagccaaaacctggaaggtattatctttattccatgg

SEQ ID NO: 162010 - DNA, 391 bp, Arabidopsis thaliana columbia
ttttggtgggaaaccggggtcggttttggaaggaatgtttttggttgccaaaaatggggtgggggttggaaaaaatggaaccggggggaaagccacggattcagaaggggttgaacccaaccaaaaggggaaaccccacctggaggagggttcaaaaaaaaccaaatttggggttggtattggacccgaaaagattgctggtgattttgaagaaaccaccgggaagaattcagaaaaaacccttggtgaaactgaaaagggccctgaaaaaagtagggttgttttcccagttggggaccaggctgaattaccaaaggagtcaagccctggagggggggcttggtttacccaattgggggaatcccagaccgggaagaaggcccaggtgtcc

SEQ ID NO: 162011 - DNA, 393 bp, Arabidopsis thaliana columbia
  unsure (1)..(393): unsure at all n locations
aattanggggccgaccacacgcgtccgacgcacccgtaaatctcctggttaatggggggtttagaaccccatatgggtggttggccatggttaatttggttttagggacccatttagtcggggcttaccaagtttattgccaacccctttttgccttcgtcgggagggaagcctttggggggtttccagggggcgaattcgtaacaaaagagatcaggatccaccttttccgggggaggccttttaactggaattttttaaggctggtttgggggacgtttttggggaggccaccaccgtggatctaaatgttaaggccttctttaaacgaggtagtgggtctttggggggccatgggttttgggcctttaacggtttatttccaaggggaaa

SEQ ID NO: 162012 - DNA, 350 bp, Arabidopsis thaliana columbia
aaaagcattataatttccaattaataaaagttaaagccagggctgcatttttttttgccccctttatgataatggaagaggaagggggattcgaaccggaggttgcggaagtccaaacttgggggagctaaaaggggttaaggctaccagggcgccctaccactgcccgggccgggggggctttacggggccatttaaggcagggttatgcttggaccgagagggttaaaaagctggggagaccgctaaaaagccataaagccaacggtccggccttttgaacctttggagcgtgggaccttgttcaggggaccatgatggttaaacatttggcccccatttattttttt

SEQ ID NO: 162013 - DNA, 423 bp, Arabidopsis thaliana columbia
cggggcggacccaggcgtccgggttttatgggcctggagttaagtgttgttttcacggccctggaaagggaggaaggttttatggaggaactgaatcaactaaggccggaatttgatcctggaatcagaaagctggctaaaggggttttaataaatccaagaaaaattgcctcccatcctggggtttttgcaggcaaaataattccagcaaaggtggggaaaccagggctgatggaactaattgttgccaaaaccaaggaacccagggatcctttgggggttgacgctgctttaatggttactggaggagctccattaaccaagggtctgggcctggaaaaaataaaggttcccccccaaagaggttttataccatttgttgagcgaatgcgtgttattgatggaaatggaaggctggttccc

SEQ ID NO: 162014 - DNA, 320 bp, Arabidopsis thaliana columbia
aaaacccgggccgacccacccgtccgtttgtccaagggctttttttttccttttttctgttccaacggtggcctttccggttggggcgcgattatggacgttccttcaaacggccttaagtcctccgttgctttccaagccacccgaagggctaacaacgccattacttcaataacaggcaacggcggaggagttaactgcttgcagggttggcctccgatgggaaagaagaggttggggactttttctaaccttccggcccttaccgatcccgaattgcttaaggaggttgcctactttatcctcaccaggtggattct

SEQ ID NO: 162015 - DNA, 387 bp, Arabidopsis thaliana columbia
taattaactaaggagcctttaacttgccccatattttaaccgaaagggccgcttggacaagggttttttcttttcctgtttggaccggaagggccgttaagttttccccgggggcctccgaagattttggaaccggccgaataaccatgcgcaaagcttccaagccaaccggtccatccggaagccaatggtccggatccgcccgagtaaagtcctggggtccattttccggggggcctccgggttacttaactggaaagttccccggggattacggtggggacactgccggtttttccgccgatcccgagaccttcgttgggaaccgtgggctagaagtattccacagcagatgggccatgctcggagccctaggttgggttttcc

SEQ ID NO: 162016 - DNA, 409 bp, Arabidopsis thaliana columbia
  unsure (1)..(409): unsure at all n locations
ggggccgcccggcgnccaaacttcaattaaaaaaatttggcttccattgttttttcaagcgccatggcgggaacttaatgaatccgtggttccccagttccaatcagtttccgttcctttccataagccaacacacattcctttttgggcttaaattaaggcaccgtcggggggggccgtgtaacagccatggttccatccagggtcaggttcataacaccagagggggagttaggggttgggggggacaccgacgcttccgttcttgatgctgttgaggaagctggaaccgatttgccttactttggccgggttggtttttgttcaggctgtgctgtgaaagtgttgttgggatctgttgttcagcctgcccagattttccttgaggatgaacagatgggggaggggt

SEQ ID NO: 162017 - DNA, 445 bp, Arabidopsis thaliana columbia
  unsure (1)..(445): unsure at all n locations
gaatnnnggggcggacccaggcgtccgccaaaccataataataataatttttgggggcctgaggaaaggggtgggggaccagagaaaagggcggcccaggccctggggtttttttaactaacctcctttgttaaaccagttggccagattttgggttaaaaaccagttgcgtttgcctaacagaaaaagagttccttggtggttaaagttgttgcacctccacctgtaaggcagggggccaccagaccatgggggttggtttaatcgaaaagttttttttactgggttggcagttaacctggggactttggtttcgaccttttgggtttttaagacccagagggtcctgggggattcatggagccaggatggttagcttccggggggatcataaacggccggttcgccatgtggggtgcagctgaagctatggttcctgagattt

SEQ ID NO: 162018 - DNA, 388 bp, Arabidopsis thaliana columbia
ttaagggggctggaaagaattgcaggggatgttttgaataaccggaggttttggagggtaacaaagccttttttgttgggagaggggggaaatcttgaaattaggataaagcctgatcctgataacggacccataaccataactgatactggtttgggaaggccaaaggaggaactaatggatggcctgggaactatggttaaaaggggtccttcaaaattttggaaggctttaaaggaaaacaaggaccttggggctgccaacggtttgatcggccagttgggggtggggtttaactctgttttttaagtggctgaaaaggttgttgggtccaccaaaggcccaaaatttgacaggcattatgttgggaaatcggttgccgatagta

SEQ ID NO: 162019 - DNA, 400 bp, Arabidopsis thaliana columbia
gaattggggacggacccacccgtccggaagaccatgtagtttccagtggtttactggtccatgcttaagggggaagagggggaccaaaccagggttttaataaaggaagttggggggaatgggggcttttttgggatagggaaccagggattaccacatgactaaatggccaggatcgggaggttgccaaaggcccattccaggacatgccaggaccaaaggttaaaggcctggctcaagtccaagggttgggttaatcttgagacaaaagtcgaagatgtcgttggggaaagaactttttacgttggtaacctccctaaatccaatttaaaggccatttaaaaggggttggtggaatccaggacggccatgaaagactttgttaggagactggggaatt

SEQ ID NO: 162020 - DNA, 371 bp, Arabidopsis thaliana columbia
gggccggcccaactcgtactttttttcctccgattttttttcccactgtttttccccccccagggccaacaccgggggtcggtttttcatttttttaaccaaaacccactttcccttaactgaccgagttgtaaaatcctccaggacaccttcccaggttgtccaaccaatcaacggggacccttttcatcgaagttgtgaaactccgctgccataaacccaatggaccgctcggttcttttccaccctccttgatacccttccctccttaaaccctatctaccctggtgcgaaaggggcccagccccatggttcttcattcccggcccttttctaaaaacttgtccctccaagaacccttctttccgccg

SEQ ID NO: 162021 - DNA, 393 bp, Arabidopsis thaliana columbia
  unsure (1)..(393): unsure at all n locations
gggcccgcccaccgcgncctaaaaaaggaaacccttaaaccaatgtttctttttcctccccaaaccagggctttgtgggggggtgcttttcacggaagggctgtaaaccctgcctattaaaatgtcctggaacgcggcctttcgaccatatgtaaggttgtggccaagccaaaggtcccataagccttccaatggaccggatctacccaagttaagtacttgggccaattcccagggatgcccccttcttaccttacaggggggttccctgttttctccaatgggtacatcgttggttaatccccttacccaaatccctttgccagtaaccttgggcttgatgtatatcaacacagcttggacaaaccttgaatcccaaggggggattttcct

SEQ ID NO: 162022 - DNA, 413 bp, Arabidopsis thaliana columbia
cttttaagaagccaacgccggttttaaaagtttaagccgtttaagggtttaatcctttggtggggatccaataatgggggttgttgaaccaaaggttgttgttgttggagttccaaagaggaggacgtttaaaaagtttgctttaaagggagttgatttcgatgtttttttcgatttgtttactgaggatctggcaaggttttttttttttggatttcgaggaaggttttttagaggtttgccagggaagccaatggttttgattaagaagttgaggaaggcgaaaggggaggcaccacagggtgggaggccagaaccagggagaaccaatttggggaacatgatcatggtccttgaaatgatgggaagcataattggagggtccaacggaaggactttaaaccaggttggga

SEQ ID NO: 162023 - DNA, 418 bp, Arabidopsis thaliana columbia
ggaataccgggcccgaccacacgcgtccggggggaagtccggggacgggttttaacagtgtgttgttgcccttcctcgaagaaaccatggaaccatttttaaggtttgggtggatggaaaagaagggattccattagcattcccaacgttggggtttttttaaagagaaaggagacctcaacataatcataacttaaaggttggagcaatgaacgcattgttgggggttttttcgaaaattacttgggggaaaataatactaaactgggactgggatttgtccgcaaccacctaaaagtaaacacgcgacgcgttttgaatcctcctggatgggaaagagggaaaggagattgttttcgggcagtttccgaagtgttttgccattgtaccaggaaatgatttgtttggaagcatgatg

SEQ ID NO: 162024 - DNA, 425 bp, Arabidopsis thaliana columbia
aataacggggccgacccacccgtccggaaaaatcaaccacaacggttaactggacttttaagttggggggaatggccaggcgtgtaatggaggggttcaagaaggaggctgttgaaataaccaagaggcccttaaagtccccttgggtgtgggccaaacttaaggccgaccgtgggcgtggtttaaccatcgattttgttttatggaggttcgggaccaccaagtcctactgcccagtcattgatgccccaggccatcgtgatttattaaagaccatgtttcctggtccctcccaggctgatggggctgttctaataatggactccaccactgggggtttgggggttggtttctttaaggatggtcagccccggaggccccttttttttgttttaaccctgggggcaaagcagatgatttgttgt

SEQ ID NO: 162025 - DNA, 419 bp, Arabidopsis thaliana columbia
gaaaccggggcggacccacgcgtccgaaacgttttgtttttggagatcgggaggacttttgggttggtttacaccgcttacgcaaaagcggtggacccaaagaacggtggtttgggaccaatggaaccaatggccataggtttaatggtgggggttaacatcctggccgggggggttttaaggggggtttcaatgaacccagccgttgttttcggaccagccgtcgtaggttggacgtggcccaaccactgggttaactgggctggtcctttattgggggggggactggccggaattatttacgactttgttttaatggatgaaaatgccaacgggcaattgcttaccaccgtttactgaagacgtaaaattcaacgttgttaatttgatgaatttttcgggattggctttttaaattt

SEQ ID NO: 162026 - DNA, 439 bp, Arabidopsis thaliana columbia
gaatccggggcggaccaacgcgtccgaaaggagttggaggtttcctgaaccatgattttgggtaaagaagaggtcaaccagttgggagaggttgttgaaaaggactcctacttccagatgtcctatgaggatctaccaatttggggattaatgggaagggtggccagggttttaaaatttgatccgggggaattaaattttttttggtccaagcccattcagttggggattttatccaatagggcccgggggatcgagatcagggttggaagggatcctaattcgttgggggatctaactggggtaaaggaagttgatgcatagtttttgtccactgtgaagtggaaggaaactgaaactcctttggggaaaggaatggaaaagtcttttatgttttttttttttcccaatattttggaaatccattggttttcctttt

SEQ ID NO: 162027 - DNA, 447 bp, Arabidopsis thaliana columbia
ggaataccggggccgccccacccgtccgaggaaccattgtggaagtttttgaggcagattataagcggggatcctccttaagggccgttcggccggcaaaagggcagggttcttaaaatccttcgttgccggacccggggcccgtggttccggccattgcttggtggccggactgaagaagtccccgggcaaggtcttccgcaaggcctaagcgaagaagacggcgaagaaatcaagggtgaaaggtttcatcaggctcgggatttcccagcttttgatgcctccacgttccacgctcgtttgtgttttgaaggaggtggcgcttttggttgctttaaggagtagggttaggagggtgctctgtttaagggaggttaaggttaggctgggggaacgtttaaggactgggaggaccagttggttttttactaactttatggttttgaa

SEQ ID NO: 162028 - DNA, 375 bp, Arabidopsis thaliana columbia
  unsure (1)..(375): unsure at all n locations
ggaaaacggggccgacccaggcgtccgntgaggaaaaaggtctggttgggaaggaaattttggttgtggacctgcctgaaagtccgggggcggttttgtaggttgcaaaatgtcccctgcctggggattttccggggggccacccacaccggagacttttgttttgggcgtggaaccggcgttgaaaaataagtccggggtttaaggggggagtaacaccgttgggaacgatgttggcaggggtggatctgcctgaagggtggatcctggcccctgcaagggaggaagcctttttaaataagcagggaaaatcgggtctctttaattaattaggtttttcaataggtaaaccttttttgggttggggtttttggg

SEQ ID NO: 162029 - DNA, 398 bp, Arabidopsis thaliana columbia
tttaagacagttaaaattaattccaaggaacctgggttgggttgggttccaaaggaggtgggggttaaggcaaaaatgtccaccggaaatgaaatttgtagagggaagacaaagggtttcttaagggaaatttttatgccaaagggttaattaccatggagggatttaaaaaaggttggttttgacagaaagtaaggggttgtttggttgaagcagaaaaagagctttattaacaggttaacagagatggttaagttggtttcttatggaaccgaagcaccagcctttgttgaaaccggtaaaataaagaggttaattggagtaaaagccaaggaatttttaattggggtcattttaaaggagatttttacgggggaacccctaacaaagataacttt

SEQ ID NO: 162030 - DNA, 367 bp, Arabidopsis thaliana columbia
gggccgccccacgcgtccgccaggtacaaaaggaccaaggttagttggggctttttcaatggcaagccagttaaggagcgggtgggcttccgtttttttttttaagggtctcgccttcccgaagggcttttccggggctcctttcggggttattccgcccaaaagagctttttccttaattgtccgagctgttaaatccgccaggacaccattccaggttgttaaaccattaaacggggatccattaatgggaggttgggaacctccggtgacttaaagccctttgttcggtgggaacttttccaacctcctgggttcccgtaccgcctaaaacctttttctccggggtgtggaagtggccctggcc

SEQ ID NO: 162031 - DNA, 311 bp, Arabidopsis thaliana columbia
aaaaaaggaggataaccacaacattttttttggtttccgctagccttccctcggggggggggtttccatccctggttaagccccccatggctgttcaattaacagctttaaaaacatccgttaaattcctggccaccccaaaaaccaacaaggcaataatttcaatttaaagcaacggggaaaaagttagttcaataaagttgtggccaccaattgtaaagataaagttagaaattttatctaacttccttaacctttttgactttaaatgggttaaggaagtttcttacttactccaaaacaggagaatt

SEQ ID NO: 162032 - DNA, 414 bp, Arabidopsis thaliana columbia
cgggctaattggggaccggggaaaaataaaccattggttcttaaggccgccgggatcttaaattgggccataacacccgcggaaacctcgggggtaaggaaactccattttttttaaacaaccaacggtccaaaatccttttctttaaccaaaaccgaattcggggccgggaaaccagattcttccgccgccgttgttgaagccccggccacgaaggaggctccggggggattaacgccaccgaagttggaccaaaccacacggtttcggattttggttggaggcaccgggggttttttacgtaaggggcagggggaggagtcttacgtaataacggggaactaaccgaaggaccagatcttggggatgccgccggggggggcagcgttcatgaaagagggtccgatttttttg

SEQ ID NO: 162033 - DNA, 405 bp, Arabidopsis thaliana columbia
gttggtggttttgggttttttaacacagcaggaaattaacaccaccaaccgggccacgcttaacagatcaattaagtaggatcgccatggaaaagggtttttccagacgtttgggggttaacaattttaaggtaaagggttccttggttaagttaactttggccaaatcctccggggctgggtgggggtaaaagaccaggtttaactatggttttttaagggcaggactaaggcttcccgttggattggcctttggggtgggggtggcttcttattaataaaccgcagggccttatccgaaaggccccgccgggatagccatagaatggttgggtagaagtaggaaggatgattggccgatccagccgattgtttttgcaattggaagtccttgaccgggaaggg

SEQ ID NO: 162034 - DNA, 371 bp, Arabidopsis thaliana columbia
accggggcggcccacacccttccgaccttgggggaagacccattggtgttccaatttacagaggaagggttaaccagaaaactgggtgggaatccaatccagggggttttgcaggtggccttccttgagctggatggagcgatggagccaatcgttttggttggtcgggaccttagaacagggaagtaacatgctttcaacaggagaggggagcaactttgaataaaagcgattcgatggggtgggctaaaaagaaaaactaaggcagagaagaagctggcaataactgttttaagtttcccacctgtaaaaggtaatgtagggactgaagcttacctaaaggggttggcttccattttttcggggttaaa

SEQ ID NO: 162035 - DNA, 411 bp, Arabidopsis thaliana columbia
accagggaacgccctaatgagtgggggcaccttaaacggcaaccgggcggggggcttggcctactggccccggggggttccatttacccaggggggctgcaccggggttcctaaccttaaaaccatggccggtccaaccccagaccgtaggaaggttggccgtggccttaaatttgccgttaaagccgttggtcccggtttaaacattgcccgtgcggttggccttcttagcgcttgcaaggtcatttttctttccaaaataagggccggaaccaactgcaccaccggggggtgttgagcgacggtcaattgaagttcctagcggttgtttcgattattttttattcgtggggatattattaattaaagatgttcgaagggcgtgcctcttttaaatttccggcctttttt

SEQ ID NO: 162036 - DNA, 421 bp, Arabidopsis thaliana columbia
accaaaagcttaaccggggatcaaagccccttatattggggaccattccaaagccaaagaccacttcctgtaggaccagggaatgcaaaaggcttcctttgcccagggttccccaatccaggaggggtaaggccagttttgttgttaagggaaggcgtctttttgcccgaaaccaatttggttttgggggtcagactaagcctgtcttccacaaaagggttaagaccacgaaaaaaatggttttggggtttaagggtcaaagttgcaggcccttttggcagggtcctatcaagaggggcaggcttttcaggatcgggggtgccaggaggggaaggggaccatttttgtttaaggtgggtttaatctaattttttgcgattttggtcctggctggattgggaatccattggttttagctttt

SEQ ID NO: 162037 - DNA, 437 bp, Arabidopsis thaliana columbia
ggccgccccacccgtccgcccacattattaattccagtttgtttgggctttatttctttcatcataacctctcctgggggattcatggttattcaaaaggctctaaccgttccttttctaatatctctcttggtcctccacctcgtccaggctgttgtcgaaacctcccagaggaaaatggtttccccaaagaaaaccttttggggaagtccttgtgtaccccggtccagcctttcagggggcccgaggttgtttaccagagcgtccggaccttgttgctccaggtccacctgtgggcctccgggtccgtccggaacctccgccaggggccagggttccgctggcctaaccacccccgggggcccccgcaggtccccataagaggaaccaaggcttttattggctgcggttaaggggccaatgtcgttttgtttgtt

SEQ ID NO: 162038 - DNA, 341 bp, Arabidopsis thaliana columbia
aaggaggaggaggaggaagttttgggggggtttcatgggcgatataagtggcagtttcgtcgtttatggccgggagggttcaacgggttccggccgattcaaccctttgttccgccgtccttaatattcctcctggttcattgggccgatcctttttaaccgttccgtggaagttggtttaaggaattggatggaaaaaagttgaattgttgaaaacaggagtttttttagaggaaacctgttccttggttccaaacgaactcttaacagttttgagggaaaagtgggttggttttgagaccaaatctccggtcctaatatatggggggggggccatggtg

SEQ ID NO: 162039 - DNA, 336 bp, Arabidopsis thaliana columbia
aacggggcggcccaaggcgaccaaaaatgatcgggccctgggttttttttttatttaggacggggattccatgccaggggtggggcgtgtgttttaagggggaattaatgttcggtaaaaaccatttttaaccgaaatatttgaataggattttgaattgaaatttggtgtaggaactttaggccatccttggggtattgcacttggggcaaattttaatcggttggtttttgaagcttttgtccaattttctaacaaagggctcgtaactttttttaaaggtaaaaaatttatccgatcagtttgtaaaggaagtcttaaattagccgagttttt

SEQ ID NO: 162040 - DNA, 432 bp, Arabidopsis thaliana columbia
  unsure (1)..(432): unsure at all n locations
aaaccgggnccgcccacggcgtcggaaaaggaaaaaaaaaccggttttgggaggatgtttttaaacctcaacttttttttccttctggtttggtttttaatcctaacaatttggtccggggccgcccaagcttgggtttccgtaaggaaaccacttgtgggccaccgcaccaaaacggggttggcagccgtcgccggaggaggggggggaaaggagatgttgaagggggggaagcaaccaagtggttgtacctggtttaaggggggaggggttttggaggttttttaccttttttacgattaatccacgtgccttttaatcgccggggagttcgactgtttaaaattgggccgaccagccaaacagttctttagagcctttgggcggcctgattaatgcaccgtcccagggttgtgtggggaagcgtttttg

SEQ ID NO: 162041 - DNA, 400 bp, Arabidopsis thaliana columbia
  unsure (1)..(400): unsure at all n locations
ggaaatnccggggcggccccacccgtccggttgtggccacacaaccacgcggttaactgtaccaccggccaggaggggggacttaatatgggaccttccttaaaggatcgaataaaactgggaagcaaacctccagggcggggtaaggcaactttttgcttccaggattaccgttaagtcgaaaatggttaagttgggcggggccaaatttggccttttttccaggtggttcttttggaaataatgtccaaaaggcttcggatctttaagttcgtccaagaccgttgtttaaccagttcctcccgggggggggctggttccgcccagttattacgttcctttttggcccataatcggtttccaatgatccgcaccgtttaaatcctggtttggggggttt

SEQ ID NO: 162042 - DNA, 380 bp, Arabidopsis thaliana columbia
ccgttgggggttaagttactaaaacccgggttttccaatggcccaaacctaaattttacgaatttttaaggattcatttggggatattaaatcgggaccgataaataaaaggtgggcctttttttggggctttttttcttcggtttttcggaagtttttcggatccgatcctttggggggctcctaggggtggtggggagggggttttggaacctggaaggcattagacacttttggtttcgcaagggggccgagtttatttttaattttttggaacgagctcagatttgttccaccgttgttcctaatgccagggatgcctttattttggaggggtttaagggttctttattggagtttttggttggggaaatggaaag

SEQ ID NO: 162043 - DNA, 432 bp, Arabidopsis thaliana columbia
gggtccgcccaggcgtccgtttttttttttaaatctggatggtttttttctaaattaatgtcgaggatgggggttttccagggccggattttgggggtaattgtggttgggggccaaaaattgaaagaaacggatgggttttaaggacaggatcaatacgtggtccttgagtttgggggcagaagtaaccgtaccagaacctgaacagttgggggaaggaacgttgttttcaaagagaggttaattttaattttgatggaagggtttagggatcttaaggtggctgcctggaatagaaccattttttcaattgttgacttaattggcattgcaacgattaaattgcagaaggttttttttaaggattacaacaacgtgccctggattttgcaaagaaaaactgggaggtaataacattggctttactagttt

SEQ ID NO: 162044 - DNA, 292 bp, Arabidopsis thaliana columbia
cgaccacgcgtccgattaattagacaaaagataagagagaattgtgagagtgagagcaatggccaatgcaaagggctttggtctcctcggcttctgtggtcgtggattacagatattctccatcttccatatcggaaatggggaattggagatgaactattacaaagagagttgtccaaaagcggaagagataataagacaacaagtggagacgctttactacaaacacggtaacacagccgtatcttggctccgtaatctcttccatgactgtgtcgtcaagtcgtgtgat

SEQ ID NO: 162045 - DNA, 395 bp, Arabidopsis thaliana columbia
  unsure (1)..(395): unsure at all n locations
agaaaaccggggccgaccacgcgaacgaaactagtcccttttacctggttttttttaccccatcaataannnnnnaatgtngggatttatttcaaaaggggcaagacccaacctccanttataatggctcaacccatcaataccaccaacagccaccttcctgtattagcggtaaccaaacattgtaacaacaaatgattcatcaaatatgccaacagattgcaaacagcaatggaggctccggtcaacaacaacaatcactttctgttcagaacatgatgaattgcattaccaacatttgaagaaacaaaacatattattttcccgcagtagttgaaacaccaatcacctccaacagattcagaggcatcaaggggttataccaaaaccaaaac

SEQ ID NO: 162046 - DNA, 291 bp, Arabidopsis thaliana columbia
  unsure (1)..(291): unsure at all n locations
gcgtccgttctggtgagaaaacggagtcggttgaggttttaatgttttttgatgacaaaaatggtgagggggagggaaaaattggagagggtgggaaagacacggaatcanaaagtgatgaaaccaagcaaaaagagaaaacacaactggaagagagctcagaagaaaacaaatctgaggatagtaatggaaccgaaaagaatgctggtgaatctgaagaaaacaccgagaagaagtcagaagaaaacgctgttgaaactgaagagagcactgagaaaagtaaggatgttt

SEQ ID NO: 162047 - DNA, 345 bp, Arabidopsis thaliana columbia
  unsure (1)..(345): unsure at all n locations
cccggaaatctcctcgctcatggagtttttttaaacccatattgnntgctncacagtgctgatctcactataggggggcatgtaaacnncgcttaccaagtttattgccaacccctctttgccttcgtcgagaaggaagcctctaggaggtttccagagagcgaattcgtcacaaaagagatcaagatccaactcttcccggggaagccctttaacttgaatctcttcaggctcgtatggaggacgttcttcgtgatgacaacaacgttgatctcaatgttaatgcctttctttaacgatggagtcggtctcttgggggccattggtttttggcccttaacggtt

SEQ ID NO: 162048 - DNA, 396 bp, Arabidopsis thaliana columbia
  unsure (1)..(396): unsure at all n locations
cgaccgcaaagcaatatcatttccaatttataaaagtttaagtcatggctgcatctttctctgccccgtctaggataatggaagaggagtggggattcaaaccgnaggttgcggaagtgcaaacttggtggagctcagagaggttcaagctaacaaggcgcccttacactgcccgtgacgtggtggctctacgtggccatctcaagcaaggctatgcttcgaacgagatggctaagaagctgtggagaacgctcaaaagccatcaagccaacggtacggcctcttgcaccttcggagcgttggaccctgttcaggtgaccatgatggctaaacatttggacaccatctatgtctttggttggcagtgctcgttcactcacacatccactaatgagc

SEQ ID NO: 162049 - DNA, 438 bp, Arabidopsis thaliana columbia
  unsure (1)..(438): unsure at all n locations
ggttatatcggtcttgagttcagttatgttttcacggccctnggaagtgaggtaacttggttgaggactggggaactggtgcctgaatttgatcctgagatcagtaagctggctcaaagggttctaataaatacaagaaaaattgactaccatactggagtatttgcaagcaaaatcactccagcaaaggatgggaaaccagtgctgattgaactaattgatgccaaaaccaaggaacccaaggatactttggaggttgacgctgctctaattgctactggaagagctccattcaccaatggtcttggcctggaaaatataatgttaccacacaaagaggttttataccagttgatgagcgaatgcgtgttattgatggaaatggaaagctggttccccacttgtactgcattggtgatgccaatggtaaactgatgc

SEQ ID NO: 162050 - DNA, 251 bp, Arabidopsis thaliana columbia
  unsure (1)..(251): unsure at all n locations
ggaagaacaatggcttcctctatgctttctttttctactatggntgcctctcccgcggagggctttatatgtaggtcctggtcaggggaccataaaacctccccttccttcccaaccccccccaaggctaacaacgacattacttccattacaagcaacggcggaagtattaactgcatgcaagtgtggccctcgattggaaagaaaaagtttgagactttttttttcccttctgaccttacccattccca

SEQ ID NO: 162051 - DNA, 253 bp, Arabidopsis thaliana columbia
  unsure (1)..(253): unsure at all n locations
cagtttctgtgtaccataattgacctattagattttgtttttaatggtagattctgacgcgggggaatatccgccggagagccggcganaacaactcttcggcaaatacaaggtcggaaaattggtgggatgcggcgccttcgcgaaagtgtaccacgggaggagcacatcgacgggtcaaagcgttgcgatcaaagtggtgagcaagcaacggctgcagaaaggaggactcaatggcaacattcagagagag

SEQ ID NO: 162052 - DNA, 363 bp, Arabidopsis thaliana columbia
  unsure (1)..(363): unsure at all n locations
gttatataacataaagagctctttatacttgcgctttctactttctaccgacaatggccgctctcaacagagggctgctttccatctccatgctgtggaccggaaaggcacnnttaagctattccccggcnggcctccgaagtattgtggaaccggccgaatcacctatgcgcaaagncctcacaagcccacccggtccaatccgtgcagcccatggtaccggatcccgaccgagtcaagtaccttgggtccattctccggtgagctctccgagctacctcactggagagttccccggtgattacgggtgggacactgccggtctatccgccgatcccgagaccttctttaggaaccgtgagc

SEQ ID NO: 162053 - DNA, 393 bp, Arabidopsis thaliana columbia
  unsure (1)..(393): unsure at all n locations
gcgccaaaccatcatcatcatcatctcttggtgttagattaaaagagttgaggaacananaaaggggcggcacaagcactagtgggttcgtcactaacctcctctgttcaaacagctagacagatatttggctcaaaaccagttgcgtctgcctcacagaagaagagttcctttgttgttaaagctgctgcaactccacctgtcaagcaaggagccaacagaccattgtggtttgcttcatcgcagagtctttcttacttggatggcagcttacctggtgactatggattcgaccctcttggtctttcagacccagaaggtactggaggattcattgagccaagatggctagcatacggagagatcatcaacggacggttcgccatgttgggt

SEQ ID NO: 162054 - DNA, 245 bp, Arabidopsis thaliana columbia
  unsure (1)..(245): unsure at all n locations
aaggttctctcccaaatttttttcttncnacnncncccccccacggtccgtttcaatatccataaagtctgccccactacccaaaatccatcatccacttttaccatcaatcttaccaaaaaacattttaatctttcaattctaacactttttttttattgtttcttttcgaaaaataaacccaaatccttttaaaaactttaaatattcacttattccaacaattccttcactcttctcatacc

SEQ ID NO: 162055 - DNA, 383 bp, Arabidopsis thaliana columbia
ttagggagcttgtaagtaatgcaagtgatttttttttaagctgaggttcttgagtgtagcagaggcttctttggtgggggaggggggagatcttgagattaggattaagcctgatcctgataacggcaccatcaccataactgatactggtattggaatgacaaaggaagaacttattgattgccttggaactattgctcaaagtggtacttcgaaattcttgaaggctctaaaggaaaacaaggaccttggtgctgacaacggtttgatcggacagtttggtgttgggttttactctgctttcttagttgctgagaaggttgttgtgtccaccaaaagccccaaatctgacaagcaatatgtttgggaatcggttgccgata

SEQ ID NO: 162056 - DNA, 441 bp, Arabidopsis thaliana columbia
  unsure (1)..(441): unsure at all n locations
ggcgggcccaggcgnccggaagaacatgaagtttccagtagtagacttttccattttcaatggggaagagagagaccggaccagggctctaatcaaggaggctggggagaataggggcttctttgagatagtgaaccatggattaccacatgacttaatggacaagatcgagaagatgacaaaggaccattacaagacatgccaagaacaaaagttcaatgacatgctcaagtccaaaggtttggataatcttgagacagaagtcgaagatgtcgattgggaaagcactttctacgttcgtcacctccctcaatccaatctcaatgacatttcagatgtgtctgatgaatacaggacggccatgaaagactttggtaagagactggagaatcttgctgaggattttgtggatctactgtgtgagaatctaaggttagagaa

SEQ ID NO: 162057 - DNA, 312 bp, Arabidopsis thaliana columbia
  unsure (1)..(312): unsure at all n locations
aaaaaanaaacacaaatccaattttttttttttctcccccaaccannncnnnggcccccggtncttttaccagaggggcgggtaacccaaccccatcanatttcctcnnaagcggccttgtgaccataagtaaaactgtctccaagccaaagggtccatcattcatcccatggtacggatctgaccaagtcaagtacttgggtccattctccggcaagcccccgagctaccttaccggtgagttccccggttactacggatggaacaccgcttgtctatcctccgacccaaaaaccttctccaggaaccttt

SEQ ID NO: 162058 - DNA, 456 bp, Arabidopsis thaliana columbia
  unsure (1)..(456): unsure at all n locations
ccgcccaggcgnncgcctatagcagccaacgacagttatcaaagtttatgtccgtttagggttttatccttttgcggagagccaatcatggcggaggtggagccanaagttgctgctnctgaanttcccaagaagaggacgtttaagaagtttgccttcaaaggagttgatctcgatgctcttctcgatatgtctactgatgatcttgtcaagctcttctcttctcgtattcgtagaaggttctctagaggtttgacaaggaagccaatggctctgattaagaagctgaggaaagcgaaaagggaggcaccacagggtgagaagccagaaccagtgagaacccacttgaggaacatgatcatcgtccctgaaatgattggaagcatcattggagtgttcaacggaaagactttcaaccaggttgagatcaagcctgagatgattggtcactacctg

SEQ ID NO: 162059 - DNA, 280 bp, Arabidopsis thaliana columbia
  unsure (1)..(280): unsure at all n locations
aaacccggggcggaccgacacaaacggaaaaacctagaattctctagattttttattttagagagacggaaggtaaaaaacgagaggttataatataaactaagattgtcccaaaaagccaacctatcttaacttctgttcatagtgacaaggactacaaaaagccaccacctgcgccgttgttcaatcctcttctatctagcttcatggaccttctgcagagctgttatttctgagtttatagttacgtttttgttcctttacataacttntttttact

SEQ ID NO: 162060 - DNA, 245 bp, Arabidopsis thaliana columbia
  unsure (1)..(245): unsure at all n locations
cgctactcgaagaaaccatggaaccgttcttcaagttggggtggagggaacaaaaagnaatacaatagcaataccaacgttggtgtatttatcaagagaaaagagacctcaacatcatcataacttcaaggctggagcaatgaacgcattgctgagggtttcttcgaaaattacttgtgggaaaatcatactaaacttggactgggatatgtacgcaaacaactcaaagtcaacacgcgacgcgc

SEQ ID NO: 162061 - DNA, 418 bp, Arabidopsis thaliana columbia
aactgaactcttcaaatatctgtatggtatactcaacctccggattctcagtggggtcacttaaagggggcagtgcaaagaaaataacctcaaaatgaaaggagattaccacaggtaccttgctgagtttaagactggagctgagaggaaagaatctttttatagcactctggttgctaacaagtcagctcaggatattgcacttgctgatttagctcctactcatccgattagactgggacttgctcttaacttctctgtcttctactacgagaattttaacttacctgatcgtgcctgcagtttctcaaaacaggcttttgttgaggccttttctgagctgtatccatttggagaagaatcattcaaagacagtacttttttaatgcaacttttccgtgacaatctgaccctttgg

SEQ ID NO: 162062 - DNA, 446 bp, Arabidopsis thaliana columbia
  unsure (1)..(446): unsure at all n locations
gcccgacccaggcgnccgaaacgctctcgtcttcgatatcgtgatgacttttttttctcgtctacaccgtctacgccacggccgtggaccccaagaacggtggggggggaacaatcgcaccaatcgccataggtttcatcgttggagctaacatcctcgccggtggagctttcagcggagcttccatgaacccagccgttgctttcggaccagccgtcgtaagctggacgtggaccaaccactgggtttactgggctggtcctcttattggtggtggactcgccggaattatctacgactttgtcttcatcgatgaaaatgcccacgagcaattgcctaccaccgattactgaagacgtcaaattcaacgttgttaatctgatgaatttttcggatttgctttaaatttgcatcgaatgggttctggccgttggacattttagatg

SEQ ID NO: 162063 - DNA, 480 bp, Arabidopsis thaliana columbia
  unsure (1)..(480): unsure at all n locations
gaaaccgggccgggccgaagcgaacgaaatgagtctgagttatattgcaattttgattttagtaaagaagaggtcaaacaggggagggttccttttgaaaggtgctacgacttccaaatgtcctatgatgatctacctatctggggattcattggaaaggttgacaaggatatcaaatctgatccgagttaattcaaatattttttgtacaagcacattcagtttgagattctatacaataaggaccgtgtgatcgagatcagtgctagaatggatcctcattcgcttgtggatctcactgaggataaggaagttgatgcaaagtttatgtacactgttaaatgtaaggaaactgatactccttttgagaaaagaatggagaagnactctagtgttcttctcttccacaacatttggaaatccactggttcttcattattaactcctttgtcactgtcctttttttgactggatttcttg

SEQ ID NO: 162064 - DNA, 389 bp, Arabidopsis thaliana columbia
  unsure (1)..(389): unsure at all n locations
cggagaaacaatggtnaagtttctgaagcagtttatagtgttgatcctccttcaaggcccttgggcgggggaaaaggcaggggtgatcagatccttcaatcacnnaaccantnaccgtcgttacggacactgcctcgtcgccggactgaagaagtacccgagcaaagtcatccgtaaagactcagcgaagaagacggcgaagaaatcaagagtgaaatgtttcatcaagctcgtgaattaccagcatctgatgcctacacgttacacgctcgatgtagatctgaaggaagtagcgactcttgatgctcttaagagtaaggataagaaggtgactgctttaaaggaagctaaggctaagcttgaggaaacgttcaagactgggaagaaca

SEQ ID NO: 162065 - DNA, 348 bp, Arabidopsis thaliana columbia
  unsure (1)..(348): unsure at all n locations
cctgactaannattctccggcgagacaaccacaactgagacttttgtcttgggcgttgcaccggcgatgaagaatcagtactaggcttcaggggagagtaacaacgctgagaacgatgcttgcaagtgtggatctgactgcaagtgtgatccttgcacctgcaagtgaagaagcctttttaaataagcagagataatcgagtctctttaattaattaagttattcaataagtaaaccatatataggatggtgtttttaggtttggtttatgtgtaataatggcttcaggctaattttttagccggaccattgtcttttgtgtatgtttatgatcaaacttttaaaatg

SEQ ID NO: 162066 - DNA, 430 bp, Arabidopsis thaliana columbia
  unsure (1)..(430): unsure at all n locations
tttaagacagctaaaactaattacaaagatttcttttgggtttggttacagaggaggtgggagctgatgcaaagatgtacgccggggataanatatgtagagagaagacaaagtgtttcctcaaggaaatatctatgcccaatggtttattaccattgaaggatatagaagaggttgggtatgacagagagtcaggtgttgtatggctgaagcagaagaagagcatcactcacaagttcacagagatagataagcttgtctcctatggaaccgaagtcacagccattgttgagaccgggaaaatcaagaagctcactggagtcaaagccaaggaactttttatttgggtcactatcaatgagatctataccgaggaaccccttaccaagatcacgttcaagacaccgaccacactgtccaggactttccc

SEQ ID NO: 162067 - DNA, 397 bp, Arabidopsis thaliana columbia
  unsure (1)..(397): unsure at all n locations
cgaacgcaagacaaatagaacaatttccgttagtgttcatttttggccagccacctaanaaccgggtngggttccaatgatgggtcgcgggggcaaaccaacccnaagggcatctccggtgctcctttcggtgtttctccgaccaaaagagtctcttccttcactgtccgagctgttaaatccgacaggacaacattccaagtagttcaaccaatcaacggtgatccattcatcggaagtttggaaactccggtgacatcaagcccattgatcgcgtggtacctttccaacctccctggataccgtaccgccgtaaacccttttctccgtggtgtggaagtgggcctggcccatggtttctttttagtgggcccatttgtcaaagctggcccattaa

SEQ ID NO: 162068 - DNA, 317 bp, Arabidopsis thaliana columbia
  unsure (1)..(317): unsure at all n locations
aatcaaaaaaccccnaggacccanccccaataacagaggaagatctgcttcaaataccgcgaggagggcgtacactcgagggtttaaggctgaacacacgtgtaggaattcaatacttagccgcatggttaacaggatcaggatctgtcccactctataacctaatggaagatgctgctacggctgaaataagccgtgtccagaattggcaatggattaggtatggagtggaacttgatggagacgggcttggagttcgagtgagtaaaaagtttgtggggagagttgtctaaaaaaaaattgaaagaatttaaaaa

SEQ ID NO: 162069 - DNA, 262 bp, Arabidopsis thaliana columbia
accaaaacccttccattcaccttctttaattcatccccttcattcctcttcacccccatgaccaacggggacattattttttttttatgcatcgggggaagaaaagcatcatgaaggtgtggccaccaattggaaagaataagtttgagacttttttttacctccctgacctttattgacgtctaatcggctaaggaagttgtcttccttttccggaacaagtggatttcttgtgttgaatttctctttttaccacggtttt

SEQ ID NO: 162070 - DNA, 370 bp, Arabidopsis thaliana columbia
  unsure (1)..(370): unsure at all n locations
gcgngctcattagagaacagagaaaaaaaaaactttggtttctcaagccgccgggatcttcaactccgcgataacaaccgccggggcctggggcgtaaagaaactccactttttctcaacaacccaccgtcccaaatccctctccttcaccaaaaccgcaatccgcgccgagaaaacagattcctccgccgccgttgctgcagcccccgccacgaaagaagctcccgtgggattcacgccaccgcagctagacccaaacacaccgtctccgatcttcgctggaagcaccggtggtcttctacgtaaagcgcaagtggaagagttctacgttatcacgtggaactcaccgaaagaacagatctttgagatg

SEQ ID NO: 162071 - DNA, 429 bp, Arabidopsis thaliana columbia
cgtacggcaagaataccaatgttaaatcattttcattcaattttcctttggctccaaacaatcaagctgggatcttataaaacaatggaggtgccgatttttccagtagtcagtctggtttcttttcaagccaatctggagcattctccagcagtccttctggtttgatatccaatagccagactggatcttttagcagtggccagtttggtacgacaaaaagcagccaaccaagcctattttccggcagtcaagccggagcaatctctaatagccaacctggaactttctccagcagtcactctggtataacatctaatagccagacgggatcttttagtattggccaatttggtcagacaaaaagcagccaaccaagcctacttttcggcagtcaagcaggagcaatttctagtaaccaaccttttt

SEQ ID NO: 162072 - DNA, 361 bp, Arabidopsis thaliana columbia
  unsure (1)..(361): unsure at all n locations
gttcgttgtctttggtttcttcacacagctggaaattcacaacaccaaacgtgacacgccgcacgggtcaattcaggaggagcgccggggaaaatggcttctccagacgtttcggagctcacaatattcaggtcaatggctccctcgctaagctcactctcgacaaatcctccggagctgggttggtgtcaaagaacaagtatcactatggtttcttcagggcaagactcaagcttcccgctggatttgcctctggggttgnggttgctttctatttatcaaacgcagagacttatccgaaaagccacgacgagatagacatataattgttgggtagaagtaggagagatgattggacgat

SEQ ID NO: 162073 - DNA, 438 bp, Arabidopsis thaliana columbia
  unsure (1)..(438): unsure at all n locations
ggcgggncgaggcggacgtacacttgtggcaataccactggtgtcccagtctacttaggaacggctaaacagcacactgggtcgggttccaataaagggagcgcggcggaaaaccctccctgagcttgatggagcgatggagccaatcgttttcgctggtcgtgaccctagaacagggaagtcacatgctcttcacaagagagtggagcaactctgcatcagagcgattcgatggggtgagctcaaaagaaaaactaaggcagagaagaagctggcaatcactgttttcagtttcccacctgataaaggtaatgtagggactgcagcttacctaaatgtgtttgcttccatcttctcggggttaagagaccttaagagagatggcttcaatgttgaaggccttcctgagaatgcaaagacttttttttgaaaaaatta

SEQ ID NO: 162074 - DNA, 430 bp, Arabidopsis thaliana columbia
  unsure (1)..(430): unsure at all n locations
ggccggccaggcgaacgaacagggaacgcgcttattagttgtggcactttcatttgcaacctggcagggtgcattgcgtactggacccaaggtgcgccggttgcccaaggntcctgcaacggcgttactaaccttaaaaacatggccagtacaaccccagaccgtcagcaagcttgccgttgccttcaatctgccgctaaagccgttggtcccggtctcaacactgcccgtgcagctggacttcctagcgcatgcaaagtcaatattccttacaaaatcagcgccagcaccaactgcaacaccgtgaggtgatgagcgacggtcaaatgaagctactagcggatgtttcgaatattatataatcgatgagataatattaaataaagatgttcgaatggcttgactcttttcaatttcctgtcttttttta

SEQ ID NO: 162075 - DNA, 323 bp, Arabidopsis thaliana columbia
ggggccggccaggcggacgacaaaagcttcaccggagatcagagacgctttatgtttaacattccaaaaacaaaaaacgcttagggtaaaaacaaggaaggcaaggggcatactttgcacaaggttacccaatacaagaagggtaaagacagtcttgctgttcaaggaaagcgtcgttatgaccgtaaacaatctggttatgggggtcagactaagcctgtctttcacaaaaaggctaagaccacgaagaaaattgttttggggcttcagtgtcaaagctgcaagcactttttgcagcgtccttataagaggtgcaagcattt

SEQ ID NO: 162076 - DNA, 293 bp, Arabidopsis thaliana columbia
ctcatcataaactctccttggggaatcgattctatttcaaagggtctggtcacttctcttctcatatctcttcttgttctccaactcgtccaggctgatgtcgaaaactcacagaagaaaaatggttccccaaagaagatcgattgtgggagtccgtgtgtagcacggtccaggcttttcaggaggccgaggctgtgtcacagagcgtgcgggacttgctgctacaggtgcaactgtgtgcctccgggtccgtacggaaactaccacaagtgccagtgctacgctagcctcac

SEQ ID NO: 162077 - DNA, 346 bp, Arabidopsis thaliana columbia
aaagaagaagaacaagaagttctcggcgtgtttcattggcgatatcagtagcagctccatggtctgtggccgggagggggcggcgtgtgcccgcccaatccaccctttgctccgccgtcccttatcttcctcctcgctcctttggccgatcctttttaaccgttccgttgaaccttgtttcagggaatggattgcaaaaagctgaattgttgaaaacaagagcttcttcagaagagacctcttccattgttcccaacgaactcatcacagatttgaaggaaaagtgggatggtctcgagaacaaatctactgtacttatatatggaggaggagccattgttgctgt

SEQ ID NO: 162078 - DNA, 273 bp, Arabidopsis thaliana columbia
  unsure (1)..(273): unsure at all n locations
taaacatatcccanctctgaccaaaatctttggaaattattctgtattgcaatttgnnggaggaactttaggacatcctttgggtaatgcacctggtgcaacacctaatcgggtggctttagaagcctgtttacaagctcttaactaagggctcgatcttgctcttgaaggtaatgaaattatcctatcagcttgcaaatggagtcctgaactatccccagcttttgaaatatttaaagcgatcaaattcgatttcgagcccgtagataaact

SEQ ID NO: 162079 - DNA, 408 bp, Arabidopsis thaliana columbia
  unsure (1)..(408): unsure at all n locations
caggcggacggaaaagaaaaaaaaaaccgttcttggaagattggttttaaactcaactctcttttccttctgctgtggttattaatactaacgatcgggtccaaaaccaaccaatccttggcttacgtcaagaaaccacatgtgagccaacgcaacaaaacggcgttagcagccgtctccgtaagaggaggaggaaaagagatgttgaaagggaggaagcagactagtggttgtaacttgtttcaagggagatgggttttcgatgcttcttaccctttctacgattcatccacgtgcccttttatttacggtgagttcgactgtctcaaatttggccgaccagacaaacagttccttaagtactcttggcagcctgattcatgcaccgtcccaaggnttgatggggaa

SEQ ID NO: 162080 - DNA, 461 bp, Arabidopsis thaliana columbia
  unsure (1)..(461): unsure at all n locations
ccggggcgggccgacgcgtccgctcataccgnnttctctctctccttctncgtttctgcagaatcactctctcgccggagttgttcacctgcagagcgggcgggtttttctctcaagcatcatcattttcgtcggatcaatcaccaagagatggcgtcgagaaactccgtcaccggattcgcgttgttcagttttgtattcgccgncatcttatctttcgccggcgctcaatccctggctccagctcctgctcccaccagcgatggaacatcgatagatcaagggatagcgtatttgctaatggtggtggcgttagtgctgacttacctaattcatcctcttgatgctttttcttcctactccctcttctaaaccctctctctctttcttcgggtttttttaatcctttgcaacttcttattagtttcttcaaattgcccttttttcttctttttggggat

SEQ ID NO: 162081 - DNA, 251 bp, Arabidopsis thaliana columbia
gggcaacccaaccttgttccaccctcaaagcatcttatccatttgggctactcaagttatcctcatgggagctgttgaaggctacatagtcgccggagatggtccattgggagaagcagaggacttgctttacccaagaggcagttttgacccattgggcctcgctactgaccccaagtctttctcatattttaaggtgaaagacctcaaaaacggaagggtggctatgtcccctatgattggatttttcg

SEQ ID NO: 162082 - DNA, 337 bp, Arabidopsis thaliana columbia
  unsure (1)..(337): unsure at all n locations
gctgtagccacacaaacacgcggttcactgttacaactgacaagaagggtgacttcatatgggaacgtccctaaaagatcgagtcaagctgtaaancaaaactccaaggcagcgtcaagcaactttatgcttccaagaataacgttaagtcgaagattgttaagcttggcggtgacaaatatggtctctcttccaagttgttcttcttgaaatcatgtccaagaagcttcggatcttttagttcgtccaagaccgttgatttaccagttcctcccgagtgggggctggctccgaccagttattacgttcctttcttgcccatcatcggtatcccatg

SEQ ID NO: 162083 - DNA, 406 bp, Arabidopsis thaliana columbia
gtctcttcctcttttgattctccgatggagtgttaagttactcaaacccgcgttttacaatggcccggacctcaatctgacgagttctgtaaaactcatctcgcgattatcaatctggaacgataaatcaaaagttggactatcttctgggtctcttttcctccgtctttccgcagcttctccgatccgatactctagggggctactaagggtagatgagagtgagtttttgaaacttgaaagcattagacactctttgattcgtcaagaggacagtattatctttaatcttcttgaacgagctcagtatcgctacaacgctgatacttatgacgaggatgcctttactatggaagggtttcaaggatctttagttgagtttatggtcagagaaactgaaaaactt

SEQ ID NO: 162084 - DNA, 323 bp, Arabidopsis thaliana columbia
  unsure (1)..(323): unsure at all n locations
acgnttatttttctcaatctcgattgttttcttttaaatttatgtcgacgatggcggntttacggggccggattctcgaggtgagggtggtggggtcccagaaattgaaagacacggaatggttttcaagacaagatccatacgtcgtccttgagtatggtggcagaagtcaccgtaccagaacctgcacagatggtggaaagaacgctgttttccaagagaagtttatcttcactttgattgaagggcttagggatcttaaggttgctgtctggaatagcaacactctctccactgatgactttattggcaattgcaacgat

SEQ ID NO: 162085 - DNA, 420 bp, Arabidopsis thaliana columbia
  unsure (1)..(420): unsure at all n locations
gccgagcacgcggacgccacgcgtccgcccacgcttccggtagatgttaaatttgattcaaggtcacnnatactaggatgaggcttgttgtcccaatggtggaggacacaccatattgataatgaactacacagattcacttaccaaagctatagaagcctatccaaaagcaacagcagtgttggtacgcaatcacggagtttacatttggggtgattcttggatccatgctaagacacaggctgaatgttaccattatctgttcgatgctgccattaagcttcatcaactgggtctggatgctgctaccccaaaccacgggcctatccggggaaccatacattcacagatcaaggattcacaatacgaaagagaatggccttggcgatggattgtccttcgacattgaaggaacaacta

SEQ ID NO: 162086 - DNA, 290 bp, Arabidopsis thaliana columbia
  unsure (1)..(290): unsure at all n locations
ggaanccggggcgggccgcacgcgtccgaacacataaaagagagatttaatacttaattttgagaaaaaagaaagatatttcgggactgagcaacaagatcgggagcgcggtccacattgaaggaggcaacaaggaaggtgagcacaagaaggaagaggaacacaagaaacacgttgacgagcacaagagtgtttagcacaaagaaggtattgttgacaagatcaaagacaagatccacggtggtgaaggtaaaagccactacggaaaaggcaaaagccactactgtgag

SEQ ID NO: 162087 - DNA, 434 bp, Arabidopsis thaliana columbia
tgcagaatgtggaggacaatgcacaaggagttgtagcaacacaaagtatcataagccatgcatgtttttctgccaaaagtgttgtgctaaatgcctttgtgtccctccaggcacgtacggcaacaaacaagtgtgtccttgttacaacaactggaagactcaacagggtggaccaaaatgtccataaacaaaaacattgagagagaaaccccaatctgtttcctattttatttaattatttccagtatgcttttgttgtcgtgatggttaaattatagtgtttttgcaggtatcatttatcatcgataaacaatatcatataaaatcttctatgtttctttcacgttttgtttctttggttggagtcaatacacgaaatgtgtatggaccttctaattaggaatatataaaattttatttattaattagaaaaa

SEQ ID NO: 162088 - DNA, 428 bp, Arabidopsis thaliana columbia
atttctcacattttcgtagccgcaagactcctttcagattcttacttgcagctatgggtaaagagaagtttcacattaacattgtggtcattggtcatgttgattctggaaaatcgaccacaactggtcacttgatctataagcttggtggtattgacaagcgtgtcatcgagaggttcgagaaggaggctgctgagatgaacaagaggtccttcaagtacgcatgggtgttggacaaacttaaggccgagcgtgagcgtggtattaccatcgatattgctctatggaagttcgagaccaccaagtactactgcacagtcattgatgccccaggacatcgtgatttcatcaagaacatgattactggtacctcccaggctgattgtgctgttcttatcattgactccaccactggaggttttgaggct

SEQ ID NO: 162089 - DNA, 439 bp, Arabidopsis thaliana columbia
ttcagatctcgttaaacctagaaacctcgttataattcgtatcaatggcgccgaaggcagagaagaagcctgttgtgaagaaaccagttttcgagaagccggtggaggagaaatcaaaagccgagaaagctccggcggagaagaaaccaaaggccggaaagaagttcccgaaggaagctggtgccggaggcgacatgaagaaaaagatgaagaataagagtgtcgagacttacaagatctacattttcaaggtgcttaagcaagttcatcccgatatcggaatctccagcaaagcgatggggatcatgaacagttttattaacgatattttcgagaagcttgctcaagaggcgtcgaagcttgcgaggtacaataagaaacctacgatcactttttgggagattcaaacttgtgtgagattggtgcttcctggagagtt

SEQ ID NO: 162090 - DNA, 423 bp, Arabidopsis thaliana columbia
cctttctcagtacacttcttttcatacctcaagagactaaaactagtttgaggagatttagaggagtgtttggttctttggataacaatatcccaaactgaaaatggctaagtcatatggagctatcttcctcttgaccctcattgtcctcttcatgcttaaaaccatggttatggcctcaagtggatctaatgtgaagtggagccagaaacgttatggaccaggaagcctgaaacgtacccaatgcccatcggaatgtgataggaggtgtaaaaagacacagtaccacagggcttgcattacgttctgcaacaaatgctgcaggaagtgtctctgtgtgcctccgggttactatgggaacaaacaagtttgctcctgctacaacaactggaaaactcaggagggtggaccaaaatgcccttg

SEQ ID NO: 162091 - DNA, 425 bp, Arabidopsis thaliana columbia
caaaaacatggatcgttgcacgtcgtcgtttttgtttctcacattggtctctaccttgtccatgctccaaatctccttgggtcaacttgttccagcaatcatgacattcggggactctgtagttgatgtcggcaacaacaactatcttccgacccttttcagagctgattatcctccttatggccgtgatttcgctaaccacaaagccaccggtcgtttctgcaacggcaaattagccactgatataactgctgagactttaggcttcactaagaacccaccagcttatctaagtcctgaggcttctggtaagaatcttctcattagggctaatttcgtttctgcagcttcaggttatgatgacaaagctgctctttttaataacgcgatcccgttgtattagcaagtagagtatttcaaggaat

SEQ ID NO: 162092 - DNA, 388 bp, Arabidopsis thaliana columbia
caaaaacatggatcgttgcacgtcgtcgtttttgtttttcacattggtctctaccttgtccattctccaaatttccttggctcaacttgttccagcaatcatgacattcggggactctgtagttgatgtcggcaacaacaactatcttccgacccttttcagagctgattatcctccttatggccgggatttcgctaaccacaaagccaccggtcgtttttgcaacggcaaattagccactgatataactgctgagactttaggcttcactaagtacccaccagcttatttaagtcctgaagcttttggtaagaatcttctcattggtgctaatttcgcttctgcagcttcaggttatgatgacaaagctgttttttttaatcacgcg

SEQ ID NO: 162093 - DNA, 434 bp, Arabidopsis thaliana columbia
cacacaaggggagaggagagaaagagagattttgtttcagagataatggcgtacagtgcgggtttcctacaccagagcgcatgggcttcatcagccgcacgatcataatcttcctcctaatcccagcgtcacgtgtcgttctccaaacctgttcagatcatctgtaaagctcaacagtctcatgaagacgataactccgtcgtctcccgccgttttgctttaactctccttgtcggcgccgctgctgttggttccaaagtatcttctgctgatgccgcctacggtgaagcttcaaacgtgtttgggaagccaaagactaacacagacttcttgccatacaatggagatgggttcaaagttgctatgttccagcaaattggaacctaagcaaagtgattgagtatccaggacaagttcttagtgtcgaagacaac

SEQ ID NO: 162094 - DNA, 439 bp, Arabidopsis thaliana columbia
ccttctctaatatctctctactcgtacaacattgttttcgatggctgcaaccaccaattggaccaaatctatgctctttccgtgctctcatgtttcaggaaatgcgagcttgaattcgcagagaagaacatggccaaagcagtacaagtctaaaaatggttacaggtctcttcgagtgaatggattatttggaggtggaaacaaagataataacagtgaagatggacaatcaaaggcaggaatatttggtaatatgcagaatatgtatgagactgtgaagaaagctcaaatggttgttcaagtggaagctgtacgtgttcaaaaagagttagctgccgcagaatttgatggttattgtgcaggcgagcttgtcaaggttacgttatcaggtaaccagcaaccaatccgtactgatattaccgaggcagcattggaacta

SEQ ID NO: 162095 - DNA, 326 bp, Arabidopsis thaliana columbia
aacatcctcctccatattattaccactcctatccttttccggtgaaatccccaccaccaccgtacgtttactgctttctacgaccgccggtaaaatctcccccaccttctgtctacatttactctattcctcaacctaccacacatttctaggctcatcaatttcaacataatttcccctttattcaagttttctcttaaaaatataaataaaggatggttctaatgtcaaagataataagatgtgaacctaataaggttcttggcttgtaattcataaccaaatcatttttaacaacgatccacatcacttcctatttttttaat

SEQ ID NO: 162096 - DNA, 435 bp, Arabidopsis thaliana columbia
gcgagaaacaccaatgcaaagacgatgggttttgttccattgccaaccaagaagcgtatctactgtgttctcaagtctcctgacgttcacaaggatgctaggttccattttgaaatccggacacaccagcgcatgattgatattctctacccgactgctcaaactatcgattctttgatgcaacttgatcttcctgctggtgtcgatgtggaagtgaagctctgaagaagaagcgtaactacaatgatgtgatgggcacttttgcattgaatgaacagactgtttcagatcaactacattgcttagaactggtaagccttgtatcatcttttttgagaacctttgtaacgaaaatgtaagttgtattatctggtccttggaatctatctttagcgatgcttggttcttagttgatgaacatatccttaattaagc

SEQ ID NO: 162097 - DNA, 439 bp, Arabidopsis thaliana columbia
cccaggcgaacgaatctggttcccgggaagcactcctccattttgttttgacggtagcctccctggtgactggggagttgatcctatgggtcggtgatcggacccggacagtctaaaatggaacgtacaagccgagatagtccactgccgatgggctatgctaggagccgccgggatattcatcccagagttcctaacgaagatcggaatctttaacactccgtcatggtacacggcgggagagcaagagtattttacggtcaaaaccacactctttgtcgttgagctcattttgatcggatgggcagaaggacgttaatgggccgatataataaagcccggtagcgtaaacactgacccaatcttctaaatcaacaaactgacgggcacatactttggttacccaggtggtttatggttcgacctcttgggttgggat

SEQ ID NO: 162098 - DNA, 290 bp, Arabidopsis thaliana columbia
cgaaaaattcgaaaaaggaactgagaagaaatagatctgaagatggagtgtgtatttggtctagtggggaatggattcgctatcggggcggcggatacatcaccagttcacagtattcttcttcacaggaccaaagaggccaggatcatgactcttgactctcacaagctcgtcgccgctagtggtgagcctggtgaccggtttcagtttacggagtttgttcagaagaatgtgtcacttgttcagtttcgaaatgggattcctttgagtccttgtgctgttgctaatct

SEQ ID NO: 162099 - DNA, 419 bp, Arabidopsis thaliana columbia
cgaacaaaaaaagctttgaatatccgccatggttgttggacgaggctttctctttcttctatgaccaagtttcttcttctggccttcacaaacgcagagcaccgattcattcacatcggttctcgtatctcaaaacggactcgatttcgtcaaaaatcttctagttaacaaagctatcgcgtcgattatacctctccagattcccagaattgagaaatctatgaaaatcccgttccttggaggaatcgatgttgttgtctcgaatctcacgatatacgagcttgacgttgcgtcatcttatgttaagcttggtgagacaggtgttgtcatcgtcgcttaaggtgcgacttgaaatttgatgttgaattggcattattcttacaagccttggctttcttcctattgaaatattctgtcag

SEQ ID NO: 162100 - DNA, 441 bp, Arabidopsis thaliana columbia
ttctccaatccatcaactggaggagttttgttgatggattcccgaatctatttatcaacaacgcacatgatatccgaggccagcacgttgcgttccttgcttcattcagttcccctgctgtcatctttgagcagatctctgtcatttacttgctccctcgattgtttgttgcgtccttcactttggtgttgcctttcttccccactggctcctttgagagaatggaagaggaaggagatgtagcaactgcttttaccatggcaaggattgtctctaatatccccatttcacgcggtggtccgactagtgttgtcatctatgacattcacgctttgcaggaaaggttttactttgccgatcaggttcttccttggtttgagactggaatcccgttgttgactaaacgccttcaacagcttcctgaaactgagaaagtcatag

SEQ ID NO: 162101 - DNA, 218 bp, Arabidopsis thaliana columbia
  unsure (1)..(218): unsure at all n locations
ggccgggcccacgcgnccggagaagcaaannaaaaaaaagcaactgtcttaaagaagaagaagncaaccatggcagggggggtgaaagccgagccggggggagggaatcaaacaagagactaccaagacccgccaccagccccgttaatggagggagcggagctaaagaagcggccatccaacagagcagtaaccgcagagcccgaaaccaccccccc

SEQ ID NO: 162102 - DNA, 443 bp, Arabidopsis thaliana columbia
ggcggacccaggcgtccgttcgtccacatctttatcttttggtggcaatctacattgccagatagagagaaacgatggcggggaactcgttaatgagctggggcatacccgccgtgtacccttcgtttttctttttttccaagtctaaattcgaatccgccggagtaccactcccaaacgccgggaatgttggtcgtatcataatggctgctcactggatgcctggcaagccacgaccagtttaccttgacggttctgctcctggtgactttgggtttgacccacttggactgggagaagttccagctaaccttgagagatacaaagagtcagaactcatccactgatgatgggctatgctcgctgttcctgggattttggtaccagaagcattaggatatggaaactggtttaaggctcaagaaagggcagcactaccaggg

SEQ ID NO: 162103 - DNA, 444 bp, Arabidopsis thaliana columbia
  unsure (1)..(444): unsure at all n locations
gaaaancgggcccgacccacgcgaccgctgctactcaaaagacagttgatggcccatttatgaaggactggagaggtggaagagcgggtggcttcaacattattgctgggagcactggtgccgccaaggctgttgggaaagtgttgccatccctcaatggaaaattgaccggaatgtctttccgtgttccaaccgtggatgtctcagttgttgatctcaccgttagacttgagaaagctgcaacatacgacgaaatcaagaaggccatcaaggaggaatctgaaggcaaaatgaagggaattttgggatacactgaggatgatgttgtgtctaccgactttgttggtgacaacaggttaagctttttcaatgccaaagttgggattgcattgagcgacaagtttgtgaagttggtttcatggtacgacaaccaatggggttaca

SEQ ID NO: 162104 - DNA, 406 bp, Arabidopsis thaliana columbia
  unsure (1)..(406): unsure at all n locations
aaagggngctcccctccacagcaaccaaacttgagccagccaccactnccactatgcttgggatgaagcaatgggggagcctccttaaacgattgatgtcgcagcagcattgttggctctttaatacccctgtggacgtcgccaagctcaacattcctgattatttcaccattatcaaacatcctatggatttaggaactgttaaaagcaagttaacttccggcacgtattcaagcccttcagagttttctgctgatgtccgcctcactttccgcaatgctatgacttataacccgccagataataatgggtatcgcttcgctgatactctcagcaagttttttgaagtgagtaggaaaactatcgagaagaagtcatccgtaaccaaatttgaaccaagtaactt

SEQ ID NO: 162105 - DNA, 253 bp, Arabidopsis thaliana columbia
cccacgcgtctcaaaaaaaatgaaacctcaaaaccaattttttttttggcgtcctcaaccaaggcttgggccggcttttattatagccggaggggctgaaaagcctgccacatcaaatgtcctcggaagcggccgtgtgaccatgtggaaaactgttgtcatgccaaaggatccattatgtattcaatggtccggatttgcccgagtcaagcacttggttccattctccggcaagccccctagcataccttac

SEQ ID NO: 162106 - DNA, 429 bp, Arabidopsis thaliana columbia
gttttgtacaattccaatcaaaaaaggagtttttatttcacgttaccgagggcctcgttttaaaaaaatactccgtctgggggctttaccgggactaactagtaaaaggcctaaggcaggaagcgatcttagaaaccaatcacgctccgtaaaaaaatctcaatatcgtattcgtttagaagaaaaacaaaaattgcgttttcattatggtcttacagaacaccaattacttaaatatgtgcgtatagccggaaaagccaaggggtcaacaggtcaagttttactacaattacttgaaatgcgttgggataacatcctttttcgattgggtatggctttgactattcctcaagcgcgccaattagttaatcatggacatattttagttaatggtcgtatagttgaaataccaagttatcgttgcaaacc

SEQ ID NO: 162107 - DNA, 253 bp, Arabidopsis thaliana columbia
ggccggtaaaaccaacaagctatcccccgcggcatcaaaaatcccagaaagcggccgtgtgacaataaggaagaccgttgccaagccaaagggcccaacaggcagccaatggaacggaactaaccgagacaagaactagggcccatactctggcaaaacaccaagctacctaaccggaaagatccccgaaaacaacggaggggacaccaccggacttacagttgaccccaagacatacgcaaggaaccgtgaa

SEQ ID NO: 162108 - DNA, 314 bp, Arabidopsis thaliana columbia
ccgttccacgcgccgggagactccattgttgaagtgtgtcacttttttttcccaaacaacaatggcgacggggggtacacttaaatccttgagccggacttcttcaatcatcaacggagcaaacaaacttcgcctctcatgtaccgtcatcactttctctccctcaacgacggacctttttccgagtaaccgcagccagagccactcccaaactctccaaccgtaaactccgtgtcgccgtcatcggtggtggaccagcaggcggggcagttgcagagactctagcacaaggaggaatcgagacgattcttatc

SEQ ID NO: 162109 - DNA, 412 bp, Arabidopsis thaliana columbia
cgtccgaaaatgcctattggggggttcatcaaccttttttcttaaccagggttccttacaggtttgggccttaaagcgcgtccaacgcccaattttacacaacaaacgggggggctccagtttcaaacaccattttttccttaaccatgggggaaggaggtccggtttttttgggggatattaattggaccgagagggtggctattttaaccagaggggggatccctggggggggggttaaggctggaggattcagggctaagggtttttttgaagcaacccatgccatttaaaacctaactggtgctgtttttttaagagcccctggggttaaaactccggtttttgtccgtttttccaccgttgtcacacgaccgtgccagtcctgaaaccatgagggttattcggggtt

SEQ ID NO: 162110 - DNA, 369 bp, Arabidopsis thaliana columbia
tcccggtccgaccacacccgtccgatttttaacattttcgtagccgcaggactcctttcagatcctacctggcagctatgggtaaggggaggtttaccattaccatgggggccatgggccatgtggattctggaaaatcgcccccacctggccactggacctataagctggggggtttggccaggcgtgtcatcaaggggtccgggagggaggctgctgaaatgaccaagaggcccttcaggtccccttgggtgttggccaacctaaaggccggccgtgggcgtggttttcccatcgatttggctttatggaggtccgggccccccaagtcctacgtgccatccattgttgccccaggccatcgggttt

SEQ ID NO: 162111 - DNA, 450 bp, Arabidopsis thaliana columbia
aattcccggtccgcccacacccgtccgcttttttaagtccactttttttaatccctaaggagactaaacctggttgggggggatttaggggggggttgggttcttgggttaccattttcccaaactgaaaagggttaagcattttggggcttttttcctttggcccctaattgcccttttaatgcttaaaaccatggttttggcctaaggtggttctattgtgaaggggacccagaaccgttttggcccaggaggcctgaaccgtccccattgcccatcggattgggttggggggggtaaaaggccccagtcccacagggtttgctttccgttctgcaccaaatgctgcaggaggggtttttggttgcctccgggttactttgggaccaaccaagtttgctcctgttccaccacctggaaaactcaagagggtggcccaaatggccctgg

SEQ ID NO: 162112 - DNA, 381 bp, Arabidopsis thaliana columbia
accagaaaatgggccatgctcggagccctaggttgggttttccctgagctatgggttaggaccggggggaagttcggagaaccggttgggttaaaggccggttaacagatcttaagggccgggggatgggactactggggcaacccgggcttggtccaccctaaaagcattttagccatttgggctactaaagttatcctaatgggagctgttgaaggctccaaagtccccggagatggcccattggaagaagcaaaggacttgttttacccagggggcagtttcaaccaatggggcctggttactgaccccgaggttttcgcagagttgaaggtgaaggacctcaaaaccggaaggtgggctatgtcctttatgttggga

SEQ ID NO: 162113 - DNA, 375 bp, Arabidopsis thaliana columbia
  unsure (1)..(375): unsure at all n locations
cgggntggatttcccgggcggaccacacccgtccgagccaccatggtcgttcaattaaccggtttgaagtaatccgtttttttcccggtaaccggaagggccaacaccgccattacttccataacaggcaacggaggaggagttagctgcttgaaggggtggccaccaatcggaaagaaaaagttggagactttttttaacctccctgcccttagggacgttaaatgggttaaggaagttgactcccttttccgaaccagggggattcctggggtggaatccaagtgggagcacggttttgggtcccgggggcacggaaccactcccggatactatgatggacgatcctggacattgtgaaagcttccattgttc

SEQ ID NO: 162114 - DNA, 315 bp, Arabidopsis thaliana columbia
ggttggccccacccgtccgttcttaaatcctttcctttaatggtggttaaccaaagattccgattttggccacttaagttttccaccattcttctttggcgggccaaccggttttaaggccctccagggccctattccaaaaggtgggcgtttggggcgggggccgtgtgaccatgcttcgtaccgtcaggtttactccccaaggcttttgttttggcccagaccgtcccaggtacttgggacctttttgggggaccacacgcgtttacttaactggggattaccccggggcctacggttgggccaccgttggac

SEQ ID NO: 162115 - DNA, 192 bp, Arabidopsis thaliana columbia
cccgggtcggccccacccttccggtggatgctatggtggggttccatggccggttgggccctggcatggatggaaccggggggtttaacgctcaatttccaccttttcctcctcttcaagagaaactccaaggccatggtggggccggtggaaatcctggggacgatggggctttcaaaaatgtgaagaaaa

SEQ ID NO: 162116 - DNA, 360 bp, Arabidopsis thaliana columbia
ttttgttggccagggctccggttccttcttttgtggccaaaccattttttaagggttttttggggttttaaggacttcaaaactcctttgtttttccttttgccaaaagatctttttccgatgggttggtttccttggtaagtttccaaacttttgcattgggaagcattgggggttccaggaaaggggtgaccgaggccaaaataaaggtggccatcaatgggttcggtgggatgggtaggaactttttggggggttggcatggccgtagggactttcctttggatgtcgtggcaattaacgacactggtggggttaaacaagcataacatttcctaaaatacaactaaacttttggaa

SEQ ID NO: 162117 - DNA, 320 bp, Arabidopsis thaliana columbia
gacccacccttccgttcgaaagtttaatcaccacatgtaaaaatgttggccaaaaacctaaaaccaaaggcccgaaagttggtaatattacggtttttgcaccccaccgaaggccgtaaagcgctcccttaaggcccttaactttccggttcttccgtggcccgtccttaagttaccatttcttccgaggaccgtccttaagttaccattccttccggggaccgtccttaagctacccgttcttcctgtgaccatccttaagctccccgttccaccagaagctgtccctagattacccgttcctccggtgaccgtcccaa

SEQ ID NO: 162118 - DNA, 189 bp, Arabidopsis thaliana columbia
accctccggtcaatccaaaaaagggggttattccagagagggctattccagaaggagagggtgtgggccgagaccattatacctatggggaaaaaggtaagcccaattgaagttaagttaacgggcaaacaaagttttgtttggtaggaccggtaacctaaaaaacccaaaacctttgtgcaggggggg

SEQ ID NO: 162119 - DNA, 252 bp, Arabidopsis thaliana columbia
cttccgaaggttttggagggaagtgggggggggttgtatgttaaaaaagaagatgttggagccggggctaacaggtttccggaggggcacccgaccggaacttcggttaaaagggccagggcctccaaagggccaccacctgccccgttgttcaagcccggcaagctagcttaatggtccttttggaaagctgggatggctgagtttatagctacgtttttgttcctgtccataactgttttgactgttttg

SEQ ID NO: 162120 - DNA, 221 bp, Arabidopsis thaliana columbia
aaatttccggccggaccaacccgtccggaagatggaagagaggatttaaaaagtttttcaaatgccgtctaatataataccaccggggggtgttttttaaaccacttctaccacttccgttactacctttaaagctgctttcgttaaacctcctttggcctttccgtctttgtcaaacccccttcgtttttaacaatctccttggtaatatccgtcgctcc

SEQ ID NO: 162121 - DNA, 380 bp, Arabidopsis thaliana columbia
cggatttccgggttcgcccacacccgtccgcgaaaaattcgaaaaaggaccggagaagaaccagacctgaagatggagggggtttttggcctagtggggatgggatccgttatcggggcggcggttccataagcagttaacagttttttttttaacaggaccaaaggggccaggtccttgactttggactttaacaggctcgtcgccgttggtggtgggcctggtgcccggtttcagtttacggggtttgtccagaagaatgggtaactgtttcagttccgtaaggggatcccttggagtcctgttgctgctgttaacttaactcggggggaactggccactgttttgagaaggattccattttcggggaacatcctgtt

SEQ ID NO: 162122 - DNA, 338 bp, Arabidopsis thaliana columbia
cgtccggtttaaggttcctttggggtccacctccatagccaaaaaaggggaaaccataactctggaggaacttatgaccaatccaggagggccaccggcggtaaactgcattaatgggttccattccactcctgttgaaactgggtcattggactttccaggggccacggttttgaagcttttcaaggttttaaatcctgccctttttgtgtttgcagggattaacggatggtccaactttccttttttaatgacagggttccaggaggcgctttttcattacttttaactttttgccatgttggccaccccattccacgcaggggttgagtccaaaa

SEQ ID NO: 162123 - DNA, 233 bp, Arabidopsis thaliana columbia
ccggtcggaccacacgcgtccgaaatcctaaaaagcctatttgggggatcattttctttttatcataaccatggttccttacagggttggtccttaaagcgcgtacaacgcccaatcttacaccacaaacggtggtgctcaatgttccaacaccatcttttcccttaccatgggagaaagaggtccggttttttttgaggatttatattttatcggaaaggttgctaatttat

SEQ ID NO: 162124 - DNA, 368 bp, Arabidopsis thaliana columbia
aaatacccgggccgaccaacccttccgatttggagaaaccggttccttaaaaacttatttggttgcaggatcctttaattccaggggggtttaagaatgcccaaatttcccccattgttggcaggcctttgaccgttgaatggaacgtttactcaaggggttttagaagtctgtggaagtccattaaggccaaatccgcaattccggaaattttgaccatggaaaacggttttgggaaaaaactaggggcctaaaattctgtggctgtggtgcccgctgtccaaaacaggaaatttttttttaaaaggcttttttgtggtttgcaagaagcggttggcttcgccaaagggattgttacaggatccttt

SEQ ID NO: 162125 - DNA, 377 bp, Arabidopsis thaliana columbia
ccccacccgtccgttcgtccccatctccgtttttgatcctttatttattcctcatggaaaaaatcaatccgacctaaaaaaattctcgaaggccttggcccgtaatttcctccttaatttggtcccaccggataatttggcattacctctttcctttttgggggccgaaaaaattaggttttttttggggattctgtggatggcgacgccaccaccaccccaggggcagcaaccggcgatggcctcggcggtcctcgatgttttattcaggcgactcccgggggtccggttggctggcccaggaaggcaggtccagctttctgaagctgaaaccaaccagctttgtcctccagctggggatattttccttcagcacc

SEQ ID NO: 162126 - DNA, 424 bp, Arabidopsis thaliana columbia
gatttccggggcggaccacagccgtccgttttcaaatcaataaacggggggggtttggctgttggattcccgaatctattaatcaacaccgcacatgatttccgaggccagcacgtggcgtccctggcttaattaagttccccggctgcaatcttggagcagatctttgccattaactggctccctcgatggttggtggcgtccttaacttgggggtggccttttttcccaactggctcctttgagagaatggaagaggaaggggttgtaccacctgcttttaccatggcagggatggtctttaatttccccatttaacgcgggggtccgactagggtgtgaatttatgacatcaacgcttggcaggaagggttttactttgccgatcaggtccttccttggttggagactggaatcccgtggt

SEQ ID NO: 162127 - DNA, 366 bp, Arabidopsis thaliana columbia
aaccggtccgtccaacccgtccgttattgaaaaaggttattcaccaatctcttttgcctccttcccaggaccatcgggggggaatcttccgtccgatttatgatgaacctttaccccgccccaacaccaaaaaccgcctggaatttaaaaccacccttacccgaaaagggagaaattggtaaacaagttaagcctttccactccaaaggatcaagctttaaccaattgattccaaaattaatgtttaaaggaggtgatttcacagccggaattggtcccggagttaaatttatttatgaatcgaagttaaaatactagacctttataaaaaaactataccttaccattttttttgcttatggttaa

SEQ ID NO: 162128 - DNA, 327 bp, Arabidopsis thaliana columbia
cttccggagggcgagggtgtccaatgattaagggagtaagttcgttgaaagcctggaagttaaaaagaccggaaagaggctggttaactaaaggaagggacctcccgtgttcgagcaacccaggatgactaatgagaagctaatggaatccggaaccatgctggtgttggaccaggagaatgtcaggagagtccaacttgccgggacctacctaagccaggctgttttggaagacccaaaccctgaccccttgggccgcggaactttctacggtaaaccagaggaaagggagcccagcaggtaaacctgccagttcctgaagggggt

SEQ ID NO: 162129 - DNA, 290 bp, Arabidopsis thaliana columbia
cttccgttcaaccttatacgctcttttaatccgggttggacttttggagaagttttactgggcccggaccgttgaagaccgtttggtggtttgcaagggttttttaagacctgccaggatcaaggccaaagactttgtaacacttgtggttcagttccctgtgaaatctatcaattttttcgtggctttaagggcaagagtgtccgatgttgaagggaggaagttcgttgagagccttgaggttaagaagaccggaaagaggctggttaactaaagggaaggacctcccg

SEQ ID NO: 162130 - DNA, 387 bp, Arabidopsis thaliana columbia
tccggtccgacccacccgtccgttattttattaagtggcaaaaaaaaaatcggggttttttaaaaaagggtaggagggaaatggggggttcagttaaccgttgaccagatttaaaagttaagggaagcctttagccttttcgttagggatggggttggtggtttaaccaccaaggggctgggacccgtgttggggtttttggggcaaaaccaaccagaggctgagcttaaagacatgaccattgaagttgttgcaattgggaacgggacctttgttttcccggagttcctgaacctgttggcagggaaattgaaggccactgtttcagaggaggagctaagggaagcttttagggttttggttaaagaccagatgggtttaattttt

SEQ ID NO: 162131 - DNA, 347 bp, Arabidopsis thaliana columbia
cgtccgaaattttgaattggggggggccggagaaaattggcgtcgtttttgaaggcattaatggacccgaggaggaacttcctcgttggtttgcttttgaaagccatttttacttgccttggcagttccggtttggggtccgatgttctgtccgttcagttttccagtttggccttcaaagaggttttgaccggtttgcccaggggggtggtggttgctggtaaccagcgtttaaggcgtgcctgggacctttccttgaagaccgatgccctccccatggttcttaaggcggggcaaacccaattccggggttattttaaggccatgcttgcttttgttgaggggga

SEQ ID NO: 162132 - DNA, 419 bp, Arabidopsis thaliana columbia
atcatttctctctatctctttctaaaacacatccatgactgtttcttcatctccatgggctctcatggctctctttctaatggtttcttcaacaatggtaatggctattcctccacgcaaggccattgatgtaccatttggtcgtaactacgtcccaacttgggcttttgaccaccagaaacagttcaatggcggttccgaacttcagcttatcctcgacaaatacactggcacaggatttcaatcaaaggggtcatatttgtttggacattttagtatgcacataaagcttccagctggtgacacagccggagttgcacagttttctatctattatttccaacaatgagcatgacgagttagactttgagttccttggaaacagaacaggccaacctgttttatttcagacaaatgta

SEQ ID NO: 162133 - DNA, 191 bp, Arabidopsis thaliana columbia
tttaaaacccaaatcttatcactactcttttttaatcttcatcatggcctcagtaacctgagccaccgttgcaatcccatggttcaccggccttaaagccttaaccatcaaatcatccgccaccgtcagaatccaaactgctgctgttgcatcaccgaagcttacagggaagtcatttttaaagaactttg

SEQ ID NO: 162134 - DNA, 165 bp, Arabidopsis thaliana columbia
gcgcatttgaccctcttggatactcgaaggtaccccaagaagctcgaggaattgaaagtgagaggtttcaagaacggggtgcgcgacacatcaccttacctttcttgatcaaactaatttacaaatgtatatttaaattcggcgtattttttatgatcatttttt

SEQ ID NO: 162135 - DNA, 255 bp, Arabidopsis thaliana columbia
tcttcgtctagtagattggggatcgatgggatattggtgaagctatagagatcatagacaaatgaatggttgaagagacgtgtgatgagggccaattaatgaagtgcttacacattgggttactttgcgtgcaagaaaactcttcagacagaccagacatgtcctctgttgacttcaagttaggtcataacgccattgatatggaatttgcgaagcatactgcatttacggcgtgaaggaggagaaaccccaaaa

SEQ ID NO: 162136 - DNA, 444 bp, Arabidopsis thaliana columbia
cgtccgatttcccgttcgaccacgcgtccggaaactggcactgtaaaatgcatttcttcgtttcctgagggttccggtgcaaaccctaggatggagtcagtctaaaatgggggtcgttggtactatccgctcatttttttcgcacgatgatcatcttagcagagaacctgccttcaatagagtcctcattgttgtcaagagcttccccaaagccgatccctctaaggtgactcctgaggttcatttccaaaacgatttgggattagatagtttgaacacagtggagatagggatggctattgaagaggaatacaagctggaatatccagacaaagaagctgacaagatcgattcttgctctctggccattgaatacgtttacaatcatccaatgtctatctaattcctgagtgcctcttaatggttttttccttcctttttttg

SEQ ID NO: 162137 - DNA, 251 bp, Arabidopsis thaliana columbia
cacaaacacagagagattcatcatcgaatcataaagctctgttttcaagaagaaaatatgcatctgattaatgcggtggcggcggcgaggattttatccggaatcggacaatctaacggtaataacggaggagaagcgattccgtttggatcgtttgagtggatcacttacgccggaatatcttgtttcctcgtactcttcgccgggattatgtctggtcttactttgggactaatgtctttgggccttgc

SEQ ID NO: 162138 - DNA, 264 bp, Arabidopsis thaliana columbia
agcaaacgaagatgggtaccaccaagacgcattcttggctgcctctatgctctcctccgccgctgaggttacatccccgggtggggccaccatgatcgctcaattcaccggcttgacgcaatgccctggattcccggtcacccgcaagaccaccacggacttgactttcatcccaagcaacggcggaagagtgcgctgcatgaaggtgtggccaccaattgcaaagaagaagcttgagactctatattaccggcgtgaccttag

SEQ ID NO: 162139 - DNA, 336 bp, Arabidopsis thaliana columbia
cggacgcgtgggcgttttggtgagctaacttctctatcctgtgaagctacccccattctctgtgaacgttttcgttttgaaagggcgaggaacaagatcagagagtatgactcaaagaggttggtgaaggaacatttcaaaaggctttctggcaaagagcttcctatcagatccgttcagattaatgaaacaactgatctaaatgagctagttgaaaaggaaccttggctctcgtctgagaagctggtggcgaaacctgacatgttgtttggaaagcgtggcaagagtggttcggttgcctcgaaattagattttgctgatgttgccacttttgtt

SEQ ID NO: 162140 - DNA, 205 bp, Arabidopsis thaliana columbia
ttttcttctacttctccttccctttgcttcaaaaagggggtggtcggatctttatcgctcaaaaatcttcactttcagatcaagccactcctttatggaatctttcaccgcattcattactcgagagtaaaaacaagttctttaaatcccacggaaaaaagaattggtgtttaaaattgccctgcgttaataatggcttcaaaaa

SEQ ID NO: 162141 - DNA, 470 bp, Arabidopsis thaliana columbia
taattgccgggccgacccacccgcccgtataagtccactttttttaatacctctttattctaaaactagttggaggaaatttaggggagtgtttgtttcttgggagaacaatatcccaaactgaaaatggctaagtcatatggagctatcttcctcttgaccctcattgtcctcttcatgcttaaaaccatggttatggcctcaagtggatctaatgtgaagtggagccagaaacgttatggaccaggaagcctgaaacgtacccaatgcccatcggaatgtgataggaggtgtaaaaagacacagtaccacaaggcttgcattacgttctgcaacaaatgctgcagaaagtgtctttggtgcctccggttactatgggaacaaacaattttgttcttgttcaccaactgaaaactcaagagggtggaccaaaatgcccttgaaaaaatctcccttcgttccctttttat

SEQ ID NO: 162142 - DNA, 461 bp, Arabidopsis thaliana columbia
cctctctcagtacacttcttttcatacctcatgagactaaaactagtttgaggagatttagaggagtgtttggttcttgggataacaatatcccaaactgaaaatggctaagtcatatggagctatcttcctcttgaccctcattgtcctcttcatgcttcaaaccatggttatggcctcaagtggatctaatgtgaagtggagccagaaacgttatggaccaggaagcctgaaacgtacccaatgcccatcggaatgtgataggaggtgtaaaaagacacagtaccacaaggcttgcattacgttctgcaacaaatgctgcaggaagtgtctctgtgtgcctccgggttactatgggaacaaacaagtttgctcctgctacaacaactggaaaactcaagagggtggaccaaaatgcccttgaaaaaatctcccttcgttccctttttataataaaaatt

SEQ ID NO: 162143 - DNA, 420 bp, Arabidopsis thaliana columbia
cacagcagatgggccatgctcggagccctaggttgcgttttccctgagctattggctaggaacggagtgaagttcggagaagcggtttggttcaaggccggttcacagatcttcagcgacggaggattggactacttgggcaacccgagcttggtccacgctcagagcatcttagccatttgggctactcaagttatcctcatgggagctgttgaaggctacagagtcgccggagatggtccattgggagaagcagaggacttgctttacccaggtggcagcttcgacccattgggccttgctactgaccccgaggctttcgcagagttgaaggtgaaggagctcaagaacggaaggttggctatgttctctatgtttggattcttcgttcaagccatcgtcaccggaaagggacctttg

SEQ ID NO: 162144 - DNA, 352 bp, Arabidopsis thaliana columbia
ctcaggtaactaattaatattcaaaaagattttttttaaagtggaagcagggggtggcgccggaggagcttcatgggaggagggggtccacaatggccttagaaaggtgcatgtagggcaaggccaaaatggtgtgtcatctatcaacgtcttgtatgcgaaggactctcaggatgttgaaggaggtgaacacggaaagaaaacgttacttggatttgaaacgtttgaggttgatgcagacgactacatagtagcagtgcaagtgacctacgacaacgtgtttggccaagactctgacatcatcacatctattaccttcaatacattcaagggaaaaacatctccaccctat

SEQ ID NO: 162145 - DNA, 237 bp, Arabidopsis thaliana columbia
cgccgacccatctactttcacaaaccagaaattggacccgtgtcttctttctcactgttccttccttcacaaagagaccctattataaagaagtgggttcactttttccctattaaaatggccctccttttatacgaatttccaagattgtacctcaagttttcgatgaacgtttagcttatcaccgccataacgttttcaaactcgcccacactgcaacctgaatgccattactaa

SEQ ID NO: 162146 - DNA, 457 bp, Arabidopsis thaliana columbia
gtaaaactaaaaataaaaggagttccacttttcaatttttctccactccaaaaccagaaggggggaaaaaaacatcagggaggacaccaccaccaacgaagaagccgcacgttctggtgataccgtttccacaatccggtcacatggttccacatcttgacctcacgcataagattcttctccgtggagccaccgtcactgtcctcgtcacacccaaaaactcttcctatctcgatgctctccgttctcttcactccccggaacacttcaaaaccctaatccttccttttccttctaacccttgtataccttccggtgtcgaatctctccagcaacttcctctcgaagctatagttcacatgtttgatgctctctctcgtctccacgaccctctggttgactttctaagccgtcaaccaccgtcggatctccccgacgccatcctaggaagctcatt

SEQ ID NO: 162147 - DNA, 278 bp, Arabidopsis thaliana columbia
tcacatccaaaaaaaaaaaaccacaatcttttatttttaatggcttcctcaaccatggggtgttcctcccatagctgggggggaaagtctttaaatcctcccatatcaaatatcttccaaagcgcccattttaccataaataaaactttcgccaatccaaatgtttcatcatccatcccatactacggttcttaccaaatcaagtactttactccattctccatctagccccccagcttccttaccgtttatttccccgtttactacctattttacac

SEQ ID NO: 162148 - DNA, 392 bp, Arabidopsis thaliana columbia
agccaccatggtcgctccattcaccggtttttagtcatccgtttctttcccggtcacccgcaaggccaacaacgacattacttccatcacaagcaacggaggaagagttagctgcatgaaggtgtggccaccaatcggaaagaagaagtttgagactctatcttacctccctgaccttagtgacgttgaattggctaaggaagttgactaccttctccgcaacaagtggattccttgtgttgaattccagttggagcacggatttgtgtaccgtgagcacggaaacactcccggatactatgatggacgatactggacaatgtggaagcttccattgttcggatgcaccgactccggttaagtgttgaaggaagttgaagaatgcaagaagg

SEQ ID NO: 162149 - DNA, 290 bp, Arabidopsis thaliana columbia
agcttccataagagtcttattcccaacttgtattacacatatttcactctctctgaccggggtttcttttagccaccagagggccaccactcctttctccggcttttttctcacttcactttctccttcccaatcttctctccagaaactctctcttcgtacttcttccaccgccgtttgcctcccacccgccttttattattcctcatcttcctcctcctcatttacccgttccgttccaacccttatccgtaacaagccattttttgccgtttcctactcctaccatt

SEQ ID NO: 162150 - DNA, 422 bp, Arabidopsis thaliana columbia
ctcttaaatcctttcctttcattgtagttaatcaatgattacgattatggccacatcagctatccaacaatcctccttggcgggccaaacggctctcaagccctccagcgacctcatccaaaaggtgggcgtcttgggcggtggccgtgtgaccatgcgtcgtaccgtcaagtctactccccaaagcatctggtttggaccagaccgtcccaagtacttgggaccattctcggagaacacaccgtcttacttaactggagaataccccggagactacggctgggacaccgctggactctcggctgacccggagacattcgctaagaaccgtgagcttgaagtaatccacagcagatgggctatgttgggtgctctcggatgcacattccctgaaattctctccaagaacggtgttaaattcg

SEQ ID NO: 162151 - DNA, 332 bp, Arabidopsis thaliana columbia
  unsure (1)..(332): unsure at all n locations
ctctggtagccatggcttcggctactttctctgtggccaaaccatctcttcagggtttttgggagttctcaggacttggaagcgcnctctgctcttccctttgccaagagatcttcttccgatgagtttgtttccttcgtcagtttccaaacttctgcaatgagaagcaatggtggatccaggaaaggggtgaccgaggccaagataaaggtagccatcaatgggttcggtaggattggtaggaacttcttgaggtgttggcatggtcgtaaggactctcctcttgatgtcgttgccattaacgacactggtggtgttaaacaagcatcaca

SEQ ID NO: 162152 - DNA, 358 bp, Arabidopsis thaliana columbia
ggtgatgctattgttgggttccatggacggtttggctcttgtattgatggtatcggggtgtattacgctccacttccacctggtgctcctcctccagaaaaactccaaggccaaggtggtgacggtggagattcttgggacgatggtgctttcaaaaatgtgaagaagatatatgtaggacaaggcgatgttgggattgctgcagtcaaatttgagtacgagacttacactagtgaggtgattctggcagaaagacatggaaaggaaacattgctcggatacgaagagtttgaactggactatccgagtgagtacattacagctgtggaaggttgtcacgaataagtaattggatctg

SEQ ID NO: 162153 - DNA, 337 bp, Arabidopsis thaliana columbia
ttatggtcgctggtgctcatctttgtgattttttataccgtaagagttgtgtgtactgaagggcctgaaaggattcgggaacggagggcaatgggagcatcatttgatcacggcgaggatggaaatttgcatttggccagagagggtggtcactcgcattgtaggatcgttcacgctgctgatatgacaggaagagagattgagagagctttacttgaagctgtacttaatgatcccaacatatctgtcttcaaacaccattttgcaatcgatctgttcacttttaaagatggcttgaacacagtttggtatggtgtggacactttgaatatcaaaa

SEQ ID NO: 162154 - DNA, 384 bp, Arabidopsis thaliana columbia
gtgagactcaaccatggcgtctttggctcatcaattctcgggattgagatgttccccactctcttcttcttctaggttatcgaggagagcttcaaagaactttccccagaacaaatctgcctctgtttctccgactattgtcgccgcggttgcaatgtctagcggtcaaacaaaggagcgtcttgagctgaaaaagatgttcgaagatgcttatgaacgatgtagaacttctcctatggaaggtgttgctttcaccgtcgacgatttcgctgctgctattgaacaatacgacttcaattccgaaatcggcactagggtaaaaggaacagtgttcaagactgatgcaaatggtgcattagtagacatttctgcaaagtcatcggc

SEQ ID NO: 162155 - DNA, 351 bp, Arabidopsis thaliana columbia
ctcgaaagatttatcatacacatgcaaaaattttgtcccaaaagctaaaatcaaaggccgatgagatggtagatgtgcgggtgggggaacccaccgaagggcttaaagcactcccttaaagcccctaacctaccagttcctccggtgaccgtccctaagctaccagttcctccgatgaccgtccctaagctaccagtccctccggtgaccgtccctaagctacccgttcctcctgtgaccatccctaatctacccgttccaccagtgactgtacctaagctacccgttcctcctgtgaccgtccccaagctacccgttcctccagtgaccgtccccaagctacccgttcct

SEQ ID NO: 162156 - DNA, 221 bp, Arabidopsis thaliana columbia
ttcatcctaaagatggtgtttatccagagaaggctaatccaggaagagaaggtgttggtctcaacatgagatctattgggaaaaatgttagtcccattgaagttaagtttactggcaaacaaagttatgatttgtaagatctgtaaactaaaaaaaccaaaaactatgtgcatgtggtgatgattatgactatgtttcatgttaatttttaatggattttg

SEQ ID NO: 162157 - DNA, 449 bp, Arabidopsis thaliana columbia
gaaagctctagagagaaagagagagagagattgtttgtaaagaagaagatgttagagtcggaggtaacaagtttccggagaggcagccgatcggaacttcggctcagagtgacaaggactacaaagagccaccacctgcgccgttgttcgagcccggcgagctagcttcatggtccttctggagagctgggattgctgagtttatagctacgtttttgttcctgtacatcactgttttgactgttatgggtgtgaagaggtcaccgaacatgtgtgcttccgtcggaatccaaggtatcgcttgggctttccggtggtatgatcttcgctctcgtttactgcaccgctggtatctccggtaagttcactggtttctccgatctaaacgattcgaatatagatcctgggttagctaggtagcgaaattcaaatttagcatgtttaggatt

SEQ ID NO: 162158 - DNA, 372 bp, Arabidopsis thaliana columbia
cgaaaaattcgaaaaaggaactgagaagaaacagatctgaagatggagtgtgtatttggtctagttgggaatggattcgctatcgtggcggcggatacatcagcagttcacagtattcttcttcacaagaccaaagaggacaggatcatgactcttgactctcacaagctcgtcgccgctagtggtgagcctggtgaccgggttcagtttacggagtatgttcagaagaatgtgtcactgtatcagtttcgtaatgggattcctttgagtactgctgctgctgctaacttcactcgtggagaacttgccactgctttgagaaagaatccatattcggtgaacatcctgatggctggctatgacaaagaagcc

SEQ ID NO: 162159 - DNA, 370 bp, Arabidopsis thaliana columbia
gaagaaggaagagaggagataaaaagcctttctaatggcgttcaatatcataacaccggggggtgtttattcaggcacgggtgtcactttcgtttccaccattaaagctgctttcgttaaacctcctttggcctctccgtctcgtcgtaacctccttcgtttctcatcatctcctttgtcatttccgtcgctccgtcgaggtttccacggtggtcgtattgtggcaatgggttcttctgctcctgaatcggtcaataagccggaagaagagtggcgtgcgattctttctcctgaacaatttaggattctcagacagaaaggcactgaatatccaggaactggagaatacaacaaagtattcgacgatggc

SEQ ID NO: 162160 - DNA, 135 bp, Arabidopsis thaliana columbia
tcataccaccgagggcgtttttttaagaggcatgtatcactttcatttccaccattaaagctattttcgttaaacctcctttgtcctctccttctctttttaacctccttcctttcttatcatttccttttacat

SEQ ID NO: 162161 - DNA, 382 bp, Arabidopsis thaliana columbia
gtttaatgttccttttgagttcaacttcatagccaaaaaatgggaaaccatcactcttgatgaacttatgatcaatccaggagagacaacggtcgtcaactgcattcatcggttacaatacactcctgatgaaactgtgtcattagactctccaagagacacggttctgaagctattcagagatatcaatcctgacctctttgtgtttgcagagattaacggaatgtacaactctcctttcttcatgacgaggttccgagaagcgctttttcattactcttcactctttgacatgtttgacaccacaatacacgcagaggatgagtacaaaaacaggtcactgttggagagagagttacttgtgagagacccgatgagcgtg

SEQ ID NO: 162162 - DNA, 397 bp, Arabidopsis thaliana columbia
ttcgtccccatctccgtttctgatactttaattaatactcattgaaaaaatcaattcgaactaaaaaaaatctcgaagagtgtgggcgcgtaattttcttctttattttgttctcactgattattttgcattagctcttttcttttttggggtcgaaaaaattaggtttttttttgggattctgttgatggcgacgacgacgacgacgcaggggcagcaaacggcgattgactcggcggttctcgatgatataatcaggcgactcacggaggtccggttagctagaccaggaaagcaagtccagctctctgaagctgagatcaaacagctctgtactacagctagagatattttccttcagcaacccaatttacttgggcttgaggctcccatcaaa

SEQ ID NO: 162163 - DNA, 362 bp, Arabidopsis thaliana columbia
ggccgaccgcacgcgtccggtggtgagtgatccaagcttgacgaaatcatttgtttattggagctggaacaatgcttcgggtggtttttttaaccagttgtgggaggaagcaagtgacgttgagaaggctcgtaaagtgtgggagatcagtgagaagctcgtgggcttggcctaataaacttgaagtctgttaaatttgatgacacctctcggtaccaatcgaagaaatctagtgaatttccgggatttttagatatctgattctgttgcgaagtttttttatccttattagtgtctgttgagtgtaaattgcttggcgagtagcccacaataaagaaataaaaatggcgaatctttagctt

SEQ ID NO: 162164 - DNA, 342 bp, Arabidopsis thaliana columbia
aaatcctcaaaagcctatttgggggatcatcttctttctatcatcaccatggatccttacaggtgtcgtccttcaagcgcgtgcagcgccccattctacaccacaaacggtggtgctccagtctccaacaacatctcttccctcaccatcggagaaagaggtccggttcttcttgaggattatcatttgatcgagaaggttgctaatttcaccagagagaggatccctgagagagtggttcatgctagaggaatcagtgctaagggtttcttttgaagtcacccatgacatttcaaaccttacttgtgctgattttctcaaagcccctggtgttcaaactcc

SEQ ID NO: 162165 - DNA, 162 bp, Arabidopsis thaliana columbia
  unsure (1)..(162): unsure at all n locations
tttacgctttttgtcatttaacaaaacccatgagtttgagctaacaagttcccncagaggcaacctttttgaagataagctcagccttacatggcctacaattaaccaccaccagctccttttttctaacctgttaagctttcttcatggcctttttgaaaa

SEQ ID NO: 162166 - DNA, 351 bp, Arabidopsis thaliana columbia
ctctccaatccatcaactggaggagttttgcttttggattcccgaatctatttatcaacagggcacattttatccgaggccggcgcgttccgttccttgcttcattcagttcccctgctgtcatctttgagcagatctctgtcatttacttgctccctcgattgtttgttgcgtccttcactttggtgttgcctttcttccccactggctcctttgagagaatggaagaggaaggagatgtaccaactgcttttaccatggcaaggattgtctctaatatccccatttcacgcggtggtccgactagtgttgtcatctatgacattcacgctttgcaagaaaagttttact

SEQ ID NO: 162167 - DNA, 362 bp, Arabidopsis thaliana columbia
ccaaaactccagaaccctagaattcgaaatctccaaagaacccgacaaagcgccatgtcggtcactatcccggcgaatgtggggctcaacccgagatctaacaaatctctcactcaatccgtacctaaatcctccgcaggattcgtctgctccgatgacaaatcctcctcctccacacctaaatccatgaaagctttctccgccgccgtcgccctctcttccatcctcctctctgctcctatgccagctgtcgctgatatctcaggtttgactccttgcaaggactcaaaacagttcgctaaaggagagaagcaacagatcaagaagcttgaatcttctcttaagctctacgctcctgaatc

SEQ ID NO: 162168 - DNA, 452 bp, Arabidopsis thaliana columbia
tcccggtcgaccacgcttccgaagggcgagagtgtacgatgatgaagtgaggtttttcgttgagagccttggagttgataagatcggaatgtggctggttaagggaaggcaaggacctcccgtgttcgagcaacccgagatgacttatgagaagcttatggaatacggaaacatgcttgtgatggaacaagagaatgtcaagagagtccaacttgcctagacctacctaagccaggctgttttggtagacgcatacgctgacgccatcggccgtggaactttctactttataacagagcaaaaggtgcccatcatgtaaacctgccagttcctgaaggttctactgttcctgagcttgaaacctttttccaactcctaatattgcaattgaaccttttttttactacttttgggcattattataccccttttttatattccttgtttaactc

SEQ ID NO: 162169 - DNA, 167 bp, Arabidopsis thaliana columbia
cgggccgacccacgcttcctcaaaaagcttttaacctcatcctttaatccttcctccaaccatgccgaccagaaacaaagccattttttaagaagaaaagaaagtctatcaccccaactcacttatggcggccctcgctaattttatctcaactttaatcttcttct

SEQ ID NO: 162170 - DNA, 342 bp, Arabidopsis thaliana columbia
cgtccgttcatataaaaaaagaaatttcaacaatttttttttctacttcaacatgaccatcaggagaaaatcttccgaaggtatggggagggaccttaacccccccacaacaccagaaaccgccgataatttcagagcactctgtaccgtatagagaggaatcggtaaacattttaagccattacactacaaaagatcaagctttcaccgagtgattccaaaattcatgtgtcaaggaagtgatttcacatccggaaatggtaccggaggtgaatctatctatgaatcgaatttcaaagacgagaactttatcaagaaacatacaggaccaagttttttttt

SEQ ID NO: 162171 - DNA, 391 bp, Arabidopsis thaliana columbia
ataatatattcagtagcaaaaaaaaaatctgtgttttctaaaaaaaggtaagaaggaaaatggcggatcagctcaccgatgacgcagatctcatagttcaaggaagcctttagcctcttcgataaggatggtgatggttgtatcaccaccaaggagctcggaaccgtgatgaggtctctggggcaaaacccaacagaagctgagcttcaagacatgatcaatgaagttgatgcagatgggaacgggaccattgatttcccggagttcctgaacctgatggcaaggaaaatgaaggacactgtttcagaggaagagctcaaggaagcttttagggtttttgataaagaccagaatggtttcatatctgcagcagagcttcgacatgtcatga

SEQ ID NO: 162172 - DNA, 379 bp, Arabidopsis thaliana columbia
  unsure (1)..(379): unsure at all n locations
gaanacagggccgaccgacgcgtccgttccaccctatacgctcctttaatccgtgtggtacttatggagaagttctactgggcccgggggggttattaccgaatgggggtgtgcaagggtatcttcagaactgacaagatcaaggacgaagacattgtcacacttgttgatcagttccctggtcaatctatcgatttcttcggtgctttgagggcgagagtgtacgatgatgaagtgaggaagttcgttgagagccttggagttgagaagatcggaaagaggctggttaactcaagggaaggacctcccgtgttcgagcaacccgagatgacttatgagaagcttatggaatacggaaacatgcttgtgatggaacaag

SEQ ID NO: 162173 - DNA, 354 bp, Arabidopsis thaliana columbia
aaaatctgaaattgagagagacagagaaaaatggcttcgcttctgaaagcattcatcgatccaagagaagaacttcctggctggtatgcatatgaaagccatatctactcgccttcgcagatacggtctgaggtacgatgatctgtacgatcagtattacagtatggacatcaaagaggctatgaacagattgcccagggaggtcgttgatgctcgtaaccagcgtcttaagcgtgccatggacctctccatgaagcacgagtacctccccaaggatcttcaggcggtgcagaccccattccgtggctattttaaggacatgcttgctcttgttgagggggaaagcaaggtacg

SEQ ID NO: 162174 - DNA, 239 bp, Arabidopsis thaliana columbia
gcgtccgcaaaagcctatttgggggatcatcaaccttcttattccaccatggatccttacaagtatcgcccgttaagctcgtacaacgcgcgattctacaccacaaacggtggtgctccagtctccaacaacatctgttccctcaccatcggagaaagaggtccggttcttcttgaggattatcatttgatccagaaggttgctattttcaccagagagaggttccctgtgagagtggt

SEQ ID NO: 162175 - DNA, 371 bp, Arabidopsis thaliana columbia
aataccggggccgcccacacccgtccgattttaattctaataattattatcaatcagcccaccaccaaaagggggttaaggggagggggtttcataataataaataaatccttaatttattggatctactaatatttggatttttccttttatctttccctttttttccatctttttttttttgggtttccccgattggaaaagcgtgccaaaggaagaatttttatttaaaccaaatttttttgttttaattttggaatggcctcggggggcttagagcctattgccggggttggggaatttactggaaacgttcctgatgctgttagataacccggggggatgaaggccttgaaatttcaagatgttaa

SEQ ID NO: 162176 - DNA, 388 bp, Arabidopsis thaliana columbia
cgttctttaaccactaggttcagcatttagaaagggtttacccaccaagaatccaaattcataagggggtatagttgcaggagccatagtttcagaaccaggagagcaaagctgtaaaatcagtaatctttttagccgaagggaagcatggttttgggtcctcggggtttcagggggattataaatgggctaactggcggggtttgcagctggtttacctccagaggataaaccaagactttgggaagcaaaaggcgggaaagagctggaaaaggttccaagggtaactccagagccggggcttcagtatagggtttttaaagtgggtggaggcccgagtccaccggtgggttttcaggtggcggctaattatggggctttggttcca

SEQ ID NO: 162177 - DNA, 261 bp, Arabidopsis thaliana columbia
ccggggccgccccacccgtccgtttggtaatccacaataaaatggctggggattttaattaagggggaccaaaaaggagaggggcgcggggctaaaagcctaccatggcataccccaggtgggcaccaggattaactccttgggtggcaagttaccaccaaataatccattcgacaaccacctttccgttttggaccttaagacccggcctgggcccatttttccagccaccgaatacttccaacactttttttgttaagg

SEQ ID NO: 162178 - DNA, 400 bp, Arabidopsis thaliana columbia
cgaaaattaaaaaggaggaacctaccaaaccaaaaaaaaaatggggggccgggaaaccaccacggccgccgccaccaccgccggggaagaaaccgggccaggggaaggccaccgcctggccgcccgatggcccttccttggggccgggtccttgggaggattccaaatggaaggcttttggggccgagggtcaccaagggcctactccgggtttgggggggggttccaccgttgctcctactctttttggggacgcacccgccgccattaccaccgttgcgaaggctccgtgaaaaaaaggaaggcctttattattgaccgggtttgggggttcgccggaaaccaaacccatattggtggtttgttcaatacctgatccagcttggttttttaccgtttt

SEQ ID NO: 162179 - DNA, 328 bp, Arabidopsis thaliana columbia
aatcccggggccgccccagccgtccggggatggatccagccattcttagagggttcaacggggcaaaaatttttgattggaagaaaccaagggcccaattggtaaaagatgtttttttggtgccaaagttgggggaaccagccaggtttggggcccagagccaaattaggttttttcgaaaggggttggttggcaaggaaaagggggttgttgttgaagaaaaattaggcccagttttgaatctggggcttaggatcagtccaccttggcaaacccggagggaaatttttactggcactgcgtccggtttttccatggaaaccgcctt

SEQ ID NO: 162180 - DNA, 308 bp, Arabidopsis thaliana columbia
ggaaaacggggccgaccacacccgtccgaaaaacccgccgaaaagaggtaaatccgattcttctttttgtggaccatggcttaactttgcggtccaaggctttaactcaaaagaccccccctaacctaaaacctttcttttttcccctcgtttccaagtctcaaggcatggcccaatccgtctttgcccctgtttcccaggagttttttggcctgagtggttcttatggggaagggttcttggttatggttcctcatcccaggaaggtgtataaattgccttttgaggttctggtttttgttaaggct

SEQ ID NO: 162181 - DNA, 311 bp, Arabidopsis thaliana columbia
gggaataccggggccgaccacacccgtccgttaccccaaagaatcctaactggttaaaccgtgaccgttccgtcctttttgttgaccatggatgcatgttgaaataccctctgtttaacctggttggctacaccagcgttggggaggaagatttgaagagcttccgccaagggggaagaaagactccaggacatcctgggaatttggggactcctggggttgaagccactactggtcctttgggacaaggattggcaaatgctgttggttaagctttggcggaaaagattttggttgttaatttaaacaaa

SEQ ID NO: 162182 - DNA, 388 bp, Arabidopsis thaliana columbia
aattccgggtccgcccacacccttccgccattttattttttttaaaggaaattcgtaggtcctttcaagaagcagaagatggcccaaaggggggaggcccagggggggaagggggccaacttttgggccgttggttcgccccatgacgccttgcccaaaattaagttggcagcaggcttagccggaattaaatttgttcagtttgtttttgtaaagaccggccaacccgaccaggttctttttgtgggtcccaaaggccgggttctcccagttgacccgttggggattaaccttccagccgaacatttattttttgtggaaggttggtttagccttgaaggttttattcaaggatttaagttcttttccaacaagaagacttttgttg

SEQ ID NO: 162183 - DNA, 429 bp, Arabidopsis thaliana columbia
  unsure (1)..(429): unsure at all n locations
cgggnccggaatccccgggccgcccacacccgtccgtgggtttttttggccgaaaccaggcctagattcgttttccaatttggtccttttttttttaacacgggggaggaggaagaagaagttggattccttaccaggcttttaatttaaatttccgcttaaatctccttaataatataatctttttccttcttttacttggaatttgaacctgccaaatcgttactattatggttttccctttttttcctggtgggtcctttggttcttagttggttaaccggaggtaggattcgcgtcggttttggtcagatttgggggccggaccagattaacgatgggtaatccacggttaccgaacgtgaatccaggaggaaatcggggaataagcgatctaagggttcgccgaaaggcgttaatccgccggaa

SEQ ID NO: 162184 - DNA, 289 bp, Arabidopsis thaliana columbia
gggccgccccacccgtccgttccatttcgaacctccaccgaatcctttgttgattttcccaagggcgatggcaccatcgaggggttggaatctaatggggccatccaagggcttgtcttttttttcgccttcgcctttccttagaggcgattggggtttttcccccaaaccctttttaacggggccttttcctttggaaaatctcaaagctccgattccgttgccaattgattcggcccataggaaaggagctgtgggtcccaataccggtcgggattttcctgggcac

SEQ ID NO: 162185 - DNA, 270 bp, Arabidopsis thaliana columbia
cggggcggccccacgcttccgaatctgccaaatcctttttttatccttttttttatctcacctaataatttcttaggttaaggaacctgggtttaaaaattaaaaggcctcttcgggttgtttaaaaatcctgtttcaccgcagtatttaatttaaaaatacctgccgttgacggggcatgcccttaaaaggaacctgccttgattccaaaaacgttgggttttcccctacgccgggttactttcggggccttgttcgttaaacaaacgg

SEQ ID NO: 162186 - DNA, 407 bp, Arabidopsis thaliana columbia
  unsure (1)..(407): unsure at all n locations
cgggncnggaataccggggccgaccacacccgtccggggaggcggagctgaaatgttaaacctgcaattaaccgggaggacaacctaatttagtttgggtggtcagaaaaggatgtcgcttacttgtttttcgaccccatttgggccgtccaaaatcgatccccgggaggggttttacgcaccgcctttttttaatgccagggttaatctccgcccgttttttcctggccatgtccttgtctgcccgagaccccttgggccacgatttactgattttccagttgatgagaccagggccctgtggcttactgttaaaaaggtgggctttaagcttgagaccttccataaggcgtcttctttaccataagccatccaagatggcctttaagcgggccagactgttcccc

SEQ ID NO: 162187 - DNA, 429 bp, Arabidopsis thaliana columbia
  unsure (1)..(429): unsure at all n locations
cgggnttggaataccggggcggaccaaggcgtccgaaaaattttgaatttggatttaaagggagtaacgcgggctgttacgggcaaccgggaaggtggtgggaattccgaaatggagacgaccaatcggggcgatcaaccgtaaattaagaattgaatggttttcttggttttgggttaaacaaatggggggaatgggggggggggcgaatttgatttcgggtggtaagtttggtcaaattttttttttggattggtgggggatcaaggggggagggaaaggagaaattttaaaacgggttaaggccgccgttgttgaaggtggagatacggttgggtaggagggttgttaaagttggattcctggccaggtttcaatggttaggaactggattcttctttttaatgtggtacttttggaatgtgattt

SEQ ID NO: 162188 - DNA, 292 bp, Arabidopsis thaliana columbia
aaaaaccgggccgaccacaggcgtccgtaccaaacaaaaagggttttgaaaaagtttcttttaatggggcggctttggctccggacgggggtggcttttcaagaaaaggcagatggaccggttggcccgccgtgaaacaaactaagccggccaggtttccttgagggttttaattgggaacggttactggggattaccaggtcgaaggtccgattaaggaaactggtcgtggcccagcctaatgggcctattacttgaggaagaattccaaaggggtccaataacgttatcg

SEQ ID NO: 162189 - DNA, 366 bp, Arabidopsis thaliana columbia
  unsure (1)..(366): unsure at all n locations
acgggnctggaaaaccggggccgaccaacgcgtccgggaatccggggccattaatccagaaccttttgggttgtccatgggggaatttttgaccaaggttggaatcctttactgtaatatgatggaacccaaattgaaaccagggggggaattagcagggggttttaacacattaatgccaatgggggaggcctttagggggactttaatttttgcaggagatttaacgggggaggttgggattgaggcctgggcaaagggacgaactgtttttggggttaatggccgagggtttttagccaaccaagacttgccaaaggggttccaactggttgcaccgttgattaaatccattaggtaaacgtt

SEQ ID NO: 162190 - DNA, 380 bp, Arabidopsis thaliana columbia
aaattttcacagatttttttaatggacgatggcgcttggggctactactaaaaggactatcggattggcggcgaccctccggcgggtggttcgacctttggttactgacgcgggggtggagtcggataccaggcgtggggggaccggaagggtctccggaatccaagaggggcatttttttggaagggggataaaatactaacctgttagaacagttaccaagtaaggatctggaaaactcggaaaagggaagataaacttcgtttcaaccttaaagtgggagaatccgttgtggggatggccttttacaggtgacccttaggctaaggtgggggactttgtttttgttttggatcctgagaaagctgttaattttttgg

SEQ ID NO: 162191 - DNA, 404 bp, Arabidopsis thaliana columbia
  unsure (1)..(404): unsure at all n locations
ggggnggacccagccgtccggaccatgggtttcctttatgctcttttccgttcttttggtggcctctccggctaaggccacgaggggggttcttttaaacggcctaaagtcctccgttgccttccaagccacccgaagggttaacaccaactttccttccttaacaggcaacgggggaggagtaaactgcttgcaggggtggcctccaattggaaagaaaaatttggagactttttttaaccttcctgacctaaccgattccaaatgggttaaggaggtggtcatacctaatccgaaacaggtggtttccttggttataatccaattgggaccacggtatttttgttccttaggcacgttacctaacccgtttcctataatggacggatctggccaatgtgtaa

SEQ ID NO: 162192 - DNA, 393 bp, Arabidopsis thaliana columbia
cggaatccccgggccgcccacacccgtccgaaaacctaaactgggattctttcgggtaaccttggtttcggttccttcttttgtccccaggggtttaactgaattttaaggatggcaaacctcctttgttttttttcctttcggaaggaaacttttttccgatgggttcgtttcaatcgtttctttccagacttttgcattgggaagcaggggtggttccaggaagggtgggactgaggccaaccttaagggggccattaatggattcggtgggaccggggggaacttcctgggatgttggcatggccgcagggactctcctttggatatcatggccataaatgacactggtggcgtaaggcaggcttggcattaactaaaatccaactttac

SEQ ID NO: 162193 - DNA, 429 bp, Arabidopsis thaliana columbia
  unsure (1)..(429): unsure at all n locations
gaatnccggggcggcccacacccgtccgtccttggaagccgaggaagaggaggaggcctttccagttccacaccgccttgggtttgggcgtgttagtttttcgaccaattcgaccagtttaacgtttttttaaatttaaaacctccaattttttcttccgaccaatcgtttaaaaaccagagctccaatttcctgattccgttgttgtttttgagcctgagccgccgccccaaattttccttcttagaaaccctgtaggtggagcacgcgtccacttttggaatcctgaagatgcgatcgaggtttttgtcgtgggttacccggccaaagtccttaagggattaattgtttttaaggctggtgaggtcgttggagttgatttcccggggttttgttatcattctcgttaatttatggctggaaattgca

SEQ ID NO: 162194 - DNA, 328 bp, Arabidopsis thaliana columbia
gccaatccgttatcaatactttttgccgtcccctttaagagggaaaggcctgggtcgggtgcgggggccataaatactcaaaaactcgacctttcaaccgaatttggttcaactcgaccccaatgggtggctgttgttggtggttgcccaccattcgcgggggtttcttttttaagaaggctttcaagacctcctcctttggtttccctttttgctttggttttttttgggaagaaggaagttgggtttcctgaaaaagccccagctgttttggaacctaattttcaggccattaaagccattattcgggttttttatttaaggggtt

SEQ ID NO: 162195 - DNA, 431 bp, Arabidopsis thaliana columbia
cgggcccggaattccggggccgcccacacccgtccgaccgggatggcgaagaaaaggaggggggttaaggccgttggaaaacgggccattaacggggatcctttaaccaataaatggaggaccagaactccggtcccttccgtttccggaaaacgtaagagaaggttctttcgaaaagggcccaaagggcaaaaggatttgggggggaagggtttggttcctttggaagatgtggggatggtttttgttaaggctgcataagaggactccaggaaatcccccagaaaatttagcgttaagaagagctggaggttgaccaacctaattattaagggcaaaaggaggaaaacccggaaggccaggggggaaaaatctgttgatgtgttgctagaatgagtgtcgggtttactctgaaacccattttttttaac

SEQ ID NO: 162196 - DNA, 430 bp, Arabidopsis thaliana columbia
ccggggccgcccacaggcgtccgaaccgttccatccacggccccatccccttgtttgtaggattccgttaaggggggggggcagtttaaaatccttccatgaaaccaccgttttataggaggactaattttttgaaacgaactaaattccaggggggacacattttaaacgggggatcgggatcgtccttttttccacacacccccacttgcaaagttggggaggaggaagtgttggccaagtttggggtttggaaggatttgggagttggaaattttgggggggctggtttttttagccccaaagggaccaaagggctggttgttattgaaatacattggggggggtcgcaggattgatgagaatgtggcaggggggtttatatatatggttaatttaggcttcctaattattaaagatttaagggggg

SEQ ID NO: 162197 - DNA, 453 bp, Arabidopsis thaliana columbia
  unsure (1)..(453): unsure at all n locations
cgggnctggaataccggggcggaccaaggcgtccgaacaatttatgtttttggtgggaagggttggtccattaaaacatccattaaggggccggggccggattttgttgattatccgaccaaaaccgttcttaacagggtggaacacctttttttggttaagcagtcccatgccagaaggcaggggggggcaggattgagcttgaccagggaagaggggccaaaaactccgttgggggactacttaaagccaataatggccgacggagacaccggttttgggggaacaaccgcaaccgtaaaactttgaaggtttttcgttgaaagaggccccgttggggtcaaaatgggggaccagtcctccgtaaccaagaagggtggccacatggccggaagggtcttggtggcagtaagggaaaaaataaaccgctttgtgggggttgggttccagttc

SEQ ID NO: 162198 - DNA, 363 bp, Arabidopsis thaliana columbia
aatcccggggccgaccacacccgtccggtttggtttaatggcaggaatcttaaattcatgactggaggggggggcctattgtcaccccaaccggggcctaaggcaggggtggggttcaaggctggggttaaggagattaaatggccttactatcctccggaatatgaaaccaaggttcctgttttttgggcggctttccgggtaactcctaaacctggggttccacctgaagaaccaggggctgcggaggctgttgaatcttctactggtccatggccacctgggtggcccgaggggcttaccagccttgatcgttccaaaggacgatgctcccacatgaggcccgttccaggggaagaaact

SEQ ID NO: 162199 - DNA, 322 bp, Arabidopsis thaliana columbia
  unsure (1)..(322): unsure at all n locations
gggnngggaataccggggccgaccacaggcgtccgaattttttaaccaggttggaccacaatgtttgtccttggttccgtttttaacggtggttggggctttttaattcttttttgttccctccataaatccaagcaggaccttttttctttttttctccctaaaactaaactttttctttttttttttgggtattggccccaggccattccggttttttaaaatccgttcttctttgccctgggaatctgaattggattccgccttaaatgcttttgcagttccagttgattggggtgggaaacttggtaatgcaaatgag

SEQ ID NO: 162200 - DNA, 279 bp, Arabidopsis thaliana columbia
  unsure (1)..(279): unsure at all n locations
cgacccacgcgnccgctccttctaccactaggttcagcatctagatttggtttaaccaccaagaatccaaattcaggagagatatatagctgcaggaggcatagcttcagaaacaagagagcaaagctgtaaaatcagtaatctctttagcccgagagaagcaatgtttttggtactcggcgtctcaggaggattatcaatgagctcacttgccggcgttgcagctggtttaccttcagaggataaaccaagactctgggaagcagaatgccagaaaga

SEQ ID NO: 162201 - DNA, 171 bp, Arabidopsis thaliana columbia
aaccccggcggaccacgcgtccgctttgtcatccactatcaaatggcttgggatgtggattaaggaggagcaaaaaggacagggtccagttctaagatgctcagcggggcatatcacaagtcggcaccacgatttacttcctttgtgggcgagttcacaccaaatcaatcc

SEQ ID NO: 162202 - DNA, 318 bp, Arabidopsis thaliana columbia
aaaaaaaaaaagaggaaactaacataatttaaaaaaaaagggaggccgggaaaacaccgccgacttttacaacaacgacggggaagaaaacggagcaagtgaaagacaacgacttgccgaccgatagcccttacatggcgacgggtactttggaagattacaaattgaaagcttatggagccgaaggtcaccaagagcctactccgggtcttggaggtggctccaccgatgctcctactttttttggtgacgcacccgccgccatttctactgttgcgaaagctccgtgaaaaaaaagaaagactttaatattgaacg

SEQ ID NO: 162203 - DNA, 248 bp, Arabidopsis thaliana columbia
  unsure (1)..(248): unsure at all n locations
caaaaggggtaaagagggaggttcttatcatcaataagccttcattttatggactactcatatctggattcnccttcttatctccccttttctccatctcttttctctgggtttccccgattgaagagcgggcaaaggaagaatcttttataaaacaaattcttttgttttaatcttgggatggcctcggtgggcatagagcctagtgccgcggttagggaatctactggaaacgttactgatgctga

SEQ ID NO: 162204 - DNA, 302 bp, Arabidopsis thaliana columbia
cgaaaaataaaaaagaggaaactatcaaaataaaaaaaaaaatggaggccgggaaaacaccaccgacgacgacaacaacgacggagaagaaaacggagcaggtgaaagacaacgacttgccgaccgatagcccttacatggcgacgggtactttggaagattacaaattgaaagcttatggagccgaaggtcaccaagagcctactcctggtcttggaggtggctccaccgatgctcctactccttctggcgacgcacccgccgccactaccaccgatgcgaaagctccgtgaaaaaaaaga

SEQ ID NO: 162205 - DNA, 205 bp, Arabidopsis thaliana columbia
aggcagagaggctttcttttaatgagagaggaaaagagacgacgaggggtttcctaaaggaaatagctaggcccaagggttaataaccatggaaggatatagaagaggtggggtatgacagagagccaggtgctgaatggctgaagcatataatgagcattactcacacgttctcagagatggataagcttgcctcctaaggaac

SEQ ID NO: 162206 - DNA, 282 bp, Arabidopsis thaliana columbia
  unsure (1)..(282): unsure at all n locations
cccacgcgaccgatacagagctcaataattaaactgattcgaattggcgaagatgtacgcggaagttgccactcgtgcggtgtttatgggaggacagagaatgggacaacatatgtatatagagggtgtaatgaaaagtgtattgtagggtcaagatctcacaccgaatcatcttacatcanagtttgagtaccttgcaggatagacggcgaatttaataacaacctgaatatgtggactccataatcagcaacccttaaagatgtttgtatattcaatacc

SEQ ID NO: 162207 - DNA, 367 bp, Arabidopsis thaliana columbia
cgcgaccgcaaagctccagggatcagagctcatatatgtcctcttacaagaatctccagtcgtattcatgctctccaattgtggggcgagcggggaaagtaaggctgcatttgctgtggctgagaagcttgtgcgagagatagaagtgtctcattgggggaatgtgcaggtcacggagaattacaatgttgtccaccgtggggctcaactcaagggcgagttttcaaggttagattttcaagccagacctaatccccgtggagcatctgcctttaggcatttacttgctagattaccccccagagcccattccatttattacaggtatgattttggaaatatttccacgtctgagatgaaatgtgat

SEQ ID NO: 162208 - DNA, 143 bp, Arabidopsis thaliana columbia
  unsure (1)..(143): unsure at all n locations
caggaggatattactccggggactggagaatttacagagggggtgggcaagaatataactgttgaaaancaagatggtaaaggtgaatcaactgatgcaaagaatgaaacacttgcttgagaaagcagaggaaaagcctgagg

SEQ ID NO: 162209 - DNA, 221 bp, Arabidopsis thaliana columbia
  unsure (1)..(221): unsure at all n locations
cgcgnccgaaaaacccggcgaaaaagggaaattctaattcgtcttctgttgatcattgcttcacttctgcttccatagcttttacgcaagacaagctccctnatctcaaatctctctttttttccctcgcttccaagtctcagagcaatgaccaatacgtctcgtaccctgtttttcaggagtattttgttctgagtggttctttaggtgaaaggatcttt

SEQ ID NO: 162210 - DNA, 357 bp, Arabidopsis thaliana columbia
gggatggatccagccactcatagagggatcaacgaggcaaaaatttctgatttgaagaaaacaaaggaccaaattgtaaaagatgtttcttttgtgacaaagtttgaggaaacagacaagtctggggaccagaagcaaaataagtttattcgaaatgggttagtttgcaaagaagagagagttgttgttgaagaaaaaataggcccagatttgaatcttgagcttaggatcagtccaccatggcaaaaccagagagaaatatctacttgcactgcgtcccgtttttacatggaaaacgacatggagtgtagtagtgaaactgtgaaatgtcaaacagagaatagtagcagcattagc

SEQ ID NO: 162211 - DNA, 347 bp, Arabidopsis thaliana columbia
acccgggcggaccgcacgcgtccgataaccccaagaatccttactggtttaacctggatcgttccgttctctctgctggacatggatgcatgttgaaatacgctgggcttcaccttgctggctacgacagcgttagggaggaagatttgaagagcttccgtcaatggggaagtaagactccaggacatcctgagaattttgagactcctggtgttgaagccactactggtcctcttggacaaggtattgcaaatgctgttggtttagctcttgcggagaagcatttggctgctagatttaacaaaccttacaatggtattgttgaccactacacgtatttaattttt

SEQ ID NO: 162212 - DNA, 293 bp, Arabidopsis thaliana columbia
  unsure (1)..(293): unsure at all n locations
cgggccgaccacgcgtccgaaacccaattagccggagatggccgcaacattctgcttttgctgcagctgcttcttccatcgggggtactcggttggctccgggtatccatcccnnttcaggtcggttcacagccgtgttcggtttcggaaagaagaaggcagctcccaaaaagagtgccaaaaagacggtgactacggaccggcctctttggtacccaggcgccatttctcctgactggcttgatggttccttggttggagattacggttttgatcccttcggtttaggcaaa

SEQ ID NO: 162213 - DNA, 265 bp, Arabidopsis thaliana columbia
  unsure (1)..(265): unsure at all n locations
aaagcctttcacctcccgcgggggttaccgtttccactgggctgcgactccattcaagggaaatgtaagtgttttgggggcaaacccaagtcagatgctatttctgaaactcaaccaaacccttaaaacgagaaaccaccagcattttgggagacccctcgttgtggttagccaaacggcggttacgtcgtcggcagttgtagctccggagagattccgtttggataatcttggaccacagccagttncttggaagaagcataag

SEQ ID NO: 162214 - DNA, 457 bp, Arabidopsis thaliana columbia
aaatcgtctaattctctctctatctttctttttatctctactaattatttcttaagttggggaaacagagattaaaaggtgaggggccttctcgggttgtttaaaaatactgtttcaccgcagtaattaatttaaaaattactgtcgatgacgtggcatgcacttaaaaagaaacagccatgaatacaaaaacgatgcgttttcccccacgccgagttacctccggcgccgtcgccggcaaacaaacggaatccgccgtgataaatccaccaccgccgccgtctaaatccatcgtcaagaaaacgccgatcatcctttgaccaactaccaccgccattgtagccttagccgagccggtttgttcgaatcagcttttagccggttacttggctcatgagtttctcaacaatggcacacttttcggagagctttggaattcaactaaagcccaagcccg

SEQ ID NO: 162215 - DNA, 394 bp, Arabidopsis thaliana columbia
  unsure (1)..(394): unsure at all n locations
ggaatcccggccgaccacgcgtccgacaatctactctctttaaaagaaatttttttttactatcaagaagcanaagatggcccaaggggtgtaagcacaaggggggaagggagccaacctatgggacgatggatcgacacatgacgccgtgaccaagattcagctcgcagcaggcatagacggaattcaatatgttcagtttgattatgtcaagaacggacaacccgaacaagctccttttcgtggtaccaaaggccgtgttctcccagctgatccgtttgtgattaaccatccagacgaacatctagtttctgtagaaggttggtatagccctgaaggtatcattcaaggaattaagttcattttcaacaagaagacttctgatgtcattgga

SEQ ID NO: 162216 - DNA, 434 bp, Arabidopsis thaliana columbia
  unsure (1)..(434): unsure at all n locations
gaagaaagcacaagtgtcctcaattaattggttagtctgcaatgngacagctggacgagacggcatcccttgcctggacagtgggcaagctatcagaaagcttcattcgacaaagcattatgaacatcgtgagaggcattgtcccgaggagtctccacgctgccttgtttctcttcccgaagggtataagcgatccatcaagtggcctaagagcagagaaaagatctggtacaccaatattccacacaccaagcttgcagaagtcaagggacatcaaaactgggtgaagatgagtggtgaatacttaacattccctgtgggaggtactcaattcaagaatggtgcttttcactacattgaattcctccaagagtcatatcctgatattgcttggggaaataggactcgtgttatattggatgttgggtgggggg

SEQ ID NO: 162217 - DNA, 197 bp, Arabidopsis thaliana columbia
ctccatttcgaaactccaacgaattctctgttgattttaccaatggcgatggcagcatcgatgagtttgaatctaattggggcattcaaaggcttgcctctttcttcgacttcgtcttttcttagaggcgatttgagtttttcccccaaaacctctttcacggtgactcttcccttggaaaatcttcaagctccgat

SEQ ID NO: 162218 - DNA, 477 bp, Arabidopsis thaliana columbia
  unsure (1)..(477): unsure at all n locations
gcccacgcgnccgnggaggcggagctgagatgctgaacttgcttttaaccgggaagacgatcttatctagtaggggttgtcagagaaagaggtgggctacttgttcttcgtacgcatttgggccgtacaaaatcgatccccgtgaagtgttctacgcaacgcctctctcttatgccatggttaatctccgtccgctttttcctggtcaagttcttgtctgcccgagacgccttgtgccacgatttactgatcttacagctgatgagaccagggacctgtggcttactgctcataaggttggctctaagcttgagaccttccataatgcgtcttctttcacattagccatccaagatggccctcaagcgggacagactgttccccatgtacacattcatattttgccttgtaaaggtggggactttgagaagaatgatgaaaactattatgcctttgatgagaaggagaaggaactga

SEQ ID NO: 162219 - DNA, 271 bp, Arabidopsis thaliana columbia
caaaactctgaatttcgatttcaatggagttacgcgtgctgttacgcgccaccgcgaatgtcgttggaattccgaaatggagacgaccaatcggagcgatccaccgtcaattcagcactgcatcgtcttcctcgttctcggttaaaccaatcggaggaatcggagagggagcgaatctgatctccggtcgtcagcttcgtccaattcttcttctcgattcgtcggcgatcaacggaggagagaaaagagaaattctcaaaccggttaaaag

SEQ ID NO: 162220 - DNA, 291 bp, Arabidopsis thaliana columbia
  unsure (1)..(291): unsure at all n locations
gaacccggggccgaccacgcgtccgggaatccggagacactaatccagattcattttggctgnacatggnggaatctgggaacaaatatggaatcctctgggtgccatatgattgaacccagaatgaaaacagtgggagaaatagcagcgtgttctcacacactaatgccaatgagggaagcctttaaggggactttcatttttgcaggagatttcacgagggatgatgggaatggtgccgtggcaaagggacgaactgttcttggggcttatggtcgaaggtttttagcc

SEQ ID NO: 162221 - DNA, 423 bp, Arabidopsis thaliana columbia
caaaccttaacttggattctttctgttcaccatggcttcggttactttctctgtccccagagggtttcactgaattctcaggagtgcgaacctcctctgcttctcttcccttcggcaagaaactttcttccgatgagttcgtttccatcgtctccttccagacttctgcaatgggaagcagtggtggatacaggaaaggtgtgactgaggccaagcttaaggtggccattaatggattcggtaggatcgggaggaacttcctgagatgttggcatggtcgcaaggactctcctcttgatatcattgccattaatgacactggtggcgtcaagcaggcttcgcatttacttaaatacgactctactctcggaatctttgatgctgatgtcaaaccttctggagagacttcaatctctgttgatg

SEQ ID NO: 162222 - DNA, 401 bp, Arabidopsis thaliana columbia
catagaagacgaagaagaagaagatgacttccagatccacaacgccatgggtttaggggtcttatcttatggaacaatgggaccagcttcacttcttcttcaatctcaaacctccaatttcttcctccgcacaatcgtttcaaaaccagagctccaatctcctgaatccgctgctgtctctgagcctgagccgccgacacagattctccctcctagaaaccctgtaggtggagcacgcgtccacttttcgaatcctgaagatgcgatcgaggtctttgtcgatggttacgcggtcaaagtccctaaaggattcactgttcttcaggcttgtgaggtcgctggagttgatatcccgagattttgttatcattctcgttaatctattgctggaaattgcagga

SEQ ID NO: 162223 - DNA, 210 bp, Arabidopsis thaliana columbia
cctcaccggctcaagccggtatggtctctcctttcaacggacttaagacctccactcccttcccagccacccgcaaggctaacaacgacattacttccatcacaagcaacggcggaagagttaactgcatccaggtgtggcccccgattggaaagaaaaagtttgagacttttttttaacctcctgaccttaccgattccgaattggcta

SEQ ID NO: 162224 - DNA, 212 bp, Arabidopsis thaliana columbia
  unsure (1)..(212): unsure at all n locations
cgaaaaacggcgccgnatcaacgangattaccctatcatgtaatgtcgnaacgcccattgncggcctcgttttcttagtagggctgatcgcaagtgacatgncatttacctcgctttgggaatcttgttttcctttttctttgtgatctgccggtttaatttattctacatattcttttcttttgttcacgttgatacttgtcgtggaaatt

SEQ ID NO: 162225 - DNA, 284 bp, Arabidopsis thaliana columbia
  unsure (1)..(284): unsure at all n locations
cttatatcctctctctacatctcgnccgttgttgcataagtgctatggatctcgcgtcgaatgttggtgtgtaagatcgggaaagccgatgttctcaccgccgtcaaaaagtatgagcaatatcatgtcttccatggaggaaacgtgtatgtgagaaaagccaattttacttacatgtttaataattactaagaccttgctactagctttaattagttcttattgttagatttttttcttttcgctcattttttgtaaagtatattttcttttttagactttta

SEQ ID NO: 162226 - DNA, 212 bp, Arabidopsis thaliana columbia
accacgcgtccgaacgagattgcgaagaagaagagtgtggcttatagccgatagaaaacgagccatggacggggatcctctcaccaatggatggaggaccagaactccggtcccctccgtctccggcaaacgtcagagaaagctccttcgcaaatggcgcagagagcagaaagatatggtggagaagggtctttttactatggaagatgtgg

SEQ ID NO: 162227 - DNA, 89 bp, Arabidopsis thaliana columbia
ggccgaccgacgcgacacgaaaagctccaaccaatgaccgcttttatgttcttttcttttacggaattgactctgcctagttaatttaa

SEQ ID NO: 162228 - DNA, 210 bp, Arabidopsis thaliana columbia
caccatctatgtctctggttggttgtgcttttccactcacacatccactaatgagcctggtcctgatcttgctgattatccgaacgacaccgttcctaacaaggttgaacaccttttcttcgctcagcagtaccatgacagaaagcagagggaggcaagaatgagcatgagcagagaaaagaggacaaaaactccgttcgtggactacct

SEQ ID NO: 162229 - DNA, 375 bp, Arabidopsis thaliana columbia
  unsure (1)..(375): unsure at all n locations
aaaacccgggccgacccacgcgnccgaattttctcaccaagctcgaacacaaagatcttccatggctacgctcttcaccgtcgctgggccttcttcactcctctatgggtcctccataaatccaagcaagaccttctctccttctatctccctaaaacttaactctctctctttctcttttggttatcggcccaagccactccggttttctaaaatccgatcttctctgccctcggaatctgaatcggaatccgacctagatgcgtctgcagttacagatgaatggggggagaaacctggagatgcaaatgagccccacttttagccagataatgtgaccgtgaatgtgattaccgaccaatggggccagaaatt

SEQ ID NO: 162230 - DNA, 213 bp, Arabidopsis thaliana columbia
  unsure (1)..(213): unsure at all n locations
gaancccggggcggacccacgcgtccgcaccgatacatacaccgacacatatgcatgtgtgtaagtatacgctcaagtgggggagcgttctcagatccctcgaggaaagcaacgctttataagatgactcattttctgaaacgaactcaactccaagtgtgacacattctcaacgagagatcgtgatcgtacttatatacacacacgcacact

SEQ ID NO: 162231 - DNA, 196 bp, Arabidopsis thaliana columbia
caccatctatgtctctggttggttttgcttttccactcacacatccactaatgagcctggtcctgatcttgctgattatccgaacgacaccgttcctaacaaggttgaacacctcttcttcgctcagcagtaccatgacagaaagcagagggaggcatgaatgagcttgagcagagaagagaggacaaaaactccg

SEQ ID NO: 162232 - DNA, 143 bp, Arabidopsis thaliana columbia
  unsure (1)..(143): unsure at all n locations
gttttgttttattgcaagaatnctaaatttatgacttgtagggagggacttatgtcaccacaaacagagactaaagcatgtgttggttccaaagctgttgttaaagagtataatatgacttactatactcctgaatatgaaac

SEQ ID NO: 162233 - DNA, 409 bp, Arabidopsis thaliana columbia
aaaccaccaaaacactaatttttccacatttggggagaaaaaaccagaccaggttttttagggatctaatggcgagggcggcttccgaagctgtcctaagggggctgggtttttcgttcctaaccggaggcaaaaaaggtgccaccgaattggcaagcggcttaggccctggacctaaaaaagttggcaggaaaactttaattgtcgttgttggggttgttaagcctaaaaaatttgggatccctgccgttaaaggggggggcaacttccttgaccctgaatggttcgatggctcgctaccagaaaatttcgggttcgacccattgggtttggggaaagacccggtttttttgaaatggtccaaaaaggctgacctgatccatggccgatggccaatggcagcggtttt

SEQ ID NO: 162234 - DNA, 367 bp, Arabidopsis thaliana columbia
  unsure (1)..(367): unsure at all n locations
aattnnggggccgccccagccgtccgcgggggaggaatagttggatcatctggggggaaaaataagggcggtttaagggaggctattttgggggccattgaaaccagctggtttaacgggggaaaaaacggcggttaggggattaccgccgttaacaaaagctggtccttctttaaaaatggccgccgggggcgtaaaaaaaatcaagaccgccaggcccttcggaattaacggcagcttggccttgggggacggggtcaccccctccggcagaaggggcaggggatccggggtttccaagtccgtcgccaggtttggagctaacgtcgatggatccagccctttttacaacgggaccaagtggtca

SEQ ID NO: 162235 - DNA, 268 bp, Arabidopsis thaliana columbia
gggaatccggggcggaccacacccgtccgggccgttgtggtaccatccccggttaaggccacaatggtcgttcaattcaccggctggagagaatccgttgaattcccggcaacccgcaggaccaacaaggccataatttcaatcgaaggcaacgggggaggagttagctgcatgaaggggtggccaccaatgggaaagaagaagttggggactttattttacctccctgaccttagtgccgtcgaattggttaaggaagtggactacc

SEQ ID NO: 162236 - DNA, 437 bp, Arabidopsis thaliana columbia
ggccccagccgtccgaccacatttcttttggaaaccgaccttaaacccttccctaggagaccaatttggttggggggaggaagtggccttgctggttttgggccggcaggatggtggccggtccaataacatggaacgctgcgctaagttgtggttaagttaacagcacctgggcagcgtgcatgggctacgggctccaagggggggtcattcccccagcgggtggttccggggttaaaaacctcaccagcttagccaagacgaccccagaccgtaagcaggcttgcaattgcattcagggggccgttggagccttaggctttggtttaaacgctggccgggcagttggaattcctaaggcatggggggtcaatattccttacaaaatcagcaccgagcccaactgcaaaaccggggggggatgagctagcaccggg

SEQ ID NO: 162237 - DNA, 286 bp, Arabidopsis thaliana columbia
tttacttggacttaagaatgccatatgtgggtgctgggatgattggtcctaattgggggaatcggccgtggcttttcggggccatcctttcggggggaataatgtggcctttaatagcccggtttaaaggcaattggttccctgcaccattgaaggataatatgttgcagggcttaaacggctccagggggttaatatccatggcactgatcttaggagaggggcttaataacttcgttaagaaactctttttaactggaagaagcttccactttagactttccaa

SEQ ID NO: 162238 - DNA, 233 bp, Arabidopsis thaliana columbia
tccgagttggtccccaaaaaaaaaaaaaaccccaaatggtttaaagggccgcttccacaagggttttttcttcccttgccttggccggaagggttgggaacctttcccccggggaatttgaagtcctcggaggcggccgggtgccaatgaggaagactgtggccaagccaaagggtccataaggcagcccatggtccggatccgcccgagtcaagaccttgggtccatttttt

SEQ ID NO: 162239 - DNA, 362 bp, Arabidopsis thaliana columbia
ttccgttccaagggtggcctttccggttaaggccattttggccgttcctttaaacggcctaaagtcctccgttgccttccaagccacccgaagggttaacaacgccattacttccataacaggcaacgggggaggagttaactgcttgcaggtgtggcctccaatgggaaagaaaaagtttgggacttttttttaccttcctgacctaaccgattccgaatgggttaaggaggttgactcccttttccgcaccagggggtttctttgggtggaattcaggtgggaccacggtttttggtcccgggggcccggtacctaacccggttcctttgatggacggtcctggccaatggggaagcttc

SEQ ID NO: 162240 - DNA, 443 bp, Arabidopsis thaliana columbia
  unsure (1)..(443): unsure at all n locations
cggaatnccggggccgccccagccgtccgaggaaaaagggaggcattacctaaaaaggggtggttttttaaacctttggttcatggggggccaaaaggctggggctcgttcatcccagtcggttgctttaggttttttaagaatccgttcccaaaaaggtgggtcgtacctggggctgggccgggctttaacagtgatcatgaagccgcaaatggcccgtattttcagtttccaccttccttatgggaggaccgtttcctttccatttccgccaaccagccggaaattgttggcctggggggagatttcggggcccttaaggttaaagggggtgaaaggctggttttgttggccttaaaggaggggattcactggatccatctgctagtcagcctgggagcggtttaccatttcgggaaacagttcgaagatttcctgaaggt

SEQ ID NO: 162241 - DNA, 397 bp, Arabidopsis thaliana columbia
  unsure (1)..(397): unsure at all n locations
acctaaactaatatcctccatcctcttccttcagattaaagagaaccctaaccgnaatatcgcccctcccctttccttttggcctcccccaggaggaaggcaaatttttttttttcaggatggcttgaaacctgtagaaatctttagggtttttttcccccaataggggtcagggggggggggggggggggaaggggggtccttttcttaaaaaggccgggtattctcacctccggggggatacctgttttaccatttggggggattaggaggaggaggaggaggaggcccagcctaaggaagggtggctttttaatcagctgggccttgggaaacctttggcaatctcaagtttcttttttcccctccattagctgcccaggtggggtcctcgggg

SEQ ID NO: 162242 - DNA, 427 bp, Arabidopsis thaliana columbia
cggggcggccccacccgtccgttttccagcggtggatccttaagatccaccgtcacctttgctccaccctcgaatcgtgggcggggaccattttgaacctgcccaccaggtaaaccaaactttccaccgttccagggggcttcaggccattttagttatcctggggtgggttgaataatccgagggggatcgcttaaccgtgccaggagcccgaaaaatggaccgttttttataccacccttttttcgtagcaaaggtttttccaggttctccgggaaaatttgttggtctagcggaaccaattagggggtttaattggatcctttccggagaatttgatttttttcccgaccaggccttttacttagggggtaccatcgatgaagctcctgcgaaggctccaaccttagaaatggagagtaaattg

SEQ ID NO: 162243 - DNA, 383 bp, Arabidopsis thaliana columbia
cggggccgccccacccgtccgtattaggagggttttaggctttggaaccaaaaaaattggcttccagggcttgggtcctgtggggccttttggctgtccttttcgccgcctaaaaagtagccgcggctttttttgccacagggaattcagagggtagggaacctgtgaaccctgaccaccgtggttccggggccaatgggggaaattccaataccggaggaggttcccagggaggagggggtatttcccaagggggggggggtatttcccaagggggggggggtaattcccaggggggagggggaggttcccaagggggggggggccggtcccaaggagggggaggccgatcccaaggaggcggtggccaccatggaggaggg

SEQ ID NO: 162244 - DNA, 423 bp, Arabidopsis thaliana columbia
ggcccaagccgcccgaaaaaaaaaaaacctaaggagggccttgggggcctgggaagcttttttcaaatcaacggttgctttcttccagtgggggaaaatggccaccgttctttttgggggaggttttaacttccgatcgattaaggcgcggggaaaatttttggggctggaaacttcctgggttggcctaattggttctttccagcctgcctttaaggccttaaccggtaaaggctccgccgctgtcaaaatcgccggattcgttttggccacctttgttttggtcggttgggaggcaagtgcggggggggctccaaggggatggacctatgatgggattcagggcaggccttacatggaagtgaagggacctggaccggttaaccagggccctactattgacggggggttttgagacttttg

SEQ ID NO: 162245 - DNA, 413 bp, Arabidopsis thaliana columbia
  unsure (1)..(413): unsure at all n locations
ccccgccgtccggggggaaaacctggaggccttttcgtccttttttcgggccaaagcctttgccaaaatccgtgggcctccgataaatccaagggatccttgcttttcaacgctggtttttatggccgngaatcttccggaaaggcttttaaatcggcgggttaacgctgttgtgccgccatatttggccattttggactcccttaagttaatgttttttcctgcccaggtggaaggaccaggggtttttaacgggccccgaccgagaactcttccaccagactggccatttatgctttttgacgggggaatggtttccatgggaatgccttttgggccggcggggactgacctagtgtgcgttggcctaatgtttcttaaggggctggatcccagggaccccatttcccttt

SEQ ID NO: 162246 - DNA, 433 bp, Arabidopsis thaliana columbia
cggggcggccccaggcgtccgttaaacctattttttaaaccaaaggttcattggtttccaaaatggcagggggctttgttagggaaaccaactattttttttccttttccttcttaagttttttttccaaacctaatttttttttttcctaacgcacccaaggtttaaggactttaatttttaagatcaaccacctaataataataataatccttaacgttggaccttaccaccgtggactttaactcctccatccttttggtttttccggctgaggcttgcgaggtaatcaggggttccgctggttctgttgattttaaccctgaggtcaggctggatccaaagccggtttaaggtccgggggtttaagagccggttgccggggattccgaggggtttaccagccccaaaccggttttccgggagggggcct

SEQ ID NO: 162247 - DNA, 368 bp, Arabidopsis thaliana columbia
aaaaaaaggaaaccccaaaaccaaggtttttatgggtttcctaaaccatggtttggtcctcccttgccttggccggaagggctgggaagcctgccgaataaaatgtcctgggaggcggccgggggaccatgaggaagacggccgccaagccaaagggtccatcaggcagccaagggtccggatttgaccgagtaaggtcctggggtccattttccgggaggcccccgggttaccttaccggggggttcccgggggactacggtggggacaccgttggtttatccgccgacccaaagaccttcgccgggaaccgggggctagaagtaatccacagcagatgggccatgctgggagccttaggctgggtt

SEQ ID NO: 162248 - DNA, 422 bp, Arabidopsis thaliana columbia
cggggcggccccacccgtccgtttttgggttccgattttaattttataaaccaggttctttaaccattaacccccccccccgagaaaaaaaaataacgcttcaggaggggaccattaggcccccaattaattaacaccttacttggctggtaaacagttttttttttttcccaaaaagggtttaaggttccatagcttttttttgggttttaaatcttttttttttaacaccattttccgcctggggtggctgacctccgggcgggggaggtggcccttttcccaagccaaagccaactcctaaaccaaccccaagccttagttttggttggggcaagtgccctaaagacaccttaaagttcggggtctgcgctaatgggctaaacggcctcctggacttgaccctgggcaggccaccggtc

SEQ ID NO: 162249 - DNA, 448 bp, Arabidopsis thaliana columbia
cggaaatcccggggcggccccacccgtccgttattttgggtccaataccaggggatttttacctccggttggaaaccaattttcctctccataaaaggcgtgattgagattttgatggattcgaaggctggtattaagaagtcaggcgccattagttccttatgttccgaaccacccttgggttccagcattgaagccgtccgtcctttcgggggaatcaagaaattcaaattttttgtctactccaactgccctaggaggccttcctgggtcctagccagttccttccatagcttttaaataccaccaatctccttttttaaaagctctggttccccaaatcctttcgcttttggttggccctaacaccaccaccaccaccgcagggttggccatgtctgtcttgggcttcgagggttccaagaggcggtttgaagttacttttttt

SEQ ID NO: 162250 - DNA, 390 bp, Arabidopsis thaliana columbia
accctcccggaaccaaaccttctttggaaaaaaaccaccaatcccgattttaattttaatcaacccgaaaaaatgggaaaaggcgtccgagagccaccccgtctttttggagcttttccgaccttttttttttttttggaacaataccaaggcttttttatcggcttttgttggctgggctggggccagggctgcttataaaaggacctttttttatggagatgatgttgccattgtcccgcgccataggactccactttgcaggtccaaccgtggcattttcaaggttccatatcccgatgattggctcgcacctgtttggggggcattgttggagaagacgattttaaccccaagtgaagtaggtgccattgttgggggtcctgtttt

SEQ ID NO: 162251 - DNA, 414 bp, Arabidopsis thaliana columbia
acaacaaccaaacactaatttttccacatcttgagagaaaaaaacagagcaggtttattagagatctcatggcgatggcggtctccggagctgtcctcagtgggcttggttcttcgttcctcaccggaggcaagagaggtgccaccgcattggcaagcggcgtaggcactggagctcagagagttggcaggaaaactcttattgtcgctgctgcggctgctcagcctaagaaatcttggatccctgccgttaaaggtggtggcaacttccttgaccctgaatggctcgatggctcgctaccaggagatttcgggttcgacccattgggtttgcggaaagacccggcttttctgaaatggtacagagaggctgagctgatccatggccgatgggcgatggcagcgggtcttgggt

SEQ ID NO: 162252 - DNA, 430 bp, Arabidopsis thaliana columbia
  unsure (1)..(430): unsure at all n locations
ggaaaacccgggcgcgacccacgcgtnnccggaagaacaacaacanctaagctaaaaaagaaatgtttcaagnccgagagagccaatnggcatgcaacgagttacttagttcaagcagggtgggttaccccaacaacattnccttggccagactaaagcctcaagctttaacccccttcgtgatgttgtctctctcggatctcccaagtacactatgggaaatgatctttggtatggacctgacagagtgaagtacttaggacccttttccgttcaaactccgtcttacctaaccggagaattccctggcgattatggttgggacaccgccggtttatccgcagaccctgaagcctttgccaaaaacagagctcttgaggtgatccatgggagatgggcaatgtagggagcttttgggtgcaaaacccct

SEQ ID NO: 162253 - DNA, 332 bp, Arabidopsis thaliana columbia
cgagagaagaatagtttgatcatcttgtgagaaaaataatggctgcttcagtgatgctatcttgggtgacattgaaaccagctggtgtaacggtggaaaagaccgcggttagaggattaccgccgctaacaagagctggtccctcctttaaaattgtcgccagtggcgttaagaagatcaagaccgacaggcccttcggaattaacggcagcatggacttgagggacggggtatacgcctccggcagaaagggcaggggatacggtgtttacaagtccgtcgacaagtatggagctaacgcagatggatacagtcctattcacaacgagaac

SEQ ID NO: 162254 - DNA, 205 bp, Arabidopsis thaliana columbia
cgccgttgtggttacatccccggctcaggctacttttttcgctccattcaccgccttgaaggcagccgttttattaccgggggccgccaagaccaacaaggacatcacttccatcgcaagcaacgggggaagagttagctgcattaagttgtggccaccaattggaaagatttattttgagactctatcttacctccctgacctt

SEQ ID NO: 162255 - DNA, 382 bp, Arabidopsis thaliana columbia
cacacatctcctattgcaaacgaacataaaacactacctaagagatcaatatggctggagtgatgaagttgtcatgcttgctctgggcctgcatgattgtggccggtccaatcacatcgaacgctgcgctaagctgtggctcagttaacagcaacttggcagcgtgcattggctacgtgctccaaggtggtgtcattcccccagcgtgttgctccggcgttaaaaacctcaacagcatagccaagacgaccccagaccgtcagcaagcttgcaattgcattcaaggtgccgctagagccttaggctctggtctcaacgctggccgtgcagctggaattcctaaggcatgtggagtcaatattccttacaaaatcagcaccag

SEQ ID NO: 162256 - DNA, 426 bp, Arabidopsis thaliana columbia
  unsure (1)..(426): unsure at all n locations
cgtccgtcatactttgacttcagtatgacatatgttgtttctgggatgattggttctcatttggtgaatcggtcgttgttctagggggccgggctctcnaaangaatcatgtggcctctcatagcccggcttaaaggcgaatggttccctgcaacattgaaagataatagtatgcatggcttaaacggctacaaggtgtttatatgcattgcactgatcttaggagatgggctttataacttcgttaagatactctttttcactggaagaagcttccactctagactctccaaaaccaacagcatcagcacattggtagaagttccagaagatagcacgaaagaatccgataacctgaaacgagagaatgaagtgttcgttcgagagagcattccgctatggatggcttgtgtcggatacttattc

SEQ ID NO: 162257 - DNA, 399 bp, Arabidopsis thaliana columbia
gcgtccgagatagtcaccaaaaaaaaaaaaaaacacatatggtttcaatggccgcctccacaatggctctcggctcccttgccttggcgggaggggctgtaaacctttcccccgcggcatctgaagtcctcggaagcggccgtgtgacaatgaggaagactgttgccaagccaaagggttcatcaggcagcccatggtacggatccgaccgagtcaagtacttgggtccattctttggcgagtcaccgagctaccttaccggagagttccccggagactacggatgggacaccgttggactttcagctgatcccgagacattcgcaaggaaccgtgagctagaagttatccacagcaggtgggctatgctcggagccctaggctgcgttttccctgagc

SEQ ID NO: 162258 - DNA, 412 bp, Arabidopsis thaliana columbia
  unsure (1)..(412): unsure at all n locations
cggcgcgtccgaaagaacaatggctncctctatgctctcttccgttactatggtggcctctccggctcaggccgcgatggtcgctcctttcagcgggcttaantcctccgctgccttcccagccacccgcaaggctaacaacgacattacttccatcacaagcaacggcggaagagttaactgcatgcaggtgtggcctccgattggaaagaagaagtttgagactctctcttaccttcctgaccttaccgattccgaattggctaaggaagttgactaccttatccgcaacaagtggattccttgtgttgaattcgagttggagcacggatttgtgtaccgtgagcacggtaactcacccggatactatgatggacggtactggacaatgtggaagcttcccttgttcggt

SEQ ID NO: 162259 - DNA, 444 bp, Arabidopsis thaliana columbia
ccggggccgccccacgcgtccgaagaaaaatggaagcaataactaaaaatgggttgttctctcaaactcttgttcattgtgggccagaaagcttgagctcgttcatcccagttcgctgtcttaggttttctaagaatccgttccccaaaaagttggtcgtaactagagctaggacgagcattaacagtgatcatgaagccgcaaatcgtccgttatttcagtttccaccttccctattggatgatcgcttcctttccatttccgccaaccagtcggaaattgatagccttgggagagatatcgaggcacttaaggctaaagtgagtgaaaagctggtttgtatggacgtaaaggagaggattcacttgatccatctgctagtcagtcttggagtcgcttaccatttcgagaaacagatcgaagaattcctgaaagttgatttcg

SEQ ID NO: 162260 - DNA, 163 bp, Arabidopsis thaliana columbia
tttctaaaaatcctttccccaaaaagttgttcttaactagacctaggacgagcattaacagttttttttattccgcaaatcccccaaaatttcaatttccaccttccctatcgcatgatcgcttcctttccatttccgccaaccaatcttaaatttattgcct

SEQ ID NO: 162261 - DNA, 444 bp, Arabidopsis thaliana columbia
ccggggccgccccacgcgtccgagatacgtggaggtggccaaagaaaagaacttatttcgccactaggagctaccatctctggtgggtggctatttaagctcggctgccataactcgtcttaaaacaaaggcgaaagagtcaagagacatgcatgcgaagacagactcggaggcaacaagcatcgacgcatttgctttgtctacgccgcgttcagcgattagacctctttactatgtacagagtccatcaaaccatgacttggagaagatgtcatttggttctggttgcagcctaatgggttcacctacacatccacattactaccattgctcaccaatccatcactcccgggagtcatccacctatggtttatgtgaccgagctctcttttcttacaagtccatccgcgaacgtcgccgatacatcaacgacggagacgacaa

SEQ ID NO: 162262 - DNA, 316 bp, Arabidopsis thaliana columbia
  unsure (1)..(316): unsure at all n locations
aaatatctccacaaatccttagggtgattttttaacaaatgaggcctgatcaactaaantagtctcttggttgtcttttatcttcacccctaccgttacatccagtcataccaagtcgatcttagtcttttttttttcgaataggctttcatatcctacaatcaaattggtgaagaatttatgttcataatcctatcacagagtcattgtataaaaaagttatttgatatacccatatttatacttccattattttaccaccaccaagttaaattcttaacattttttcttttattaaaaattcctcttaaggacc

SEQ ID NO: 162263 - DNA, 409 bp, Arabidopsis thaliana columbia
  unsure (1)..(409): unsure at all n locations
aactcaactaatattctccatcctctttctttagttttaagagaaaccttaccgntatatgctctcttctcttttcttttggacgcccacaagaagaaagcaaatttctttttctcaggattgcttgaaaactgtagaaatctttaaggtttttttacaccaataagagtcagagagagagagagagagagaaagagagatctattcataaaaaagacaggtaatctcaactccgaggagataactgatataacaatttgagagaataagaagaagaagaagaagaagaccaagctaaagaatggttgcttttttatcagcttggccttgggaaaactttggcaatctcaagtatcttctctacgctccattagctgcacaagtagtgtactcgtgggtctatgaagaa

SEQ ID NO: 162264 - DNA, 302 bp, Arabidopsis thaliana columbia
cgcgtccgatctcaactgatagaccctatccattcactttaaattaagcaacaacctcaaatcgatggcggggatcattttgaatctgggccgcccgcaaaacaaactcaacaacgtttcaaggagctttgggacataatctctatcctggggtaggatgaattaccccaataggatctcttaacgcgagcgagagcgcgaaagattgatctgttctaataacaaccctttttcgtaactcacgtgttgtacagcttcttcgcaataatatgtggtactagcgggaacaattagagggccaa

SEQ ID NO: 162265 - DNA, 306 bp, Arabidopsis thaliana columbia
gcgtccgaaataagagagttttaagcatttgaaacaattaaattggcttccaaggctttggttctgggggggctctttgctgatctggggggcgtctaaaaaatagccgcggcattttctgccacagtgaattcagagagtaaggaaactgtgaaacctgatcaacctggctacgttgccaatgggggaaattacaataacggaggaggttcccagggaggagggggtaattcccaacgaggaggaggtaattcccaaggcggaggaggtatttcccaacgaggacgaggaagatcccaaggtgga

SEQ ID NO: 162266 - DNA, 327 bp, Arabidopsis thaliana columbia
gaaaacccgggccgaccgcacgcgtacgaggatccaagggaactggaaagaagttttctctttggaatagaagatccaaatacggcaagcagtatttaataaggcttagcccttgaaacaggtaaatgatgggaaaatccctaaagatcgtgcaactcttcggatgctgcatgaggaaatgatccgttggccatttttataggttgaggtttcaaagaagcatcgtggaaagtcattgtacgctaaatccacagacactggaatagatccaaatgaagcagccttgatactcaacttttaatgggattcagcttctgcaattgaaga

SEQ ID NO: 162267 - DNA, 376 bp, Arabidopsis thaliana columbia
  unsure (1)..(376): unsure at all n locations
cggggccgacccgcgcgtccggaaagaanaaactcgaagacttttcgttacttctttctcgccaaagcctctgccaaaatccctgggccttcttataaatccaaggggtcctttcctctccaccctcgcttttattgccgcgaattctccggaaaagcttctcaatcggccgtttaacgctgatgtgcctttttttcttgacatctttgactcccctcagctcatgtcttctcctgcacaggttgaaagatcattggcttataactagcaccgaccgagaactcctccaccagacttgccatctatgcttcttgaccgtagaattgtttacattgtaatgcctcttttgccgtcagtgactgatctagttttctct

SEQ ID NO: 162268 - DNA, 437 bp, Arabidopsis thaliana columbia
ggccgcccgacgcgtccgctaaacctatcttcttaaccaaaagatcaattgtttacaaaaatgcagggagctctgtttgtcggaccaactattcttctggctggtccttcttcagtttcttctccaaaactcacttttcttcttcctcacgcaaccaaagcttcaagactctcatctctcagatcaaacaactcatcatcatcatcatccttaacgtctgaccctaacaccgtcgactataactcctccatcctttctgtttttccagctgaagcatgcgaagtaatcagtggatacgcttgttctgctgatatttaccctgaagtcaagctcgatacaaagcccgtctcacgtcccgtggcttcagagcccgttgacagagaatacgaagagtataacagccccaaaacggttttccgtgaagaggcctgcgatga

SEQ ID NO: 162269 - DNA, 416 bp, Arabidopsis thaliana columbia
aaaaaaaagaaaacacaaaaccaaagattattttgttttcctcaaccatggctttgtcctgcccggccttcgccggaaaggctgtgaagcctgccgcatcagatgtcctcggaagcggccgtgtgaccatgaggaagactgtcgccaagccaaagggtccatcaggcagcccatggtacggatctgaccgagtcaagtacttgggtccattctccggcgagcccccgagctaccttaccggtgagttccccggtgactacggatgggacaccgttggtctatccgccgacccagagaccttcgccaggaaccgtgagctagaagttatccacagcagatgggccatgctcggagccctaggctgcgttttccctgagctattggctaggaacggagtgaagttcggagaaacggtt

SEQ ID NO: 162270 - DNA, 381 bp, Arabidopsis thaliana columbia
  unsure (1)..(381): unsure at all n locations
aaaaaaagaaaccacaaaaccaaagatttttantttttcctcaaccatggctttntcctgcgcggccttttacaaaaggggggggaagcctaccacatcatatgtcctcggaagcggccgtgtgaccatgaggaagactgtctccaagccaaagggtccatcaggcatttcattttacggatctgaccaagtcaagtacttgggtccattctccggcgagccccctagctaccttaccggtgagttccccgttgactacggatgggacaccgctgttctatccgcctacccaaaaaccttcgccaggaaccgttagctagaagttatccacagcatatgggccatgctcggagccctaagctgcgttttccctgagctatt

SEQ ID NO: 162271 - DNA, 402 bp, Arabidopsis thaliana columbia
gtaggaaatggttaccctatgctctcaaactacttgcaagaagcatccaccgagcttgttgtcaagttcaagctgtttatggacggggtcgcaaaacgtggcttaaacgtttcggagatcgtgttcacgacgtcaacgattggatggtacggtgagactaaggccgaggctgtgcgagttattagattgatgccgttttatcttgacggcaccgttaatatgtatcttagacctattgaaggaatgacgataatcgttaatcttgatgagatgaaggtatcggagtttaaggacaggtcagtggttactatgcccatagctaacggaacggagtaccgtatctcgaagcttaacccaccctttggaccgacgcttcataacgccgtccttttgcagccggat

SEQ ID NO: 162272 - DNA, 408 bp, Arabidopsis thaliana columbia
  unsure (1)..(408): unsure at all n locations
ctccccccaaacccggncggcccggccgtccgaanngggnnccgattnnaatttaaaaaactatgttcattaaacaataaacacacacacccaaggaaaaaattcacgcatcaggaagggaacaataaccacccaattcactcacaacctacctagctagtaaacagtattttctatataccaaaaatggcttcaagttccatatctcttttcttggctctcaatcttctctttttcacaacaatctccgcctgtggtagctgtactccgtccggcggaggttgcccctctcccaagccaaagccaactcctaaaccaaccccaagccctagctctggctcgagcaagtgccctaaaaacaccctcaagctcggtgtctgccctaatgtgctcaacggcctcctggac

SEQ ID NO: 162273 - DNA, 270 bp, Arabidopsis thaliana columbia
  unsure (1)..(270): unsure at all n locations
aactacattttcttctcatttttcaacaccataaacaccggaccnncccttctctcctgggaggtttttttataaaaccgggtcgtaccctacaaaaattctcctccctttcactcccttttccttctctccctcgccttcttttttcatgtcaagcctcctctcttatttttctcttcttctccttccaatatcaaaggaaaatcttacctttaagacttcctttcattacataatttttacacacccaccatcaaaactattttatac

SEQ ID NO: 162274 - DNA, 223 bp, Arabidopsis thaliana columbia
aagattatcaaccaaatatttacaggatgaacctatggccaacgaacgaggtccttccctttttcatgtcctggtcctactaaaggacccaaaataaggttatgaagattaatgtacagatcctacccatcaactagatcttttataagaacccaacaactatcaaaaattttggaatcttgttcatataccagagccgtacatgttaccataacatttacaa

SEQ ID NO: 162275 - DNA, 425 bp, Arabidopsis thaliana columbia
  unsure (1)..(425): unsure at all n locations
ccggggcggcccgaggcgtccgaactttaaaggttcaatatttcttcaactttatctgccctcttttgccactttattacatgtatgtatattagttcaatacttcgatctttttctcttacagattaactatttacatgtaaaaaaaatgatttgtctcttaacttttttgttgggatatactgtattcttgaattaagttgttgagataatgtttatctccgactccaaagtgggatctaattagttttcttcttcttcagttcttctacatatattagatggtggtgaggatgagactaggaaagattgtggaaggcttgaagtcgaagataaagactggtctaaggatgcggaagagatcatcattatcatcatcatcatattcatcttcatcatcatcgncatcatcatcatcatcatcg

SEQ ID NO: 162276 - DNA, 419 bp, Arabidopsis thaliana columbia
gtccggggaaagaaggtcaaataaaggaagaggagtttttttcaaaaccagcgaaaccaaaacccaagaaagttgttgctcctgggaggtggattgatacctatgctgaacaacgcgttacctgtcacaagtggagggtgattgatagctcggtggaatatcaatatttcatatgttaaatgctcgaggagcctatataactgtcatacgaatcagggcttgtattgagaaaagcctgcttatattgactacgattctttttgtactagggtcattgacaagcctggtctccccaaaacgcctaagggtttcaagagaagcttagttcttagaaaagatttctctaagatggatacctacttactttacttctaccgggaagaagcttaggagtctcaatgaaatcgctgccttctttg

SEQ ID NO: 162277 - DNA, 422 bp, Arabidopsis thaliana columbia
gtccgaaaacaaatccttctctgagaaaaaacaacattttcgaattttatctttaatcagccggaaaaaggggataaagcgatcgagggggaacccgttcttcttgagcatctccgaccttcttcttcttcttcgcacaattacgaggcttctctatctgcttctgcttgcttggctggggacagtgctgcatatcagaggacctctctctatggagatgatgttgtcattgtcgcggcacataggactccactatgcaagtccaaacgtggcaatttcaaggatacatatcccgatgatttgctcgcacctgttttgagggcattgatagagaagacgaatctaaacccaagtgaagtaggtgacattgttgtgggtactgttttggcacctggatctcagagagccagtgaatgcaggat

SEQ ID NO: 162278 - DNA, 208 bp, Arabidopsis thaliana columbia
  unsure (1)..(208): unsure at all n locations
taccattcaccaccccctcccgggagggtttttataaaaacttggttgtaccacacacaaccttctcctttnaactcccctaccaccaccatactactaccattcaccttctcctccttttaaaactccttttttttctaactactaccattaacacacccccccccttaaaatctcctcctcctccattctactaccactccccacc

SEQ ID NO: 162279 - DNA, 78 bp, Arabidopsis thaliana columbia
ttctcacttcttcttttctccttatatttcatttcttccacataactaaaaaaaaaatggagttagcgatgagggggg

SEQ ID NO: 162280 - DNA, 353 bp, Arabidopsis thaliana columbia
ccaaaaaaaaaactcaagagagactttgtggttatggcagcctctctccaatccacggctagattcctccagtcggcgaagatcgccaccgctccttctcgcggaagttctcacctccgatcgactcaagccgtcggcaaatcttttgggctcgaaacttcctcggctcgcctcacttgctccttccagtctgactttaaggacttcaccggtaaatgctccgacgctgtcaaaatcgccggattcgctcttgccacctctgctctcgtcgtctcgggagcaagtgcggagggagctccaaagagattgacctatgatgagattcagagcaagacatacatggaagtgaaagg

SEQ ID NO: 162281 - DNA, 357 bp, Arabidopsis thaliana columbia
  unsure (1)..(357): unsure at all n locations
ngngactngaaaaaggncgccggccattcttttttctgcttctggttttcttctgcgggcggcttcanatagatgagatgggtcaaatcnttaatgtggatgagtnccaagagctggctaaacaagccctccctaagatgcactatgattcctacaatggaggagcagaggatcaacacactctcaatgaaaatgtccaagctttccgtagaatcatgttaaggccgagggtccccgccgatgtgagcaaaannnatatgcctaccaaaatattgggttaccctatctctgctccaatcatgagggctccaacaggaaatcataagttggcccatcctgaaggagaaaccgctcctg

SEQ ID NO: 162282 - DNA, 374 bp, Arabidopsis thaliana columbia
ccgggccggcccacgcgtccgcagagaaccgaaagaagaaaacaaaactcttttagtcgcaacagaaaagaaacgggggagagggggtggtaggcggcgggggagaaggagatcagaagagaagcagcggagaaatgatggcgatggcgagtttattcaacgatcagcagaatccaattcaacagtttcaggttaaattcaaagaagtagaaactaatttcaagacatggttgtcgaaacagtcgattccggtggaagccgccgtcgtatccaccatgagcggtgtacaaggagctttcattggtggtctcatgggaacactctctccggaaatgcctcaagccggcgttgaccctcaagccatagcttcgatg

SEQ ID NO: 162283 - DNA, 259 bp, Arabidopsis thaliana columbia
  unsure (1)..(259): unsure at all n locations
ggccgggggggcggggctctgggcgggccggctttgcccggnngggccgntnngctntccccggcggcctccgtggtttttgggcccggccgtgtccccttgcgcgtggcctccttgccctccggtccttccggcngcccnntggccggttccgcccgggccnggtccttgggtccgttctccggtgggcctccgggctccctccctggngngttccccggtgtttccgggtgggcccctgccggtctttccgccggtc

SEQ ID NO: 162284 - DNA, 303 bp, Arabidopsis thaliana columbia
  unsure (1)..(303): unsure at all n locations
cccacgcgtccgctcaaaggttangaagaaaagatgtcttaatttttggaagcccaaggnggccgngggggaggggaatgtgacgaggggggggcttacaaaaacgtcaagaaagtgtntgtgggccaaggtgattctggtgttgttaacgtcaagtttgattacgagaaagatggaaaaatctgttcacacgaacatgggaagcagccactacttggaacagaggagtttgtggttgatccaaaagattccataccatcagngaaaatttactacgagaagctctttggatcaccgatagaa

SEQ ID NO: 162285 - DNA, 360 bp, Arabidopsis thaliana columbia
cccccaacattctctcgcattcggctcttgcttctctacggaagggcggaaagcactcccctggagccgctaagctaccagttcctccggtgaccgtccctaagctaccagttcctccggtgaccgtccctaagctaccagtccctccggtgaccgttcctaagctacccgttcctcctgtgaccatccctaagctacccgttccaccagtgactgtacctaagctacccgttcctcctgtgaccgtccccaagctacccgttccttcagtgaccgttcccaagctacccgttcctccagtgacaggtcctaagctacccgttcccccggtttctgtacctaagctacccgttccttcag

SEQ ID NO: 162286 - DNA, 406 bp, Arabidopsis thaliana columbia
aaaaaaatcttgctgctatctctctataagtccactcctccttcaagcaaagcaccttcctcttctttttgctcctctgagattggtttaagattaaaccagacccatctaagggatctggaacaagcttcgtctctggttccactctgatcatcagagtattaaaaatggagtctttcttctccagatccacctccatcgtctccaaattgagtttcttggccttatggatcgtcttcttgatttcttcatcttcttttacttcgacagaagcatatgatgcgcttgatccagaaggcaacattacaatgaaatgggatgttatgagctggactcctgatggctatgttgccgtggttacgatgttcaactttcagaaatacagacacattcaatcttcaagatg

SEQ ID NO: 162287 - DNA, 446 bp, Arabidopsis thaliana columbia
aaaactcttgaatttttcaagaacaaaagaaaaagacatctttaatggcggccatgaactcgagtgttctcacttgcagctacgcaattgctggctctggctcggtagagcttaaccagaaagttggtttggtgaattcatcagttgggtttggtcagaagaaacagatgattatgcctgtgatcaaagctcaacgcgttgttggtgatgatgttgatggatctaatggaagacgatcagccatggttttcttagcagctacactcttctccactgctgctgtttctgcttctgctaatgctggcgtcattgacgaatacctcgagaggagcaaaaccaacaaagaacttaatgataagaagagattggcaacaagtggagcaaactttgcgagagcattcactgttcaattcggaagctgcaagttccctgagaatttcactggc

SEQ ID NO: 162288 - DNA, 443 bp, Arabidopsis thaliana columbia
accggaccggaagggccgacccgagcgacccgagcggtcaaaaatactcgttggagaagtagccttacgtaccagttcattaaatcggctttccgaacaagctgctcgcaaccctgaggattttcacatcagagatcaaatacagaaattagaagatgaaatcagcgaaaagaaggatcaaatacgtgttctcgagcaacaaattattgagattttcggaatgactccctatgcctcagattctcttggaatgccccaggttctgtcaaagctcacgatgcaactaaatgagaaaatatttgaacatgagataaagtctgcagacaataggatacttcaggagcagctgcagatgactaaatcagaaaacgctgagatgcaagagacaatcattctactaagacaacaactagattcgttagccgagagacattcaacacagc

SEQ ID NO: 162289 - DNA, 482 bp, Arabidopsis thaliana columbia
  unsure (1)..(482): unsure at all n locations
ccggnnnggaagggccgacccgagcgacccaaaacgtgaatccggaagtcttcaattggaatttgtttcgtgggattttggaaatggcatcgaaacggattttgaaggaattgaaggatctgcacaaggatcctcctacttcatgtagcgcaggacccgttgcggaagacatgtttcattggcaggccactataatgggtccatcggatagcccttattctggaggagtttttcttgtaaccatccatttccctccagattacccatttaagcctcctaaggtggcttttaggacgaaggtgttccatccaaacattaacagcaatggaagcatctgcctcgacatcttgaaggagcagtggagtcctgctctcacaatttccaaggtgctgctatcgatctgttctttgttaacggatccaaacccagatgatcctttggtccctgagatagctcacatgttcaagacagacaagaacaag

SEQ ID NO: 162290 - DNA, 463 bp, Arabidopsis thaliana columbia
  unsure (1)..(463): unsure at all n locations
cgaaaaaaagagaaacccgaaaacgagaaaaangtctttctccgangctctcttgccaatctccgggagagtataagaaccattatgtgcttacacaagattaccaatggccgtcccgaatcaagaaacccatggcccccggagaagaagaccctttaaaggtctcctcgccgtctcatttggtctcttgttcatcgccttttacgtcgctctcatcgccacacacgactgatctagatccaacgacgaagggatcgatgaaacagagacgattacgtcacgtgcacgttttgctggtgtgtcggagaaacgtaacgatgggttatggaaactttccggtgatcggaacacgccggcgtttgaatggaacaatagtatgttgtcgtggcaacgaacggcgtttcattttcagcctgtgcaataatggatgaacgatcctaacggtccattgttctacatggga

SEQ ID NO: 162291 - DNA, 456 bp, Arabidopsis thaliana columbia
gaaagcaaaactgaaagcttctaccgatttcgttgggctcaactactatacttcagtgttttcaaaccatttggagaaacctgatccttcaaaaccaagatggatgcaagattctcttattacatgggagtctaagaatgcgcaaaattacgccattggtagcaagcctttgaccgctgcattgaacgtttactcgagaggttttagaagtctgttgaagtacattaaggacaaatacgcaaatccggaaattatgatcatggaaaacggatatggagaagaactaggggcctcagattctgttgctgttggtaccgctgatcataacaggaaatattatcttcagaggcatcttttgagtatgcaagaagctgtttgcatcgacaaagtgaatgttacaggatactttgtatggtcattgttggataacttcgagtggcaagatggtttcaaaaa

SEQ ID NO: 162292 - DNA, 421 bp, Arabidopsis thaliana columbia
  unsure (1)..(421): unsure at all n locations
caacaaagcaaaacatgaaaggcacattcactaacttgcttgtgctccttctcattgcacttgtttgtgccaatgtcggtgctaggaaacttatctccgaagatacccaattcaaggatgaaaaatctttcctcggaggcggtggcagcggtgatggcttagggcttggccttggtggaggagctggtcttggtgggcttgggattggggctgggatcggcgcgggagccggactagggttaggtggaggcggtggtggactcggaggtggtggcggtggactcctcggtggaggcggctntgggggaagagccggtggcggactcggtggccttccttgaacgtattgacaagtgtgcgtgtgagagctgattctcagcttattactaattaatttaggtactttcattctcttaataaa

SEQ ID NO: 162293 - DNA, 426 bp, Arabidopsis thaliana columbia
gacccacgcgtccgcttcgttatattccttgagataacaactaagcatcgttcttcacctttaccaaaaagataaaaaaaaagaaaaatggcaaaagaaaatggatttataggatcaatcgatcaaggaaccaccagcaccagattcatcatttacgaccacgatgctcgtcctgttgcttctcatcaagtcgagttcactcagttctatcccgaagctggatgggtggaacacgatccaatggagatactggaaagtgtgaaagtgtgcattgcaaaggctctcgacaaagccactgccgatggacacaacgtcgacggtggcttgaaggccattgggcttacagatcagagagagactactgttgtttggagcaaattcactggcctttcttccacaaggctattgtctggatggatgctcgta

SEQ ID NO: 162294 - DNA, 267 bp, Arabidopsis thaliana columbia
cggacgcgtgggtgtagctgatatgatttactttgatcatcaatctcggattgaacaggaacagataactaggatttctgagactgttgatactgagataaggcgttgggcaactggaaaagaaggaaacatgcgtgcgctgttatcttccttgcacatcgtactctggcccggatgtggttgggaggctgtttccataacagatttgatcacattggccagcagtcaagaaagtctatagataggcatcactgtttgttcattccg

SEQ ID NO: 162295 - DNA, 447 bp, Arabidopsis thaliana columbia
  unsure (1)..(447): unsure at all n locations
ctagctctttcgttgtgatgcaaccatctccgtctttgtcgaaaaggctaggaacactgatgagatcattaggtcaaaatccaacagaagcagagttacaagatatgataaacgaagtagatgctgatggtaacggaaccatagacttccctgagtttctgaacctaatggctaggaagatgaaggacactgactctgaagaagagctcaaagaagctttcagggttttcgataaggaccagaacggtttcatctcggcagctgagttaagacatgtaatgacaaatcttggtgagaagttaactgatgaagaagttgatgagatgatcaaagaagctgatgttgatggagatggtcagatcaattatgaagagtttgtcaaagntattgagggcaaagtgaggaaactattctcatatcttttctctcttttttttttctttcttt

SEQ ID NO: 162296 - DNA, 447 bp, Arabidopsis thaliana columbia
  unsure (1)..(447): unsure at all n locations
aacctttcttctctaatggagancngctctttcttcaaatcacaacccacttggctccggagtctcttcgttctggggtggatctcaatcttcaaattcatcttcaccctcctcagatctttctacatctacttcctccgaccatccaaaaacctccgccgatacggttcatgggcaatcatcaccggaccaacagacggaatcggtatagctttcgcctttcagttagcccagaaaggtcttaaccttatactcgttgctcgtaacccagacaagctcaaagatgtctctgattccatcagatctaagtatatgcaaactcagatcttgaccgttgtgatggatttctctggagatattgatgaaggtgtgaaacggtttaaggaagagtttgtatgattagatgttgggattttgttttttaatgcctgcatgtcttatccttat

SEQ ID NO: 162297 - DNA, 350 bp, Arabidopsis thaliana columbia
ctcgatcgtctccgtctccgatctcgtttcttcattttccgcgtgttgattggtacaaaggtttaatcaaatggttggaggaggagttatccagcaaattcttaggaggaagcttcactcccaatcacttgcaactccggttttgtcttggttttcttcgaagaaagctcatgaggatgctggttcttctggtgtaagagcacttgccttgttgggtgctggtgttacaggactgttgagtttttctacagtagcatctgctgatgaggctgaacatggattggagagtccagagtacccttggcctcatgatggcattcttagctcatatgaccatgcttcgatccgtc

SEQ ID NO: 162298 - DNA, 459 bp, Arabidopsis thaliana columbia
caatctactctctttaaaagaaattcgtatgttctatcaagaagcagaagatggcccgaaaggtgtaagcacaaggagggaaaggagccaacctatgggacgatggatcgacacatgacgccgtgaccaagattcagctcgcagcaggcatagacggaattcaatatgttcagtttgattatgtcaagaacggacaacccgaacaagctcctcttcgtggtaccaaaggccgtgttctcccagctgatccgtttgtgattaaccatccagacgaacatctagtttctgtagaaggttggtatagccctgaaggtatcattcaaggaattaagttcatcttcaacaagaagacttctgatgtcattggatccgatgagggtactcactttactctacaagttaaaaacaagaagatattggctttcattggtctgccggggcaatcttaattcttttggg

SEQ ID NO: 162299 - DNA, 353 bp, Arabidopsis thaliana columbia
gcgaagagaagccatcatcatccatggctatttagaatctactgtccctagctcgccgggcgcagaggcgtttattcctgacgcaagccacacgatcttcctcttcgttttcagctatcgattcggtgccggcttccgcatctccgacggctctatctccaccgccgccgcatcttatgccatacgaccacgcggctgagattataaaaaataagatcaagaagctcgagaatcctgataagaggttccttaaatacgcatctccacatccgatcctcgcttcccacaatcacatcttgtcagctccggagactcgtgtcactaccttgcccaatggtctacgagtcgctact

SEQ ID NO: 162300 - DNA, 384 bp, Arabidopsis thaliana columbia
aaaatctctctctgccaatctcatcttttacttttctctaactctcgttttcgattctacaggggctgtacaagaagattaggagcggaatcaacggattcggaagaattggtcgtttggttgctagagttgttctccagagggacgatgttgagctcgtcgctgtcaacgaccccttcatcactactgagtacatgacctacatgttcaagtacgacagtgttcacggtcaatggaaacacaatgaactcaagatcaaggatgagaagacccttctcttcggtgagaagccagtcactgttttcggcattaggaaccctgaggatatcccatgggccgaggctggagctttctacgttgttgagtttacttgggtttttactt

SEQ ID NO: 162301 - DNA, 394 bp, Arabidopsis thaliana columbia
  unsure (1)..(394): unsure at all n locations
tttttcgagaaaacggggatagagatacggagggattcttatatgaaagagatggcacacttcaaggttcgtaaactcgcttcggagaaactcgcaatcgatctctcggagaaatctcacaaagcatntgtactaagcgtcgtggagaaattcctcgacgaagagagagcgagagaatatgaaaactcacaagtgaataaggaagaagaagatggagataaggattgtggtaaaagaaacaaagagtttgatgatgacggcgatcttatcatttgcaggttatcggataagagaagagtgacgattcaagaatttaaagggaagagtttggtttctaatcaaaagtttacaagaaagatggcaaaaacttcctacttttaaagaataagctaac

SEQ ID NO: 162302 - DNA, 486 bp, Arabidopsis thaliana columbia
  unsure (1)..(486): unsure at all n locations
aaaaccgggccgacccaagcgtccgttactttaaagccattaatgtaagagattttgtattagacgccgacctccaagaggaacgggacggctatgttcttgtccacggagagccaaanagaaacgacatggttgagtactttggtgagcagttgtctggttttgccttcactgcaaacggatgggtccaatcttatggatctcgctgtgtgaagccaccagttatctatggtgatgtgagccgtcccaaggcaatgaccgtcttctggtccgcaatggctcatagcatgacctctcgcccaatgaagggtatgcttactggtcccgtcaccattctcaactggtcctttgtcaggaacgaccagcccatgcacgaaacctgttaccagatcgctttggtcatcaaggacgaagtcgaggatcttgagataaggggaatcggtgtcattcagattgatgaggctgcacttagaagaagactaccac

SEQ ID NO: 162303 - DNA, 259 bp, Arabidopsis thaliana columbia
acaaccaaggccaccaaaacccaggccggagttctttaaaaaaggaggggcagcgccccaccaactcgcaaagtctctcgagcaatccacctcgctcccaacgccacaatctccggcgtagcaagccggtctttataaaaagccaaagcctttgccaccgccaataactacccataatcaaccaaaatccaccactcttacgaatctcttctcgaatacccatatatcgaagctctctattgacctctccccactaatc

SEQ ID NO: 162304 - DNA, 381 bp, Arabidopsis thaliana columbia
agcaaaagtatgctggatgggtttatcattaaagcaaaagcatcaaccatcatcaaaatccaacaagatagtgaaagatccaaccgccacttgcaactacactacacaactctgaaatacaaaatcattgaagatctacccaaaaaaaaaaaaaaagagatggttctgctagagaagctttgggatgatgttgtggctggacctcagcctgaccgtggccttggccgcctccgtaagatcaccacccaacccattaatatccgagatataggagaagggagcagcagtaaggtggtgatgcataggtcgttgaccatgccgacggcagtgatgccctgttacttcaactactctaaccacttctactacgccacttaggat

SEQ ID NO: 162305 - DNA, 454 bp, Arabidopsis thaliana columbia
  unsure (1)..(454): unsure at all n locations
ccctaacttccttcatcatttttcccattctctctccgaaacagagaacatttngaggggggtcttattctaaatcctgggagcaacaatggtgaaggcaacaaaagcagagaagaagatagcgtatgacacaaaactatgtcagcttatcgacgaatacactcagatcttagtcgttgcggcggacaacgtcggatcgactcatcttcagaacatcaggaaaggtcttcgtggagactcattggttctcatgggtaagaacactatgatgaaacgttccgttagaatccactccgagaactctggaaacactgcaattttgaatctgcttcctcttctttaaggaaacgttggtttgatcttcactaaaagtgaatctaatgaagtgtgcgaggaggttgccaaatacatagttggtgcttcctgctcgtgttggtttagttgctcctattga

SEQ ID NO: 162306 - DNA, 447 bp, Arabidopsis thaliana columbia
caaaagaagaagagaaacatcaagaagatagttttggcttcctctatgttctcctccaccggtgtggttacctccccggctcaagccaccatggtcgctccattcaccggcttgaagtcatccgcttctttcccggtcacccgcaaggccaacaacgacattacttccatcacaagcaacggaggaagagttagctgcatgaaggtgtggccaccaatcggaaagaagaagtttgagactctatcttacctccctgaccttagtgacgttgaattggctaaggaagttgactaccttctccgcaacaagtggattccttgtgttgaattcgagttggagcacggatttgtgtaccgtgagcacggaaacactcccggatactatgatggacgatactggacaatgtggaagcttccattgttcggatgcaccgactccgctcaagtg

SEQ ID NO: 162307 - DNA, 413 bp, Arabidopsis thaliana columbia
gaaccggaacggacgaagatggttgacagtttatttgatcggagatggcatcgaatgcggcggggcctttctagagagcggcggggatcacatatatatcgtattcaaacatctgtgcgaatatcgtgaggaactgtctcaaggagccacacaaagctgaagctcttactcgcgagaaggttcacttctctctctccaaatgggctgatggaaagccccagaaacctgttttgcggtcagacacacctgaagtttgaagtcaactttgagcttatgttcttaagggattcaaaagttactgagttaccaaagattgttttctttttattgtcaacaatggagcctgagtgaaatactcatttccgatcataataatgacacactgagtcctgtgatcctctttcctcttttgc

SEQ ID NO: 162308 - DNA, 451 bp, Arabidopsis thaliana columbia
ccctagctcaaagctttctctctcaaatccgtcatgactaaacagcacgcgaactggtctgggtacgataacaatggaggaagatgtgtggccatcgctggatcggattactgtgttatcgccgccgatactcggatgtctactggttacagtattcttagtcgcgattactccaaaatccataaactagcggacagagctgttttgtcttcctctggcttccaggctgatgtgaaagctttgcagaaggttctcaaatccagacacttgatctatcaacatcagcataacaagcagatgagctgtcctgcaatggcccagcttctctccaacacgctttatttcaagcggtttttcccctactatgcctttaatgttctaagagggcttgacgaggaaggaaaagggtgtgtctttacttacgacgctgttggctcatacgagagagttg

SEQ ID NO: 162309 - DNA, 326 bp, Arabidopsis thaliana columbia
tctcttcggggtgggaatttttaccatcactggcggcactcgcaccagtgacgggatgttaccaaacggcgactttgaactaggaccaaaaccatcggacatgaaaggaacgcaagtaataaacaagaaggcgattcctatctgggagctttcaggcttcgtcaaatacataaagtccggtcaaaaacaaggagacatgcttctcttattcccggccgtaaagttcgcaatccggctaggcaacgaggcatcgatcaaacaaatacttaacgttacaaatagaatgtattacttactgacgttcattgtcctaaggacatgttccc

SEQ ID NO: 162310 - DNA, 467 bp, Arabidopsis thaliana columbia
ggacgcatcttcaacaagccgattcgcttctacgttcgtacaaaacggagcctaagtgttttccggcgaaatcttatctccggggaaacgagaagtgtaagctagctctcacgggactgcccgatgagttctacgatacagagtgggatctgctgatggtcgatgctcctaaaggttacttcgcagaagctccgggaagaatggcggcgattttctcggcggctgttatggctaggaaccggaagaaaccgggagttacgcacgtgttcttgcacgatgttaatcggagggtggagaagacttttgccgaggagtttttatgccggaagtatagagtcaacgccgccgggaggttatggcattttgctattcctccggcggctgcgaacgctacgattgactctggtgattataggttttgctaagattgcgacacgatttatcttcttatttcctcttttgccctt

SEQ ID NO: 162311 - DNA, 281 bp, Arabidopsis thaliana columbia
cactctctctctttgcgtcgagcttttcttatactgtgggggcgctctctatccactccacctaaaacgaacgtactctacgtcgtttcatctctccagcaaacacaaactatcctctcactcgacccgactcgttcctcactcaccaccaccaaacccgaatccctattctacccagttttcttcaattcattttcaccactatctctagaacttcactctcgagacactttcgtcgcgtcacaacacatagactacaaaagcttaacactcattctact

SEQ ID NO: 162312 - DNA, 331 bp, Arabidopsis thaliana columbia
cgtgagcttctgtctcgttcatctacactatctgactcggttgagaagaaatggcaggacacatggttgctcatgccacattgaaaggcccgagtgttgtcaaggaattgattattggtttgacgcttggtttagctgctggtggtctctggaagatgcaccattggaatgagcagaggaaaactagaactttctatgatttgcttgagagaggtgagatcggtgttgtcgcctctgaagagtgaatgggaatgcctctctctcactctcaatgtttgtggctcgatttttctgtttttatggtttcttgtgatcttatataagttaccta

SEQ ID NO: 162313 - DNA, 447 bp, Arabidopsis thaliana columbia
  unsure (1)..(447): unsure at all n locations
cggactcgtgggttctaattaattcgtttctttatcnaacatatttttttttattatgagggcatattttactacttcaaatgcagaggtttcgatacgtgaaaaaaaaaacctgggacgtatcgcccaaatcattggtccggtactggatgtagccttccccccgggcaaaatgcctaatatttacaatgctctggtggttaagggtcgagatactcttggtcaagaaattaatgtgacttgtgaagtacagcaattattaggaaataatcgagttagagctgtagctatgagtgcgacagagggtttaaagagaggaatggacgtggttgatatgggaaatcctctaagtgttccagtcggcggagcgactctaggacgaattttcaacgtgcttggggaacccgttgataatttaggtcctgtcgatactcgcacaacatctcc

SEQ ID NO: 162314 - DNA, 306 bp, Arabidopsis thaliana columbia
  unsure (1)..(306): unsure at all n locations
gcgctttggtatgagattgctttataccgatttttatggnccggntaaagctggtgaccgggtgtggcttatagagtttggagcgggtttcaagtgtaatagtgcggtttggaaagcgttacgaccggtttcgactgaggagatgaccggtaatgcttgggctggttctattgatcaatatccggttaaagttgtgcaatgattggttgaaccggataatcatatatgtaattgtgttcttcttgattttattttttaattgttgatgtaagttgtcgattgaaaatcatataatttaattaattt

SEQ ID NO: 162315 - DNA, 441 bp, Arabidopsis thaliana columbia
cgggccggcccacgcgtacgctctattcaaaaagcttttttcctcatccgtttaatcttcctccgatcatgccgaccgggagcgatctcataggtggagtccaagaagaggtctatcaccccaacgcacttagggcggcgctcgctgagtttatctcgactttgatcttcgtcttcgccggctcaggctccggaattgctttcaacaagatcactgacaatggagcaaccactccttccggcctcgtcgccgctgccttagctcatgctttcggtctctttgtcgctgtctctgttggcgctaacatttccggtggccacgttaaccctgccgttaccttcggtgtcttactcggtggtaacatcactctcctccgtggtattctctactggattgctcagcttcttggctccgtcgccgcttgtttcctccttagctttg

SEQ ID NO: 162316 - DNA, 463 bp, Arabidopsis thaliana columbia
gaaatttataaactttattcctcaattcaatttggggtttgcttcatttttttctccgaccaaacaagttccgggtgttttgaaagaaccccgacaatggcgtggaacgtgttcaagttctgcacagcacttcgcgccttgggttcgatcatgatcttaattgttatcgggatcatcggattcacatactacgccgttgtcgtcgttaattacggacctgctctactgatcggtggtgtcgattcattactatctgttctcgtcttagcgttcttccactttctgcttataatgctactgtggagttatttctctgttgttgtgacggaccctggtggtgttccaacgggttggaggccagaattagacatagagaaaagcgagggaaaccaagctttgattggagaagcttcggttggagattcctcgtctcatggtgtaagatattgtagaaagtgcaatc

SEQ ID NO: 162317 - DNA, 409 bp, Arabidopsis thaliana columbia
  unsure (1)..(409): unsure at all n locations
ctgctgagttctctggtttccttcnctacatgtagctnggtcgaagactcaagaaaacaggcgctgttttggctgagatcttgtctcttatgtctagagatgaagcaagacatgccgggttcttgaacaagggattgtctgatttcaacttggctcttgatttgggtttcctgacaaaggcaaggaaatacactttcttcaagccaaaattcatcttctacgcgacttacttatccgagaaaatcgggtactggagatacatcacaatctacagacacctcaaggaaaaccctgagttccaatgttacccaatcttcaagtactttgagaactggtgtcaagacgagaaccgtcatggtgatttctttctctgctttggatgaaagctcaacctcaagttccttaaatg

SEQ ID NO: 162318 - DNA, 441 bp, Arabidopsis thaliana columbia
gaagagaaacaacaagaagtagtaatggcttcctctatgctctcctccgccgctgtggttacatccccggctcaggccaccatggtcgctccattcaccggcttgaagtcatccgctgcattcccggtcacccgcaagaccaacaaggacatcacttccatcgcaagcaacgggggaagagttagctgcatgaaggtgtggccaccaattggaaagaagaagtttgagactctatcttacctccctgaccttagtgacgtcgaattggctaaggaagttgactaccttctccgcaacaagtggattccttgtgttgaattcgagttagagcacggatttgtgtaccgtgagcacggaaacactcccggatactacgatggacggtactggacaatggggaagcttccattggtcggatgcaccgactccgctcaagtgttg

SEQ ID NO: 162319 - DNA, 461 bp, Arabidopsis thaliana columbia
cgtccacatctttctcctttggtggcaaacacaacgacagatagagagaaacgatggcgtcgaactcgcttatgagctgtggcatagccgccgtgtacccttcgcttctctcttcttccaagtctaaattcgtatccgccggagttccactcccaaacgccgggaatgttggtcgtatcagaatggctgctcactggatgcctggcgagccacgaccagcttaccttgacggttctgctcctggtgactttgggtttgacccacttggacttggagaagttccagcgaaccttgagagatacaaagagtcagagctcatccactgtagatgggctatgctcgctgttcctgggattttggtaccagaagcattaggatatggaaactgggttaaggctcaggaatgggcagcactaccagggggtcaagccacttacttgggaaacccagtcccgtggggt

SEQ ID NO: 162320 - DNA, 207 bp, Arabidopsis thaliana columbia
ctctccttatccccaaaaattcaaacttttttctctttggaaaattctgaggcaaaaatgcggcgtaattgctgccatgtttcatttgcttcaaccctcaagatccttaattttgtccaagctttcattggtggttcgatcattatctactccatatggatgctccatgaatacaggcgtgacctttccgtggacccggcttcgtca

SEQ ID NO: 162321 - DNA, 424 bp, Arabidopsis thaliana columbia
  unsure (1)..(424): unsure at all n locations
aaaaccgggccgagcacgcgtccggaaatgtcaangncancgncccccnnnatctttctcacnnncnnncnnccttcttctcggttgttcatcttcatattccgatggcgatctctgagctattcgacgactggtgccagaaacatggcaaaacgtacggttcagaagaagagaggcaacagaggattcaaatctttaaagataatcacgacttcgttacgcaacacaatctcatcactaacgctacttactctctctctctcaatgctttcgcggatctgactcaccacgagttcaaggcttctcgtcttggtctctctgtttccgctccgtcggtgataatggctagtaagggacagagtctcggtggtagcgtaaaggttccagattctgttgattggagaaagaatggagctgttactaa

SEQ ID NO: 162322 - DNA, 427 bp, Arabidopsis thaliana columbia
  unsure (1)..(427): unsure at all n locations
aaancagaannacaaacaaaaanggtttttcaaaagcnnccncncaaagggctggggntggcttctttccatagtcgggtgtccagcaaatgcagatggacctgtttgcccgccgtctaacaaactaagccgggcaagtttccctgaaggttttttatttggcacggctactgcggcataccaggtcgaaggtgcgattaatgaaacttgtcgtggaccagccttatgggacatctactgtagaagatatccagagaggtgcaataacgataacggcgatgttgccgttgatttctttcatcgttataaggaagatatccaactaatgaagaatctaaacacagacgcctttataatgtctatcgcatggccaagaatatttcctcatgggagaaatgaaaaaggagtgagtcaagctgttgttcaa

SEQ ID NO: 162323 - DNA, 347 bp, Arabidopsis thaliana columbia
gagaaaacacccaccacatctccgtcttctttttcaaaatttaccaccagagatcgcagatggttcttcattctatctctctcggttagatccgattcgatgccgtcccgtagacgtaccctcctcaaggtcatcatcctcggtgatagcggggtgggaaaaacctctttgatgaatcagtatgttaataaaaagttcagcaaccagtacaaggcaaccattggagccgacttcttgaccaaggaagtacagtttgaagatcgacttttcactttacagatctgggatacagctggacaggaaaggtttcagagccttggtgtaacccttttaccgtgagtgctgat

SEQ ID NO: 162324 - DNA, 282 bp, Arabidopsis thaliana columbia
  unsure (1)..(282): unsure at all n locations
gagaccagaagggagatatttttctttcaatgacgtgaggcctantctccnttcattaaaaatctcggcatgtttcatgttcgggtggacttcttatctgaggatggtcaaacgattgctatgttttggcgttcgtgcatgttaagattcacaagtgagcctattcggctagttcagacattcttcaaaatggctccgttagcgacatgatatgtctctgaaatccaaaccctgagctagaaatttaaaggctttgtagaaaaagacatttccactgcttgc

SEQ ID NO: 162325 - DNA, 361 bp, Arabidopsis thaliana columbia
gccacatcagctatccaagagtcctctttcgacggccaaggggctctcaagccctccagccacctcatccaaaaagcgggcgtcttgggcagtggccgtgtgaccatgcgtcgtaccttctagtctactccccaaagcatctggtatggaccagaccgtcccaagtacttgggaccattctcggacaacacaccgtcttacttaactcgagaatacccccgagtctacagctgggacaccgctggactctcggctgacccggagacattcgctaagaaccgtgagcttgaagtaatccacagcagatgggctatgttgggtgctctcggatgcacattccctgaaattctctccaacaacg

SEQ ID NO: 162326 - DNA, 439 bp, Arabidopsis thaliana columbia
ccggggatttctgtctcaagagttgtatccgcctgctcatttaaagctatgaaacaggtagctagaagattttatttggaattggggcagattcgctaaattagaagccttttcccaattttcttctgatctcgataaagctactcagaatcaattggcaagaggtcaacgattgcttgagttactgaaacaatcccaatcagcccccctcacagtggaagaacagataatgaccatttataccggaacaaatggttatctggatggattagaaattggacaagtaagaaaatttctcgttcaattacgcacttacttaaaaacgaataaacctcagtttcaagaaatcatatcctctaccaagacattaaccgctgaagcagaaagctttttgaaagaaggtattcaagagcaactagaacgtttcctacttcatgag

SEQ ID NO: 162327 - DNA, 396 bp, Arabidopsis thaliana columbia
  unsure (1)..(396): unsure at all n locations
ccgggccagacccacgcgtnccgacagatgtccatagaatccactttctcagattggnctttgtgaagnncaaacagagagctcatccggtgcaagaggaaaactcgacagttgacgtttgtggcgatagacgagaaaccctcgtacctcgctagatagccgatgagacgcttggtataggcaatacgaacacatgctaacataaggcgccgtggggatcataaatcttggagaatggcaatatggtaatatacgattccagtggaaaatttgtatggcagagctttgattctcccaccgacacacttctcgttggacagtctttgaaactcaacggtcggaccaaactcgttagcagactgtctccatctgtcaacaacaaacgaccgtacagtc

SEQ ID NO: 162328 - DNA, 452 bp, Arabidopsis thaliana columbia
ctttatggatgagccaacttcagggctagactctagagcagcggctattgtgatgagggcggtaaggaacacagtggacactggaagaaccgtggtctgcaccattcatcagcctagcattgatatctttgaagcatttgatgaattgatgctgatgaagagaggaggacaagtgatttacgcgggtccattgggtcaaaactctcacaaggtggttgagtactttgaatctttccccggagtgtccaagattccagaaaagtataacccggccacttggatgctcgaagctagctcactcgccgctgagctaaaacttagtgttgactttgctgagttatacaatcaatcagcattgcaccagcgaaacaaagcgttggtaaaagaacctagtgttccaccagcaggagcatcagatctttactttgctacacaattctcacaaaacacat

SEQ ID NO: 162329 - DNA, 488 bp, Arabidopsis thaliana columbia
  unsure (1)..(488): unsure at all n locations
ggtagagtttgacgagggatttgtaaggttttttgnatgtaacaccagaaggagagactgcgtgaagacgtattttatagagtgtgaggggttcatacctagcccaacaagagttagtgaagattggcagggattgctctggtgccatctccatttatgaagccatcccgatttccaaacaccatattattctcacatcagtagcagagtctatcatatccccattaaacaagttggctccgcaaattcggatattgtatgttctttctagttgtttcgcacttcctcacatacagttagcttcctcaagaggaataatttcattagcatttttgtgtcttacaagatatgcagagacctgatttacccttcaaatccgaacctaaagccttttatactgtatctttttatgtcctattagattgagatattccttcgacatgtatgataaatacgagcctgtcaacgagccatatttggactactgc

SEQ ID NO: 162330 - DNA, 431 bp, Arabidopsis thaliana columbia
aaactcttgaatttttcaagaacaaaagatattgacatctttaatggcggccatgaactcgagtgttctcacttgcagctacgcaattgctggctctggctcggtagagcttaaccagaaagttggtttggtgaattcatcagttgggtttggtcagaagaaacagatgattatgcctgtgatcaaagctcaacgcgttgttggtgatgatgttgatggatctaatggaagacgatcagccatggttttcttagcagctacactcttctccactgctgctgtttctgcttctgctaatgctggcgtcattgacgaatacctcgagaggagcaaaaccaacaaagaacttaatgataagaagagattggcaacaagtggagcaaactttgcgagagcattcactgttcaattcggaagctgcaagttccctg

SEQ ID NO: 162331 - DNA, 305 bp, Arabidopsis thaliana columbia
ggtcatttctggtatatggttactagaattatttttcaaaacattacagagccttcaaaggaagactgctcttgagaccggtgcgaccagcggaatcctttattccatagtataatatgtagctgtttttggagctaaaattcacatatgtgacatatccaaaactttgttcaatcaaagtttaagcgaatggaaaaataaaaggcttcaaactaagtggtcaatatgttatgtaacctttcattcttagaaaaaaaaactaattcataccatctcctttatttttctatgcaaactcaacattc

SEQ ID NO: 162332 - DNA, 401 bp, Arabidopsis thaliana columbia
ggccggcccacgcgtccgctctctcgatatcatctatttctctctttgattcaatttcgcaaaatggctgacaagagagtcagtttctgaatcaacggttgcggaagaatcggccgtttggttgctagagttgttcttcagagggatgatgttgagctcgtcgctgttaacgatcctttcatcaccacctattacatgacatacatgtttaagtatgacagtgttcacggtcagtggaagcaccatgagcttaaggtgaaggatgacaaatctcttctctttggtgagaagccagtcactgttttcggcatcatgaaccctgaggacattccatggtgtgaggcttgagcttacctttgtttttatgtctctggtagtttcactgacaaagacaaggcttc

SEQ ID NO: 162333 - DNA, 369 bp, Arabidopsis thaliana columbia
gctaaggaccctgagcaaggagctcttctctttgtcaaagagatcaagaacgggagattagcgcatgtttgcgatgctcggttgctttatccaagcgtatgttaccggagaaggtcctgttgagaaccttgcaaagcatctcagtgatccttttggaaacaacttgcttaccgtcatcgctggaactgccgagagagctcccactctctaagccatttctactttttttaagagcttccaaaatgtacactttgttcgattggaactccttttgacaatgttaaaaaaacttccatctgaatcttcttgatatatttcaaattttcaaaaaaaaaaataaaataatttataaaataaataataaaattt

SEQ ID NO: 162334 - DNA, 328 bp, Arabidopsis thaliana columbia
cttcctttctcctttccatgtctctccgaccaaaagagactcttccttcactgtcccagctgtttaattctttcagacatctaaccacctattacaaccaatcaactgtcacccattcatcggaagtttgcaaactcctactacatcaatcccatttatcgctttgtacccttccaaccttccctgataccctaccttcatcaacccttttctcttcattcttaaatctacctctcccatagtttctttcttatagacccatccatcataacttacccattaaggaacactatttaccccctgtcatatcattctttcacctcttcta

SEQ ID NO: 162335 - DNA, 469 bp, Arabidopsis thaliana columbia
cgcccggcgcgtccggaagaacaatggcttcctctatgctctcttctttttctatggttgcctctccggctcaagcgaggatggtctctcctttcaacggacttaagtcctccgctgccttcccagccacccgcaaggctaacaacgacattacttccatcacaagcaacggcggaagagttaactgcatgcaggtgtggcctccgattggaaagaagaagtttgagactctctcttaccttcctgaccttaccgattccgaattggctaaggaagttgactaccttatccgcaacaagtggattccttgtgttgaattcgagttggagcacggatttgtgtaccgtgagcacggtaactcacccggatactatgatggacggtactggacaatgtggaagcttcccttgttcggttgcaccgactccgctcaagtgttgaaggaagtggaagagtgcaagaaggagtt

SEQ ID NO: 162336 - DNA, 322 bp, Arabidopsis thaliana columbia
  unsure (1)..(322): unsure at all n locations
ccacgcgccggccctgcactganattttttctaccgtttgtgatatcaccgaggagaaatggctcnaaaaaggaatttttaaagaggatgtagggacactcctcctctcaaactgaatctttcatctacgactatagattcagtttccaaagtccatttatagaatatgaaagagaatttcttaaaaccacctgccaatgcacaagttataagattgccatccttacgatctttccgcatgaacgtcatgttcatccataaaccgaccaccttagatgccacctaacgaaactattagacttctggctacatttgatccacc

SEQ ID NO: 162337 - DNA, 441 bp, Arabidopsis thaliana columbia
ggccactggtggaaaagtctccttcaaagtctctctgacttcggatcctaagcttcctttgagagttttcagcgtaccagagggagctccgttcacggcggttctgaaattcgcagcagaagagttcaaggttcctccacaaaccagcgccatcatcactaatgatgggatcgggatcaatcctcaacagagtgcaggaaacgtttttctgaagcacggatctgaactaagattgatcccgcgtgatagagttggagctgtgtttgtgatggatccatagatgatgtgtaagcaatgattaaaaactcagttccaaaaaaaacataataatatactgaaatgcttatgtacaacttcgttgaataaatatgtaatcgtcacaattgaagtgagttgaatttggtcaagtttaaatattaatatttatattattattatatt

SEQ ID NO: 162338 - DNA, 452 bp, Arabidopsis thaliana columbia
atctcagaaagatcaatctagagagaccaattagagatcggaagagatggcttctacctccgcgatgtcattggtcacaccagttaaccagacccgttcgtctcctttccttaagccattacctctgaaaccatccaaggctttggttgcaactggaggcagagcacagaggcttcaagttaaggccctcaagatggacaaggctttgaccggtatctccgcggctgctcttactgcttcgatggtgattccggagatagctgaagctgctggttctggaatctctccttccctcaagaatttcttgctcagcattgcttctggtggcctcgtcctcactgtcatcattggtgtcgtcgtcggcgtcttcaactttgaccctgtcaagagaacctaagacctatatatctttcttacatcattattgtaatctggtctccttctgtgtattc

SEQ ID NO: 162339 - DNA, 450 bp, Arabidopsis thaliana columbia
tcggaaaactctgagatgcatcgcggcgcgtgttgttttcggacggaaacgtagactgatgcgtctccatggcagcagaaactgggccagatccttttgctcttcttcttcactatctgaacatgaatgtttcattaaggatatagcaaaagctcagcctcctaagcatctgatgcagctgctgaatatattcacagctagaggtaaatccatagtttctcctggtgccaagcaaggcttgttacctcttactattccgttggtgaaaatgagcccgggttcttcaattgctctattacggtggccaacagctccttctagtatggagatgcctgtggtggaagttcagaaacatggggtttggtttctagctaataatgttgatcagttcattcacagaatattggtggaagaagatgtttccaaacccgaagaatgcagccaagaaat

SEQ ID NO: 162340 - DNA, 453 bp, Arabidopsis thaliana columbia
gtgcagcaaacaagaaaggtatgccggttttttgtgacccagcagctctcatcgccaaagagtctgacccattagtcttcaccggatccatccgggttaaaaccggctacgagatccttagaatcactgctcacttgcaacagaacctgaacaaagtgaaagttccctttcttgtgatgcacggtactgacgacacagttaccgatcctagcgcctcaaagaagctctacgaggaagctgcctcgtcagacaaatcactcaagctctacgacgggttgttgcacgatcttctttttgaacccgaacgagaaatcatcgctggagccatattagattggctaaaccagcgggtttagctcgttcaaaccaacaatcactatcgcatcgaatcaagagattcttgattcagacaagaataattaattcgcggaattttctgagtgtgttgactga

SEQ ID NO: 162341 - DNA, 451 bp, Arabidopsis thaliana columbia
gtcctccgctgccttcccagccacccgcttgtcttacaacgacattacttccatcacaagcggcggcggtagagttaactgcatgcaggtgtggcctccgattggaaagaagaagtttgagactctctcttaccttcctgaccttaccgattccgaattggctaaggaagttgactaccttatccgcaacaagtggattccttgtgttgaattcgagttggagcacggatttgtgtaccgtgagcacggtaactcacccggatactatgatggacggtactggacaatgtggaagcttcccttgttcggttgcaccgactccgctcaagtgttgaaggaagtggaagagtgcaagaaggagtaccccaatgccttcattaggatcatcggattcgacaacacccgtcaagtccagtgcatcagtttcattgcctacaagccaccaagcttc

SEQ ID NO: 162342 - DNA, 456 bp, Arabidopsis thaliana columbia
  unsure (1)..(456): unsure at all n locations
cgtccggagcaagacgatgatgacgttgttgatatgtttgttcctcggatccgagagcgcgaagttaggcgcgctttctagatcctataggggtaanaagtctggccaatctaaagatagaactttctccaccatgtcctcttcattggttgaggcagcagcaggattgccggaaaagggtttgatggtgtgcaaatggctaggcacaggttcagcaggttatggaggatacaaagcctctgagtatttttttcctattgacaacgaagagtttagggaaaaccttgaggattgggaatctacgttgcaaagttgggagaaactgaaaaattatttggagggtatgcacaaaggacctgttggcaatcaaacaagaactcattgacgaattccaatctggtggagagaaacctttaatcctttcatgtatctagttgtgtcatgtttcatgtcata

SEQ ID NO: 162343 - DNA, 366 bp, Arabidopsis thaliana columbia
cgtccgtgaaattgcccactagcatttgctctaccactgattactgaagacgtcaaattcaacgttggggagctgttttatgtttcgtgagtggcttttttaatttgcatcgtaatgggtttctggccgttggatcatttttagatgaatctttgtctattgattgatcatttatgtgtctttgggtttgttgttggagttgtaatatctctggaaggcttttgtgcaattgtattgtacggtttaataactataattgagaaaaccagggaatgtgaattatgaaaatgaaataattttcttattttaaatagagttaaacttattttaattataatttatttatttattatttcccttttttta

SEQ ID NO: 162344 - DNA, 345 bp, Arabidopsis thaliana columbia
  unsure (1)..(345): unsure at all n locations
ggccggcccacgcgtccgcgttcttcttcttctacattcatcaatttcgttttgagaaaactaaatcttcnctgaaaaagtgtcttttcgaggaaagggaggaaaaggtttgggtaagggaggagccaagcgtcacaagaaggttctgagagacaacatccaaagaatcaccaagcctgcgattctaatattggctcgtagaggtggagtcaagcgtatcagtggtctcatctacgaggagactcgtggcgtcctcaaaatctttctcgagaacgtgattcgtgatgctgtcacttacaccgagcacgcttggaagaagactgtgaccgccatggatgttgtcta

SEQ ID NO: 162345 - DNA, 436 bp, Arabidopsis thaliana columbia
  unsure (1)..(436): unsure at all n locations
gaaagacttcacattttaccatnattttttttgatctcagaaagagagnncaagaaacaagggcgtttatgcaagtatgaaggggttatcgctgtcnttgcgcttatcgtctgctctgcatctgctaaaaccgcaagccctccagctccagtgctgccaccgacaccttctccatcaccagccccggaaaaagtgaatctcaccgagcttttaagtgtagctgagccgttccacacattcctcgactaccttctctcgactggagtcattgatacttttcaaaaccaatcttacaacactgatgaaggcatcacaatctttgtccctaaagatgatgctttcaaagctcaaaaaaatcctcctttgtcaaatctcacaaaggatcaacttaagcagcttgttcttttccatactttgcctcattactattcgcttt

SEQ ID NO: 162346 - DNA, 285 bp, Arabidopsis thaliana columbia
  unsure (1)..(285): unsure at all n locations
gctatagttggggtagcctctcaggatagcacaaattccctgaatattcttctccaaagaacgagtgttaatattcggaagaagccgtgtgagttcaagagcaggctctcaganttttctcagaagagaggtcttgatttacctcggaaacccctatacttgattccacgcgcaaagctatcttagccatctgtggctagttctagttgtgcttcatgggggttcattgaaaagctacaagaatcgggaggttggaccacttcggagaaggactttgacccgctt

SEQ ID NO: 162347 - DNA, 425 bp, Arabidopsis thaliana columbia
  unsure (1)..(425): unsure at all n locations
cccgggccggccgacgcgtccgcggatttttcctgtgaatctaacgcattgccttagtatcggaagagagggataaggttagaaatcctctttgagatggatgaggggacatccaanaacctgaggtcgatgctcaatcggagattcttcgaccgatctcctcagtcgtcttcgtcatcgctatgcaagcttatgctcttcctttggtcaacattttcggactctctgaaactactgattcgccgcttggtaaaggattgccctgggttctgtatcacatcgtgcataaagatcttcgaatcaatgtatttcgccccttatagagatgcagctttagggatcgatagtgttggaactgttccagcttctctcataactttttcttccattcaagcatttaaacctgtcattataatcaatgcctg

SEQ ID NO: 162348 - DNA, 454 bp, Arabidopsis thaliana columbia
attagagaacagagaaaaaaaaaacaatggcttctcaagccgccgggatcttcaactccggcataacaaccgccgcaacctgcggcgtcaagaaactccactttttctcaacaacccaccgtcccaaatccctctccttcaccaaaaccgcaatccgcgccgagaaaacagattcctccgccgccgctgctgcagcccccgccacgaaagaagctcccgtgggattcacgccaccgcagctagacccaaacacaccgtctccgatcttcgctggaagcaccggtggtcttctacgtaaagcgcaagtggaagagttctacgttatcacgtggaactcaccgaaagaacagatctttgagatgccgacaggaggagcagcgatcatgagagaaggtccgaatcttttgaagctagcgaggaaagagcaagtgttagctttggggacaaggcttaa

SEQ ID NO: 162349 - DNA, 434 bp, Arabidopsis thaliana columbia
cggtccgacccacgcgtccgatttagagctatagctgattaggtaggagcttttttgctttgagacatggctcacatcaggggtctctttgctgctcaggaagctgcaaacccatttgagtactgtgacgttgtgacaaccacaacccacaagagtttgaggggtccaagggctggtatgattttctacaggaagggtccaaaaccaccaaagaagggtcaacccgagggtgcagtctatgattttgaggacaaaatcaactttgctgtattccctgcgcttcaaggtggtcctcacaatcaccagattggtgctctagctgttgcgttgaagcatgctaatactcctgggttcaaggtctacgcaaaacaagtgaaagccaatgcttgtgcccttggaaactacctaatgagcaagggttaccagattgtgac

SEQ ID NO: 162350 - DNA, 320 bp, Arabidopsis thaliana columbia
  unsure (1)..(320): unsure at all n locations
tcatcttttccgaattccttttcttctcccaaanntctgtgaaaacatagaatgctttcttgcaccactggtggggccaccanaatccggagcttccaagacctatcctcaatcatccggtaacatccgtaaaggtggtcacatcgtcatcaaaaaccgttcctgcaagggtgttgaggtttcgacttccaaaactggcaagcacggtcacgccaaaagtcactttggtgctattgatatcttcactgctaaaaagcttgaagatattgttccatcttcccacaattgtgatgtttcacatgtgaaccgtgttgattacc

SEQ ID NO: 162351 - DNA, 450 bp, Arabidopsis thaliana columbia
cgtaattgaattcagataatggaagcttgtttactcgcgatcctctgttctcacctgaacggacctgttccgaacccgagccgagacccgactctcagggtctccgattgtagctctggttcttccggcgacgggaaagtggaatcatctactctccaaaacgactgcgttttctgcaagattatccgtggcgagtctccatgtctcaagttgtacgaggatgatatgtgtttgtgtattctggatactaatccactaagtcatgggcactctcttatcattccaaagttacattatccaaccttagaggaaactcctccctcagttgttgctgccatgtgttctaaagtgcctcttatcagtaacgccatcgtgaaagctaccgggagtgactcatttaacttattggttaacaacggcgcagcagctggacaagtcatatttcacaca

SEQ ID NO: 162352 - DNA, 277 bp, Arabidopsis thaliana columbia
cgcaaaaacatattcattttactcataaggttaaactatcgttatcattttagatcatagatgatcaactaaatacgaattgggttcttcgatgttacgaagccggttttcgcttttcgtgtacaagaatgatgaaaattaagagagaaaaatgagactaaatgagtgtagtgatcatatagtaatgggacttcataagcatgatttgatttgttcgtgtgatttgtttctttgtgatgtgtaatatgtaatgtaatatcaatgttgatgtatattc

SEQ ID NO: 162353 - DNA, 374 bp, Arabidopsis thaliana columbia
  unsure (1)..(374): unsure at all n locations
gcgtcccaactntatctcccaatctcaaaacataataattatggctnccactgctctctcaagcgcagtctttttaactagattgcatgggtccttccccanctccaatcattctccgttcccttccatcagccaacacacaatccctcttcggtctcaaatcaagcaccgctctttttggacgtgtcacatccatttctacatacaatgtcaagttcatcacaccagaaagtgagctatatgttgagtgtgactacgacgtctacgttctttgattctgctgaggaagcttgattcgatttaccttactcttgccatgtctagttcttgttcgagctttatcttgctaaagatacattctttatcttgtttat

SEQ ID NO: 162354 - DNA, 269 bp, Arabidopsis thaliana columbia
cctcatcccaagactgtttgcttacgctgttctacagcctcttactcgctactttcaaaaccagagcatgattacacctcttctcatcacctcttgttttgtgttctgtctccatgttcctctctgctggctttaggtttataagtcaaggcttggtaatcttggaggagccttaactctcagtttttcgaacttgtcttataccattatccttggatctttaatgtgcttctcctctgcctgttctgagacacgcgcaccgctctcca

SEQ ID NO: 162355 - DNA, 364 bp, Arabidopsis thaliana columbia
tatcagtccttcttgtgtctttgattgttgttccgtttcttttgtatctcatctatcctcctacggtgaagagcagtcctgatgctcctaagctggctcaggaaaagcttgacaagatgggacctatgtctaagaacgaattgattatggctgccactttattcctcacggttggtctctggatctttggagctaagttgggtgtagatgctgtgactgcagccattcttggacacactcacctggttcgctgctctcattgcgatggctggttatcttaacaaatatggtctcattgagtggttcagccagaccgtagtcaagtttgtgggaggattgggtttgtcatggcagctatcttttg

SEQ ID NO: 162356 - DNA, 450 bp, Arabidopsis thaliana columbia
gctggaattaattaagtactctcttgttttctaattcaatcactggagaaggaagacttgttggtttcaccaaaaagtctcttcttcaatttttttaattcagaggcagtagtagtacactcagatataaaagaaaccaaaacgatcggaatcttcttccacttgttcttttaaaagattaaagcttttttttttctcttaaagcaaaaaaaggaaaactttccccctcgcgtctctctcttttgacctcacattcgctgaatcactcttctgggttttttttttttttttttttctttgccctagatcttaaagacaaggaggatcaaattatacttttttgagatctgggttcggacaaaaattctgtctttctgcattctctaccgtttcgattcagctcgaggcaatgccaatctaaaaggagtaggtgaaaaaagattcaatttt

SEQ ID NO: 162357 - DNA, 384 bp, Arabidopsis thaliana columbia
gcgtccgagaacaatggcttcctctatgctctcttccgttactatggttgcctctccggctcaagccactatggtcgctcctttcaacggacgtaagtcctccgctgccttcccagccacccgcaaggctaacaacgacattacttccatcacaagcaacggcggaagagttaactgcatgcaggtgtggcctccgattggaaagaagaagtttgagactctctcttaccttcctgaccttaccgattccgaattggctaaagaagttgactaccttatccgcaacaagtggattccttgtgttgaattcgagtaggagcacggatttgtgtaccgtgagcacggtaactcacccggatactatgatggacggtactggacaat

SEQ ID NO: 162358 - DNA, 405 bp, Arabidopsis thaliana columbia
attgaaaacaatctgtttcaccaaaaaaagttctaaaaagcatgggttcgatttcaaagagatgcaggtgaagatctccgatggctttcgtccatggcaacgctcttttcaattctgggttcgagctactaatatctacacaggctacaaggtgtttcaacttcgagtaagtttagtaaaagatgcaaagaagcaagaggaaatgtgggaaagacaacatgaacaagctgctgataagatttacttcatgtgctctgatcttggtggtttcttccttaagattgctcaacttttagcaaaacctgacatggcaccagctgcgtgggtgaaaaagcttgtcactttgtgtgatcaagctcctgcgacgccgtttgatgcgattcaacttgttctagagaaggagtt

SEQ ID NO: 162359 - DNA, 450 bp, Arabidopsis thaliana columbia
atctttttctcattcatcataagaaaattctcttgcaaaaaaaactcaaaacgtttttgaggataatgatgatgatgacgaagatgtttgttcagatcgctgtggtttgtctattggcgacgatggccgttgtgtccgcccacgagggtcaccaccaccatgctccggctccagcaccaggacccgcatctagctcaaccgttgtttcggccaccaatatgttcaccgtcttggctattgctgccgtggctctcgtcgttggttccaaccactaagttggttattacattcgtcgttttgtttcggtttctatgaaattgttctcttgacttttaatatattttgaatttttctcatttagttttaactctctctatgttgatctgatttcttgaataaaataaaaagttattgaacgtgtgtttttaattacgaagatttggattacaa

SEQ ID NO: 162360 - DNA, 291 bp, Arabidopsis thaliana columbia
gcgactggtggtggtcgtgaagctggtagcttctcatggaaacagtacatgcgtcgatcgacttgtaccatcaactatggaaacgagttacctctagcgcaaggaattaacttcggttagatttttcagagatttactcgttaattaataatgttatgttggttcgatttcgatacttgtattgtatgccttgttctctccaagcctttgacttaagatgattacgcttttaatatatataaaaaaatattgaatatattttgattgttaatttgaagataaattcggact

SEQ ID NO: 162361 - DNA, 410 bp, Arabidopsis thaliana columbia
  unsure (1)..(410): unsure at all n locations
ctcttttctctccagatttcgattcccgaggctcgagagaaaaccgnaaatctcttttccggtcactcaatcaaccaaagatgcgtgagattcttcacatccagggtggtcaatgcggtaaccagatcggagccaagttctgggaagtggtttgcgccgagcacggcatcgatccaaccggaaggtacaccggagactcagatctgcaacttgagcgcatcaacgtttactacaatgaagcgagttgcggtagattcgttcctcgtgcagtgctcatggatttggagcctgggactatggatagtctcagatctggaccgtacggtcagacctttcgacctgataacttcgtctttggtcaatccggtgcgggttacaactgggccaagggacactacactgaaggagct

SEQ ID NO: 162362 - DNA, 231 bp, Arabidopsis thaliana columbia
acgcaaggcattaacttggcgctcctctaatcgagacaattatatcggctgccagacggaaagcgctcaagggtgaacggtccaagggacactgacgactggttaaacatttatcagccgcaaaacgttaactacataaaaagcgagttgctagatgatacattctagggcaccgacaatactgctgtttgctgtggctatgcaatatttcaagtcgtgacccttccatga

SEQ ID NO: 162363 - DNA, 354 bp, Arabidopsis thaliana columbia
ccgggccgagcccacgcgtccgaattcttagaatatgatgttccgataatgtgcttatactgcaacagccactgttaacgtgcagaaagattttcttgagtcactggacctgtcaaaggaaacaaaaattgtacttacttcatttttcaggccaaatctacaattttctgttaaacatagtcgaaccaagttttcatcttcatatgcaaaggacttccaaaacttagttgacttatactctgaaaagaaaaactctaccgggaaatagctagcagtaatctcacgagagtcagaagagcattctgattttggttcttacaatttttaatacattcatgagaccgtcttattatt

SEQ ID NO: 162364 - DNA, 397 bp, Arabidopsis thaliana columbia
gaacaaaaactcttcctactttgtggaatggtttccaaacaacgtgaagtcaagcgtctgagacatatctccccgaggtctctgaatggcatcgacatttattgggaattccacatcgatccaagagatgtttaggcgggtgagcgagcagttcactgctatgttcaggaggaaagctttcttgcattggtacacaggtgaaggaatggacgagatggagtttactgaagctgagagcaacatgaacgatctagtctcagagtaccagcaataccaagacgcaactgcagatgacgaaagcgagtatgaagaagacgaggatgaagaagagatattggatcatgagtgagtgaaaagagctgatattaccgatttttaaaatacctctcttatcttc

SEQ ID NO: 162365 - DNA, 221 bp, Arabidopsis thaliana columbia
ctcggaattgtttttgcagaaagtctctcatctgaactcagaaaatctccgagttcgtatatcttctgcgtttgagcaatggcgttggtcatgcacacatacaagggaaacaaaggtgccaataaggcacttattgctgcaaagtatgcgggtgtgaagatcgaggagtccgcagactttcagatgggcgtcactaacaagtcacctgagttccctaaaga

SEQ ID NO: 162366 - DNA, 348 bp, Arabidopsis thaliana columbia
cttcagtgttttcaaaccatttggagaaaccttatccttcaaaaccaagatggatgcaagagtctcttattacatgggagtctaagaatgcgcaaaattacgccattggtagcaagcctttgaccgctgcattgaacgtttactcgagaggttttagaagtctgttgaagtacattaaggacaaatacgcaaatccggaaattatgatcatggaaaacggatatggagaagaactaggggcctcagattctgttgctgttggtaccgctgatcataacaggaaatattatcttcagaggcatcttttgagtatgcaagaagcttgttgcatcgacaaagtgaatgtta

SEQ ID NO: 162367 - DNA, 410 bp, Arabidopsis thaliana columbia
  unsure (1)..(410): unsure at all n locations
ctcggtaattgntnanacatttatagtctctcattttaacttaaaaaaccaccgagttcgcatggctgctggttataagcaatggggtcagtcatacacacatacatgggaaacaaaggtgccaataaggcttcttattgcttcagagnatgcgggtgtgaagatcgaggagtccgcatactttcagatgggcgtcactaacaagtcacctgtgttccttaagatgaaccctattggaaaggcgcctgagcttgagactcctgaaggtcccatattcgagagcaatgccattgcccttatatgtgagccgtaagaatggttacaactctatgtatggatcctaccttatagtatactctcacattgagcaatggatcgtattctcctcattggagattgatgcttacatg

SEQ ID NO: 162368 - DNA, 319 bp, Arabidopsis thaliana columbia
  unsure (1)..(319): unsure at all n locations
acccacgcgnccgaaaagcatcaagaacacggttgagactcaattttaggttatcactagtaaagctgctgtcgggtggggtccaaaagtgccgggggtaatgcaagaaatatgcgtcgatcctcctttttttatttttttccgngnnaaaatcctttactcctccatttgccacaccgatctcggatgttggaacggcacgaacgaagctgaacgagcatttccaaggattcttggccatgaagctgtcgggattagtagagagtgttggagaaggagtaaaagatgtgaaagaatgagactacgtgattccgacttt

SEQ ID NO: 162369 - DNA, 453 bp, Arabidopsis thaliana columbia
tctctcttcaatcctttcctttcattgtagttaaacaaagattacgattatggccacatcagctatccaacaatcctccttcgccggccaaacggctctcaagccctccagcgacctcatccaaaaggtgggcgtcttgggcggtggccgtgtgaccatgcgtcgtaccgtcaagtctactccccaaagcatctggtatggaccagaccgtcccaagtacttgggaccattctcggagaacacaccgtcttacttaactggagaataccccggagactacggctgggacaccgctggactctcggctgacccggagacattcgctaagaaccgtgagcttgaagtaatccacagcagatgggctatgttgggtgctctcggatgcacattccctgaaattctctccaagaacggtgttaaattcggagaagccgtgtggttcaaggcaggctc

SEQ ID NO: 162370 - DNA, 226 bp, Arabidopsis thaliana columbia
acagtttcggggtagtgatccttgagatagttactaggtaacgcccggttgatccacaacttggggagaaagatttggagaagagggagtactctacattggaccaaaaaggcattgaacatgtgatagacccgtaactcgactcttgcttcaaagaagagataagccaaattcttatccttggactactttgcacgaggtcgttgcccattaacctaccttccat

SEQ ID NO: 162371 - DNA, 426 bp, Arabidopsis thaliana columbia
taaaaaacaagtggaagctttaaaacgagaggtagagtgcaaaaatggcgacgtcgggaacgtacgtgacggaagttccgctaaaaggatcggccgagaaatactacaagaggtggaagaacgagaaccatgtcttccctgatgctatcggccaccacatccaaaatgttaccgttcacgaaggcgaacatgactctcacgggtctatcaggagttggaactacacatgggatggaaaggaggaggtgttcaaggagagaagagagatagacgatgagaccaaaacgttgacgttaagaggacttgagggtcacgtgatggagcagctcaaagtgtacgacgtcgtctaccaattcattcccaaatctgaggatacctgcatcggcaaaatcactttaatatgggagaagcgcaacgattattccc

SEQ ID NO: 162372 - DNA, 413 bp, Arabidopsis thaliana columbia
acgcgaggaagaagatgacggtggcgtttatattttagaagccaggaatggcgagtgtgaaaggtatgcctttgattcaggatggggcaccacctggtggattcgcgccggtccgatatgctcgccggatctccaacacgggacctagcgccatggctattttccttaccgtttccggtgcttttgcttggggcatgtaccaagttggtcagggcaacaaaatccgcatggcgttgaaagaagagaagtacgctgcacgtagagcaattctaccgattcttcaagctgaaaaagatgaaaagtttgtgtctgagtggaagaagtatctagaatacgaggcggttgtgatgaatgatgttcctggatggaaagtcagtgaaaacgtgtacaatttctgttcgttggatgccttc

SEQ ID NO: 162373 - DNA, 436 bp, Arabidopsis thaliana columbia
aactttatctcccaaaacacaatttttaaatttatggctcccactgctctctcagagcgccagcgtctgttcttcattgatccagggttccccagctccaatcagtctccgttcccttccatcagccaacacacaatccctcttcggtctcaaatcaagcaccgctcgtggtggacgtgtcacagccatggctacatacaaggtcaagttcatcacaccagaaggtgagctagaggttgagtgtgacgactacttctacgttcttgatgctgctgatgaagctggaatcgatttgccttactcttgccgagctggttcttgttcgagctgtgctggtaaagttgtgtctggatctgttgatcagtctgtccagagttttcttgatgatgaacagattggtgaagggattgttctcacttgtgctgcttacccttcc

SEQ ID NO: 162374 - DNA, 343 bp, Arabidopsis thaliana columbia
attcaagattcaagccggacctgccgatatgtcaatgatctacgtcgaatacaagggtgaagagaaagagttctcagctgaggagattgcttccatggttcttattaagatgcgtgagattgctgtggcttaccttggtgtcacaatcattatcgccgttgttaccgttccatctttctttaactactctcagttacatgcttctaattgtttctttttctttgctgtttttatcttttttgttttttgtcttttttttcttctttttcttttttttttactttcttttttgtataatttttctttcctttcttttcttctttattattatttttttttattt

SEQ ID NO: 162375 - DNA, 241 bp, Arabidopsis thaliana columbia
  unsure (1)..(241): unsure at all n locations
atacaatacaatgtctactctagttttatttttccaactnnnnnccatcctaccagtancaggtgaatttaaccagggcaaagggaacccaaccaatactcaagaccaaagctctaccctaagaatcttccacatagacagcccttgctcccccttcaaatcatcatccccactctcatgggaagcgcaagtactccaaacgctggctcaagaccaggcccgtctccagttcctgagcaat

SEQ ID NO: 162376 - DNA, 436 bp, Arabidopsis thaliana columbia
atcatactaactaaagagactaacacttgctcgacactgtaacgagaccggccggctgtacaatggctatctcctctactgctatgaccgaaaaggacgatcagctatccgcaggaggctgacaagtatttggaaccgaacacttcaccatgcgcaaagccttgaagcacacccatacatacggcaggcgatggttcggatccgaccgagtcaagtacttgggtccattctacggtgagcctccgagctacctcactggagagttccccggtgattacgggtgggacactgacggtctatacgccgatcccgagaccttcgctaggaaccgtgagctagaacttatccacagcatatgggccatgctcggagccctaggctgcgttttccctgagctattggctaagaacggagtgaatttcggagtaaccgtttt

SEQ ID NO: 162377 - DNA, 341 bp, Arabidopsis thaliana columbia
gatctttggtatggacctgtacagagtgaagttcttagttcccttttccgttcaaactccgggttacctcaccggtgaattggctggcgattatggttgggacaccgccggtttatccgcagaccctgtagcctttgccaaaaacagagctcttgaggtgatccatgggagatgggcaatgttgggagcttttggttgcataacccctgaagttcttcaaaagtgggtccgtgtggacttcaaagaaccagtctggttcaaagccggttcacaaattttcttcgaaggcggtttggacttcttatgctacccaaacctattccattgctctaacattttta

SEQ ID NO: 162378 - DNA, 455 bp, Arabidopsis thaliana columbia
gaagaaacagagaaaccaaagagttaagtggtgaacctcgaagctagttcaaactagtgggaggttgtttcacgtttcaactttcaagtcataaaaccaaatccaactctaaacgtaaacccaaacgtcaaatcatcagatagaaggaaatattctgattgagagatggctcgtggaaagattcagcttaagaggattgagaacccggttcacagacaagtgactttttgcaagaggagaactggtcttctcaagaaggctaaggagctctctgtgctctgtgatgccgagatcggtgttgtgatcttctctcctcaaggcaagctctttgagctcgctactaaaggaacaatggagggaatgattgataagtacatgaagtgtactggtggtggtcgtggttcttcttctgctacttttactgctcaagaacaacttcaaccaccaaatcttga

SEQ ID NO: 162379 - DNA, 300 bp, Arabidopsis thaliana columbia
  unsure (1)..(300): unsure at all n locations
aagatgacaaaagcaaggttcttcataatttttcctttgagagattagnnnctccaatttgaaaagactatacgtgaagaagacgatcgaatatgaacattttcagattagctggtgatatgactcacctagccagtgttcttgtcttgcttctcaagatccacaccatcaaatcctgcgctggtgtttcattgaatactcaagaactctatgccattgtctttgcgacgcgttatttggatattttcacgagttttgtgtctctgttcaacactctctatttatatagttgttttttta

SEQ ID NO: 162380 - DNA, 426 bp, Arabidopsis thaliana columbia
caatcaaacaaaaaaaaatcatcgctcccaattttacattcttcttctcgccaaaccgtaattgtttcgatttctgctacattcttccggaaacttgttctatctctgacggatctcgaatcggtattctcagctgctgaaatctccggggaatgcagagaacgttttgctgcgaggtggagaacggttggaaggaatccctctctcaagggattgttatcgtaggtcctaaagcaagaactagggacaaaccttgggatattctctaatctttcatctttgattaggacagcaaagacttaagaagcagcatgactcggattttggttcaaagaggttcatcaggcagttcttccaactctagccgtccttcttcctcatctagttcttcctcgggatcagaaacacagatttacaattattttc

SEQ ID NO: 162381 - DNA, 404 bp, Arabidopsis thaliana columbia
cttaaacgttttactttgtgctgctctacttttcctcaaaggccgcctcaacaagggctcgctcctcccctgcctggggccgggaaggccctcaagctttcccccgcggcatctgaagtccttggaagcggccgtgtgacaatgaggaagactgttgccaagccaaagggcccatcaggcagcccatggtacggatctgaccgtgtcaagtacttgggtccattctctggcgaatcaccgagctaccttaccggagagttccccggagactacggatgggacaccgtcggactttcagctgaccccgagacattcgcaaggaaccgtgaactagaagttatccacagcaggtgggccatgctcggagccctaagctgcgtcttccctgagcttttggctagaaa

SEQ ID NO: 162382 - DNA, 421 bp, Arabidopsis thaliana columbia
acgcgggcgaaggaaaataatgagctcgtcgccgttatcttcatctttttttcatcctctgtctaccttgtcaactgattgccttggtacggagacagagacctctgtttcaatcggaagcaacaacctttcgttgtcagagccgcataactttctgaaggggtgatagtgccaaaagcacaacccaaatctcaacctgcgtttctgggattcacacaaacagctgtgatatggaactcacgagcttgcatgattggtctcatcggtactttcatcgtcgaactgattctgtacaaggtaatacttgaactgatcggtgtagagattgggaaaggactcgatctttctctataatgtatatcactgtttgtgttctttccaacaaaaacatcttttatgaaatgtaaaaatttccaagttt

SEQ ID NO: 162383 - DNA, 432 bp, Arabidopsis thaliana columbia
aatttctcttcttttccccaaaaaaaaatgtctgaagttgagtaccggtgctttgtcggcggccttgcctgggccaccaatgatgaagatcttcaaaggacgttctcacagttcggcgacgttatcgattctaagatcattaacgaccgcgagagtggaagatcaaggggattcggattcgtcaccttcaaggacgagaaagccatgagggatgcgattgaagagatgaacggtaaagagctcgatggacgtgtcatcaccgtgaacgaggctcagtcgagaggtagcggcggtggcggaggaggccgtggtggaagcggtggtggttaccgcagcggaggcggtggtggatactcaggaggcggtggcggcggatactcaagaggaggcggtggtggttacgagagacgtatcggaggttacggatctggt

SEQ ID NO: 162384 - DNA, 459 bp, Arabidopsis thaliana columbia
gatcagatcaaatacgaggagagatctctatttagatttatcgtttcaaatttgttcacgtggagaagtttaatttagattaaacaacaaaaagatgggttactggaattccaaggttgttccaaaattcaagaagttattcgagaaaaatagtgctaagaaggctgctgctgctgaagctaccaagacctttgatgaatctaaggaaacaatcaacaaggaaattgaggagaaaaagacagaactccaaccaaaggtcgtggaaacctatgaagccacgtctgcagaagtcaaggctttggtgagagaccctaaggtggctggtttgaagaaaaactcagcggctgtgcagaagtacctcgaggagctagtcaaaattgaattccccggatcaaaagcggtgagtgaggcttcgtctagcttcggagctggctatgtcgcatgaccggtcacgttcat

SEQ ID NO: 162385 - DNA, 467 bp, Arabidopsis thaliana columbia
  unsure (1)..(467): unsure at all n locations
cgtacggaacatatcaaattcgaggttagatctctatttagatttttgcgcccaaatctcttcacgtgaggaagtttaatttagattgagcaacaaatagatnggtcactggaattccaaggttgttccataattcaagaagttattcgagaaaaatagtgctaagaaagctgcttctgcttaatctaccaagtcctttgatgaatctaaagaaacattcaacaaggaaattgaggagaaaaagacagaactccaaccaaaggtcgtggaaacctatgaagccacttctgcttaagtcaaggcttttatgagagaccctaatgtggctggtttgaacaaattctcatcggctgttcagaattacctcaatgagcttttcaaaattgaattccccagatcaaaatcggtgagagaggcttcgtctagcttctgagctggctttttctcatgaccggtcacgtttcatt

SEQ ID NO: 162386 - DNA, 454 bp, Arabidopsis thaliana columbia
agattgatctgatttgctttgttgttttctttctgctacaagtagataaaaaatggcatggcgcagtgcagcacgctctttcgtctccgctacagctagagctccgtctctccgatctccgccgccaacgcttccccgcctccgtccttcccaatcctctttgccccgccgccgatttgcctctttcactaatcccaggaatttgggagagctaggatgcacagagtcattcttgcctctgtacaatgttgtggctgcagcgagactcacatctcaccttaatgttaatctgcgagctttctgcgaactctctaacggtacttgaatgcacaaagtggatgcatcagttatcttgaagcagttggagacttgagaaaaggggtgtaccaagaagaactcattggttgttttgtgttccattaggaaccaaaaactatatacattattatcgatc

SEQ ID NO: 162387 - DNA, 447 bp, Arabidopsis thaliana columbia
cgatggtgtccctaaggctttgacatggcatggggttgtgatcgatatgattggagattgtcttatggatatggctaaacagggaattacgaccaaggaaaagatcgaactgttcagtttgcccatatatattccgcatattagtgaattcaaggcagaaatagagcgaaatgaaaactttagtatcgagacaatggagaagataagtcatcctatggattataagccactaaccaacgacttcatcacttccatgtttcgagccattctcaatacgattattgaagaacactttggagatggtgtggtcaatgagctattcgatcgatttgctaagaagctcaacaagtacccaattgatttcaaaaggtgtaaaaagtatgtgaattattttatcgtgcttaaaagaaaataaaaatggagataatgacaaaactagttatgtca

SEQ ID NO: 162388 - DNA, 357 bp, Arabidopsis thaliana columbia
  unsure (1)..(357): unsure at all n locations
cgatggtgtccctaaagctttgtcttgtcttttggangagatcgatatnattgagaataagtttatatttataggggaacagggaattaccaccaatgaaaagatcgaactgttcagtttgcccatatatattccgcatattagtgaattcaaggcagaaattgttcttatttaaaacttttgtatcaagacaatgtttaagattagttatcctatggattataatccactaaccaacaactttatcactttcatgttttaagccattcacaattcgattatttaataacactttgtatatgttgtggtcaataatctattcgatcgatttgctaagaagctcaacatgttcccatt

SEQ ID NO: 162389 - DNA, 450 bp, Arabidopsis thaliana columbia
ctacgggaaaaagtccaagttgggtttcacagtttacccatctccacaggtctccacctctgttgtggagccttacaacagtgtcctctccactcactcactcttggaacacactgatgtctctatcctcctcgacaatgaagctatctatgacatctgcagacgttccctaagcattgagagacccacctacaccaacctcaaccgtctcgtctctcaggttatctcatccttgactgcttctctgaggttcgatggtgccttgaatgttgatgtgactgagttccaaaccaacttggtcccatacccaagaatccacttcatgctttcctcctatgccccagtcatctccgcagagaaggccttccatgagcagctctcggttgctgagatcacaaacagtgcttttgagccagcatccatgatggcaaagtgtgaccctcgtcacgg

SEQ ID NO: 162390 - DNA, 376 bp, Arabidopsis thaliana columbia
acagcatcctgtagaagctaagcctgctacttatcctcagtgttctaaaaagccaattgaaaataacactgaggagaagaaacttcctgatgttaatctctcaaaggtggttaaaggacatactgacatatcggctgcaccaagagtcgcttctactggactaagggatagtagaagtgtagagggatacattccaaaccatgtgggatatgagcctgttgtgcagagaaagggtccaggattcccttcttttactgaaggaggccattctactcagttgcttcagaaatatggatctgatgataataacaagttccacattggttaggttgcatattacgttttaagagagtcgtctcctgggtttgatgttttg

SEQ ID NO: 162391 - DNA, 360 bp, Arabidopsis thaliana columbia
gttttgattaaagtagttgcggcggctctttttcccgttgatgctaagagacggcaagggaaatttagtgccactgattcgcctctcccgactgttccgggatacgacgttgccggagtagcggtaaagtgggaagtgcggagaaggatttgaaagaaggagatgaagtttatgctaacgtgagcgagaaagcatagcaaggtccaaagcaggttgtgtctttagcggagtgcacgggcgtggaagagaagttattagctgtaaaacctaaaaacatccgattttgcgcaagctgcacggctttcgttaggcgatagaaaccggtgttgaagggctagttaggactgaattctcagccgg

SEQ ID NO: 162392 - DNA, 450 bp, Arabidopsis thaliana columbia
aaagcctatttgggggatcatcaaccttctatcatcactatggatccttacaagtatcgtggttcaagcgcgtacaacgcccgattctacaccacaaacggtggtgctccagtctccaacaacatctcttccctcaccatcggagaaagaggtccggttcttcttgaggattatcatttgatcgagaaggttgctaatttcaccagagagaggatccctgagagagtggttcatgctagaggaatcagtgctaagggtttctttgaagtcacccatgacatttcaaacctcacttgtgctgattttctcagagcccctggtgttcataactcggttattgtccgtttctccaccgttgtccacgaacgtgccagtcctgtaaccatgagggttattcgtggttttgctgtcaagtgttacaccagataaggtaactttttttttgttggg

SEQ ID NO: 162393 - DNA, 437 bp, Arabidopsis thaliana columbia
ccatcaccacaacgccggacgacaatgggttttgatctgatcgccggaggtaagagtaagaagaccaaaaggacagctccaaagtctgatgatgtctacctcaagcttactgtcaagctttaccggtttctggtaaggagaactaatagcaagttcaatggtgtgatattgaagaggcttttcatgagcaaagtcaacaaagctcctctttctctatctaggcttgtggagttcatgactggcaaggaagataagattgccgtcttggttggaactataactgatgatttgagggtacacgagattccagccatgaaagtgactgccttgaggttcacagagagagcaagggctcgcattgagaaagctggaagtgaatgcttaaccttttaccagctcgctctcagagcttcattgggccagaacacggttctttt

SEQ ID NO: 162394 - DNA, 457 bp, Arabidopsis thaliana columbia
gcaatttttagggttttatcctccgaaagtctcaacctttttcttatcctcaacaaggagaaatggcggcgactcaacttacagcgtcaccagtgactatgtcagcaaggagcttagcctcgctggatggtctcagagcttcgagtgtcaagttttcatctttgaaaccagggacccttagacagagccagttccgtcgtttggttgtcaaagctgcttctgttgttgcccctaagtatacttcaattaagccattgggagatcgagttttggtgaagatcaaggaggcagaggagaagactttaggtggtatcttacttccatccactgctcaatcaaaacctcaaggaggtgaagtcgttgccgtgggtgaaggaagaactattgggaagaacaaaattgatatcactgtccctactggagcacaaattatctactccaaatacgcatgaactga

SEQ ID NO: 162395 - DNA, 455 bp, Arabidopsis thaliana columbia
attcttcttcaagtgccgggttctcgggtcggatcttctaagtctagctagggataatggctactgtcactactcatgcctgggcctcgattttccgaccttgtacttcaaagccaagattcctcaccggttcttccggtaggttgaaccgcgacttgtcgtttacatcgatcggttcatcggccaaaacgtcgtcgttcaaggttgaagctaagaaaggagaatggttgcccggtttggcatcgcctgattatctcaccggcagtcttgccggtgacaatgggtttgacccgttgggtctagcagaggatccagagaacttgaaatggttcgtccaggcagagctggtcaacggacgatgggctatgctcggtgtcgctgggatgcttttgccggaagttttcaccaagatcggaatcatatatgttcctgagtggtacgatgcttggaaagag

SEQ ID NO: 162396 - DNA, 282 bp, Arabidopsis thaliana columbia
  unsure (1)..(282): unsure at all n locations
cacgcntccggggtcatctcataccactcgtcgtgttagctatacgactcgtccatcttcacgggctcacggttacctttgtaatggccggcgaacgtccaccatcaaaagctcagagaaccgtcctcgactctctcccttcttcaatctccttcgtctttctccctcctgttgatctcaccgatctctcttcgtccactcgcatcgaatctcggatctccctcaccgtgactcgttcaaacccggagctccggaaagtcttcgactcgttcgtggagggag

SEQ ID NO: 162397 - DNA, 361 bp, Arabidopsis thaliana columbia
atttgtgaaaagctccttgtctgagttaattctagggctagaatttgatgggaaagaatcggctttctacttatcatttcacctgaagttagtgtcaggtagagatccggacggtcaagaaatgctgactcacagggacactgacttctgtatcccggttggttttactgctggtcatccattgccgctaggcctttcttccgggccagatgatgattcttggaatttttcgttcttttcaagaagctcaacgaacgtggttttatgctagtatgatgatagcacaacagataaacctgctttagaacttgatcttgatccttattgtaaccgaacaggtgattgttggcatgcttcaatt

SEQ ID NO: 162398 - DNA, 450 bp, Arabidopsis thaliana columbia
  unsure (1)..(450): unsure at all n locations
agcaactncagctctagaatttntttcgtttcagacttacggatcgaaacttctcaaccagatcaagcgcatctaacctaaggcgcgggcgcatatacaactccacctactctacctgtcaccaatcagcaagctgttcaatctcagcctccaatcaacacacctgcttttcttactttcttctcacgtctctccacctcgatccgtgatggcttgtcacagcgtcttccatggactgagctcatcgatcgtagtttcatttctagacctgaatctctcacctattccttgtcccggataatgaattaatctcacttacttcatagttaactacctcgtcatcttctctctcgtactctcttttacttatttttcttattcattcttcttatcttttcttattatttcttctatgcattaatgtattttttttttccttaacttttcttt

SEQ ID NO: 162399 - DNA, 348 bp, Arabidopsis thaliana columbia
  unsure (1)..(348): unsure at all n locations
aacgcatcatacgacctctctctncctctactacacacttccgtttccatttccctctccgccacactcacgcaccgtatctattaatggttggtctccaccagcttacttcaccacccgtccccgccgagtcttcctcctcgacttctcgtgttacaaaccagacccttcactgatctgctctcgtgaaacattcatggacagatctcaacgtgtaggcatcttcacagaagacaacttagctttccaacaaaagatcctcgaaagatccggtctaggtcagaaaacttacttccctgaagctcttcttcgtgttccttctaatccttgtatggaagaagcgagaaa

SEQ ID NO: 162400 - DNA, 445 bp, Arabidopsis thaliana columbia
ctaacactacactccaagcaacttgcttctcttctactcaatactatgtttctatcggcatgtatggcttcttcttcacttcacgttgctatcttctctttaatcttcttattctcactcgccgctgcaaatgaagtcaccgtcggtggaaaatccggcgactggaagatccctccttcctcttcttactcattcactgagtgggctcaaaaagctcgcttcaaagtcggcgactttattgttttccggtatgaatctggtaaagactctgttttggaagtaacaaaagaagcttacaacagctgcaacaccacgaaccctttggctaactacactgatggagaaaccaaggtgaaattggacaggtctggtcctttctacttcattagtggagctaatggtcactgtgagaaaggtcagaagctgagccctgttgtgatcagtc

SEQ ID NO: 162401 - DNA, 456 bp, Arabidopsis thaliana columbia
gcgtttaaaacgagagggagagagcaaaaatggctacgtcgggaacgtacgtgacggaagttccgctaagaggatcggccgagaaagactacaagaggtggaagaacgagaaccatgtcttccctgatgctatcggccaccacatccaaaatgttaccgttcacgaaggcgaacatgactctcacgggtctatcaggagttggaactacacatgggatggaaaggaggaggtgttcaaggagagaagagagatagacgatgagaccaaaacgttgacgttaagaggacttgagggtcacgtgatggagcagctcaaagtgtacgacgtcgtctaccaattcattcccaaatctgaggatacctgcatcggcaaaatcactttaatatgggagaagcgcaacgatgattccccagtaccaagcgggtacatgaaattcgttaagagcttggttgctg

SEQ ID NO: 162402 - DNA, 439 bp, Arabidopsis thaliana columbia
gttgttggcatcgccgtttagttcattactctccgtcgttttcatttccgtcatctccgtcgtcagatgctgctctcctaaagatcagacggctctcaatgctttcaagtcgtcactgagcgaaccaaacctcggtatcttcaacacttggtctgaaaacactgattgttgcaaggaatggtacggtatcagctgcgatcctgattcgggtcgggtcactgatatttctctccggggagaatctgaagacgccattttccaaaaggcaggccggtccggttatatgtccggttcgattgatccagcatgttgtgacttaaccgcactcacttccctcgttctcgccgactggaaaggaatcaccggagagattcctccgtgcattacttccctagcttcgctccgtatcctcgatctcgccggcaacaagatcaccggg

SEQ ID NO: 162403 - DNA, 410 bp, Arabidopsis thaliana columbia
  unsure (1)..(410): unsure at all n locations
gggccgacccacgcgnacgaaaggtggnaagancggatttgcacatagtctcgtttgtttcgaagcacatgaccttgctagttcacattgaaatgtcgtgcagagaccgcgcacttgactttatttagggatggcatctatacacaactacatttggagattatccacagatcatgaaagacattgttggacatagattgcctaaatttacaactgagcagaaagcaaaactgaaagcttctaccgatttcgttgggctcaactactatacttcagtgttttcaaaccatttggagaaacctgatccttcaaaaccaagatggatgcaagattctcttattacatgggagtctaagaatgcgcaaaattacgccattggtagcaagcctttgtaccgctgatagaacgtt

SEQ ID NO: 162404 - DNA, 451 bp, Arabidopsis thaliana columbia
  unsure (1)..(451): unsure at all n locations
atctatttataaatttacattcacaaccaatanataatttaggcgccgccccaatcccgagagtccagtgtaaatttaagagaggtccagcactttatccctccnggtctctgaatctcaaatcgtctccaaccaatcctccattttctcaatcataattttctgcaaacatttacttatctttccatccatcctgaaatttcctgatgacatatatccgctcctgtaaatgaaacgagcatatgataaagcctataaacatatccttcctgagccacacttgtttttttacttttctattctccacataatttttcgaatcttttctctcattatttaacatctcaacacctatcttctttactcctttttattttttactctatttcctatctcttattcttttataataattcttgcttaccacttatattaatttcccatccttata

SEQ ID NO: 162405 - DNA, 371 bp, Arabidopsis thaliana columbia
  unsure (1)..(371): unsure at all n locations
acctccagagctcttgccactttagacggtccattcactccccccaagncatccccttctttcccattcacccgcatagccaacaactacattactttcatcacaagcaatgtttttaagagttagcttcatgaatgtattaccaccaatcttaaagaataaatctgatactctatcttacctcccttaccttactttcttctaattttctaaagaagttgactaccttttccccaacaaatggattccttgtatttaattcatatttgatcaccttttttttttccttgagcacttaaactcctcccttatactacaatttaacttactttaccatatataaatcctatcattgttctaatgcaccctcc

SEQ ID NO: 162406 - DNA, 412 bp, Arabidopsis thaliana columbia
atttctttagctcaaccttcattactaatctccttttaaggtttctttcgtgaatcagatcgtaaaaatggaatcttggttgggcacatctgaatccgtcaacgagggacatcccgacaagctttgtgatcagatctccgacgctatcctcgatgcttgccttgaacatgaccctgagagcaaagttgcttgtgagacttgtaccaagactaacatggtcatggtttttggagaaatcaccaccaaggctaacgttgattacgagcagattgttcgtaaaacatgccgtgagattggattcgtctctgctgacgttggtctagatgctgacaatttgcaaggttctggtttacatttgacaacagagtcctgacatttcacatagtgtttatggtcatctcaccaataatcc

SEQ ID NO: 162407 - DNA, 433 bp, Arabidopsis thaliana columbia
  unsure (1)..(433): unsure at all n locations
gtgatggtgatgttcctcattctggaattggtcgtgccaggcggatgcaagttccaaatgtgaatttacagcacgatgttatgattgaggcggttgagaatcatatgcctgagacaatcatcattgacgagataggaactgagcttgaagctttagctgctagcactattgctcaacgaggtgttcagcttgttgcaactgctcatgggatgactatagacaacataatcaaaaatccttctttgcagattcttattggtggaattgagagtgtgactcttggtgatgaagaagcaaggaaaagaaaagtgcagaagacaattcttgaaagaaaaggacctccgacattcacttgtgctgtagagatgatatcgagaactgagtgtcggggtcatcaaagactagatgttaccgntgatgctatactagctgg

SEQ ID NO: 162408 - DNA, 448 bp, Arabidopsis thaliana columbia
gaaagcccaatctaacaaggttggtagcggtgcatcatcaaatgcttcagctcctgaaaagactgaaggaaaggatgaaaactcatcgaaagacccttcttcttcgactgatttagctacagaagagtctatctctgagttccttacccaagtaacaactctcgtcaagcttgtggattcgagagacattgtggagttgcagttgaaacaactcgactgtgaacttgtcattcgaaaaaaggaagctttgccacaacccgagtcccctgcgcaatatgttatgatgcagcaaccaaaccaatcatcttatgtgcaatcagtggctcctccttctgcacctgctgcatcaccagcaccttctactcctgcctcttcacctacaccatctccacctactccagctaaatcatcgctttctactgttaaaagccccatggctggcacattc

SEQ ID NO: 162409 - DNA, 430 bp, Arabidopsis thaliana columbia
aaaaaaaataaaacagagcaaaatggccgttgttttacgtggaggcatcaccggaggatttcttcaccatcgtcgtgacgcttcatccgtcatcacaagaagaatctcatccgtcaaagccgcaggaggaggcatcaacccaacggtggctgttgaacgtgccacgtggctacctggactaaaccctcctccttatcttgatggaaatttagctggagattacgggtttgacccactcgggttaggagaggatccggaaagcttgaagtggtatgttcaagcagagcttgttcactctcgtttcgctatgctcggtgttgcaagaatactcttcactgatctccttcggaccacaaggattcgtaatttaccggtttggtatgaagctggagctgtgaaatttgattttgctagtacaaaaactcttata

SEQ ID NO: 162410 - DNA, 419 bp, Arabidopsis thaliana columbia
  unsure (1)..(419): unsure at all n locations
gggccgacccacgcgnccggggacatgnggaatcagncgcaaagctaaatgtattggacattgatacagcaggacatcactgacggtgtgtagttggagttgcacggcaacacaaacatttaccgaaaaccaaccccatcatgactcatcttttgttttgtcttcacaaatctctctttaaaagtcattacagtagagggaagagaactcttgtgtattgccataactcttccaaaactcttttttctttttgttattgttagtcattgttcttaaaactcctactcgatatgagctttgcaaatttgcctttgaagaaacaaggccctttgcctttgaagagacaaggcactttgctttttaatggcctaatgtgattattcttaaaaaaaaaaaaaaaaaaaaaaaaaaaaataaaa

SEQ ID NO: 162411 - DNA, 494 bp, Arabidopsis thaliana columbia
  unsure (1)..(494): unsure at all n locations
cgccctggagggatccaacagttccagcagcaacctcccatgatgcagcaccagatgcatccaaggggtcggaacatccggtactcccaagggcgtggtgttagtggtggcgatgtgcctccatatgacatgggcaacaacaacatgccattgcccattggaactttggcttcaaatctggctaatgcttctccagagcaacagaggacgatgctgggtgagaatctgtacccgttggtggagaagctcgaggcagagtctgcagccaaagtgactgggatgcttttggagatggaccagaccgaagttctccatctcttggagtctccagaagctctcgaggctaaagttgcagaagcaatggatgttctgaggagcgttgcagctggcggtgcanccgagcagctcgcttccttgaacctctcttaacttctcgtgtttccaagttgatctttgctttttattatgttctctctccccccatacaatcacag

SEQ ID NO: 162412 - DNA, 469 bp, Arabidopsis thaliana columbia
aagaaacacacacacaaatagcaaatggctaacatgatctttctcgtgtgcgcaacttttgccttgtgcgtcctcctcaccaacgcctccatctaccgcaccgtggtcgaattcgacgaagatgacactaccgaccaagtaggcccattccgccaaccacagaaatgccagagggagtttcagcaagagcaacacctaagagcttgccagcaatggatccgccagcaacttgcgggatcacccttcagcgaaaaccagtggggtcctcagcaggggccgtcgctacgcgagcaatgctgcaacgagctttaccaggaagaccaagtgtgcgtttgccctactttgaaacaagcagccaagtcagttagggtccagggacagcacggaccattccagtccacccgcatctaccagatcgctaagaacttgccaaacgtgtgcaacatgaaacaaattggaacatgtccct

SEQ ID NO: 162413 - DNA, 454 bp, Arabidopsis thaliana columbia
gaaaaaccgggccgaccgacgcgtaacgaaaaaacacagctctatatgtcccatgttctttcaaaactcactatctctctactgagtaggcttcattactacggttggtggcgcctcacactaatgaataagctccactgctctgttatattcgaaaggctccgaatctaaggtgctgcacgaaaatggctttttatagatcccaatctgagctctgacctctctcgacgtgaccctctctaggcaacttcgatgaacggatcaaagacgcatgtcgtttcctcgtctcagctgatcttggaacagatctctgggagatcttgaactttttgctcgctcgtaggggaacattgtttagtgcactcacaggagccataataggccaagaaacacagagcgggtataatccgggagcggctaaaggtgccatttcacggactgaattttcatcgga

SEQ ID NO: 162414 - DNA, 407 bp, Arabidopsis thaliana columbia
  unsure (1)..(407): unsure at all n locations
gaccagctcaatgcactggagccgtcacacgtacttaaggctgaggctggtcgcatcgaggtgtgggaccaccacgctcctcagctacgttgctctggtgtctccttcgtacgttacatcatcgagtctaagggtctctacttgccctctttctttagcaccgcgaagctctccttcgtggctaaaggacaaggtcttatggggagagtagtccctggatgcgccgagacattccaggactcatcagtgttccaaccaggcggtggtagccccttcggagaaagccagggccagggacaacaaggtcagggccaaagccagcagggtcaaagccagggacaacagggccagggccaacagggtcaaagccagggcttncgtgatatgcaccaaaaagtggagcacat

SEQ ID NO: 162415 - DNA, 564 bp, Arabidopsis thaliana columbia
  unsure (1)..(564): unsure at all n locations
nnccggaaaggacccaatactaaccaaggtgtggtatgctggttgctattcatacaaatggcccttcagctttccttgaaaaggacgtgtaagtgaaagggatgagaaacgtgcactcgaaacgaaacccttcnnttcttcgacctgggatttagctaccagaagacgtctttatctcnnngagttccttaccccacagtaaaccaaccctctcnngtcaagccttggtgngnnattcgaagaagacaattcgtgnnngagttgcangttgggaaacaaacctnctgactgttgaacctttgtcatnnntcgaaaaaaagggaagcnntttgcccacanacntnccgagtcccccctggcgcannatattgttatggatgccagcaaccccaaacccaatnncatcttatggtgccaatcaagggggctccttcccttcttgcacctgcttgcatcaccaagcacctttctacttcctgcctcttcacctacanccatctccacctgactccgagctaaatcatcgcttcctactgttaaaaagccccatggctggcacattct

SEQ ID NO: 162416 - DNA, 448 bp, Arabidopsis thaliana columbia
  unsure (1)..(448): unsure at all n locations
caacaacaaatcttaaacgttttactttgtgctgcactactcaacctcaatggccgcctcaacaatggctctctcctcccctgcctgcgccggtaaggccgtcaagctttcccccgcggcatctgaagtccttggaagcggccgtgtgacaatgaggaagactgttgccaagccaaagggcccatcaggcagcccatggtacggatctgaccgtgtcaagtacttgggtccattctctggcgaatcaccgagctaccttaccggagagttccccggagactacggatgggacaccgccggactttcagctgaccccgagacattcgcaaggaaccgtgaactagaagttatccacagcangtgggccatgctcggagccctaggctgcgtcttccctgagcttttggctagaaacggagtcaagttcggagaggcgggttggttcaag

SEQ ID NO: 162417 - DNA, 440 bp, Arabidopsis thaliana columbia
gtgcgtacattctaggatcatctagtcgcgagggcgttatcttctagcaacagatccagcgcccgagaataggtgagagtgatggctaccggagaggagaaaccagtgatggtagtgggtgtggacgaaagtgagcaaagcacctacgcactggagtggactctcgatcgtttcttcgctccctacgctcccaatttccctttcaagctcatcatcgtccacgccaaacctaacgccgtctccgccgttggtctcgctggccccggaactgcggaggttgtgccttatgttgatgctgatttgaagcataccgctgttaaggttatcgagaaagccaaagctctctgtctgagcaagtcggttcatggcgcaatgatggaagtttttgaaggcgatgcaaggaatatcctgtgcgaggttgttgataaacaccatgcttc

SEQ ID NO: 162418 - DNA, 430 bp, Arabidopsis thaliana columbia
cccacgcgtccgctcagtaatagtagcagcggtcttgcgaaaatggtgaagggacgccaaggagaacgtgtcagactctacgtcaggggaaccatcttgggatacaaaaggtcgaagtcaaaccagtacccaaacactagccttatccagatcgaaggagtcaacactacagaggaagtgacatggtacaagggaaaaaggatggcttacatctacaaggctaagaccaagaagaacggtagccactaccgctgcatctggggaaaggttacaaggcctcatggtaacagcggtgttgtccgtgccaaattcacttccaacttgcctcctaagtccatgggaatgagggtcagagtcttcatgtatccgagcaacatttgaagcgaaagtagaacagcataaactttgatttagctgttgttttttgcac

SEQ ID NO: 162419 - DNA, 472 bp, Arabidopsis thaliana columbia
cggacgcgtgggcggacgcgtgggcggacgcgtgggttcattcccaataatctcttggctatctcgaacataatgacatgatgtctgacgaagagcaccacttcgagtccagcgacgccggagcttccaagacctaccctcagcaggctggtaacatccgtaaaggtggtcacatcgtcatcaagggccgtccttgcaaggttgttgaggtttcgacttcgaagactggcaagcacggtcacgccaagtgtcactttgttgctattgatatcttcactgctaagaagcttgaggatattgttccctcttcccacaattgtgatgttccacatgtgaaccgtgttgattaccagctgattgatatctctgaggatggctttgttagccttttgaccgacagtggtggcactaaggatgacctcaagcttcccaccgatgacaatctcagcgctctgatgaaaagtggatttga

SEQ ID NO: 162420 - DNA, 506 bp, Arabidopsis thaliana columbia
gatttctgtcacatgtaagaaagaagcactaattacaaaaaaaaagaaaaagaatcaatcttttgttcttcgattcgatttctaatcaattagattgtttttgttttgtttaacatcagttgcgaatcgagctggattcttgggctcgctttttctttcaatcaaaagtttcgatattagtgaaggataaaattcgctaaaaaaagagaattttttttgttaaaaaaattataaaagctggctttctcaaaatttctccatgtggtcgacgaagaagacgaagaagacgaagaagaaagagaaagtctcttagcaaacatgaccgccaccgaagctaagaatcgcaaaatcaatgtcggagatggagatgacgttgttgatatcgaaatccctgacactgctcatcaaattagcagcgattcatggtttcaggtggcgttcgttttgaccaccggtataaacagcgcgtatgtgttgggatattcaggaacaattatggttccttt

SEQ ID NO: 162421 - DNA, 518 bp, Arabidopsis thaliana columbia
aacgcagtctcccactgattcagcagctctttgatttactcttcgacaatggccgaacgtggtggtgtacgtggtgttgagcgtggtggaaaacgtggtgattttggacgaggattcggaggccgcggaggtcgaggtagatctcagaccacgtgtactagttggccctattttcttatgtattagtttaatccatgtttaaagtattgtttttgttacattaacttgtattttcacatatgtcttgttgtttttatttttggatcattaaactttctttcttttttgttatttagtttttttttgcttttttttggtcttgtttttaaactttttttttttttatattctttataattttattttatctttctcaagtttttcattatttagctattctattttctgtattttatatttttatttttcattttcatttttttctctatttttttgatttattcttctttctaatttgtttctttatagtttacacttttttttttaatattttattt

SEQ ID NO: 162422 - DNA, 440 bp, Arabidopsis thaliana columbia
cccacgcgtccggtcaaggccagggtttccgtgacatgcaccagaaagtagagcacctacggtgcggtgacaccatagcgacggcacctggtgtagctcaatggttctacaacaatggaaatgagcctatcattcttgttgcagccgctgacatcgcaaataacctgaaccagcttgaccgcaacctcagaccgtttttgttagccggaaacaacccacatggacagcaatggctacaaggccgactgcaacaaaaacaaaacaacatcttcaatggcttcgcacctcagatcttggctcaagcctttaaaatcagcgtcgagacagctcaaaagctgcaaaaccagcaagtcaaccgtggcaacatcgtcaaggtccaaggtcaattcggcgtcattagaccacccttgagacaaggccaaggcggtcagcaaccacag

SEQ ID NO: 162423 - DNA, 475 bp, Arabidopsis thaliana columbia
cactatcatgtgaaaaaaacagatgggtccttcctctcttctatcttactttttcacattggtgaccctctttcatggcttgactgctcaccagtggcccaacgagtgccagctggaccaactgaatgcactcgagccgagtcagatcatcaagagtgagggtggtcgcattgaggtctgggaccaccatgcacctcagctccgttgctgtggcttcgactttgagcgtttggtcattgagcctcagggtctttacttgcccactttcttgaacgccggcaaactcacgttcgtcgctcacggacatgctctaatgggaaaagtgactgctggatgcgccgagacattcatggactctcctgtatttggacaaggacagggccaggaacaaggtcagggacagggtcagggtcaaggccagggtttccgtgacatgcaccaaaaagtagagcacctacggtgcggtgacaccata

SEQ ID NO: 162424 - DNA, 473 bp, Arabidopsis thaliana columbia
caagaaacacacacacaaatagcaaatggcttacatgatctttctcgtgtgcgcaacttttgccttctgcgtactgctgaccggcgccttcatctaccggaccgtggtcgaattcgacgaagatgacactaccgaccaagtaggcccattccgccaaccacagaaatgccagagggagtttcagcaagagcaacacctaagagcttgccagcaatggatccgccagcaacttgcgggatcacccttcagcgaaaaccagtggggtcctcagcaggggccgtcgctacgcgagcaatgctgcaacgagctttaccaggaagaccaagtgtgcgtttgccctactttgaaacaagcagccaagtcagttagggtccaaggacagcacggaccattccagtccacccgcatgtaccagatcgctaagaacttgccaaacgtttgcaacatgaaacaaattggaacatgttccttca

SEQ ID NO: 162425 - DNA, 502 bp, Arabidopsis thaliana columbia
aaaattcatttatctatttcttccatcttctttcaaaactctctctctctctactgagtaggctccattactctcggtgggttggttcctctatctattgaataagctccactgctctgttatattcgaaaggcttagtctctaaggctctgcaagaaaatggcttcttatagatcccaatctgagctctgccctctctcgccgtgtccctctctcggaaacttcgttgaacggatcaaagacgcatgtcgtttcctcgtctcagctgttcttggcacagttctctcggcgatcttgaccttcttcttcgctctagtgggaacattgcttggagcagtcacaggagctttaatatgccaagaaaccgagagcggcttcatccgcggagcggctgttggtgccatctcacgagctgttttctccatcgaagcctttgaatcttctctcctactctggaaatctaatgagtcacgtttccgttgcctactctactagattgatg

SEQ ID NO: 162426 - DNA, 397 bp, Arabidopsis thaliana columbia
gagaaacacaataagcttatggtgacttactcttaactgcaacatgactttcaagcgcaggaactgttgcatgaacaagcacaaccggggtcatgtgaagcccatcaggtgttccaactgcgggaaatgctgctccaaggataaggctatcaagaggttcatcgtcaggtacatcgttgagctggctgccatcagagatgttcaagaagccagtgtctacgatggttacactctttccaagttgtacgccaagacgcacgactgtgtctgatgtgctatccactctcacgttgcgagagtccgattccgcaccaaccgtagggtttgtacctctcccccacgtgtcgtcagacgcaaggaggatgctttcatgcactgacaacctgttcagggtgat

SEQ ID NO: 162427 - DNA, 424 bp, Arabidopsis thaliana columbia
gaccgatccaagagagagagagagagtgtgatgaagagagatatggcacatgaaagtcagggggagctaataatggatcaggtggactagcatttctctatatccaagaataacacgccattcctatacaatcttatgatctacaaccctctcgaatggccctctctcaccgtccattggttcctatcagcgccaactccttacgctgcagacccatacttcaacgttcacaagctcatactcggaacccacacttgctggggtgcccaatacttcctcatgatctacgacgccgctataccaactgccgacgcctaacctggcttacgcggcacacatcaagatcccatagtccctaacgtggaaattaggcataatatacgtgttgatggagaagtgaacaaatctcggtgtatgccggaaa

SEQ ID NO: 162428 - DNA, 429 bp, Arabidopsis thaliana columbia
gtggaacgcaaacgcaaacgcggttctctatttgacagacggggaagcccatgtgcaggtggttaacgacaacggtgacagagtgttcgacggacaagtctctcaaggacagctactttccataccacaaggtttctccgtggtgaaacgcgcaacaagcgaacagttccggtggatcgagttcaagacaaacgcaaacgcacagatcaacacacttgctggacgaacctcggtcttgagaggtttaccattagaggtcatatccaatgggtaccaaatctcactcgaagaagcaagaagggttaagttcaacacgatcgagaccactttgacgcacagcagtggcccagctagctacggaaggccaatgaaggctgatgcttaagagcttacccagtgaacctctactgtaaaaagaagttaaatagt

SEQ ID NO: 162429 - DNA, 412 bp, Arabidopsis thaliana columbia
cagtcccaccaaaacaacttcgaatggatttctttcaagacaaacgctaacgcgatggtcagcactttggccggtggaggctgggccttgagggcattgccactagaggtcataaccaacgctttccaaatttctctcgaggaagctagaaggatcaagttcaacacgcttgagaccactttgactcgtgcgcgcggtggacaaccccagttgatcgaggagatagtcgaggcttaagttaaaacgtttacttttactaataaagtagtgacatggttactattgtaatggtcagtttgtaatcatgtccactctaagtttttaacgtatgtgtaaaatatgtgtctaaagaacacgccggcacgtctcttgtatgtaacccttctcataaataaaagtggagtttcgagtt

SEQ ID NO: 162430 - DNA, 471 bp, Arabidopsis thaliana columbia
aaaacacaagaaacacacacacaaatagcatatggctaacaagatctttctcgtgtgcgcaacttttgccttctgcgtgctcctcaccaacgcctccatctaccgcaccgtggtcgaattcgacgaagatgacactaccgaccaagtaggcccattccgccaaccacagaaatgccagagggagtttcagcaagagcaacacctaagagcttgccagcaatggatccgccagcaacttgcgggatcacccttcagcgaaaaccagtggggtcctcagcaggggccgtcgctacgcgagcaatgctgcaacgagctttaccaggaagaccaagtgtgcgtttgccctactttgaaacaagcagccaagtcagttagggtccaaggacagcacggaccattccagtccacccgcatctaccagatcgctaagaacttgccaaacgtttgcaaacatgaaacaaatggaacatg

SEQ ID NO: 162431 - DNA, 486 bp, Arabidopsis thaliana columbia
gatttctgtcacaagtaagaaagaagcactattttcaaaaaaaaagaaaaagaatcaatctggtgttcttcgattcgatttctaatgcaatagattgtttttgttttgtttaacatcagttgcgaatcgagctggattcttgggctcgctttttctttcaatcaaaagtttcgatattagtgaaggataaaattcgctaaaaaaagagaattttttttgttaaaaaaattataaaagctggctttctcaaaatttctccatgtggtcgacgaagaagacgaagaagacgaagaagaaagagaaagtctcttagcaaacatgaccgccaccgaagctaagaatcgcaaaatcaatgtcggcgatggagatgacgttgttgatatcgaaatccctgacactgctcatcaaattagcagcgattcatgggttcaggtggcgttcgttttgaccaccggtataaacagcgcgtatgtgttgggatattca

SEQ ID NO: 162432 - DNA, 309 bp, Arabidopsis thaliana columbia
cgggccgaccgacgcgtccgatcgcagtctcccactgattcagcagctcttttatttactcttcgacaatggccgaacgtggtggagaacttggtgttgagcgtggtggaaaacgtggtgatttcggacgaggattcggaggccgtggaggtcgtggagatcgtggatgtcgtggacgaataagctcttttttttttcttttatggattattattttttgttcattaatgtttttctttgtccaaacttttttacaattcttgttggtctttttttatctactttttatgtgttatttctattttttat

SEQ ID NO: 162433 - DNA, 450 bp, Arabidopsis thaliana columbia
cggaaaccgggcgacccacgcgtcgccacgcgtcggcaagccagggtttctgcatgcaccaaagtaagacctcgggcgggacacatgcgcggcactgtgtactaatggtctacacatggaatgagccttcattcttgttgcaccgtgacatgaaataacctgaaccagttgaccgacctcagaccgttttgttagccggaaacaacccacaggacagaatggctacaaggccgacagcaacaaaaacaaaaaacatcttaatggcttcgacctcaatcttggctaagccttaaaatagcgtcgagacgctaaaagctccaaaacagaagtcaaccgtggaacatcgtaaggtccaggtcaattcgcgtcattagacacccttggacagggccaagcggtcagaaccacagaagaagtaatggtttggggagacttgtgcacatgcgatgc

SEQ ID NO: 162434 - DNA, 414 bp, Arabidopsis thaliana columbia
cacaattaaagtaaaaaaaaaagatgggtccaacctctcttctctcttactttttcacattcgtgaccctcttccatggcttgactgctcaacagtggcccaacgagtgccagctcgaccaactcaatgcactcgagccgagtcagatcatcaagagtgagggtggtcgcattgaggtctgggaccaccatgcacctcagctccgttgctctggcttcgcctttgagcgtttcgtcattgagcctcaaggtctttacttgcccactttcttgaacgccggcaaactcacgttcgtcgttcacggacatgctctaatgggaaaagtgactcctggatgcgccgagacattcatggactctcctgtatttggacaaggacagggccaggaacaaggtcagggacagggtcagggtc

SEQ ID NO: 162435 - DNA, 462 bp, Arabidopsis thaliana columbia
cagaacacacacacaaatagcaaatggctaacattatctttctcgtgtgcgcaactttggccggctgcgtactactgaccggcggctccatataccgcaccgtggtcgaattcgacgaagatgacactaccgaccaagtaggcccattccgccaaccacagaaatgccagagggagtttcagcaagagcaacacctaagagcttgccagcaatggatccgccagcaacttgcgggatcacccttcagcgaaaaccagtggggtcctcagcaggggccgtcgctacgcgagcaatgctgcaacgagctttaccaggaagaccaagtgtgcgtttgccctactttgaaacaagcagccaagtcagttagggtccaaggacagcacggaccattccagtccacccgcatctaccagatcgctaagaacttgccaaacgtttgcaacatgaaacaaattggaacat

SEQ ID NO: 162436 - DNA, 474 bp, Arabidopsis thaliana columbia
acgacaacggtgacagagtgttcgatggacatttctctcaagggcagctactttccattccacaaggattctccgttgtgaaacgcgcaacaagcgatcagttcaggtggatagaattcaagacaaacgcaaacgcccagatcaacactcttgctggacgtacctcagtcatgagaggtttaccattagaggtcatagccaatgggtaccaaatctcacttgaagaagcaagaagggttaagttcaacacaatagagaccactttgacccacagtagtggcccagcgagctacggaaggccaaggaaggctgatgcttgagtgcttaaatggctgcgtttaacagtgagcctctactgtaaaaggaagctacataggagtaatgataataatagtaatgtacgaaaatgcgactggttttgttgaggtttacctgtaaaatgtgaccccttttctgaataaaatcactctcgtc

SEQ ID NO: 162437 - DNA, 455 bp, Arabidopsis thaliana columbia
  unsure (1)..(455): unsure at all n locations
cagtcccaccaaaacaacttcgaatggatttttttcaagacaaacgctaacgcgatgggcagcactttggccgggagaacctgggccttgagggcattgccactagaggtcataaccaacgctttccaaatttctctcgaggaagctagaaggatcaagttcaacacgcttgagaccactttgactcgtgcgcgcggtggacaaccccagttgatcgaggagatagtcgaggcttaagttaaaacgtttacttttactaataaagtagtgacatggttactattgtaatggtcagtttgtaatcatgtccactctaagtttttaacgtatgtgtaaaatatgtgtctaaagaacacgccggcacgtctcttgtatgtaacccttctcataaataaaaagggagtgtcgagttttnnaaaaaaaaannntaatnaaataaanattttatattattt

SEQ ID NO: 162438 - DNA, 447 bp, Arabidopsis thaliana columbia
ctcggtgaatgcgtcattgaaacgccatcattcttcttgctaatctgaatctcctcccccggcggaaaaaatggccactgggggagaagtctacttcaaagtcactctgacttcggatcctaagcttccttacaaagatttcagcgtaccacaaggagctccgttcacggcggatctgaaattcgcagcataagagttcaaggttcctgcacaaaccagcgccatcatcactaatgatgggatcgggatcaatcctcaacagactgcaggaaacgtctttctgaagcacggatctgaactaagattgatcccgcgtgatagaagctgagctgtgtttagagatggatccatatacgatgtgtcagcaatgattaaaaactcagatccaaaaaaaacatactgatatactgaaatgcttatgtacaacttcattgaatgaatatgtaa

SEQ ID NO: 162439 - DNA, 501 bp, Arabidopsis thaliana columbia
aaaaagatgggtccaacctctcttctctcttactttttcacattcttgaccctcttccatggcttcactgctcagcaggggcccaacgagtgccagctcgaccaactcaatgcactcgagccgagtcagatcatcaagagtgagggtggtcgcattgaggtctgggaccaccatgcacctcagctccgttgctctggcttcgcctttgagcgtttcgtcattgagcctcaaggtctttacttgcccactttcttgaacgccggcaaactcacgttcgtcgttcacggacatgctctaatgggaaaagtgactcctggatgcgccgagacattcatggactctcctgtatttggacaaggacagggccaggaacaaggtcagggacagggtcagggtcaaggccagggtttccgtgacatgcaccagaaagtagagcacctacggtgcggtgacaccatagcgacaccacctggtgtagctcaatggttctacaacaatggg

SEQ ID NO: 162440 - DNA, 482 bp, Arabidopsis thaliana columbia
gaaaacacacacaaatagcaaatggccaacattatcttcctcgtgtgcgcaactcttgccttctgcgtcctcctcaccaacgcttccatctaccgcaccgtcgtcgaattcgacgaagatgacactaccgaccaaataggcccattccgcccaccacagaaatgccagagggagtttcagcaagagcaacacctaagagcttgccagcaatggatccgccagcaacttgcgggatcacccttcagcgaaaaccaatggggtcctcagcaggggccgtctctacgcgagcaatgctgcaacgagctttaccaggaagaccaagtgtgcgtttgccctactttgaaacaagcagccaagtcagttagggtccaaggacagcacggaccattccagtccacccgcatctaccagatcgctaagaacttgcctaacgtttgcaacatgaaacaaattggaacatgtcccttcattgccatcccttt

SEQ ID NO: 162441 - DNA, 438 bp, Arabidopsis thaliana columbia
cttgttaacatgggacagatttcccgtgctaccgttccaatgaacctgtctctcgctgttgtggctgagcttgatgaccttaccggtggtggacttatcaatggatatggtattgaaggaagctctcacatctacggtttgtttgctgataccgttgaggcttacgagattgttcttgcgggtggagagcttgtccgcgccacaagggataatgagtattctgatctttactacgcaatcccgtggtcgcaaggaactcttggactccttgtagctgctgagatcaggcttattaaagtcaaggagtacatgagactcacttacataccagtcaagggtgatcttcaagccttagctcaaggttacattgattcttttgctcccaaagacggtgacaagtcgaaaatcccggatttcgtcgaaggcatggtttacaat

SEQ ID NO: 162442 - DNA, 192 bp, Arabidopsis thaliana columbia
  unsure (1)..(192): unsure at all n locations
gcccaacccgtccgacttccgaatctctttacatttctctctgatttttctanctctccgnccaactatgtctgcctggacatgcaaattcgccgatgagttgatcgccaacgctgcctacatcggcacacctggaaaaggtattttggctgctgatgagtccacttgtaccattggaaagcttattgcgag

SEQ ID NO: 162443 - DNA, 498 bp, Arabidopsis thaliana columbia
  unsure (1)..(498): unsure at all n locations
ctcacaattaaagtaaaaaaaaaaagatgggtccaacctctcttatctccttctttttcacattcttggcccttttccatggcttcactgctcancagtggcccaacgagtgccagctcgaccaactcaatgcactcgagccgagtcagatcatcaagagtgagggtggtcgcattgaggtctgggaccaccatgcacctcagctccgttgctctggcttcgcctttgagcgtttcgtcattgagcctcanggtctttacttgcccactttcttgaacgccggcaaactcacgttcgtcgttcacggacatggtctaatgggaaaagtgactcctggatgcgccgagacattcatggactctcctgtatttggacaaggacagagccaggaacaaggtcaggagggtcagggtcaaggccagggtttccgtgacatgcaccagaaagtagagcacctacggtgcggtgacaccatagcgacaccacctggtgtagctc

SEQ ID NO: 162444 - DNA, 474 bp, Arabidopsis thaliana columbia
aaaatgggttcttattctacagctcaagaagtgttttaactagtagatacacctgccattggtcgttctccgttagctcaggaacgctgacaacgatgtcccggcgccaggaaaccagtttgctgagtttgccgccggttgcttctggggggtggagcttgcttaccagaggatccctggtgtgacagagactgaggttggttacactcagggtatctctcacaatccttcttacaaggatgtgtgcaccaacacaacgaaccatgcagaggttgtaagggttcagtatgatcctaatgagtgcacctatgagactcttcttgatttgttctggtctaggcatgatcccaccaccttgaatcgtcagggaaaacttgtgggagctcaataccggtcaggtatatacttcttcacaccagagcaagagaaactagcacgtgagtctcttgagaaccagcagaagaactggagaag

SEQ ID NO: 162445 - DNA, 463 bp, Arabidopsis thaliana columbia; identical to SEQ ID NO: 116482

SEQ ID NO: 162446 - DNA, 483 bp, Arabidopsis thaliana columbia
aaacacacacaatatggttaagcttgctcatctcctcgtcgcaacgttcggggctctcgtcgtccttaacggctgtgtcgcaaggcagtcgctaggggttcctcctcaaatagggaacgcgtgtaacctcgataacttagacgttctccagcctaccgaaactatcaagagcgaggctggtcgggtcgagtactgggatcacaacaatcctcagatccgatgtgctggtgtctctgtttctcgccttataatcgaacaaggcggtctctaccttcctaccttcttcagctcccccaaaatttcctacgttgttcaaggaatgggtatcagcggaagagtggtccctggatgcgcggaaaccttcatggactcgcagcctatgcaaggacaacaacagggacagcaaggacaacagggacaacagggtcaacagggtcaacaaggacagcagggtctgcagcagccagggttccgtgacatgca

SEQ ID NO: 162447 - DNA, 500 bp, Arabidopsis thaliana columbia
aaaaagatgggtccaacctctcttctctcttactttttcacattcttgaccctcttccatggcttcactgctcagcagtggcccaacgagtgccagctcgaccaactcaatgcactcgagccgagtcagatcatcaagagtgagggtggtcgcattgaggtctgggaccaccatgcacctcagctccgttgctctggcttcgcctttgagcgtttcgtcattgagcctcagggtctttacttgcccactttcttgaacgccggcaaactcacgttcgtcgttcacggacatgctctaatgggaaaagtgactcctggatgcgccgagacattcatggactctcctgtatttggacaaggacagggccaggaacaaggtcagggacagggtcagggtcaaggccagggtttccgtgacatgcaccaaaaagtagagcacctacggtgcggtgacaccatagcgacaccacctggtgtagctcaatggttctacaacaatgg

SEQ ID NO: 162448 - DNA, 485 bp, Arabidopsis thaliana columbia
tctcttttgtcgatttcgcagtagaagagttttttcgccgtctccgagaaactcgttgcagcgtcacgaccaggtttccttgtcacttttactaaattttgtaattgctcggttttttgtttagtgcgagtttactctggtctgaagagaacattttgggtctgcttatttacagttggagaaaatgtcttctagaggaaaaaggaaagacgaagatgtcagagcatcagatgacgaatctgaaacccacgcgccggctaagaaagtcgcaaagccagcagacgattccgaccagtctgacgatatcgtcgtctgcaacatatctaagaataggagagtctctgtaaggaattggaacgggaagatttggattgacattcgtgagttctatgtcaaggacggaaagactttgcctggcaagaaaggtatctctctaagcgtggatcagtggaacactctttggaaccacgcagaggatatcgaga

SEQ ID NO: 162449 - DNA, 470 bp, Arabidopsis thaliana columbia
aagaaacacacacacaaatagcaaatggttaacaagatctttctcgtgtgcgcaactgggtgccttctgcgtcctcctcggcaacgcctccatctaccgcaccgtggtcgaattcgacgaagatgacactaccgaccaagtaggcccattccgccaaccacagaaatgccagagggagtttcagcaagagcaacacctaagagcttgccagcaatggatccgccagcaacttgcgggatcacccttcagcgaaaaccagtggggtcctcagcaggggccgtcgctacgcgagcaatgctgcaacgagctttaccaggaagaccaagtgtgcgtttgccctactttgaaacaagcagccaagtcagttagggtccagggacagcacggaccattccagtccacccgcatctaccaaatcgctaagaacttgccaaacgtttgcaacatgaaacaaattggaacatgtccct

SEQ ID NO: 162450 - DNA, 494 bp, Arabidopsis thaliana columbia
gcaactgattcagcaacatctttgtggttttagtttcttgctaaagctatctaacaaagctttaccttggaggattaatggctgacgttcgcacacatgcacaccaggttcaagtgcaccctctacgccagcacgaaggaggcatcaaagtggtttatccccagagcgggccttcttccactcaggttctagcagtggtcgccggcgtaccggttggagggacgctgctaactctggccggtttaaccttagccggttcggttataggactaatactggcattcccgctgttcctcatcttcagtccggttatcgtaccagcggcctttgtgatcggtttagctatgacaggattcatggcgtcaggggcaatagggctcacgggactatcgtcgatgtcgtgggtactgaaccacatccgaagaagtagggaacgtataccggatgagctggatgaaacaaaacaagcgtttggctgacatggccgagtacgt

SEQ ID NO: 162451 - DNA, 462 bp, Arabidopsis thaliana columbia
ggcgtgtgaatgtcgaccgtactgacaaaggacttcaacttcagccgcagtacgaagatcgtgtcggttatggatatgggtatggcggtaatactgattacaagagtcgcggcccttccactaaccaaatcgtggcacttatagcaggagttccaattggtggctcattgctagccttagctggactcactctagccggttcggtgataggttttatgctctccattccgctcttcctactcttcagtccggtgattgttccggcagctctcaccatcgggctagctgtaaccggaattttggcgtcagggttatttggtctgacgggtctcagctcggtctcgtgggtcctaaactacatccgtgggaggagtgatacggtgccggagcaattggactatgctaagaagcgtatggctgatgcaataggctatgctggtcaagaaggaaaagagatggggc

SEQ ID NO: 162452 - DNA, 427 bp, Arabidopsis thaliana columbia
cattcccaaatctctcttccattttctccacacaaatttctcttcaatctccgataatggaaggaaccggcgttgtggcggtgtacggtaacggtgcgataacggaggcgaagaaatctcccttctccgtgaaggtcggtttggctcagatgctccgtggtggtgttatcatggatgtcgtcaacgccgagcaagctcgtatcgccgaggaggctggtgcttgcgccgtcatggctttggagcgtgttcctgctgatatccgcgctcaaggaggcgtcgctcgtatgagcgatccacaaatgattaaagaaatcaaacaagccgttacgattccggtgatggctaaagctaggattggtcatttcgttgaagctcaaatccttgaagcaattggaatcgattacatcgttgagagcgaggttttgac

SEQ ID NO: 162453 - DNA, 477 bp, Arabidopsis thaliana columbia
  unsure (1)..(477): unsure at all n locations
taatactcgtaagatttatcaacacaagcaaatatatatggcccaaaagctagaagcaaagggtggtgagatgggagatgtatgggatgatggtgtncacgaaaatgttagaaaggtatatgtagggcaagcacaatacggtatagccttcgtcaagtttgagtatgtcaatggttctcaagtggttgttggagatgaacatggaaagaagacagagctaggagttgaagagtttgagattgatgcggatgactacatcgtatacgtggaaggttaccgtgagaaagttaacgatatgacgtcagaaatgatcacgtttctttctattaagacttttaaaggcaaaacctctcattctatcgaaaaaagacctggggttaatgttgcgctacatggtggaaaaaatcgtgtggttcacggacgttcaacaaatgttttacacttcccaggggcctatttttctttgcatccactatc

SEQ ID NO: 162454 - DNA, 499 bp, Arabidopsis thaliana columbia
aagaaacacacacacaaatagcaaatggctttcaatatctttctcgtgtgcgcaacttttgcctgctgcgttctcctcaccggcgcctccatctaccgcaccgtggtcgaattcgacgaagatgacactaccgaccaagtaggcccattccgccaaccacagaaatgccagagggagtttcagcaagagcaacacctaagagcttgccagcaatggatccgccagcaacttgcgggatcacccttcagcgaaaaccagtggggtcctcagcaggggccgtcgctacgcgagcaatgctgcaacgagctttaccaggaagaccaagtgtgcgtttgccctactttgaaacaagcagccaagtcagttagggttcagggacagcacggaccattccagtccacccgcatctaccagatcgctaagaacttgccaaacgtttgcaacatgaaacaaattggaacatgtcccttcattgccatccctttctttcctccttact

SEQ ID NO: 162455 - DNA, 480 bp, Arabidopsis thaliana columbia
cggacgcgtgggttacaaacaaggttaaacacatacacaaatggcgaacaagctcttcctcgtctcggcaactctcgccttggtcttccttctcaccaatgcctccgtctacaggacggttgtggaagtcgacgaagatgatgccacaaacccaggcggcccatttaggattccaaagtgtaggaaggagtttcagcaagcacaacacctaagagcttgccaacaatggctccacaagcaggcaatgcagtccggtagtggtcctagcttggccctcgccggtgagtttgattttgaagacgacatggagaacccccagggctcacagcagaggccgccactactccagcagtgctgcaacgagctccaccaggaagagccactttgcgtttgtccaaccttgaaaggagcatccaaagcagttaaatcccgggttcaacaacagggacaaatgcagggacaacagcagcagcaaatagt

SEQ ID NO: 162456 - DNA, 502 bp, Arabidopsis thaliana columbia
catcgttcgtgttaagggacctttccaggttgtgaggccgcctcttagacagccatacgagagtgagcagtggagacacccccgtggcccaccacaaagcccacaagacaacggcttggaggagactatctgcagcatgaggacccacgagaacattgatgacccagcccgtgctgacgtgtataagcccaacctcggccgtgtgaccagcgtcaacagctacaccttacccatcttgcagtatatcagactcagcgccacccgtggcattctccagggtaatgcgatggtgcttccgaaatacaacatgaacgcgaacgagatcttgtactgcactcaaggacaagcaaggattcaagtggtgaacgacaacggacagaacgtgctggaccagcatgtgcagaagggacagctcgtggtcatcccacaaggattcgcctatgttgtccagtcccaccaaaacaacttcgaatggatttctttcaagacaaacgctaacgcg

SEQ ID NO: 162457 - DNA, 493 bp, Arabidopsis thaliana columbia
  unsure (1)..(493): unsure at all n locations
cggacacgtgggacgcgaacgagatcttttattgtactcaaggacaaacaaggattgaggtggttaactacaacggacggagcgttctggaccaacaagtgcaaaatggacagcttgtggtcattccacaaggattcacctatgttgtgcagtcccaccaaaacaactttgaatggatttctttcaagacaaacgctaacgcgatggtcagcacgttggccggtacaacctcggccttgagggcattgacactagaggttctaaccaacgctttacagatctctttcgaggtaactagaaagatcaagttgaacacgcttgagaccactttgactcgtgcgcgcggtggacaaccccagttgatcgaagagatagtcgaggcttaagttaaaacgttttacttttactaataaagtanggacatgggttactactgtaatggtcagtttggaatcatgtcaactcttaagcttttaacgattgcgttaaatat

SEQ ID NO: 162458 - DNA, 437 bp, Arabidopsis thaliana columbia
ggtcaacaaggtcaacagggacaacatgtttaacagggtcagcagggtcaacagggacagcggggtcagcagcagcaagggttccgtgacatgcaccagaaggtcgaacatgttcgacatggagacatcattgccattactgcaggctcttcccattggatctacaacaccggtgaccagccacttgtcattatctgccttctcgacattgccaactaccaaaaccaactcgaccgcaacccaagaacgttccgtctggccggaaacaacccacagggcggttcccagcagcagcagcaacaacaacagaacatgttgagcgggttcgaccctcaagtcctagcccaggcattgaaaatcgacgttaggttggctcaagagcttcagaaccaacaagacagcagaggaaacatcgttcgtgttaagggacctttcca

SEQ ID NO: 162459 - DNA, 488 bp, Arabidopsis thaliana columbia
aagaaacacacacacaaatagcaaatggtttacaagatctttctcgtgtgcgcaactggtgccttctgcgtcctcctcaccaacgcctccatctaccgcaccgtggtcgaattcgacgaagatgacactaccgaccaagtaggcccattccgccaaccacagaaatgccagagggagtttcagcaagagcaacacctaagagcttgccagcaatggatccgccagcaacttgcgggatcacccttcagcgaaaaccagtggggtcctcagcaggggccgtcgctacgcgagcaatgctgcaacgagctttaccaggaagaccaagtgtgcgtttgccctactttgaaacaagcagccaagtcagttagggtccaaggacagcacggaccattccagtccacccgcatctaccagatcgctaagaacttgccaaacgtttgcaacatgaaacaaattggaacatgtcccttcattgccatccctttctt

SEQ ID NO: 162460 - DNA, 478 bp, Arabidopsis thaliana columbia
  unsure (1)..(478): unsure at all n locations
cgataatgcagtcactctccaccccacacactatctctcttcttctccccagaacctctccgtctcgtctttctccctctcttcactcccttgctttccccactcgattacggtctctttcctattcttctcaaacgtcgatcctccccgatgccggcgatgatttcattgtcggtgactgtctcgtctacgaggacggcgtcttcgaagacccttaccttgataaggaggtcactcaggttgcgaagcaggagcgcaagaagaatcggcgtggcggggctaagagattagatgaatccgagattgagcccgagaacctcgtgccagaagaatggagggatattcaggcggaggtgaatctgacgaagaaggacaagcgcaaaatagcgcatgagatggagttcggggttcgggtggagaagaagaagcaagggctaattccgctgaggaaagttgacttgaatgactntctcacgta

SEQ ID NO: 162461 - DNA, 476 bp, Arabidopsis thaliana columbia
aaacaagcaaaaaaacatacacacaaattgcttatggcgaacaagctcttcctcgtcggggcaactcttgccttcttctgccttctcaccaacgcctccatctaccgcaccatcgtggaagtcgacgaagatgatgccacaaacccagccggcccatttaggattccaaaatgtaggaaggagtttcagcaagcacaacacctgaaagcttgccaacaatggctccacaagcaggcaatgcagtccggtagtggcccaagctggaccctcgacggtgagtttgattttgaagatgacatggagaacccccagggcccacaacagaagccgccactactccagcagtgctgcaacgagctccaccaggaagagccactttgcgtttacccaaccttgaaaggagcatccaaagccgttaaacaacaggttcgacaacagcaaggacagcagggacagcagctgcagcaagtaattag

SEQ ID NO: 162462 - DNA, 447 bp, Arabidopsis thaliana columbia
atcataacaaacaaagttaaaaacatacacatatggcgaacaagctcttcctcgtctcggcaactctcgcctttttcttccttctcaccaatgcctccgtctacaggacggttgtggaagtcgatgaagatgccacaaacccagccggcccatttaggattccaaaatgtaggaaggagtttcagcaagcacaacacctgaaagcttgccaacaatggctccacaagcaggcaatgcagtccggtagtggtcctagctggaccctcgatggtgagtttgattttgaagatgacatggagaacccccagggcccacaacagaggccgccactactccagcagtgctgcaacgagctccaccaggaagagccactttgcgtttgcccaaccttgaaaggagcatccaaagccgttgaacagcaggttcgacaacagggacaaatgcagg

SEQ ID NO: 162463 - DNA, 451 bp, Arabidopsis thaliana columbia
  unsure (1)..(451): unsure at all n locations
tctcactctcaccgccttcatttcctcgatcttcgtcttcctccttctccgtctgtcgcagagcatcgctcgaattagggtttctgctgagagaagatgagggaaattattagcattcatatcggacaagccgggatccaagtcggaaattcctgctgggagctttactgtctcgaacatggaatccagcccgacggaatgatgccgagtgatactacagttggtgttgcacacgatgcgttcaatactttctttagcgagactggagctgggaagcatgttcctagggctgtcttcgttgatctcgagcctaccgttatcgacgaagttcgtactggtacttaccgtcaacttttccatccagagcagctcatttctgggaaagaagatgctgctaacaacttcgctagaggacattacactgntggaaaggaaattgtggatctatgtc

SEQ ID NO: 162464 - DNA, 504 bp, Arabidopsis thaliana columbia
acttttcaggggaatgatgatgtactgtcccaacctcacggcttctctaacaatcccttcatatttaccattttgccactacactggacaatttcgtccttctcatttccgatcatctgataaaaacccgaatctcgtttctatcatccgagcaaaacccagaatttctcattcgcttaggtgctttgtatcatcttcaatggcgactcctcctccgacgcagagcagcgaaaccaaaccttactctgttctttttgtctgtctcggaaacatttgtcgcagcccagcggctgaaggtgtctttagagatatcgtgaagaagagaggtctcgattccaaattcaacattgattccgctggaacaattgattatcacgaggggaatatggcggatccaagaatgagaagtgctgcgaaacgtcgcgggattgagataacatcactattcagaccgatcaaggcatctgatttcagagaatttgatctcattcttgcaatggatga

SEQ ID NO: 162465 - DNA, 405 bp, Arabidopsis thaliana columbia
cataattacaaacaaggttaaaaacatacacaaatggcgaacaagctcttcctcgtctcggcaactctcgccttcttcttcgttctcaccaatgcctccgtctacaggacggttgtggaagtcgacgaagatgatgccacaaacccagccggtccatttaggattccaaaatgtaggaaggagtttcagcaagcacaacacctaagagcttgccagcaatggctccacaagcaggcaatgcagtctggtagtggtccaagctggaccctcgacggtgaatttgattttgaagacgacatggagaacccccagggcccacaacagaagcccccgctactccagcagtgctgcaacgagctccatcaggaagagccactttgcgtttgcccaaccttgaaaggagca

SEQ ID NO: 162466 - DNA, 499 bp, Arabidopsis thaliana columbia
aaaaaacatacacacaaatagcaaatggcgaacatgctcttcctcgtctcggcaactctggccttcttcttccttctcaccggcgcctccatctaccgcaccatcgtggaagtcgacgaagatgatgccacaaacccagccggcccatttaggattccaaaatgtaggaaggagtttcagcaagcacaacacctgaaagcttgccaacaatggctccacaagcaggcaatgcagtccggtagtggcccaagctggaccctcgacggtgagtttgattttgaagatgacatggagaacccccagggcccacaacagaggccgccactactccagcagtgctgcaacgagctccaccaggaagagccactttgcgtttgcccaaccttgaaaggagcatccaaagccgttaaacaacaagttcgacaacagcaaggacagcatggacagcagctgcagcaagtaattagccgtatctaccagactgctacgcacttaccta

SEQ ID NO: 162467 - DNA, 484 bp, Arabidopsis thaliana columbia
gaaacacacacacaaatagcaaatggctaacatgatctttctcgtgtgcgcaacttttgccttctgcgtcctcctcaccaacgcctgcatctaccgcaccgtggtcgaattcgacgaagatgacactaccgaccaagtaggcccattccgccaaccacagaaatgccagagggagtttcagcaagagcaacacctaagagcttgccagcaatggatccgccagcaacttgcgggatcacccttcagcgaaaaccagtggggtcctcagcaggggccgtcgctacgcgagcaatgctgcaacgagctttaccaggaagaccaagtgtgcgtttgccctactttgaaacaagcagccaagtcagttagggtccagggacagcacggaccattccagtccacccgcatctaccagatcgctaagaacttgccaaacgtttgcaacatgaaacaaattggaacatgtcccttcattgccatccctttc

SEQ ID NO: 162468 - DNA, 415 bp, Arabidopsis thaliana columbia
agtaaagagaaaatggctcggctctcatctattctctatttttccttaacacttttgatcggtctccatggctctacaggtgggcagtttccaaacgagcgtcagctagaccagctcaatgcactggagccgtcacacgtacttaaggctgaggctggtcgcatcgaggtgtgggaccaccacgctcctcagctacgttgctctggcgtctgcttcgaacgttacatcattgagtctaagggtctctacttgccctctttctttagcaccgcgaagctctgcttcgtggctaacggacaaggtcttatggggagagttgttcctggatgcgccgagacattacacgactcatcaatgttccaaccaggcggtggtagccccttcggagaaggccagggccagggacaacaaggtc

SEQ ID NO: 162469 - DNA, 162 bp, Arabidopsis thaliana columbia
gcccacgcgtccgaacacaagaaaacacacacaaatagcaaatgtgtcaacaagatcttcctcgtgtgcgcaactgttgccttctgcgtgctgctcgggaacgcttacatctaccgcaccgtcgtcgaattcgacgaagatgacactaccgaccaaataggc

SEQ ID NO: 162470 - DNA, 447 bp, Arabidopsis thaliana columbia
aaacaagcaaaaaaacatacacacaaatagcatatggcgaacaagctcttcctcgtctcggcgactcttgccttcttcttccggctcaccaacgcctccatctaccgcaccatcgtggaagtcgacgaagatgatgccacaaacccagccggcccatttaggattccaaaatgtaggaaggagtttcagcaagcacaacacctgaaagcttgccaacaatggctccacaagcaggcaatgcagtccggtagtggcccaagctggaccctcgacggtgagtttgattttgaagatgacatggagaacccccagggcccacaacagaggccgccactactccagcagtgctgcaacgagctccaccaggaagagccactttgcgtttacccaaccttgaaaggagcatccaaagccgttaaacaacaagttcgacaacagcaaggacag

SEQ ID NO: 162471 - DNA, 497 bp, Arabidopsis thaliana columbia
  unsure (1)..(497): unsure at all n locations
ggctaacaagatctttctcgngtgcgcttcttttgccttctgcgtcctcctcaccaacgcgttcatctaccgcaccgtgggcgaattcgacgaagatgacactaccgaccaagtaggcccattccgccaaccacagaaatgccagagggagtttcagcaagagcaacacctaagagcttgccagcaatggatccgccagcaacttgcgggatcacccttcagcgaaaaccagtggggtcctcagcaggggccgtcgctacgcgagcaatgctgcaacgagctttaccaggaagaccaagtgtgcgtttgccctactttgaaacaagcagccaagtcagttagggtccaaggacagcacggaccattccagtccacccgcatctaccagatcgctaaaaacttgccaaacgtttgcaacatgaaacaaattggaacatgtcccttcattgccatccctttctttcctgcttactaaatcctagtgttatcacacgatg

SEQ ID NO: 162472 - DNA, 475 bp, Arabidopsis thaliana columbia
cccacgcgtccggttgcggttactgatctatcgcctacgcatccgatcaggctgggtctggctctcaatttctcggtgttttactacgagattctcaactcttctgagaaagcttgtagcatggccaaacaggctttcgaggaagccattgctgagctggacacgttgggagaggagtcgtacaaggacagtactctcatcatgcagttgctaagggacaacctaaccctctggacctccgacatgcaggagcagatggatgaggcctgaagatcttgtttgtggaagaacagacggttatgtaatttccccgcaaccatgaccgaaaatctagttcaaactcaagaaccccctttgctgtaaaacttgtcgaaaaaatggtctgtttatgacggttatgtgcacagctttggtgttatctgcttctctgttccaacctctgttttcttttttaaattatcatcatcttttgcct

SEQ ID NO: 162473 - DNA, 445 bp, Arabidopsis thaliana columbia
  unsure (1)..(445): unsure at all n locations
cgattnggatctaccaacaccggtgaccagctcacttgtcattatcntgccttctcgacattgccaactaccaaaaccaactcgaccgcaacccaagaacgttccgtctggccggaaacaacccacagggcggttcccagcagcagcagcaacaacaacagaacatgttgagcgggttcgaccctcaggtcctagcccaggcattgaaaatcgacgttaggttggctcaggagcttcagaaccaacaagacagcagaggaaacatcgttcgtgttaagggacctttccaggttgtgaggccgcctcttagacagccatacgagagtgagcagtggagacacccccgtggcccaccacaaagcccacaagacaacggcttggaggagactatctgcagcatgaggacccacgagaacattgatgacccagcccgtgctgacgtgta

SEQ ID NO: 162474 - DNA, 503 bp, Arabidopsis thaliana columbia
acgctttcactaagaaagaaagcgacatgatgatgatgggcggaatcgacagaactgaacttatggctgctctgaaaggcaaagggacaaagatggacaagctccggtttgcaatcatgtacctgatctccacagaaaccataaaccaatcggaagttgaagcagtggaggcagcattgaatgaagctgaggctgatacaagtgcgtttcagtatgtaaagaaaatcaaatcgttaaacgcatcttttgcagctacatcagcgaattcagctagcagaagcaacattgtagactgggccgagaagctttacggacagtctataagcgcagtgactgcaggagtcaagaatctgttatctagtgatcaacaattggcagtgactcgaacagtcgaagctttaacagaaggaaaaccaaacccggagatcgattcttaccgcttcctggacccaagagctccaaagtcgtctagcttccgtggtagccatgtaaaaaggaccgtc

SEQ ID NO: 162475 - DNA, 384 bp, Arabidopsis thaliana columbia
  unsure (1)..(384): unsure at all n locations
aannaagaaagcngaggggaccaattcatgttctttttttctgganggagcacaaagtcttggcgcgtgcctaagaatgcgtgccgcctcagacagtggtatagatatttccaaatgctcaatccattggtaccgtgcagcatctgagtctagtcgaagagaagctatatcttgtgccaaccggacagtatatgctccagaaccatttgatgtcgggcgagtgatacaagcagacattgtttcaaatggccagaagtttaccgttacaaccgatggtccaattaatactggttgtcgtaacaagagtatgctatgtttatgtacttctgtcaagtcaaatcagattatatgttgatattgtaaacataatggcttacttatcac

SEQ ID NO: 162476 - DNA, 458 bp, Arabidopsis thaliana columbia
caaaaaacatacacacaaatagcaaatggcctacatgctctttctcgtctcggcgactctcgccctcttcttccttctcaccaatgcctccatctaccgaacggtcgtagaagtcgaggaagatgatgccacaaacccagccggtccatttaggattccgaaatgtaggaaggagtttcagcaagcacaacacctaagagcttgccagcaatggctccacaagcaggcaatgcagtccggtagtggtccaagctggaccctcgatggtgagtttgattttgaagacgacatggagaaccctcagagcccacagcagaggccaccgctactccagcagtgctgcaacgagctccaccaggaagagccactttgtgtttgcccaaccttgaaaggagcatccaaagccggtaaacaacaagttcgacaacagcaaggacagcagggacagcagctgcagc

SEQ ID NO: 162477 - DNA, 465 bp, Arabidopsis thaliana columbia
tttttgtttagactttgctttttagtagttctagatcatatcaatcgctatggcaaatgtggacaggcgtgtgaatgtcgaccgtactgacaaaggacttcaacttcagccgcagtacgaagatcgtgtcggttatggatatggttatggtggtaatactgattacaagagtcgcggcccttccactaaccaaatcgtggcacttatagcaggagttccaattggtggctcattgctagccttagctggactcactctagccggttcggtgataggttttatgctctccattccgctcttcctactcttcagtccggtgattgttccggcagctctcaccatcgggctagctgtaaccggaattttggcgtcagggttatttggtctgacgggtctcaactcggtctcgtgggtcctaaactacatccgtgggaagagtgatacggtgccggagcaattggacta

SEQ ID NO: 162478 - DNA, 488 bp, Arabidopsis thaliana columbia
aaacgcaaacgcggttctctacgtgacagactgggaagcccatgtgcaggtggttaacgacaacggtgacagagtgttcgacggacaagtctctcaaggacagctactttccataccacaaggtttctccgtggtgaaacgcgcaacaagcgaacagttccggtggatcgagttcaagacaaacgcaaacgcacagatcaacacacttgctggacgaacctcggtcttgagaggtttaccattagaggtcatatccaatgggtaccaaatctcactcgaagaagcaagaagggttaagttcaacacgatcgagaccactttgacgcacagcagtggcccagctagctacggaaggccaatgaaggctgatgcttaagagcttacccagtgaacctctactgtaaaaggaagttaaatagtaataaaaaaaaagagtgataataatgtacgcaaatgtgactggttttgtagaggttttagaatgttta

SEQ ID NO: 162479 - DNA, 445 bp, Arabidopsis thaliana columbia
ctctcaacttctgctggatctctccagcagactgacgatcttcttcggagagattcttaggggaccgaacgatcgatcgatccatgcttctcgggcaaacagaagtgcagaaatggaccacgacaagacaggatgccaaagcccacccgagggtcccaagctatgcatcaacaactgcggtttcttcggaagtgctgccacaatgaacatgtgttccaagtgccacaagactatgttgtttcaacacgaacagggggctaagctcgcatctgcagtgtctggatcacccagcaacatcctaaaggaaaccttcactgctgctatggttgatgctgaaaccaaatccgtcgagcccatggctgtctctgtacaagctgttgcagaagtagtagcaccagaagaagctgcagcaaaaccaaaggaagggcccagccgatgtactact

SEQ ID NO: 162480 - DNA, 498 bp, Arabidopsis thaliana columbia
tacaaaacatacacaaatggcgaacaagctctttctcgtctcggcaactctcgccttgttcttccttctcaccaatgcctccgtctacaggacggttgtggaagtcgacgaagacgataccacaaaccaagccggtccatttaggattccaaaatgtaggaaggagtttcagcaagcacaacacctaagagcttgccagcaatggctccacaagcaggcaatgcagcccggtggtggtagtggtccaagctggaccctcgacggtgagtttgattttgaagacgacgtggagaaccaacaacagggcccgcagcagaagccaccgctgctccagcagtgctgcaacgagctccaccaggaagagccactttggggtttgccaaccttgaaaggagcatccaaagccgttaaacaacaggttcgacaacaacagggacaacaaatgcagggacagcagatgcagcaagtaattagccgtatctaccagactgctacgca

SEQ ID NO: 162481 - DNA, 505 bp, Arabidopsis thaliana columbia
ggctaacaagatctttctcgtgtgcgcaacttttgccttctgcgtcctcctcaccaacgcctgcatctaccgcaccgcggtcgaattcgacgaagatgacactaccgaccaagtaggcccattccgccaaccacagaaatgccagagggagtttcagcaagagcaacacctaagagcttgccagcaatggatccgccagcaacttgcgggatcacccttcagcgaaaaccagtggggtcctcagcaggggccgtcgctacgcgagcaatgctgcaacgagctttaccaggaagaccaagtgtgcgtttgccctactttgaaacaagcagccaagtcagttagggtccagggacagcacggaccattccagtccacccgcatctaccagatcgctaagaacttgccaaacgtttgcaacatgaaacaaattggaacatgtcccttcattgccatccctttctttcctgcttactaaatcctagtggtatcacacgatgatcatcat

SEQ ID NO: 162482 - DNA, 485 bp, Arabidopsis thaliana columbia
cggacgcgtgggcggacgcgtgggcgtacgcttgggctaccaccaatggcatacatctcgcaatgtgtgtagtcgtgggtcactacatggaagtatccatgcctacacctgcaaacaccatatatgtttcttcattcgtctttcgaatctacaaaacttctcaaaccatataactagcaaagcttgaggttctgtaccttggcattctctggataagaccctcaccaaaatggttgtaagcaattgtaacttgcatcactttgtcccttgtgtatgaatcactatgccccagcaacataacctaaacaacacgcaaccgttactaaacccctaattctcaattccaataaaccctataaaatgtgaaactttagttatagagagtaaaaactctttaaattaataactttagaaatataatattttattacttaataattaacaaaaagttattttatagaattgtagattttgatacatgtttt

SEQ ID NO: 162483 - DNA, 368 bp, Arabidopsis thaliana columbia
  unsure (1)..(368): unsure at all n locations
ccgtccgcccggacgctttacaatgggtatcgattttgatctgctggagggtaagagcanagaagaaccaaaagtgactagcttcccaacgtcgcgattgattggtctaccatcaagctcaacttgtcaagctttacacaggtttctggtggaggagaacctcagagcaacgttcaattgcagttgatcctaaagaaggcttttcattgagcaaaagtcaacaaacgctcctctttctctatctaaggctcgtcgagttcatgactggcaaggaagataagattgctgttttggttggaaccatcaccgatgatttgagagtacacgagattccagctatcaaagtcactgccttgaggttcacggaa

SEQ ID NO: 162484 - DNA, 486 bp, Arabidopsis thaliana columbia
ctgcagtcttccgcttcttcgtttcacggacgtttctcaccattagcggctccatcctccgcgacgaatgctctctccgccggtcagaaacgtggtgaaagtctcggcgtctggaactgtactggtcgagaaatctgaagccgagaaaactcaacgcctcaaaaccgcttacctcgagaggattatccctgcgctcaaagaagagttcaagtacgttaatattcaccaggttccaaaggtacagaagattgtagtgaattgtggtattggagatgcggcgcagaacgacaagggtttggaggctgcgatgaaggatatcgcgcttatcacagggcagaaacctattaagacacgagctagagcttccattgctactttcaagatcagggaagatcaacctcttgggattgctgtcactctcagaggagatgtaatgtactccttcttggatcgtcttatcaacttagcccttccgagaactcgaga

SEQ ID NO: 162485 - DNA, 439 bp, Arabidopsis thaliana columbia
gtccgatctacaacaccggtgaccagccacttgtcattatctgccttctcgacattgccaactgcggaaaccaactcgaccgcggccgaagaacgttccgtctggccggaaacaacccacagggcggttcccagcagcagcaacaacaacaacagaacatgttgagcgggttcgaccctcaggtcctagcccaggcattgaaaatcgacgttaggttggctcaggagcttcagaaccaacaagacagcagaggaaacatcgttcgtgttaagggacctttccaggttgtgaggccgcctcttagacagccatacgagagtgagcagtggagacacccacgtggcccaccacaaagcccacaagacaacggcttggaggagactatctgcagcatgaggacccacgagaacattgatgacccagcccgtgctgacgtgta

SEQ ID NO: 162486 - DNA, 481 bp, Arabidopsis thaliana columbia
  unsure (1)..(481): unsure at all n locations
aaacattatccgagtccaaggcccattcagtgtcattaggccgcctttgaggagtcagagaccgcaggaggaagttaacggtttagaagagaccatatgcagcgcgaggtgcaccgataacctcgatgacccatctaatgctgacgtatacaagccacagctcggttacatcagcactctgaacagctatgatctccccatccttcgcttccttcgtctctcagccctccgtggatctatccgtcaaaacgcgatggtgcttccacagtggaacgcaaacgcaaacgcggttctctacgtgacagacggggaagcccatgtgcaggtggttaacgacaacggtgacagagtgttcgacggacaagtctctcaaggacagctactttccataccacaaggtttctccgtggtgaaacgcgcaacaagcgaacagttncggtggatcgagttcaagacaaacgcaaacgcacagatcaacaca

SEQ ID NO: 162487 - DNA, 395 bp, Arabidopsis thaliana columbia
aaaaacatacacacaaatagcaaatggccaacaagctctttctcgtctcggcgactctcgccctcttcttccttctcaccaatgcctccatctaccgaacggtcgtagaagtcgaggaagatgatgccacaaacccagccggcccatttcggattccgaaatgtaggaaggagtttcagcaagcacaacacctaagagcttgccagcaatggctccacaagcaggcaatgcagtccggtagtggtccaagctggaccctcgacggtgagtttgattttgaagacgacatggagaaccctcagagcccacagcagaagccaccgctactccagcagtgctgcaacgagctccaccaggaagagccactttgtgtttgcccaaccttgaaaggagca

SEQ ID NO: 162488 - DNA, 459 bp, Arabidopsis thaliana columbia
  unsure (1)..(459): unsure at all n locations
cggaatnaaccgggcccgacccgacgcgtccgcaagaaacacacacacaaatagcaaatggctaactttatctttctcgtgtgcgcaacttttgccgtctgtgttctcctcaccaacgcctacatataccgcaccgtggtcgaattcgacgaagatgacactaccgaccaagtaggcccattccgccaaccacagaaatgccagagggagtttcagcaagagcaacacctaagagcttgccagcaatggatccgccagcaacttgcgggatcacccttcagcgaaaaccagtggggtcctcagcaggggccgtcgctacgcgagcaatgctgcaacgagctttaccaggaagaccaagtgtgcgtttgccctactttgaaacaagcagccaagtcagttagggtgcagggacagcacggaccattccagtccacccgcatctaccagatcgctaagaac

SEQ ID NO: 162489 - DNA, 441 bp, Arabidopsis thaliana columbia
atctacaacaccggtgaccagccacttgtcattatctgccttctcgacattgccaactgccaaaaccaactcgaccgcggcccaagaacgttccgtctggccggaaacaacccacagggcggttcccagcagcagcaacaacaacaacagaacatgttgagcgggttcgaccctcaggtcctagcccaggcattgaaaatcgacgttaggttggctcaggagcttcagaaccaacaagacagcagaggaaacatcgttcgtgttaagggacctttccaggttgtgaggccgcctcttagacagccatacgagagtgagcagtggagacacccacgtggcccaccacaaagcccacaagacaacggcttggaggagactatctgcagcatgaggacccacgagaacattgatgacccagcccgtgctgacgtgtataagccc

SEQ ID NO: 162490 - DNA, 455 bp, Arabidopsis thaliana columbia
  unsure (1)..(455): unsure at all n locations
cggacgcgtgggcggacgcgtgggcggacgcttgggctaccaccaatggcatacatctgccaatgtgtgtagtcgttgttcactacatggaagtatccatgcctacacctgcaaacaccatatatgtttcttcattcgtctttcgaatctacaaaacttctcaaaccatataactagcaaagcttgaggttctgtaccttggcattctctggataagaccctcaccaaaatggttgtaagcaattgtaacttgcatcactttgtcccttgtgtatgaatcactatgccccagcaacataacctaaacaacacgcaaccgttactaaacccctaattctcaattccaataaaccctataaaatgtgaaactttagttatagagagtaaaaactctgtaaattaataactntagaaatataatattttattacttaataattaacaaaaagttattt

SEQ ID NO: 162491 - DNA, 175 bp, Arabidopsis thaliana columbia
  unsure (1)..(175): unsure at all n locations
tctctttcgagattctttggaggattatataacaaatcagtcccagacacctcttttntnacaccaatatcgctcttaccacaaaacaaagaatctcagattcgagaagcaaaagaagggaggatgggttttactttctcgggaaacccttcccttntcttcttcttcttcttct

SEQ ID NO: 162492 - DNA, 341 bp, Arabidopsis thaliana columbia
ccggcggacccacgcgtccgagatgctagagacagacttggagatcaatgttgcagccgataagtttcaccacatgtgcggtgggaaaccacacgatgtgggaaagcaagtccaggcaacattcatggatgagatctgcacgaaggctactggcgcacagccggctctatcgcctaacggaactacttacatggatgggaggcaaagggggctaaagagaggatctgggcggaggagccagataagaacttgatcacgtttaggggtatagaaggcgatctgaggaaacggtaccaaagcttctttgctcccatccaggtgacccctaagcctggatgccc

SEQ ID NO: 162493 - DNA, 83 bp, Arabidopsis thaliana columbia
caataacgctctcagagagaccatttgatgaagcttctcgcttctggaatttgaaaaggaacttgttatggaaataatctcac

SEQ ID NO: 162494 - DNA, 154 bp, Arabidopsis thaliana columbia
  unsure (1)..(154): unsure at all n locations
ctgcggcataccaggtcgaaggtgcgatttatgaaactcgtcgnggaccagccttatgggacatctactgtagaagatatgcagagaggtgcaataacgataacggcgatgtggccgtcgattacttccatcgttataaggaaagatattcaac

SEQ ID NO: 162495 - DNA, 428 bp, Arabidopsis thaliana columbia
acggcacaaaccaccaccttcaagaactagctaccttgctggatttgaaccaaacctagaacataaatgaggagacgtggaggggtaggagattcggcaccatgttgatcctcaggtaggtatttatcctttcccacaatttgtaaaacgttgttggagaacccggggtgattacaagacactacaactttgctctctatgtcgactaagaaactcaacccaaaacataaccctaaatgatagcggtcatcaaatttcgacactgtcaggaacttgctctatgaaatggcttcggactctccatcttattcgctatccatacctgaaagctctgagcagcaaatatacaaagttgttgcgcttctctagtcattgacaaagtcgcacaacaataagaacgaggcgatcttaaatattaaccaaagaga

SEQ ID NO: 162496 - DNA, 461 bp, Arabidopsis thaliana columbia
acgaaaaaaaaaaacacaaaaagtttcaatggccgcctccacaatggctctctcctcccctgccttcgccggaaaggctgtgaacgctttcccccgcggcatctgaagtcctcggaagcggccgtgtgacaatgaggaagactgttgccaagccaaagggtccatcaggcagcccatggtacggatccgaccgagtcaagtacttgggtccattctctggcgagtcaccgagctaccttaccggagagttccccggagactacggatgggacaccgctggactttcagctgatcccgagacattcgcaaggaaccgtgagctagaagttatccacagcaggtgggctatgctcggagccctaggctgcgtcttccctgagcttttggctaggaacggagtcaagttcggagaggcgggttggttcaaggccggttcacagatctttagcgatggaggactc

SEQ ID NO: 162497 - DNA, 140 bp, Arabidopsis thaliana columbia
ggcatggggtccaaatccggacaaattcagaagaaatctgagatgaaagtttgtagataactggacttaactgagtatggtggtctcaaggcacagaacaacaaggttgtctcaatgggatcaccactctgcacagaaca

SEQ ID NO: 162498 - DNA, 313 bp, Arabidopsis thaliana columbia
cgcgtcggaagaaacaattctcagtcttcgctgcagctgaagccgaggcgaagcgggctgtggcgcttaaagattaccgaaacgggggtattatggctcacatagacgcgggaaagacgacaacaaccgagaggattctttactacacaggaagaaactacaaaatcggtgaagtgcatgaagggacagctacaatggattggatggaacaagagcaagaacgaggaatcaccattacttcagctgcaaccacaacgttttgggataaacacaggatcaatattattgatacaccgggtcacgtcgatttcac

SEQ ID NO: 162499 - DNA, 449 bp, Arabidopsis thaliana columbia
gaagaatcaaaacaattaatcgcgaggcttgagaatcaatcaatggatatgcagaatgaaaacgagagattgatggtcttcgaacatgctcgcaaagtagcagaagcaacctacgtcaaaaaccctttagatgccgagaatttgacgagatgggcaggagctttacttgaactatcacagtttcagacagagccaaagcagatgattctagaggctattttgaagctgggagaggccttggtcatcgatccaaagaagcatgatgctctttggttaattgggaatgctcatctttcatttgggtttttgagttctgatcagacagaagctagcgataactttgagaaagcttctcagttctttcaacttgctgtggaggagcaaccagagagcgaactctatcggaaatcattgacattggctttcaggctccagaactacatacaggc

SEQ ID NO: 162500 - DNA, 175 bp, Arabidopsis thaliana columbia
gaaaagaaaaaaaaaaccgttcttggaagatgggtttcaaactcaactctcttttgcttggtctttcgcttctgatgcgtcacaatcttgtccggagccgaccaagccttggcttacgtcaagaaaccacatgtgagccaacgcaacataacggcgttagcagccgtcgccggaa

SEQ ID NO: 162501 - DNA, 185 bp, Arabidopsis thaliana columbia
ctctgataagcctgacactcggcgctggctaggttggcaccgtaggattgttgcatgagaaccacaatacttacttcgttaaacggttttctgattctgctgtgttttggcttcagcgtttgctctattcccttgagagtgggatttaggtgacaacccaaaatactaggtttttgggaacccac

SEQ ID NO: 162502 - DNA, 440 bp, Arabidopsis thaliana columbia
caacaatggcgtctcttcaacaaactctattctctcttcaatccaaactcccaccatcctccttccaaatcgccagatctctcccactccgaaaaaccttcccaatccgaatcaacaacggtggaaacgccgccggagcaagaatgtcagccaccgcagcatcaagctacgcgatggcattagcagacgtcgcgaaaagaaacgacacaatggaattaacagtcacagacatcgagaagctcgaacaagtcttctcagatccacaagtactaaacttcttcgcgaatccaacgtcctcgtcgacgcgaatcggatcaatatcgtgacggagatcgttaaggagtttgagttggtttacaataagctaacggatacacaattggcggaggttaggtcggtggtgaaattggaagcgccgcaattagctcagattgcgaaac

SEQ ID NO: 162503 - DNA, 394 bp, Arabidopsis thaliana columbia
acggaacaacaacactaagcaaaaaagataagctcaagccgagagagacaatggcatcaacatgcacgagctcaagcagcgggcggaccccaacaacattccttggccagactaaagccttaagctttaacccccttcacgatgttgtctatctccgatctcccaagtaccctatgggaaatgatctttggtatcgacctgacaaagtgcattacttcatacccttttgcgcctaaactctctcttactctgaaggtcacaggtccttacggttagggcactgacactctatttttctatcccgagaccttagctttggaccatgagctagaaattattcacaacctatgggcgcatgctctgagccctaagctgcgtttttcctgagctattg

SEQ ID NO: 162504 - DNA, 395 bp, Arabidopsis thaliana columbia
accacacacaacaaaagaatagtgatcgaagctcatggcgtctcttgcaaccgtcgccgctgtgaaaccatccgccgccataaaaggactcggcggcagctcactcgccggagctaagctctccatcaagccttcccgcctgagctttaaacccaaatccatccgggctaatggtgtggtggctaagtatggagacaaaagtgtctactttgacttagaagatttgggtaacacaacaggtcaatgggacgtatacggctctgatgctccttctccttacaatcctcttcagagcaagttctttgagacattcgctgccccattcacaaagaggaggatgctcctcaagttcttgatccttggaggaggctctttgcttacttatgtcagcgcta

SEQ ID NO: 162505 - DNA, 449 bp, Arabidopsis thaliana columbia
aaactaaatacaaagaaacagagatgggtttggttacagaggaggtgagagctaaggcagagatgtacaccggagatgagatatgtagagagaagacaaagtgtttcctcaaggaaatatctatgcccaatggtttattaccattgaaggatatagaagaggttgggtatgacagagagtcaggtgttgtatggctgaagcagaagaagagcatcactcacaagttcacagagatagataagcttgtctcctatggaaccgaagtcacagccattgttgagaccgggaaaatcaagaagctcactggagtcaaagccaaggaacttcttatttgggtcactatcaatgagatctataccgaggaaccccctaccaagatcacgttcaagacaccgaccacactgtccaggactttcccggtcacagcttttatagtcccagaagaacct

SEQ ID NO: 162506 - DNA, 273 bp, Arabidopsis thaliana columbia
aggacacttagagacaaagagcatttcgttagctcacccgtctgaagtatctcgccagccggcccgtctcaagcagctcgtgagatcacccgtctgaagcatctcgtcagtctgtccgtctcaagtagctcatcagctcgcccgtctcaagcagctcgtcagctcacccgtccgaagtatctcgccagccggccccgtaaattttcccgatggagattcttccgattccggcggagagtttcaaggtaggattcatcggagctggtaaaatgg

SEQ ID NO: 162507 - DNA, 422 bp, Arabidopsis thaliana columbia
gttaggagcagctggtttcatcattcctgaagctttaaacaaatatggcgctaactgtggccctgaagctgtctggtttaagactggtgctttgcttcttgatggaaacacattgaactactttggcaagaacatccctatcaaccttgttctcgccgtagttgctgaggttgttctcctcggtggagccgagtactacagaatcaccaacggattggatttcgaggacaagctacacccaggaggtccatttgatcctctaggccttgctaaggaccctgagcaaggagctcttctcaaagtcaaagagatcaagaacgggagattagccatgtttgcgatgctcggtttctttatccaagcgtatgttaccggagaaggtcctgttgagaaccttgcaaagcatctcagtgatccttttg

SEQ ID NO: 162508 - DNA, 345 bp, Arabidopsis thaliana columbia
gtcgagaaaccgatttataaccatgtcactggacttcttgacggatacgaccttattcaggcttggaacattcttgtgatcgacggtgtcaacacaatgtttgatgaccaagtaaaactcttactacacttcagtatctactttgacagttacagcaaaatcaaattatgttataaaattaacaggcgcatggctgaaagacgtcacaatttgtagagccttaaagccagtatcgaagcccgacagcccctcttagatccatacatcctccacttaaagcagaacgcaaattccgtcatagaacggattcctacaactctgatcccatattacaactaatggaaa

SEQ ID NO: 162509 - DNA, 420 bp, Arabidopsis thaliana columbia
gccgacccagacccacgcgtccgataagaagcacaatcacatacatatagatttatatcaaagataaagataaagacacggccgcggtacatataagaaggacggaaggggccaccatgattccggtgatcattctaagaaacatcatgataagaaaaggaaacacgatggagatgaagatcttaatgacgttcataggcacaaaaaaaacacgcataaaagctcaaagcttgatgaggtgggtgcaataagggttgctggctaaaaaagctgtagacatttcaatttctgtattttgcactcgcgtaggtgtcattggttactttagaagcacttttcaacttactgtagacagcttattatggtaaaagcccaaactttttaatacattccttgaagaaaaaagggtttatttgacaa

SEQ ID NO: 162510 - DNA, 479 bp, Arabidopsis thaliana columbia
  unsure (1)..(479): unsure at all n locations
accggacggaaaacngggccgacccacgcaaacgggcagatcttccaattacccacttttaggttcaactcaatcaagctatatcaggggaaatgtcagcataggcaataggggggcttcntctgcaggcatatattgacatcacaaaaaccttggtcaatgacagtatcttttctcagtacatgtacaagacgttgatgagcggaagccatatgtgggctttcaagaaacaatttgcagtccagctagcagtctccagtttcatgtccttcatgctacaaattggtgggaggtccccgaacaaggtcttgtttgcaaaaaacaccgggaaaatgttccagacagattttcaccctgcttatgacgccaatgggatgattgaatttaacgaacctgtgcctttccgcctcacaaggaacatgcaagctttcttttttcagtttggagttgaaggtctccttatgtcatccatgtgttca

SEQ ID NO: 162511 - DNA, 459 bp, Arabidopsis thaliana columbia
gcagattgcttgtggggatagtcattgtttggctgtcactatggaaggagaggtccagagttggggccgcaaccagaatggtcaacttggtctgggggacaccgaagattctctagtgcctcagaagattcaagcctttgagggaatacgaatcaaaatggttgctgctggtgcagaacacactgctgcagttacagaagatggtgacctctatggatggggctggggaagatacggaaatttgggattaggtgaccggactgaccgcttagttcctgaaagagttacctctactggtggtgagaaaatgtcaatggttgcttgtggatggcggcacacaatatcagtttcctactctggagcattgtatacttatggatggagcaaatatggacagctaggacatggagacttggaggatcaccttattcctcacaaactggaagcactgagcaacag

SEQ ID NO: 162512 - DNA, 158 bp, Arabidopsis thaliana columbia
  unsure (1)..(158): unsure at all n locations
ggagcagagcattcgtcatgcttatgagctattngaaatgaatggaaaccgagtgatcggcatcgaagaactcgctgctgaacttggtgttggatcatccatcccggttcataccattctaaatgactggataagacatactgacgggaagctgagtt

SEQ ID NO: 162513 - DNA, 444 bp, Arabidopsis thaliana columbia
cgaatcccggtcgaccacgcgtccggtgtcttctctccctctgtgtctgtgtttagatctctcttctctctgcttgctttccaaaaatcgtcttctccttctccacctttcattatctttcttctcttaccaaaaccctttaaatacaaaaaaaaactaaaacacataaaaaaaatattgaattctcctttttcccgacaatctgagtttctcaggcagagaagacagagattttcaccgtaagggcaaaaaacgaaaaactctgtctctctgtttctgcttcggccttccttggctttgatttcttacaccaaaagagacatctttaaagaatctcacattgttccctattgcttgtctcacaagagaatccttgatctagggttcttgcttccctcccctgtttttttctttaaattcctcctctgctttctttttgttctc

SEQ ID NO: 162514 - DNA, 186 bp, Arabidopsis thaliana columbia
cgtccgtattggctccagaaaaagatggcgagatagttttggatgaccatgatgattatggtggcggtgaccatgattaacatggctaagagtgatcccattgcaccatgttacttcatatttggtgactctttggttgataatggcaacaataatcagcttcagtcattagctagagctaattac

SEQ ID NO: 162515 - DNA, 362 bp, Arabidopsis thaliana columbia
ccacgcgccggacgttatcggggcccacactctgggtcgatgccacaaggataggtctggcttcgggggtgcgatggacatcaaacccggtaatcttcgacaactcttacttcaaggaactcttgagcggagagaaggaaggccttcttcagcttgtctctgacaaagcactattggacgacccttgtttcccgcctttggtccagaaaaaccctggttatggaaaagccctttttggttgtttcccttagggccacatgaagctttctgagcttgggtttgctgatgcttaagctgtgacctatgctctgggggtgtgtgtgtgtcttcccgagaggcatggctgttttttggttgggggc

SEQ ID NO: 162516 - DNA, 412 bp, Arabidopsis thaliana columbia
gaggaagtacagtgtctggattggttgttttatccttgcttccctcagcactttggagcggatgtggatctctaaggcagagtatgatgaaacaggtccaggcattgtccacagaaaatgcttctaaactaaagagacatcgtttccatgacgggatcacatttctttctatttctccaatttgtttgtttcaaatttttttcccctttgtcatttgtgcactatgtgagaaactttccggttacagcgtttggagagatgtctaaggaggagcaggtttgaaaacccgctctcgctcttacctgaggcactaatccgcgtttcaaactcagcttcattctctattcttgcccatatgtttgtttgtttgtagcctcttcaaactcggataaaaacaaaagtttttggacta

SEQ ID NO: 162517 - DNA, 361 bp, Arabidopsis thaliana columbia
cttaaaacccaaatcttatcactactctaatagaatcttcatcatggcctcagtgacctgagccaccgttgcaatcccatctttcaccggccttaaagcctcaaccatcaaatcatccgccaccgtcagaatccaaactgctgctgttgcatcaccgaagcttacagtgaagtcatctctaaagaacttcggagtcgcggcccgagcggctgcagcttcaattgctttggccggaaacgccatggcaatagaagttctcttgggaggaggggatgggtcgttagcttttattcccaacgacttctctatagctaaaggagagaagattgtgttcaagaacaacgctggatacccacacaat

SEQ ID NO: 162518 - DNA, 425 bp, Arabidopsis thaliana columbia
cgatgaccatgaccgctaccttcttcccggccgtcgccaaggttccctcagccaccggcggacgaaggctctccgtagtcagagcctccacgagcgacaacacacccagcttagaagtcaaggaacagagcagcaccacaatgaggagggacctcatgttcacggctgcagctgcagcggtttgttctttggctaaggtagccatggctgaagaagaagagcccaagcgagggacagaggcggccaagaagaaatacgcacaagtttgtgtcacaatgcctacggccaagatctgccgctactgattcaacaacccaccttctgcatgtctatctctctctttcaatttcggtaaattttctcaattaagtttggtctgtaatcgtatatttgatcatcaatttaccaaaagcccttttatcttt

SEQ ID NO: 162519 - DNA, 429 bp, Arabidopsis thaliana columbia
cgtccgggaccacaacaatggagtttcgtggagatgccaaccagaggattgctaggatttcagctcatctcactcctcagatggaggccaagaactctgtaatcggacgggaaaactgcagagctaaaggtggtaatccaggattcaaagtagcaattcttggagctgcaggtggaattggacaatctttatctttgctgatgaagatgaaccctcttgtctctttacttcatctctacgatgttgtcaatgctcctggcgtcactgctgacgtcagtcatatggacactggagctgttgtccgcgggttcttgggagcgaagcagcttgaggacgcgctaacgggtatggatcttgtgatcataccagccggtataccgaggaaaccagggatgacccgcgatgatctgtttaaaatcaatgctggga

SEQ ID NO: 162520 - DNA, 459 bp, Arabidopsis thaliana columbia
aacaaagagagaaattaacatggcgtcttttgcaaccatcgccgccgtacaaccttctgccgccgtgaaaggacttggaggtagctctcttgccggagctaagctcttcatcaaaccttctcgccaaagcttcaaaaccaaatccaccagagctggtgctgtggtggctaagtatggagacaaaagtgtatactttgatttagaagatttgggtaacacaacaggacaatgggatgtgtatggatctgatgctccttctccttataacccacttcagagcaagttctttgagacatttgctgctcctttcacaaagagaggtttgcttctcaaatttttgattcttggaggaggctctttgcttacatatgttagtgcgaactctaccggcgatgttcttccgattaagagaggtcctcaagagccacctaagctcggtcctcgcggcaagctttaaat

SEQ ID NO: 162521 - DNA, 189 bp, Arabidopsis thaliana columbia
tccgaatcccgggcgaccacgcgtccgaaagaaaacttgctcaacgacgattcatcaattatcatctccgatcttcttccaaatccgtccggtgaaaaagacgatgtacgtaagagcacttccgacgacggatgtgaatcggaacacagagtggttcacatatcctggtgtttggactacttatattct

SEQ ID NO: 162522 - DNA, 355 bp, Arabidopsis thaliana columbia
aattccataaacacaaatagctaaattaattaaacaatcatgaaggccaccatatgcgatggtaccatttatatcgtgggcggtttggcctgaccctccctagctcgtcctgacaaccatgtcgaggactctgaaagccgtctacttcgacctggtcaaacgtaccacatcgtacctgcgaatcccgagacaggaggaggtattttctcgaacagcgaacaaatctgtcctcttgacatctaccagacaaacaatccgcttgacttgcgcctacccatcaaaattaaatcccagttatggtttgtttaggaaatgaatactatcaccatcgcgtttgaggctcctaactggtttt

SEQ ID NO: 162523 - DNA, 368 bp, Arabidopsis thaliana columbia
ctgcggcataccaggtcgaaggtgcgattaatgaaacttgtcgtggaccagccttatgggacatctactgtagaagatatccagagaggtgcaataacgataacggcgatgtggccgttgatttcttccatcgttataaggaagatatccaactaatgaagaatctaaacacagacgcctttagaatgtctatcgcatggccaagaatatttcctcatgggagaaaggagaaaggagtgagtcaagctggtgtgcaattctaccacgacctcatcgacgagctcataaaaaatggtataactccattcgttactggttttcactgggacactccacaagatttagaagatgaatatggcggcttttta

SEQ ID NO: 162524 - DNA, 218 bp, Arabidopsis thaliana columbia
aaaaaaccctaagagtagagactctctcatatcccggcggcgaagatgaagtacagcccaggagtgacctcttctcgcggaaagaacaggaaggctcatttcacagcttcctccagcgagaggcgtgtgataatgagctctcctctctccaccgatcttcgtcagaagtacaatgtcagatccatgccgatccctaaaggccaccaggggtaaaatcg

SEQ ID NO: 162525 - DNA, 130 bp, Arabidopsis thaliana columbia
aaaggtcaaagttccaactttccttgtcttggctactcagaaggtgtggatggatgtgtgatgctctcccggtaccgggagcaggtggaaagacatgtgcgcagatctttgaagaaactggctgtgacac

SEQ ID NO: 162526 - DNA, 228 bp, Arabidopsis thaliana columbia
ttctgtggagccatggcttcggctactttttttgtggccaaaccatcttttcagggtttttctgagttttcaggacttcgaaactcctctgctcttccctttgccaagagatctttttccgatgagttggtttccttcgtcagtttccaaacttttgcaatgagaagcaatggtggaacacggaaaggggtgcccgaggccaaaataaaggtagccatcaatgggttc

SEQ ID NO: 162527 - DNA, 388 bp, Arabidopsis thaliana columbia
gaaatttttgtttaggttcacatggaatatttggaagctggtgcagacattgtggttactgcatgttatcaggctacgatcgcggggtttctttctagaggtttatcaatagaagagagcgagtctttgcttcaaaagagtgtagaattagctgttgaagctcgtgatagattctgggagaaagtgagcaaggtttcaggacatagctataacagagctcttgtagctgcatctattggaagctatggtgcttatcttgctgatggctctgagtacagtggtcactattgtgagaatgtaagtttggataaactaaaagactttcacaggagaagacttcaagtcttagtggaagctgggccttatcttcttgcttttgaaaccatac

SEQ ID NO: 162528 - DNA, 196 bp, Arabidopsis thaliana columbia
aaacaagaagaacaacaacactaagcaaataagaaaagctcaagccgagagagacaatggcatcaacattcacgagctcaagcagtgttcttaccccaacaacattccttggccagactaaagcctcaagctttaacccccttcgtgatgttgtctctctcggatctcccaagtacactatgggaaatgatctttg

SEQ ID NO: 162529 - DNA, 231 bp, Arabidopsis thaliana columbia
  unsure (1)..(231): unsure at all n locations
ctggactgtgaaggtntgctgatttggtctttctcgcatcaagcatgagacgtacctcactacggacggaaggngaacgcgtcaatggatggcaccagaagttcttcgaaatgaggctgctgatgaaaagtctgacgtttacagttttggagtagtactatgggagcttgtgacagagaagatcccatgggaaaatctaaaagctattccaggggatggaagccggggggt

SEQ ID NO: 162530 - DNA, 115 bp, Arabidopsis thaliana columbia
ctagcgagtagaatcaactatcaagcaatggcatcgatgaccatgaccgctaccttcttgccggccgtcgccaaggttccctcagccaccggcggacgaaggctctccgtagtca

SEQ ID NO: 162531 - DNA, 368 bp, Arabidopsis thaliana columbia
  unsure (1)..(368): unsure at all n locations
cccaaaggtttatagacaccttttggtgtgtgtttatgctatctgaagaattcgagtctgcggaataaggatttttttttttgttgtaatcggattttaaaaactgattttgttttagaaattcgaagcattgaaaagcagaagaaaaattgtatgtactaaacgatttcggtgtgggaaatcgtttgggagggtgtgtttggatcttgaataaattacccatttttcttgtcnaaaaaaaaaaaaaaaaaaaaaaaaaaaaaaaaaaaaaaaaaaattttataaaaaaaattaaataatataaataataatattaaataaaatataaaaattaattatataaaaaaaaaaaaggggggccgttttaa

SEQ ID NO: 162532 - DNA, 441 bp, Arabidopsis thaliana columbia
cttttagatgtgattgtggatcagattctcaaagacttttcgcgaagagtctctgatcctgaaagcgcttctctctcgcttgacctcatttcgtcgtcgaaatcagatccttgtgaaaatgccgaaacaggatatggagaagatggagcttcgtaagaacttccgtaatgtttggcataccgatcttacccacagtatccagaacgatactccttattgttgcttcgcgttgtggtgtgccccttgtgcatcatacttgcttcgcaagcgtgcgctttacgatgatatgtcaaggtacgtctgctgtgccggttacatgccttgtagtggtaggtgtggagaagccaaatgtcctcaactttgtcttgccactgaggtcttctgctgctttgcaaactctgtggcctcaactcgctttcttctgcaagatgagttccaaat

SEQ ID NO: 162533 - DNA, 143 bp, Arabidopsis thaliana columbia
  unsure (1)..(143): unsure at all n locations
atcggagagaagaggagatgttctactagactgatatgacagagagtgacacttttcttcagaaggaaggctannncaaggggaatatgccattgaagctatcaagcttggttctactgcaatgggagtaaagacaaaagaag

SEQ ID NO: 162534 - DNA, 400 bp, Arabidopsis thaliana columbia
ttctcctgttgcagcaaataatccattagcatataaatttagctggaaccctgctggagcaatgggagctggtcaaaacccggccaaatacaaaagcaacggcgacataatacatgttgatgggaagaatctctatgattccgcggcaagattccgagtacctaatcttccagcttttgcattggagtgttttccaaatcgtgactccttggtttacggggaacattatggcatcgagagcgaagcaacaacgatatttcgtggaacactcagatatgaaaggtttagtatgataatggcaacactttcgaaacttggattctttgacagtgaagcaaatcaagtactctccactggaaagaggattacgtttggtgctcttttaagtaacattctaaat

SEQ ID NO: 162535 - DNA, 374 bp, Arabidopsis thaliana columbia
tttcaaaggaagaaaaaaaaaaattctttcgatgtccgccaaatcacttagccgaatgcctaataaacaggttgagctagtagattttattgactggtctggtgttgaatgtcttaaccaaagctcaagtcactctttgcccaatgctctcaagcagggatatatataagatgaaggtttaaacttagagagtgatgctgatgaacaacttctcatctatattccttttaaccaagttatcaaactacattcctttgctatcaaaggccctgaagaggaaagttctaaaactgtaaagtttttctcaaacaaagagcacatgtgctttagcaatgtcaatgattttcctccaagcgacaccgctgaactaactg

SEQ ID NO: 162536 - DNA, 113 bp, Arabidopsis thaliana columbia
gtgagaagaaaggtttgacagcagaggatgtgaacgaggcctggagagaagccgctaatggaccgatgaaaggcattttagacgtttgcgatgcgcctcttgtctctgttgac

SEQ ID NO: 162537 - DNA, 137 bp, Arabidopsis thaliana columbia
  unsure (1)..(137): unsure at all n locations
cataaggcaacggnngagaagatgnnnagcattcttcacatttcgagtatgggacttgttatcggcagggaggcgtctaccatgccactttgcaacacgtgcaacaacagagtgatgagacctcaatggtgtgggag

SEQ ID NO: 162538 - DNA, 404 bp, Arabidopsis thaliana columbia
aacaaaaataaaaaaaacatcgcacatgaaattaaaagatttgtagaatcaactaagaaaggggctagcactatgatgagtgcgattgcctcagttcaatggtcttcgagccaccaaaatctctgcagctcctgtacaaggcctggcaagtgttcagcccatgagacgcatgggaaatggagctttgggtgcaaagtgtgacttcatcggttcatcaacaaatctgataatggtaacgtcgacgaccctgatgttgttcgcggggagattcggacttgcgccatcagccaataggaaggcgacagctggacttaggttggaggcacgtgactcaggtctacaaacgggtgacccggccgggttcacgcttgcggacactttggcttgtggcacccgtggtcata

SEQ ID NO: 162539 - DNA, 343 bp, Arabidopsis thaliana columbia
  unsure (1)..(343): unsure at all n locations
cgaaaacccggccgacccacgcataccgcggacgcgtgggcgacaatgtactctacttgttgcatgcgactgaggaggaagccggtcggagaagatatattggtcgtcggggtccttattttacttggggtaaagggcgtgttacgctgctcggggattctatccatgctatgcagccaaatatgggtcaatttttatgcatggccattgaggatagttttcaactagcattggagcttgatgaagcatggaaacagagtgttgaaacgactacacctgttgatgttgnttcctctttgaaaagatttgaggaatctagaagactgagagtcgctattattca

SEQ ID NO: 162540 - DNA, 381 bp, Arabidopsis thaliana columbia
  unsure (1)..(381): unsure at all n locations
aacgggtttttttcccctnctcccaatcttatcttctccgaaaacctttcttctctcaaagtccggttaaaacatatctggcgacgagcaccacttttangccanctaatcccgatcttccaagacctatcctcaatcagccggtaacatccgtaaaggtggtcacatctttatcaaaaaccgtccctgcaaggttgttgaggtttcgacttccaaaactggcaagcacggtcacgccaaatgtcactttgttgctattgatatcttcactgctaagaagcttgaaaatattgttccatcttcccacaattgtgatgttccacatgtgaaccgtgttgattaccaattgattgatatcacttaggatggcttcgtgagcct

SEQ ID NO: 162541 - DNA, 344 bp, Arabidopsis thaliana columbia
gaaatttttgccggttctttcaaaggaaaattgtagatggtattcaaatacgttgaggaagaaggaaggtgacaaagaggaagacgaagaagaaagttgtagaaagtaatggtgttgtgggagttagctctaggaacagcttacttcttggggattaggcggacttaccggctcgcattgaagacccagcgtcggcttgttagccctaaacattcaaggattcgagattttatgcatcggaagacttatcaaatctttgatattgcacttaaggtccacaagaacatacaacagagagacattgttattggtcggaatcttggaaactggattcttcgggggct

SEQ ID NO: 162542 - DNA, 170 bp, Arabidopsis thaliana columbia
cgcccacgcgtgcggtcacaatagatatcatatgcgagacaaataaagacccgagaaacaacgtgcaggatcatcatcatcacccaactgtgaaagacaaaagcctgccacaatctttagcactcattggccatgattacaacatcgatggaaggtgaagaagtgagata

SEQ ID NO: 162543 - DNA, 461 bp, Arabidopsis thaliana columbia
ataaattctaactcactctctttccttctttactctcctggacgctcactccgaaatggacgagatcatgttcgacactctcgacgggcttttacacaagacaaaaggctcaatctctccttcagacattgatattctcgttgtcaacgtctcactcttcgctccatctccttccctaacctcacgagtcatcaacagatacaagatgagagaagacatcaaatcctacaatctctcgggactagggtgtagcgcgagcgttatatcgatagatatcgggcaaaggatgttcgaaactcgtgaaaacgctctcgcactcgtggttagcaccgagacaatgggtcctcactggtactgcggtaaagataggtcaatgatgctctcaaactgtctctttcgtgccggaggaagctctgttctgttaaccaacgcagctaggttcaagaaccaggctttgatga

SEQ ID NO: 162544 - DNA, 191 bp, Arabidopsis thaliana columbia
  unsure (1)..(191): unsure at all n locations
tcccggtcgaccacgcgtacggcataaccgtctgtacatggaagcaagacctcatggaggaaggtctagctgaggctattgatgatgtacgtattggcccaagggatgaccctaanatcagatccaagatcttggctgaggagtttggatgggacaaggatcttgcaaagagatctggggctttgggactg

SEQ ID NO: 162545 - DNA, 167 bp, Arabidopsis thaliana columbia
  unsure (1)..(167): unsure at all n locations
gaaaaataatggctgcttcagtgatgctatcttcggtgacattgaaaccagctggtttgacggtggagaagacggcggctggaggagtaccntcgctcacaagagctcgtccctccttcaaaattgtcgccagtggcgtcaagaagatcaagaccgacaagcccttc

SEQ ID NO: 162546 - DNA, 401 bp, Arabidopsis thaliana columbia
cgcgaccgctgaactcatctttcaatctctcttgatttaatccattcttcttcaagtgccgggttcggcggtcgtatattgtaagtctggctagggataatggctactgtcactactcatgcctcggcctcgattttccgaccttgtacttcaaagccaagattcctcaccggttcttccggtaggttgaaccgcgacttgtcgtttacatcgatcggttcatcggccaaaacgtcgtcgttcaaggttgaagctaagaaaggagaatggttgcccggtttggcatcgcctgattatctcaccggcagtcttgccggtgacaatgggtttgacccgttgggtctagcagaggatccagagaacttgaaatggttcgtccaggcagagctggtcaacggacg

SEQ ID NO: 162547 - DNA, 378 bp, Arabidopsis thaliana columbia
tcggaaaacccgggccgaccgacgcatacgcaactcaccaagctcagttcaaaggccgatttggttgcagaggagaaacttggatcccacgtcgatgttcttgcatcgatcgagtactgaaaaaaatcagcatctatcttttggtttaactcttgttttggtttttatctattcagattttgttttcttccttgtatcactgttgaagtttatcacctcatttcaattttatttatcaattgatacttcaatccaaaaaaaaaaaaaaaaaaaaaaaaaaaaaataaaaaattatgggcggcccttctaaaggatccaaacttacctacccgtgcatgccacgtcattacttttctatagggtcacctaaattcaaat

SEQ ID NO: 162548 - DNA, 376 bp, Arabidopsis thaliana columbia
gaaaacccgggccgaccgacgcaaccggcaaagtaacaaattccataaacacatttatttaaaagaaagaaacaatcatgaaggccagcatatttatcactaccagccggctcgtgaacactttggccgcaccctccctagctcgtcctgacaaccatgtcgaggactctgtaggccggctacttcgtcctggttaaacgtaccacatcgtacctgcgaatcccgagacaggaggaggtattttctcgaacagtgaagaaatctgtcctcttgacatcttccagtcaaacaattcgcttgacttgggcctacccaacaaatttaagtccgagttatggtttgttaaggaaatgaatagtatcaccatcgagtttga

SEQ ID NO: 162549 - DNA, 421 bp, Arabidopsis thaliana columbia
cgtccggttttgaacacacatttaaggtttaacactttctttgtcggccactctataaccctggctgatataatcactgtctgcaacttgaacttgggatttgctactgtcatgaccaagaaatttacctctgaatttcctcatgttgagaggtacttctggactgtggttaaccaaccaaacttcactaaagtgttgggtgatgtcaaacagactgaagctgtcccttctatagcttccaagaaagctgcccagcctgcaaagcccaaagaagagcctaagaaaaaggaagccccagtagcagaggcacctaagcttgctgaagaggaagaggcaccaaagcccaaagccaagaacccttttgacttgctaccaccaagccctatggttctagatgattggaagaggctttactcaaaca

SEQ ID NO: 162550 - DNA, 431 bp, Arabidopsis thaliana columbia
gactggggcactgtcggctctatcgtcttctggaattacgttcacgatggggaggcaaaggtggcgaaggagagaatcgaggcggtggagccggagaagaacttgatcacgtttagggttatagaaggtgatctgatgaaagagtacaagagctttttgatcacgatccaggtgacccctaagcatggagggcctggaagtattgtgcattggcaccttgagtatgagaaaatcagcgacgaggtagctcatcccgaaactctcctccaattctgtgttgaggtctcccaagagatcgacgaacatctcttatccgaggaagaagaggtgaagacaacagagacacttgagacagaggtggagatcaaagcttccgctgagaagtttcatcacatgttcgccgggaaaccacaccatgtttttaaagcaac

SEQ ID NO: 162551 - DNA, 445 bp, Arabidopsis thaliana columbia
agtactttaaccatcactttaaagttcatatctttttttttttttgtttgatccaaatgtgggcaaaattatggatcgcggtggggctcctaacagttacattgatctgcattgtcgtcgccggtgtcggtggccaatctcctatctcttctccgaccaaatctcccaccactccttctgctccaactacttcccctactaaatcccccgccgttacttctcccactacggctcctgcgaaaactccaactgcttcggcttcttcaccggttgagtcaccaaaatctccggctcctgttagcgagtcgtcttcaccaccgacacctgttccagagagctctccttcggttcctgcaccaatggtttcttctccagtgagctctccaccggttccagcaccagtagctgattcttcttcagctccggtagccgctccggttgctga

SEQ ID NO: 162552 - DNA, 234 bp, Arabidopsis thaliana columbia
gggaaaggaaaataagaaaaaagtgagagacatagagatcatttttgctataagaaaccaccattcctcgtgatttatttcatcttttgctattattctttactgcagcggttttcgtttttctttttgtcccttcccaaattgataattctaatctttggggttaattgataaaaattgatcgagaatgctaaaggaggaagcattaatcttgcaagtcattatcaaactgat

SEQ ID NO: 162553 - DNA, 464 bp, Arabidopsis thaliana columbia
  unsure (1)..(464): unsure at all n locations
gaagaaggttgcaatggctgatcccagtgaacaaaaagaaaaggttgtgaaaagaaaagaaagaaaaggttaagaaagaaaaggttgtgaaagaaaaggttgcaaaggcttcttcgagtggacagaagaagaaggacgtcaagaaggaaacgggtctcggactcagtgttaagaaagatgagaacttcggggaatggtattctgaggtttgtaaacaagatatgattgagtactacgatatctctggatgttatattctacggccatggtcaatggccatttgggagattatgcaaattttctttgatgcggaaatcaagaaaatgaaggtcaagaattgctatttccctctgnttgtatctcctggtgtcttaaaaaaggagaaggaccacatcgagggattcgcccctgaggttgcgtgggttacaaagtcaggtaaatctgacttggaagtccaattgcta

SEQ ID NO: 162554 - DNA, 470 bp, Arabidopsis thaliana columbia
aaacagagtaaaaaacttaaagcttaaaatggggaggcagctttatacgacgacggttctctacttagtcaccctactcttcatttgccggacaatctcagccgtccgtttccctccggaacaaccaacaaccgatgatctagatttcatccgtacgagctgcaacacaacgctgtatccagacgtatgttacacgtctctagctggatacgcctccgccgtccaagataatccggcaaggctagctaaactcgcaatcggcgtttctctctcccgcgcaaaatacacggcggcttacctctccaaactctcacgtcgcgctgcctcagctgctgtccacgactgcgtttcgaacgtgggagatgccgtggatcagatgcgtggctccctaaggcagctccgagagatgaaccaccgtcgtcccggagatccggcgtttaggtttcagatgagtaacgtgcagacgtgga

SEQ ID NO: 162555 - DNA, 459 bp, Arabidopsis thaliana columbia
aactaaagagccttttacttgcgccacactctcaccgcaatggccgcctcgacaatggctctctcctctcctgctttgaccggaaagggccttaagctatccccggcggcctccgaagtatttggaaccggccgaatcaccatgcgcaaagcctccaagcccaccggtccatccggcagcccatggtacggatccgaccgagtcaagtacttgggtccattctccggtgagcctccgagctacctcactggagagttccccggtgattacgggtgggacactgccggtctatccgccgatcccgagaccttcgctaggaaccgtgagctagaagttatccacagcagatgggccatgctcggagccctaggctgcgttttccctgagctattggctaggaacggagtgaagttcggagaagcggtttggttcaaggctggttcacagatcttcagcgac

SEQ ID NO: 162556 - DNA, 468 bp, Arabidopsis thaliana columbia
aacaggacgaccctgagtactacactgtacatcattatcaaaggcttaatgctgggtataatggttgcctcatcagagacctccgctttgacaatagagtgggcgatggcgagtttgttgaaccacccaaaagttttggacaaagtaaaattagagatcgacgagataatcggacaagaccgtttgatcgaagaatcagacatagcaaaccttccttacctccaaaacgtagtatccgagacactccggctacatccagcagcgccggttcttgtgccaagatcaacagcagaagacatcaagatcggaggatacgatgtgccacgtgacacaatggtaatggtgaacgcgtgggcgatacatagagatccagatctttggaccgaaccggagaggtttaaccctgagaggttcaacggtggagaaggagaaaaagatgatgttcgtatgctgatagcgtttggaagc

SEQ ID NO: 162557 - DNA, 469 bp, Arabidopsis thaliana columbia
gcagctgcaaaaccctcagtgccagttgtggaggagaagaaggttacattgccaattagaccggccacaaagactgaacaaatgagagaatgcttgaggtcccttaagcaagcccacaaggaggatgatgctaaagtgaagagagcgttccagactctgctgacttacatgggaaatgtcgctaagaatccagatgaggaaaaattccggaaaattagactcaccaaccaaacatttcaggaaagggttggttcgctaagagggggcatagagttcatggagctatgtggatttgagaaaattgaaggaggagagttcttgttcttacctagagacaagatcgattcagccatcataaactcagctggaacagaactcaacttcgccatcaacaaccctttctttggagttctttaaatccatgcctcttcttatgaaactaaaaaaaaattcggatatctctatgaat

SEQ ID NO: 162558 - DNA, 190 bp, Arabidopsis thaliana columbia
ccggattccgggcgcccaccctcccgataaatcagattacaaacaaaaatgggtttgcaaaagcttcctctcattgggctgcttttgctcctgaccatcgtcgcctcttcagcaaatgcagatggacctgtttgcccgccgtcgaacaaactaagccgggcaaggtttcctgaagggtttttatttggca

SEQ ID NO: 162559 - DNA, 444 bp, Arabidopsis thaliana columbia
agaagaagcaaaagagagaaacatctgacccttaatctgacctgaaaacccggaagaatcgagaaaatggggaaagatggtctgagcgacgatcaggtctcgtcgatgaaggaagccttcatgctcttcgacaccgatggcgacggcaaaatcgcaccgtcagagctcgggatcctcatgcgatctctcggcggaaacccgacccaagcccagctgaaatccataatcgcatccgagaatctctcttcaccgtttgatttcaacagattcctcgatctcatggcgaaacatctgaagacggaacctttcgatcgccagctccgtgacgcattcaaagtgctcgataaggaaggtaccgggttcgttgctgtggcggatctgaggcatattctgaccagtatcggagagaagctggagcctaatgagttcgatgagtggatcaag

SEQ ID NO: 162560 - DNA, 464 bp, Arabidopsis thaliana columbia
gcttcacaaggaaaggtcaaaaggtcttttgcgcattgtttggataacaacaatggaggtggtatattcgccattggagaagtcgtgtcgccgaaagtaaagactacacctatgctctctaaatcagctcactatagtgtcaacctcaatgcaattgaagttggtaattcagttttagaactttcttcgaatgcttttgattcgggagatgacaaaggagttattattgatagtggtacaactctggtgtatcttcctgatgctgtttataacccgttactgaatgagatattggcttcacatccagagcttactttgcatacagttcaagagtcgtttacttgtttccattatacagacaaattagatcggttcccaactgtcacttttcagtttgacaagtctgtttcattggcggtttatcctccggaatatctatccaagttcgagaagacacatggtgt

SEQ ID NO: 162561 - DNA, 470 bp, Arabidopsis thaliana columbia
aaaaaacattctcagagcaaatttcaagtttatttcattcaatttcgatccgagtaaccatggagtgtagatcattggatctgacgattatatctgcggaggatctcaaagacgttcaattgatcggtaaacaagacttgtacgccgtcgtttccatcaacggcgacgctaggacgaagcagaagacaaaggttgataaagattgcggcaccaaacctaaatggaagcatcaaatgaagctcaccgtcgatgacgcagcggcgcgtgacaatcgtcttactcttgttttcgagatcgtggcggatcgtcccatcgctggtgataaacctgtcggtgaggttagcgttccggtgaaggagcttttggatcagaataaaggtgacgaggagaaaacggttacttacgccgtgaggttgcctaacgggaaggcgaaaggatctctcaaattctcgttcaaatttggggaaaag

SEQ ID NO: 162562 - DNA, 464 bp, Arabidopsis thaliana columbia
cattcagagctcaataattaactgattcgaaatggcgaagatgtaccggaagttggcactctgcggtggtgagggaggacaagaatgggacgactatgtatatgagggtgtaagaaaagtgtatgtagggcaagatctcaaccgtatcacttacatcaagtttgagtacgtgcaggaagacggcgaagtagtaacaactgaatatgggacaacaaatcagcaccctaaagagtttgtaattcaatacccggacgaacacatcatagcagtggagggaagttaccaccaagtggctctcattgccacagaggtgattacgtccctcgtcttcaagacctcaaagggtagaaagtctccattgtttggtccaaacttacttggaattacgaccggtacaaagtttgtttttgaggatgagggaaagaagatcgtaaggtttcatggacgggcaggtgatgctgtcg

SEQ ID NO: 162563 - DNA, 455 bp, Arabidopsis thaliana columbia
cgttactaccacctaacctctcatccaccttttctcctttaagcatatttcatttcatctccgaaaggaattgtatcgttcctcacacacgcctctcatctcttaaccattcttgtccttttttcagctcaacaagaatggataattgtactggagaaaatcccatggcttctcagttgaacattctccgatgcccgttcttgaggaacatcaatgagcccactaacctctctttctcttcatccttgccttttcccatccctgcaagagctgggaaaggacctatatttgaagatggtcccaattttgatacggcgtttaggcttttccatggccaagatggagttgtccctctctctgacaccgctcgaactgaagcccagaagcctgtgcctgtattccatccacttgctgctaaggcggccactattagtctctcatcctttggatctgga

SEQ ID NO: 162564 - DNA, 232 bp, Arabidopsis thaliana columbia
atcaaatctatcttctaaatttctcatttgatgtctcttcatgcctctggtgaatggggagctttgataagtgttttgcgcggggtctcttgcgatgttgttttttctttgttcttcttgcgctctattttcataaaggaagtttgtttctttctcatcattactcttttttttctaagtttttaatttctttatttcttttggtaaaattgaattatctgtcttttttttt

SEQ ID NO: 162565 - DNA, 394 bp, Arabidopsis thaliana columbia
  unsure (1)..(394): unsure at all n locations
ggaanaccgggccggcccacgcgtacggaagcaaaagacaaatgtatttaaagtttttttttggcatatataatggatacaaatgaaggggatattcttaagggcgggacgggtgaacttanaagggctcactttgaaacggagagcactagattcactattttagatgctccggggcacaagagttacgtacccaatatgattagtggagcatctcaagcggacattggtgtgctggtgatttcagctcgaaaaggtgaattttaaacaggatatgagaggtgtggtcagacacgtgaacatgttcaacttgccaaaacatttggtgtttctaaactgattgtttgtgttaacaagatggttgacccaacttgtaatctgttcgtatgaaatg

SEQ ID NO: 162566 - DNA, 154 bp, Arabidopsis thaliana columbia
accaaattcaatagttggctggaggggaaaaaggaccaaaatttccaaaggagtgagccaagaagggcaaacccaccatgggaaagactacctggatccctcaacaacttctttttttgacatgggtgagctcaaatcctggtctttctacaaa

SEQ ID NO: 162567 - DNA, 400 bp, Arabidopsis thaliana columbia
  unsure (1)..(400): unsure at all n locations
acgcgacctcttgtcaccgtccataggactttacttttacatgagcaccgatcaatccaccgccggcactttaccagacgtcgtgagtgctccagatcgacctgacattgtcaacttcgtccacgcccaaatctccaacaacagccgtcagccttacgcagtctccaaaaaggtctgtcaccaaacctccgccgagtcctggggaaccggaagagccgtgtcacgtatccctcgtgttcctggtggtggaactcaccgtgcctgtcaagcagcgttcggaaacatgtgtcttggtggtcgtatgtttgctccttctatgatctttatactcttgcaccgtcttttcaannncaacatgaatagtctctctattgtattctgtattcctttctactgctgt

SEQ ID NO: 162568 - DNA, 402 bp, Arabidopsis thaliana columbia
cttgctttaccccggtggcagcttcgacccattgggtcttgctaccgacccagaggctttcgcggagttgaaggtgaaggagctcaagaacggaagattggctatgttctctatgtttggattcttcgttcaagccattgtcactggtaagggaccgatagagaaccttgctgaccatttggccgatccagtcaacaacaacgcatgggccttcgcaaccaactttgttcccggaaagtgagccaagttttatcagtttgtattttgcttttctttcagtcttttgaattcgagtgagagacatgaggagaaagagaaggttgtatgtgatggtttgagactttcagatgtaaatttgcaagactttgtatgatttgtcattaatcaaacttaattttttct

SEQ ID NO: 162569 - DNA, 384 bp, Arabidopsis thaliana columbia
gagttacctccggtagcgtgctagcttttttcttttccccgtcttttgggccagaaagtcgagtgttatctcggatatgtgaaaacacacgaacagagaaaaaatgcatcattttcatgtgacagagagagagagagagagagagatatgatttgtggtcttggagttgttatttcacggagacctcattaactttcaaagctcagtttccaagttgtggctccaaaaaaaaaaaaaaatataaaaaaaaaaataataaaaaataataattaaaaaaataaaaaaatttaatatatatttgatataaataatataaataagggggcggccgctttagaggatccaagtttacgtacgcgtgcttgcgtatgtaaatagtttttt

SEQ ID NO: 162570 - DNA, 463 bp, Arabidopsis thaliana columbia
ggaaaccacagcgacggacggacggacggacgataaaacttttgcctctaatttgctcctacaaatctggaatcagccggagcgaatctcgaagcttatgatctcgacttgctgaagaggctgggaatggctggtaaagaggagactgatgtatctgcacaagggtctttaaccagggaggccactgagatatggaggagtgagttggaatctcgccggtttcaggtagatagtttagaagctgaacttgtggatgtcaaggcttaccttgagtttggctcagaagaagatgccagaaaggagttaggagttctttcgggtagggtcagatcgactgcaactatgttgcgttatttgagatcaaaagctagagtcttggccattcctgatgatctagcaaatgtgtcatgcggtgtggaacagattgaagaactgaaaggattgaaccttgttgagaaagatg

SEQ ID NO: 162571 - DNA, 439 bp, Arabidopsis thaliana columbia
gagtggtaaaaccattgagcttgatgatgtcacattttaccagtgtgtgaacctgaccagagtcaagttctagaagactgtggggtgggtaccaccggatggagagtttgaactgatgaagtatcgaataacagagggtgtaaatctgcctttccgtgtattaccaacaattaaagaacttggtcgtacacgtatggaagtaaatgtcaaggtcaaaagtgtgtttggtgctaaaatgtttgcccttggggtcgtggtaaaaatttcagtgccaaaacaaacagccaagaccaatttccaagtgacaactggtcttgctaaatacaatccatcaattgattgcttggtttggaagataagaaaatttccagggcaatcagatgtcacgcttagtgcagaaattgagttgttcttaacaattgtagaagaaaaattttga

SEQ ID NO: 162572 - DNA, 462 bp, Arabidopsis thaliana columbia
gaagaacaatggcttcctctatgctctcttccgctactatggttgcctctccggctcaggcgactatggtcgctcctttcaacggacttaagtcctccgctgccttcccagccacccgcaaggctaacaacgacattacttccatcacaagcaaccggcggaagagttaactgcatgcaggtgtggcctccgattggaaagaagaagtttgagactctctcttaccttcctgaccttaccgattccgaattggctaaggaagttgactaccttatccgcaacaagtggattccttgtgttgaattcgagttggagcacggatttgtgtaccgtgagcacggtaactcacccggatactatgatggacggtactggacaatgtggaagcttcccttgttcggttgcaccgactccgctcaagtgttgaaggaagtggaagagtgcaagaaggagtaccccaat

SEQ ID NO: 162573 - DNA, 415 bp, Arabidopsis thaliana columbia
ggctgcttcagtgatgctatcttcggtgacattgaatccagctggtttcacggtggagaagacggcggctagaggattaccggcgctcacaagagctcgtccctccttcaaaattgtcgccagtggcgtcaagaagatcaagaccgacaagcccttcggaattaacggcagcatgggacttgagggacggcgtcgacgcctccggcagaaagggcaagggatacggtgtttacaagtacgtcgacaagtatggagctaacgtcgatggatacagtcctatttacaacgagaacgagtggtcagcgagtggtgacgtgtacaagggaggagtcaccggattggcaatttgggcggtaactctcgccggaattcttgccggaggtgctcttcttgtgtacaacacaagtgctttggc

SEQ ID NO: 162574 - DNA, 386 bp, Arabidopsis thaliana columbia
  unsure (1)..(386): unsure at all n locations
cgtacaaaacgagcaaaagaagaagataaacaacacttttttttaatggcttcctctatgctctcctggcggcgctttattacatgcccggctgaggccaccatggtcgctccattcaccggcttgaagtcatccgctgcattcccggtcacccgcaagaccaacaaggacatcactttcatctcacgcaacgggggaagagttagctgcatgaaggtgttgccaccaattggaaagaagaagtttgagactctatcttacctnccngaccttagtgacgtcgaattggctaatgaagttgactaccttttccgcatcatgtggattccttgtgttgaattccagttttgtgcactgattagtgttctcttgagcacttaaacact

SEQ ID NO: 162575 - DNA, 467 bp, Arabidopsis thaliana columbia
  unsure (1)..(467): unsure at all n locations
attccgatatgaatgagttcgtcgccgctgtatagaagctcgtgaaagacgtanggatgcggggcggtgtaggttttggcacggcagtcctccaatgggccgcttcaatcttcgctatttatctgttgatattggatcgtaccaactggaaaaccaaaatgttgaccacccttttagtaccatacatctttttcacacttccttcggttatcttccagttctttagcggagactttgggaaatggattgctctcatcgcgatcatagtcaggcttttcttccctaaagaatttccagagtggctagagattccggtagcattgattcttattgtggtggtgtcgccgagccttatagcttggacactaagagaaagctgggttggagcagtcatatgtctaataatagcatgttaccttttccatgaacacattaaagcttcaggtggattcaaaaactcttttact

SEQ ID NO: 162576 - DNA, 401 bp, Arabidopsis thaliana columbia
  unsure (1)..(401): unsure at all n locations
aacgcaagccatccaacaatggtgtgatggttgttatctcttccacgagtccctattttgatttgactagaacgcagcttttatgagagatgcggtgggctggaanagctanatatcaatccccgtcttcatattcgcannagtggccatgtaatgaagatcgtgaggaatataggttcaacatttgaaggaaatgtgatattggctaccttgtgtaccgtgatgaactgtatgtggtctcaggtgacatcaagaccatgtccgttaaaggtagccgcacagggtggatcaacatgagccataactggggagcttcgtaccaagccttttcttctctctacggtcagtctctctcgttccggctcacctcttacaccactcgtcagaccatatacgcttat

SEQ ID NO: 162577 - DNA, 467 bp, Arabidopsis thaliana columbia
atcgagacaaagaagaaaaactaaaaaagagactcccaaagaatcgaatatttattatttcgccccgaagattctatttctgatcatttacacccctaaaaagagtagagctttcgtggagccaccatgtgtggaggagctataatctccgatttcatacctccggcggggtccctccgggtcactaacgagtttatctggccggatctgaaaaacaaaggggaagcttcaaagaagagaatcgaataagcgatccgatttcttcgatcttgacgatgatttcgaagctgatttccagggtttaaggatgactcggctttgactgcgaagacgatgatgatgtcttcgtcaatggtaagcctttcgtcttcaccgcaactactaagcccgtagcttccgctttcgtctccactgtaggttcagcatatgccaagaaaactgtagagtccgctgagcaagctgagaaa

SEQ ID NO: 162578 - DNA, 460 bp, Arabidopsis thaliana columbia
agaagaagaaaaaaaacagagctttacaatttctctctacagagatcgaagatatggaagggaaggaagaagacgttagagttggagctaacaagttcccggagagacaaccaatcggaacatcagctcagagtgacaaggactacaaggaaccaccaccagctccgtttttcgaacctggtgagctttcttcatggtctttttggagagctgggatcgctgagttcatcgctacttttctctttctctacatcactgtcttgactgttatgggagtgaaaaggtcaccgaacatgtgtgcttccgtcggaatccaaggaatcgcttgggctttcggtggtatgatatttgccttagtctactgtaccgctggtatctccggtggacacattaacccagcggttacttttggtctgtttctagcccggaagctgtcgtttactagagctctgtactacat

SEQ ID NO: 162579 - DNA, 460 bp, Arabidopsis thaliana columbia
catcttgcatcagagatcttcaactgcgaaataactcgagtctccgatgaatctgtgaatcgaaatctgttcttcgatgcatgaccattctgaaatatcgagttcgtactaaacgaatcactcaccatcaacctcggagcaaccaacgaaccaccggaattaatcgccgtactatcttcttcatgagcctctcgacgattcgtcatcatctgtagctgaagaacatactcaagatcccaaatcacatccctcatactcgaacatcacccattccgatagattcacttcttcgtgaggaagataaggatctatagctggtctcgcgaacagtacctcgaggaggacgactccgaatgcgtaaacatctgatttctctgttaatttatgtgtttggagatattctggatccaagtaaccgaatgttcctttgatgtttatgctgatattgctttcatcttga

SEQ ID NO: 162580 - DNA, 378 bp, Arabidopsis thaliana columbia
agaagctcgggatctcattattcgcaaaggaattgatgaatgtttccaacaggtttgatgagctactggagaagattcttgttgaacatgaagagaaattgcaggagcatcatcaaactagtgacatgttggatatgttgttggaagcttatggagacgaaaacgcagagtataagatcactagagaccaaatcaagtctttgttcgtggatctgttcagtgcaggcactgaagcctcggcgaacactatacagtggaccatggcggagatcattaagaatcctaagatttgtgagagactgagagaagaaattgattctgttgtagggaaaacaaggttggttcaagagactgatctaccaaatctcctttacttgc

SEQ ID NO: 162581 - DNA, 461 bp, Arabidopsis thaliana columbia
ctacttcttcttcttctctgctaagcctttcctctcgacttgatacttttctccagtaagggtttgcaaagatgaagcttgatactagtgggttcgagacttccatgcctatgattggatttggctcgagcagtgatatgcttgatgagctttcttctgtaccctcgtttgatctaccccgtactaaagagtttgatggatttcagaaaaaagctaaagacatgttgaagcatgcaaaaggaacaaccactctcgcttttatcttcaaaggtggtgttatggtcgctgctgattctcgggctagcatgggaggatatatctcctcacaatctgtgaagaagattattgaaatcaatccttatatgctcggtacaatggctggaggagctgctgattgccaattctggcacagaaatcttgaattaagtgccgtctacatgagctggcaaacaagaggagaa

SEQ ID NO: 162582 - DNA, 327 bp, Arabidopsis thaliana columbia
gtggaaatctgtatgatatcagctcgagggctccgtgtgggaattggaatcggatcctctctactgaaacaccaatggtacgccgttggttggcttgatccagaagacaaatactgcaccacaatcgatgcttcaagagcagacaatcctgtctggagaacaaagtttgctactttgctcgatgattccacgattcaggattcgaagttggctttgcaagtcgaggtttatagcagagaacccttgttcttaaggaagaggcttcatggctctgctactgtttctttgaaggagtttctgactaagtataagcaacaacagagttct

SEQ ID NO: 162583 - DNA, 414 bp, Arabidopsis thaliana columbia
  unsure (1)..(414): unsure at all n locations
gggccgaccaggcgtccgaaacaaagatcttccatggtcgatcgcttttatattttcgcaagaacaaaaacatcaaatgggttggaatcattaatattatgggggagtctatttnancccttgatctggttttttatttggtgaaagttttgaaatggttcttgtattggcattgggggatctccatgtttcccatatagcggctgatctacctcctaagttcaaatcaatgcttgtttctgggaagatttaacacatcatctgcactgtaaatctttgcatcaaagaaatccatgactacttgaagactatctgccctgatttgcgatatatactagggtattctgacgaacattctctatacccttttaataaaaccttgacttattgttcatttcaagctgggatagtgtc

SEQ ID NO: 162584 - DNA, 448 bp, Arabidopsis thaliana columbia
caaaagaagaagagaaacaacaagaagtagtaatggcttcctctatgctctcctccgccgctgtggttacatccccggctcaggccaccatggtcgctccattcaccggcttgaagtcatccgctgcattcccggtcacccgcaagaccaacaaggacatcacttccatcgcaagcaacgggggaagagttagctgcatgaaggtgtggccaccaattggaaagaagaagtttgagactctatcttacctccctgaccttagtgacgtcgaattggctaaggaagttgactaccttctccgcaacaagtggattccttgtgttgaattcgagttagagcacggatttgtgtaccgtgagcacggaaacactcccggatactacgatggacggtactggacaatgtggaagctttcattgttcggatgcaccgactccgctcaagtgtt

SEQ ID NO: 162585 - DNA, 465 bp, Arabidopsis thaliana columbia
ctcatcggttccaaaaccgccgatcgttccgttaaacgactccgtttagatgagttttccggcggaatatcgaaagaagagatcaatttcatccaattgttagaagacgagttggagaaattcaacaatttcttcgttgagaaggaagaagaatatatcatcagactaaaggaatttagagatagaattgcgaaagctaaggattcaatggagaagatgataaaaatcaggaaggagattgttgatttccatggagaaatggttcttcttgagaattacagtgctcttaattacactggattggttaagatactgaagaagtatgacaaaagaactggtgatctcatgcgtttacctttcatccagaaagttcttcagcaacctttttacactactgacttattgtcaagcttgtcaaggaatctgaggcaatgcttgatcagatctttcctgctaacgaaactg

SEQ ID NO: 162586 - DNA, 420 bp, Arabidopsis thaliana columbia
aagaagaacaacaacactaagcaaaaaagaattgctcaagccgagagagacaatggcagtcaagattcacgagctcaagcagtggtcttaccccaacaacattccttggccagactaaagcctcaagctttaacccccttcgtgatgttgtctctctcggatctcccaagtacactatgggaaatgatctttggtatggacctgacagagtgaagtacttaggacccttttccgttcaaactccgtcttacctcaccggagaattccctggcgattatggttgggacaccgccggtttatccgcagaccctgaagcctttgccaaaaacagagctcttgaggtgatccatgggagatgggcaatgttgtgagcttttggttgcataacctctgaagttcttcaaatagtgggtcgtgtgg

SEQ ID NO: 162587 - DNA, 455 bp, Arabidopsis thaliana columbia
cgtgcttatgaccaggttgtccatgatgttgatttgcaaaaattaccggtgagatttgcaatggatagagctggactcgttggagctgatggtccgacacattgtggagctttcgatgtgacatttatggcttgtcttcctaacatgatagtgatggctccatcagatgaagcagatctctttaacatggttgcaactgctgttgcgattgatgatcgtccttcttgtttccgttaccctagaggtaacggtattggagttgcattacctcccggaaacaaaggtgttccaattgagattgggaaaggtagaattttaaaggaaggagagagagttgcgttgttgggttatggctcagcagttcagagctgtttaggagcggctgtaatgctcgaagaacgcggattaaacgtaactgtagcggatgcacggttttgcaagccattggaccgtgc

SEQ ID NO: 162588 - DNA, 287 bp, Arabidopsis thaliana columbia
gaactaagcatcaacaacatgaacaattagttcgaagtggaagaagaagcgcatgaggagattaaagaggaagcgtcgagggatgagacagcgatccaagtagactccaagttcctcccccaaataactatcggctctctgtgattctctttttagttttgtcttgaaactttttctttcttctagcaaaccttttttattttgattatggaagttttgaacattctgtgatgtatgtaaaacttgctcttgtgctcttatctatctaatcacagatcctttatcta

SEQ ID NO: 162589 - DNA, 460 bp, Arabidopsis thaliana columbia
ctccaaactctcatctctctctctttgcctcttcctcatttgcattatctatctcccccaacattctctcgcatgcggctcttgcaacccacggaagggcggaaagcactcccctaaagcccctaagctaccagttcctccggtgaccgtccctaagctaccagttcctccggtgaccgtccctaagctaccagtccctccggtgaccgtccctaagctacccgttcctcctgtgaccatccctaagctacccgttccaccagtgactgtacctaagctacccgttcctcctgtgaccgtccccaagctacccgttcctccagtgaccgtccccaagctacccgttccttcagtgacagtccctaagctacccgttcccccggtaactgtacctaagctacccgttcctacagtgaccgttcctaagctacctccttcctccgattcagggctacccata

SEQ ID NO: 162590 - DNA, 258 bp, Arabidopsis thaliana columbia
atcaagtgaaatggaagcttacgtcgtcgttttggcgttaagagtatggtttaccagaagtactagaataaaatacggctatatatcttagctgatattaccatgtatttgtttttgtctcaatgctttgtcttattttcatatcatatgttgtattgatgtgctaaaactatgataatagtaccttattagtcatcttctttctagatatctcctccaacgcatacgaacgtaataataatatgtgaagagttttat

SEQ ID NO: 162591 - DNA, 179 bp, Arabidopsis thaliana columbia
cactatcaaaactctgaatttcgatttcaatttagttacgcgtgctgttacgcgccaccgcgaatgtctttggaattccgaaattgagacgaccaatcggagcgatccaccgtcaattcagcactgtatcgtcttcctcgttctcggttaaaccaatcggaggaatcggagagggagcg

SEQ ID NO: 162592 - DNA, 261 bp, Arabidopsis thaliana columbia
  unsure (1)..(261): unsure at all n locations
ggccgaccaggcgaccgcaaaatcaatcctctaatgtatttctncaatttatgtcttcttctacttcaccaacccaatggctggtctttaactatcgtctggggcgcaaacccaacttctgatccgcatcgatttccatggcagccaacaccatttctctttccaacgtctccgccttcaagaatctcaactcctttcaaagccgtgcctatattgctccaccaactattttttgccctgcggcttttgcaaagtctatac

SEQ ID NO: 162593 - DNA, 465 bp, Arabidopsis thaliana columbia
cccacttcaaatgtcactgcagaatcactggtgttagtggtggtgggttacatagtaagagctctctgctactagtagaagaagaagaagaagattgattataaagacttaagatggctgcggcgcattttagtaaggagagggtcttcagagggtttctggtttggttctgcttttggggactgatgtctctaacatgcgctgggagactcagtgtttcaaggcagaattttgaagtgcacaaacacttgaatcgattgaataaaccagccgttaagagcattcagagtccagatggtgacataatagactgtgttcacatatcgaagcaaccagcttttgatcaccctttcctcaaagatcacaagattcagatgggacctagttacactccagaatcgctgtttggtgagagcaaagtgtctgagaaaccaaaagagagtgtcaatcctattacacagttat

SEQ ID NO: 162594 - DNA, 467 bp, Arabidopsis thaliana columbia
gcagatgcttacagtcatgatgaacctatcatcagcaatgcatcttgcactaccaactgtcttgctccctttgtcaaagttcttgaccagaaattcggtatcataaagggtacaatgacgactactcactcttacaccggtgaccagaggttgctagacgcgagtcaccgtgatctaaggagagcaagagcagctgctttgaacattgttcctacttctacaggagcagctaaagctgtggctcttgtgctccctaacctcaaaggaaaactcaacgggatcgctctccgtgtaccaacaccaaacgtatcagtggttgatctcgttgtgcaggtctcaaagaagacatttgctgaggaagtcaacgctgctttcagagattctgcagagaaagagcttaaaggtatactcgatgtctgcgatgagccactagtgtccgttgatttcagatgctcagatttttcacg

SEQ ID NO: 162595 - DNA, 435 bp, Arabidopsis thaliana columbia
caaccactgcgtctatccttgctcgggagataatcaaacatggattgttgagcgtcacttctggtgcgaatcccgtttcactcaagaggggaattgataagactgttcaaggtctgatcgaagagcttcagaagaaagctaggcccgtgaaaggtcgtgatgacatcagagctgtggcttctatctctgctggaaatgatgaccttatagggtcaatgattgctgatgccatcgacaaagttggacctgatggtgttttgtccattgaatcttcatcttcttttgagaccacggtcgaagttgaagaagggatggagattgacagaggttacatctcgcctcagtttgttacaaaccctgagaaactactagctgagtttgagaatgctagggtattgatcactgatcagaagatcactgcgatcaaagacatta

SEQ ID NO: 162596 - DNA, 429 bp, Arabidopsis thaliana columbia
  unsure (1)..(429): unsure at all n locations
ggcgaaggaggtgctgattgccgtccgattcaaccgggtgccacgtgttataatcctgaatcgttagaagctcacgcttcctacgcgttcaacagttactatcagaagaacgcacgtggagttggcacgtgtaattttggtggtgcagcgtacgtggtctcgcaacctcctaagtatgggaaatgcgagtttccaacagggcattgaaatggatatagagaagaagaggatcgtgcggatttatttacgttatttattttgatacattgttcttttgtcattcgagtatatgatttgcgtatatttatttttattattgtatatttggttggtttcatcggataaatagtcagattttctttcccccttnaaaaaaaaaaaatatttcttattttatatttttttttcattttatatatatatttcttt

SEQ ID NO: 162597 - DNA, 116 bp, Arabidopsis thaliana columbia
aacgagcaaaagaagaagagaaacaacaagaagtagttatggcttcctctatgctctcctccgccggtgtggttacatacccggctcaggccaccatggtcgcttcattcaccggc

SEQ ID NO: 162598 - DNA, 365 bp, Arabidopsis thaliana columbia
atcagagctctattcctcatcctacagggaagcaaattcccaatcagattcacaatgtggtcgtcaacaccatggcggttagggcaaacccttcgaggaagtcgactagcaacggtgtgagccagagtaatggtgtgaagcaacctagcagtgtacagcagcaccagaattcgactttgagcgcatccaagactcgagagctggaagactcaaccaccaagtgtcagattaaggcgattgccgcgagagcgctttggaagcttgcgaaaggcaattccaccatctgcaaaagcatcacagagtccagagctcttctctgcttcgctgttctgattgagaaaggcgacgaggaggtcagatacaac

SEQ ID NO: 162599 - DNA, 395 bp, Arabidopsis thaliana columbia
gaatattggaatcttctggatgcgcgaccgctttgatttttctgctcttcatccatggagcggactcattctatctcccaggtgttgctcctcacgatttctagaagggtgatgagctgaaggtgaaagtgaataaattaactttcataaagactcagcttccatactcgtattactcccttcctttttgtcgccctagcaagattgtggacagtactgagaatcttggagaagtgcttctgggtgacccgattgagaatgccccatactcgtttaaaatgcgggaggcacaaatgtgcaatattctcggccgggtcactcttgatgccaagacagctaaagcgtttaaagaaaagatcgatgatgagtaccgcgtcaacatgatcctctacaac

SEQ ID NO: 162600 - DNA, 448 bp, Arabidopsis thaliana columbia
aacatgagagagacggcgaaaagcgctgtcgtattagatgatgatgatcttgatacaggcatcgcagtcattatatcaagagcgggtcgctactcaagattgcaggatcgtagatgaaccgaacgtgcaacgtggtacaataagctaccatactgactgatatcccatactccaattactgcgttcctgtttgttcgcctagcaggattgtggacagtgctgataacatgggagaagtgcttattgtgaccgtattgagaatgccccatactcgtagaaaatgcgggaggcacaaatgtgcaatattctcggacgggtcactcttgatgccaagacagctaaagcgtttaacgaaaagatcgatgatgagtaccgggtcaacatgatcctcgacaaccttcctctggttgttccaattgaaagagtcgaccaggcgtctccctctgtt

SEQ ID NO: 162601 - DNA, 431 bp, Arabidopsis thaliana columbia
gcttttgaatttcaaaccttcacataaaaaatatacttttgaatccgtgtttcattcatcgaatctttttccgataactatggctgaggaaatcaagaatgttcctgaacaggaggtgccaaaggtagcaacagaggaatcatcggcagaggttacagatcgtggattgttcgatttcttgggaaagaagaaagacgaaacaaaaccagaggagactccgatcgcttcagagtttgagcagaaggttcatatttcagagccggagccagaggttaaacacgaaagtcttcttgaaaagcttcaccgaagcgacagttcttctagctcctcaagtgaggaagaaggttcagatggtgagaagaggaagaagaagaaggagaagaagaagccaactactgaagttgaggtaaaggaggaagagaagaaagggt

SEQ ID NO: 162602 - DNA, 455 bp, Arabidopsis thaliana columbia
cggacgcgtgggatttaatttcaattttaatttcccaagtgtcctatacaaattgaatcaaaagaaaaatcagcatatgccctaaaagcttaaatggtataaagggtgggtcctatacaaacctcccatgaactgatctcttccttcttctccttcttcttctcttctcactaattttccttcagaaaacttcaacgatcttgtgatattgatatctaaacaagttcttgatctaagctacgaaagttgatctgctcagaattcataataagagttgatcatttgtgggctttgagggtgtgtatacatacatattaattatatatatgtatatgtatgaggaggaaaggaacaatatcaataataatcaagaaggactgagattggagatggcctttcctcaacatggcttcatgtttcagcaactccatgaagacaatgctcataacttacct

SEQ ID NO: 162603 - DNA, 461 bp, Arabidopsis thaliana columbia
tgcctcggcctcgattttccgaccttgtacttcaaagccaagattcctcaccggttcttccggtaggttgaaccgcgacttgtcgtttacatcgatcggttcatcggccaaaacgtcgtcgttcaaggttgaagctaagaaaggagaatggttgcccggtttggcatcgcctgattatctcaccggcagtcttgccggtgacaatgggtttgacccgttgggtctagcagaggatccagagaacttgaaatggttcgtccaggcagagctggtcaacggacgatgggctatgctcggtgtcgctgggatgcttttgccggaagttttcaccaagatcggaatcataaatgttcctgagtggtacgatgctgggaaagagcagttttttgcatcgtcggcgacattggtcgtgatcgagttcatattgtttcattacgttgagatcagacggtggcaagaca

SEQ ID NO: 162604 - DNA, 285 bp, Arabidopsis thaliana columbia
ccgggccggcccacgcgtacgatttaaagtagccataactgttcgattattgtatggaagaagcaactcaagtaacgagttggtgatgttcctgaagtgaggggggatgttgataaccttaagacagctgatatttccgtcaaggctgtgaatggagaattgccaaaggaggagaaagaagaggaagatgttgaattcataaaagttgagaatgaagcttttgatgccaaggatgatgcggataaagcagatcatgttcctgttgaagagcaaaaggaagttatt

SEQ ID NO: 162605 - DNA, 457 bp, Arabidopsis thaliana columbia
gaatttatggcttaagatagtcttcaaagctacatacaaaactatattacaatttcgaagctgcccatggccatggcgttacagattatagcttcttcttcttcatcaccaacgattacaaaatctcaccttttctcttatcctcctctgcaatctcgttataaagcttcgaaacctaacctctcctcatggttttctcttctgggttcttctcgtttctctccttacattggtttaaagcatttgggcatctcaatctcgccgaaatcttcaaacccagagaagaagagaagatgtaagagtatgatgattcgtgcgtctctgtttggtgttggagcacctgaggctttggttattggtgttgttgctttgttagtctttggtcctaaaggtcttgcttgggtagctcggaatcttggaaaaactctgcgtacatttcagccaacgattagagagc

SEQ ID NO: 162606 - DNA, 320 bp, Arabidopsis thaliana columbia
acgctcgtccacatctttctcctttggtggcaattacaacgacagatagagagaaacgatggccgcgaactcgcttatgagctggggcataaccaccgtgtacccttcgcttctctcttcttccaagtctaaattcgtatccgccggagttccactcccaaacgccgggaatgttggtcgtatcagaatggctgctcactggatgcctggcgagccacgaccagcttaccttgacggttctgctcctggtgactttgggtttgacccacttggacttgcagaagattcatcgaaccttgagagatacaaagagtcatagc

SEQ ID NO: 162607 - DNA, 465 bp, Arabidopsis thaliana columbia
  unsure (1)..(465): unsure at all n locations
ctcttgtctgacttgaacccaattcaggtcatctttgacgccattgtcaacagtggtccacgtgaagatgctaccagaattggatctgctggtgttgttaggagacaagctgttgatatctctcctctaagacgtgttaaccaggctatcttcttgattaccactggtgctcgtgaagctgctttcagaaacatcaagactatagctgagtgccttgctgatgaattgatcaacgcagccaagggctcttccaacagctatgccatcaagaagaaggatgagattgaaagagttgccaaggctaatcgttaaggattttccctttgccctgtgcgttacaatctcgtatcaatgagtttaatgttttatcttcatttagattgaaatatgtatctcagatgtttgctctnttggtttatgaagtttatttcgtctgaactactttgaatagataaaattttgatg

SEQ ID NO: 162608 - DNA, 452 bp, Arabidopsis thaliana columbia
aatcagctgatgaggaaactgaaaccacctttaccgaggaagaaaaggaagaagatgctgaggaggaagatggtgagaaaaagcagaaaaccaagaaggtgaaagaaacagtttatgaatgggagcttctgaatgatgttaaggctatatggctgagaagtccaaaggaggtgacagaggaagagtacactaaattctaccactctctctcaaaggattttaccgacgagaagccaatggcttggagtcactttaatgctgaaggtgatgttgaattcaaggctgtgttgtatgttcctccgaaagctccccatgatctatacgagagctattacaacagcaacaaggcgaacttgaagctatatgtcaggagggtgttcatctcagatgaatttgatgagcttctgcctaagtatttgagtttccttgagggtcttgttgactctgacaca

SEQ ID NO: 162609 - DNA, 465 bp, Arabidopsis thaliana columbia
ccatctctattttcttcctttcccctaagtcttggttcttcttctctctaatacgagaagaaaaaggcgaaaacctcgccaatccgattacgcgaaaaatcaaaggtttttggatatggcgtcgaagcggatcttgaaggaattgaaggatctccagaaggatccacctacatcatgtagcgcaggtcctgttgctgaagacatgtttcactggcaggcaacgataatgggtccttcagagagtccttatgctggaggtgttttccttgtaaccatccatttccctccggattacccattcaagcctcctaaggtggcctttaggaccaaggtgttccatcccaacattaacagcaacggtagcatttgcctcgacatcttgaaggagcagtggagtcctgcgctcaccattttcaaggtgctgctatcgatctgttctttgtaaccgatccaaacccggatgat

SEQ ID NO: 162610 - DNA, 443 bp, Arabidopsis thaliana columbia
aacttactgtttcagtttggatctgatttttttttggatcaggagaacggtgttatccccggaatcaaagtggacaagggtttggttgatctagcagggaccaacggcgagaccactactcaaggtctagactcgcttggtgcacggtgtcagcagtattacgaggcaggagcccggtttgctaaatggcgtgcattcttcaagattggggccaccgagccaagcgttctctccatccaagaggacgccagggtgctagcccgctatgccatcatctgccaggagaatggacttgtcccgatcgtcgagccagaggtgctgacaggtgggagccacgacatcaagaaatgtgcggcggtgactgagacggttcttgctgccgtgttcaaggccttgaactaccaccatgtccttcttgaaggcactctgcttaaacctaacat

SEQ ID NO: 162611 - DNA, 385 bp, Arabidopsis thaliana columbia
caaacaacaacaaagagagaaattaacatggcttcttttgcaaccatcgccgccgtacaaccgtctgccgccgtgaaaggacggggaggtagctctcttgccggagctaagctcttcatcaaaccttctcgccaaagcttcaaaaccaaatccaccagagctggtgctgtggtggctaagtatggagacaaaagtgtatactttgatttagaagatttgggtaacacaacaggacaatgggatgtgtatggatctgatgctccttctccttataacccacttcagagcaagttctttgagacatttgctgctcctttcacaaagagaggtttgcttctcaaatttttgattcttggaggaggctctttgcttacatatgttagtg

SEQ ID NO: 162612 - DNA, 213 bp, Arabidopsis thaliana columbia
  unsure (1)..(213): unsure at all n locations
ggaannccgggccgcccacgcgtacgcacttcgtctctctctcgcgctcccaatttttccgccggcgggaaaaccatgtcncacttcgtaatgttcaagacacaccggtgtcaacnacacctactcacttctcgtccttaacatcaccttccgtacgactgctgatgatctctatcctctattcgcaaagtatgtataggtcgctgatgtgta

SEQ ID NO: 162613 - DNA, 213 bp, Arabidopsis thaliana columbia
aaggcattttagacgtttgcgatgcgcctcttgtctctgttgacttcaggtgctctgatgtctctaccaccattgactcgtccctcactatggttatgggtgatgatatggtcaaggtggttgcttggtatgataacgagtggggttacagccaaagagtggtggatttggctcacctagtggctagcaagtggccgggagcgtgagcttgtt

SEQ ID NO: 162614 - DNA, 435 bp, Arabidopsis thaliana columbia
aaacgagcaaaagaagaagagaaacaacaagaagtagtaatggcttcctctatgctgtcctccgccgctgtggttacatccccggctcaggccaccatggtcgctccattcaccggcttgaagtcatccgctgcattcccggtcacccgcaagaccaacaaggacatcacttccatcgcaagcaacgggggaagagttagctgcatgaaggtgtggccaccaattggaaagaagaagtttgagactctatcttacctccctgaccttagtgacgtcgaattggctaaggaagttgactaccttctccgcaacaagtggattccttgtgttgaattcgagttagagcacggatttgtgtaccgtgagcacggaaacactcccggatactacgatggacggtactggacaatgtggaagcttccatttgtcggatgc

SEQ ID NO: 162615 - DNA, 362 bp, Arabidopsis thaliana columbia
actcaagctcctggttcggaactatttacttttctatgcgattggttgtttataagttgatttcagagttcggattcttgtactcattagatgtccatataggtcttgtttactggtttaattggggttttatcaaggaaataaagagtgtttagggtttgaatttccgtgtttgcagatggcgagcaatatcatcttgttcgaggatatcttcgtggtcgatcagttagaccctgatggcaaaaagttcgataaagttactcgcgttcaagctacgagccacaactttggaaatgtctatgcatttagatgttaatacagaggtttatccattggctgtagtgataagtcacacttgcgtt

SEQ ID NO: 162616 - DNA, 306 bp, Arabidopsis thaliana columbia
ccgtggagagcagcaatcagtagccatggctttgcagactgagaaagcttttcttaagcaacgccaaggtcttccttagctcgagagatatctgggaaaggaaagagacctggtaaaggtggaaaccgtttctggaagaacattggtttgggtttcaagactcctcgtgaagccattgatggagcttacattgacagtaaatgtccattcactggaaccgtttctatcaaaggacgtatcttagctggtacttgccacagtgccaagatgcagagaaccatcattgttcgtaggaattaccttcac

SEQ ID NO: 162617 - DNA, 461 bp, Arabidopsis thaliana columbia
ctagttacatatcttcaacaaagtgaatctcatgaggatattaccgaaaagcggaggaggtgctctttgcctcctctttgtgtttgctctttgttcggtggctcattcccttagctgtgacgtcaaggttgttggcgatgtcgaagtcattggctactcagaaatcagcaaaatcaagatccccaatgcattctcaggacttcgagttacgatagaatgcaaggcggccgattcaaaaggccattttgtaacgaggggaagcggagaagtggacgaaacaggaaagtttcatcttaatattcctcatgacattgtcggtgatgacggaactctaaaagaagcttgctatgctcatcttcaaagtgccttcggcaacccttgtccggcccacgatggccttgaggccttcaagatcgtgtttctatcgaaatccggccaaaaccacgttttgggtctcaaaa

SEQ ID NO: 162618 - DNA, 453 bp, Arabidopsis thaliana columbia
acgaatactcgtaagatttatcaacacaagcaaaaaatatggcccaaaagctagaagcaaagggtggtgagatgggagatgtatgggatgatggtgtttacgaaaatgttagaaaggtatatgtagggcaagcacaatacggtatagccttcgtcaagtttgagtatgtcaatggttctcaagtggttgttggagatgaacatggaaagaagacagagctaggagttgaagagtttgagattgatgcggatgactacatcgtatacgtggaaggttaccgtgagaaagttaacgatatgacgtcagaaatgatcacgtttctttctattaagacttttaaaggcaaaacctctcatcctatcgaaaaaagacctggggttaagtttgtgctacatggtggaaaaattcgtgggtttcacggacgttcaacagatgttttacactcccttgggg

SEQ ID NO: 162619 - DNA, 436 bp, Arabidopsis thaliana columbia
ccgcagcactgaacatagtgcctaccagcacaggagcagccaaggcggtgtcattagtgttgccggagctgaagggtaaacttaacggcattgcactccgtgtgccaacaccaaacgtctcagtggttgaccttgttataaacgttgagaagaaaggtttgacagcagaggatgtgaacgaggcctttagaaaagccgctaatggaccgatgaaaggcattttagacgtttgcgatgcgcctcttgtctctgttgacttcaggtgctctgatgtctctaccaccattgactcgtccctcactatggttatgggtgatgatatggtcaaggtggttgcttggtatgataacgagtggggttacagccaaagagtggtggatttggctcacctagtggctagcaagtggccgggagcggaagctgttggaagtggaga

SEQ ID NO: 162620 - DNA, 255 bp, Arabidopsis thaliana columbia
cgcgtacgactaagctgctgcaatcattacccattacatcctatgccgaggagtgtttataaggtggtttcagtgttcggattctgtgggtcattagatgtccatataggtcttggttactggtttaattggggttttatcaaggaaataaagagtggttagggtttgcattttcgtgtttgcagatggcgagcgatatcatcattgttgaggatatctttccggtcgatcagttagaccctgatggcaaaaagt

SEQ ID NO: 162621 - DNA, 276 bp, Arabidopsis thaliana columbia
gtggcatctatcagccagtcacgggtaacccatcaccggattacatgtccatttcctccgccgggggaaaaggcagattcgttgagtgtgtgttgttcttcttcttgctttgcatcatcaagcttcggttgtaaaagcttctccactagatctcgtcggctttgtacttttactcggttgatgacgtgatatagcccccaaatttaatttaattagttttgtgttggtgttttggtcggaggatgatttaggagacataccatctttgttgtgccg

SEQ ID NO: 162622 - DNA, 465 bp, Arabidopsis thaliana columbia
ctctctatctctttctaaaacacaaccatgactgtttcttcatctccatgggctctcagggctctctttctaatggttggttcaacaatggtaatggctattcctccacgcaaggccattgatgtaccatttggtcgtaactacgtcccaacttgggcttttgaccaccagaaacagttcaatggcggttccgaacttcagcttatcctcgacaaatacactggcacaggatttcaatcaaaggggtcatatttgtttggacattttagtatgcacataaagcttccagctggtgacacagccggagttgtcacagctttctatctatcatctaccaacaatgagcatgacgagatagactttgagttccttggaaacagaacaggacaaccagctatattacagacaaatgtattcacaggaggaaagggaaacagagaacaacgaatctatctctggtttgat

SEQ ID NO: 162623 - DNA, 357 bp, Arabidopsis thaliana columbia
  unsure (1)..(357): unsure at all n locations
ggaaaacccgggccgacccacacgtacgngcttttctccgtcattaattacacctttctttttagctcccaatcttaagtacaggagtgggcttaattcaagagggtgggagtcataatacttaaccatgctctcaagagcatgtacaatgctgagaaactaggcaagacgcaggtcatgatcaggccttcctccaaagtgattatcaagtttctgattgtcatgcagaagcacggttacattggtgagtttgagtctgtcgatgaccacatatcttgcaagatcttcgtcgaattgaacggaatgttgaacatgtttgttgttatcagcccactatttgatgtttgtttcaatgaa

SEQ ID NO: 162624 - DNA, 336 bp, Arabidopsis thaliana columbia
aaagggcccattccaggccttgccaggaccaaaggttcattgccttgctcaagtccaaaggttgggttattcttgggccagaggtcgaagatttcatttgggaaagcactttttacgttcgtaacctccttaaatccaatctaaatgccatttaaaatgtgtctgttgaatccaggccggccatgaaagactttggtaggagactggggaatcttgctggggatttgttggatctactgggggggaatttagggttagggaaggggtttttgaagaaggggtttaatggaacaaatggcccaacctttggaccaaagggtggcatttttccccctt

SEQ ID NO: 162625 - DNA, 457 bp, Arabidopsis thaliana columbia
gaggtccgggcccggatttccgggttggcccacagccgtccggaggaggttaaggcaaaccacttccaaccgcattcaccttttttatggcctcctttttaaatctaatggaattcttgaccttttaagagcctaaccgccgggggatctccaggtcccttttaaaggggggggtttggttggttaaaagggatttaaacttacaacaccatccttggatggagggggtcccaaatctgcaggttttaaagtggttgcaaggtttaaaatttagggattttgggggggagaccttggttgggttgcattactacgggttcctaacaaatgaaggtttggcctttttaaggacttaccttattttcccatctgggatggttcctgctactttgaagaagcaccagaggcctttgggtcgaccttttgaaggtgtgggggaccgtcccgggggccctcc

SEQ ID NO: 162626 - DNA, 399 bp, Arabidopsis thaliana columbia
tccgtttttggccaaatctggtaaccactgcctgttaactcgaagaaggttccaggcgtaaaattggtgggcgactctgacctggtttggacggcttttgctgccaagacagtccgtttctgccggaatcctggggttgggaatattgctggggggtttccatggaatgaccattctggggagggccaggctgtacctgggcatccaacaaataaatacttgggctgggatttttttgatggtccatggggcttttacaatctggcctttggctcatgccttggccaggtttcagttgtttcaaggaatgtagattccccggctgctggttttaatcccgagggtctaattctcggaaccggtccttctaaatctgttgttaaaatttgggccgttaaa

SEQ ID NO: 162627 - DNA, 351 bp, Arabidopsis thaliana columbia
acagccgtccgttctaatctcctttccttcaatggaggttaattaaaggattccgatattggcaccataaggtgtccagcattcttccttggcgggccaaccggttttaaagccctccaacgaactcttccgaagggttgttgtatccgttggtggcctgttgaccatccgtgttccctgaaagtttactcctaaaagcatttgttccggaccaacccgtccaaagttcttaggacctttttcggggatatcaccgtcctacctaaccgtggatttcccctggtacctccgattgtgccaccatttgacttttggttgacccggtacacatcgtctaaaaccgggggcttg

SEQ ID NO: 162628 - DNA, 372 bp, Arabidopsis thaliana columbia
cggggccgaccacacccgtccgaacccaaccactaatttttcacacatttggggagaaaaaaccagagcaggttttttagagacctaagggcgatggcggcctccggggctgtcctaaggggcctgggttcttcgttcctaaccggaggcaggagaggtgccaccgatttggcaggcggcgtaggccctggagctaaaagggtgggcaggaaacctttaatggtcgttgttgcggttgttaagcctaagaaatctggatcccctgccgttaagggggggggcacctcccttgcccctgaagggctcgtgggctcgttaccagaagatttcggtttcaccccatgggttttggggaaggacccggcttttttg

SEQ ID NO: 162629 - DNA, 439 bp, Arabidopsis thaliana columbia
tccgggtccggatttccgggttggcccacacgcgtccgggtgagggaagggttccgctggcagttttaaacgtcctgggaggagtaaaagggtccccgtttgggcttgacccgaaccgggtggttccatttttgaccgaaaccgcttaaccgcccaatgccggtccaggcatggtaaactaaaaggccttaggatggcctgtttcgaagctttgagttaggtttgaagaaggggggattgggaggaatcctttaagggaatttatgagggggccaagtggggttattgattggattttgaaccaaccatgtgggatcatttaaataactcctttaaggggttccatgggtggtgggtcttttagacgattccccactctttttatttaataaattggctagggcccaaaaattttaaggtattattttttggagttatt

SEQ ID NO: 162630 - DNA, 476 bp, Arabidopsis thaliana columbia
ggtccgccggcggtccgggtccggatttccgggttcgcccacacccgtccgcgggtcatcaccggttccaggaggggggaggccttcaattcctccaatctttcggacctggggtgtaccccgggcgttttttcgttggatttcggccaagggatgttcgaacctcgggaaaccgctctggccctcgtggttggcaccgggccattgggtcctaactggtcctgcggtaaagatgggtcaaggatgctctaaaacggccttttccgggccgggggaggctttgttctgttacccaccgcagctgggttcaagacccaggctttgttgaagctcgggccaggggtccggcctcatgttggctcaaacgacagggcctacttgggctgcttccaaatgggggccagggttggtcatccaggcttttttttaaccaattccctaaaaaaggccgcagttggggccctaaccaagaacct

SEQ ID NO: 162631 - DNA, 323 bp, Arabidopsis thaliana columbia
gaattcccgggccggccacacccttccttaaaaaacaagtttttaaaaaccatcctttttttaaccaaaccaaacctgtccaaaggacgggattaaaggccttggtgggggtggttaataaaattggcctttttgttttggggtcaaagtgttctaaggaagttgttcctgccattaaaggaccttttttctttcctaacctttcatggttcccgggaaggaaagttaattggggaattaaaattggaaagccccccattgtcctcttgaaggttactggtaaatgtggttcttgtcctgtaaaaatggtccctgttccaaaa

SEQ ID NO: 162632 - DNA, 363 bp, Arabidopsis thaliana columbia
gaggagaaggagtgggcctttctgcaccacccatggggcctccttttcaatagctttaactagagggttttggccatagaggaggacccaccttccgttttttcgccacctttgccggtttaaaccccagggccgacccgccggattttcctttcctttcctaatcctttgttttgggtaaagactggaaaaaggtggttaccaggactgttgcacccttggcccttagggcttcaaccgccggtaaaaaccctgttttccctggacctacttttaacaaagtttttggggttaaaggctttgcatcgatgttcctcgaaggggtccttcttttaaacctcctttttccttccagcgaacctg

SEQ ID NO: 162633 - DNA, 475 bp, Arabidopsis thaliana columbia
ccggaggtccgggtccggatttccgggttggcccacaggcgtccgtggggtggtaaggcaggggccggggcctcctttgggtccgttgaagccaagccggggggccgaattttccgcccgggaccggcggttcaggaccgcgacccagttcagggctgttttggattcctgggttccaaaacgaccaattaaaccaattcgaggcgacccgggttttccgggatctttttttgtttccgccaaattaaccgcccttcctgaagctgccaaattccattttttccagtaacaaactaagggtaaggttttgggggggggggattaatttgcagttaaggaggggttccgggaaccagagttttactcaattttaacggcctttgttaggcaccataacacgaccggaggggggttattaatgggggggaaggaggacaccggtgaagattccggggccgtaaccgccgccgaattc

SEQ ID NO: 162634 - DNA, 409 bp, Arabidopsis thaliana columbia
  unsure (1)..(409): unsure at all n locations
aacgggncgggatttccggggtggaccacacgcttccgccgattagttggaccggaaggttttgggtttttttcgggcccacctgggaactttagtggacattggcttggttggaccacacccatggaagatcagaattctgcctccaccaggcttaagtaatttttaacctccatgggtttaaaaaggtccgctcaaaaggatgacttagccggggggcagaaactttaagccaaattttgttttgacaaattcgtttaaaacatggaagcttaccctccaaattgggacgccgagttaaaacctgttcttgtttggtccactcaattccgtccttggggggttgccccgccccctaaagtcaagaagtttggtttgggatcaatcccaaattggcccggggggttac

SEQ ID NO: 162635 - DNA, 303 bp, Arabidopsis thaliana columbia
ccgcgccacacccttccgttaaaagatcctaaaaaaattgaccattaattcgttaaaggtaagaaattggttcctttgggcgtatttttaatcggggttagggataatttattacctaaaggaatcccttctactgttgtttcaaaaatcttaaaccataatcgtccaccttccaatccaacggcggtaaaaaaaataaaaaatttggttggaattgtttttggtaaaactaattttgatgattttgtaatggaaattcccactaaaccttatgctttcaaggtaacttcaaatccctagaat

SEQ ID NO: 162636 - DNA, 408 bp, Arabidopsis thaliana columbia
attccgggtcgggccacacccttccgttaactaaccaaataggagcttttttggggttttcaaccgaaaccaccgtaactttaaacggccgaagccgccgaagggaaggctaataatccgccggggcatttttttggggggtccaaagcattgcctatttgccgaaccaggaaatggttaaaaggcatggaaggttttgattaacaagatttataatgtcgcagggcataaccggtttcaagcatgtttgctccttttttttccggggttttgttttcgttttttacaaacattctggaggccttggtgaccctaaactttttgggggggggacaggttttaccgggggtgaaataaaggcttcttttgggctgtttaaaaaattacaaatgctttgtttggtgttgg

SEQ ID NO: 162637 - DNA, 350 bp, Arabidopsis thaliana columbia
  unsure (1)..(350): unsure at all n locations
aacgggnccggatttcccggttcgcccacacccttccgctattttgtgaacccaaaggaccacgccaggccatttaaggaggggatggccgatctaacggatggcggtgttgactccagttttaagtccatcggaattgtttccgtgttgggagctgctttgaagtgctgcaacaaggaatggggaacttcggccatagttggggttgcagcatcaggccaggagattataactggtccgttccaactcttgactggcctgttgtggaaaggaacagcttttgggggtttaaagagtcgaacccaagtgcctgggctggtgaaaaagtcctttgaccaggggttaaaagg

SEQ ID NO: 162638 - DNA, 416 bp, Arabidopsis thaliana columbia
ttaattttaaagccatttccgttcataatatttcattggcggcagttttggcaccagcacccaggggcttttttttaaacccatttgctcctaaactccaaacccaacccaattccaaacctttaatttccttaccaacccaaccaaacccaaacttttttttggccgtaacaggccccgccctagccggagccgtttttttttccttaagttcctttgagccagttttagccatccaccaaatcgttaagttggctgcagcaaacgccagtggcgccacccggggttaagtttttttctttccaatggtccaagccattgattgggtcctttacaccatcttccagccagcttttaaccagtgaaccaggttccttgggagtaagggtttcgtggtgggtctaggttttgtgggg

SEQ ID NO: 162639 - DNA, 435 bp, Arabidopsis thaliana columbia
  unsure (1)..(435): unsure at all n locations
aacgggncgggaattccgggtcggaccacacccgtccggaccaccatgggacactgaaccttcaagctattccttaagcgccttttcaacctttttccggccttaaggttcctttgttaggccccttaatacaattggttgaacaaaacgcagttccggacaaactactcctttttaatgccctggtttgactacatttacggcccattggttgaaagcccggttccttggtccaagaaaactttagaaggaggaaatgatttaggggacggggggcacttaacttacctgccgaccccggattccatttaccatttgggcattggctgggcctaatttgcctcctacccttttgttattaaatggttaatgccccttttggggcctttaacctttttttccatgatattaacgcttttttacccccgccttttt

SEQ ID NO: 162640 - DNA, 389 bp, Arabidopsis thaliana columbia
acacccttccggcctttgcaaattttcaaaaatggttccttccaattttgtttctaacctttgaaggaggaaccattccaatttgttgggattcctccaaaggtttagttcctggaagtccaaccagaacccttcaattgttcttttcgtaaggcctactcttcctaataaggctcttcttttggtttccaaggccaaccaggctttttttgtttaccgtttccttttaaaacttgttgaacccaaaaggccagtgcctaaggtttttgggtttggtaagccaccaaaccatggattgccacacctaaagttcaagcgtaccaagctttcttttgtttagaaccttcctgccagaaaattggttgtcttaaaaattttaaacttttact

SEQ ID NO: 162641 - DNA, 429 bp, Arabidopsis thaliana columbia
  unsure (1)..(429): unsure at all n locations
gggnccggatttccgggtcggaccacacccttccggttgagatagctaacattgttgacctaattgttttgccgttcgaccatgtggaaaaaaggcggtttaaaatgatcctggccaggaaatttccaggtccctggaatcaaggggctggttgcctaataattttcgaagccccaaaggcagttgctttttactcggttcccttggaacccattgcaaccttggggagggtcgtcaccggcctttatttccgtcctgccaaattaatgtcctgagagagtgagtgagttggccgattgaatctaatcctatcgtcctttctttctggtttaagatttcgttgggactaaaagaaactgttgtttttaattggagaaggtaaacttggttgaatggtcaacattactcgtttggcttatgaccttatta

SEQ ID NO: 162642 - DNA, 439 bp, Arabidopsis thaliana columbia
  unsure (1)..(439): unsure at all n locations
gtccataattaaaaccccattccattcattttatttttctttttcttcctctaaaaacctcctttggaccgttttttttaatatcacgagacgtccccaacctttttcaccaccctatcccttaatcttaaccttttcaaataaacaccattaactaaccctccactttaaacattccaaccttttcccaaaaccactttcccaccttttccttttttaccaactccagaccaccaaacttttccccatccccaaccaatttttccacatcctactttttttcccccattcctcttcccactattcctatatttgcccaaccatnttcatcccccaatccttaccttcccaaaaatcaacttccttaccaactttccctctaactttcttttaaacattcctttccttactcaacaccctttaaatttaaaaaatttaa

SEQ ID NO: 162643 - DNA, 438 bp, Arabidopsis thaliana columbia
gaaatatggggaaatatctttgagggaattaaaaggcctttgaaaactattgcaggattaggcggggttgtgtccattcctgggggggtgtctgttccagcttttgccaaaaatggcctttgggggtcccagcccattaaatttgccgggggagccacattacctgggggggacttgtttcctactgcctttgaaaccactttgatgaataacctcgttgcctttcctccggttgccatggggaagaccacttacattgttccagctggccaatattcgtttaaggttcccggaatagagcttgatttccaggggatcaaaaaattttacaccatgcttaaaagctggccttgccgtacccttaggccagttgcttaaaagcttgttgccgttactcctttacttacggggcagggggtttttgatgcccttttccct

SEQ ID NO: 162644 - DNA, 355 bp, Arabidopsis thaliana columbia
  unsure (1)..(355): unsure at all n locations
cgggnctgaaattcccggtccggccacacccttccgtttttgtttgaaaaccaaaatcttccaaagaaaaaaatgtgcctctcctttggaacctcaaggtttttttgttaatccaccgggattttaggttccaatccgcttccagtagcaattaactttaaccttcaatacggttttgccctcgtttaataacaagtttaatttttacttttaacagttgctttccttgctttttttatttaaaaaaaaacccgtgttaccggttggtaatttttcaataaaaccaaccttaagttgctaaataaatggcctttcaaaggcaaaaaaatcatccatggaaaaccttttggaataa

SEQ ID NO: 162645 - DNA, 434 bp, Arabidopsis thaliana columbia
cgggtccggatttccgggttcgcccacacccgtccggaagaccatgggcttcctttatgctcttttccgttcctatggtggcctttccggttaaggccactatggccgttcctttaaacggacttaagtcctccgttgccttccaagccacccgaagggttaccaccgccattacttccataacaggcaccggcggaggagttaactgcttgcaggggtggcctccgatgggaaggaagaagttggggactttttttaaccttcctgaccttaccgattccgaatgggctaaggaggtggcctacctaatccgcaccagggggatccctggggtggaatccgagtgggagcccggttttgggtcccgggggcccggtacctaacccggttcctatgatggacggtcctggccaatggggaagcttcccttgttc

SEQ ID NO: 162646 - DNA, 306 bp, Arabidopsis thaliana columbia
acacccttccggaggaggatgataaaaatacaggagggggatggtggatttccatggagaaagggtccttctggggaataccagggctcttaataccactgaattggttaagatcctgaaaaagtttgccaaaggacctggtgacctaatgcgtttacctttaatccaaaaggtttttaagaaccctttttacactactgactaattgttcaagctggcaaaggaatctgaggcaatgcttgatcagattttcctggctaacgaaactgattttgggattttccaaccggggttttcaaaccttat

SEQ ID NO: 162647 - DNA, 459 bp, Arabidopsis thaliana columbia
  unsure (1)..(459): unsure at all n locations
gggnccggatttccgggttggaccacacccttccgacacaattagaggggggctaaaggaatggatctgtggaaccggttttgatgttggatttcggcccgaagccaaactaaatcctacggtttttcccttggcaactggttaagacctaatcttcaattatataaggaaatggaaaaatttaaatctggcttgggggaaaaaaaaaaaaaaaaaaaaaaaaaaaaaaaaaaaaaaaaaaaaaaaaaaaaaaaaaaaaaaaaaaggggggggccgttttaggggtccaaggtttacttccccgtgcttgcaaggtaatagtttttttttggggcaacctaaatcaatttaactggccgtgtttttaaaacgtggggccgggaaaaaccctggggttcccaaattaaatggcttggaagaaaatccccttttggccagttggggtattaccaaaagggc

SEQ ID NO: 162648 - DNA, 368 bp, Arabidopsis thaliana columbia
gggctcggaagaaagccctctgggctgaggttccatctttgaggaaatccaagccccttaggaagggtgtccttagatggaaaggaatggaaaatgtccccccagtggtcgtggcccctggatcctgttataaaacctatccaggggtgttgagaagggaacctcagcctgcttgaggaacctcatgagtttcttaatctcccttttaaccatcctcaaatatccatctggtacctaatgttgggcttttgattaatcgaaaaaccgaaagggattttgtaatggccctatggcaaaccctggttttggctttccaaaattccaaaccgttttccttggaaccccgacctaatgtgttttttgaattc

SEQ ID NO: 162649 - DNA, 245 bp, Arabidopsis thaliana columbia
aagaacctaaccgttttgcttaaccaccacaccaaaaaaatgggcccgatgttaaccgaatgggttaaaccagttccggctgaggctcctttccaattaaccgtttttgttttttccaccccgttttttactaggccccaaaggacccaaaccttccattttttcgttccaaccccttcgtgctgcgaagttggaccacatgatccttatggtggcggtttcccaaccttccattcaaggctttc

SEQ ID NO: 162650 - DNA, 406 bp, Arabidopsis thaliana columbia
gttaaacgttgcgaatccaactactggttgccaaaaaaagctggggaccgacattaaccaggaactacttgcgttttacgacaggagaatttttaaggaagtaaggggggatgcttggggcaaggggtcaaagggatccgttttaaagaccaaggggggttgcgataagcagggtttccaaatgaagcagggggttttgactccaggccgggttcgcctttggtttaaccgaggaactccttgtttaaaaggacatggaaggggaactgttaggaggagaagaaggtttgttcgtggtggcttggggggccctgttctttttgtttttaaccttggatttgggaaaaagggggagaccgactttcctgggcttaccgatcctgagaggccaatattgggggggcca

SEQ ID NO: 162651 - DNA, 437 bp, Arabidopsis thaliana columbia
aaaggttaaggcttccgtaatattttccttaacctcgtttgccaaaccaccaaggtggttggccaattaccgtccaaggtggcccgtcttttttgttgtaattccccgacttacaacaaataagttgaagtggacctttaccgaaccctttaaggcagggcagtaactaattgccaaaggtcttttcccaatgcttgctgatcctggtaaccctgcggattaaacaagtgcaccaaatgagtcggttcttaaaggggctttagaccatggaaagcaggccgaagtgatcaagtaacatgacaaagttgtggcctgccaaaaaggggaagatccgtccggggccaaaatcatcgacctagaggattagaaaaagcaaagtgagccgttgcctcggccttttttgtcctgtaactaataaatttaatttccttaactaa

SEQ ID NO: 162652 - DNA, 328 bp, Arabidopsis thaliana columbia
cgaccccttggttccttgcaaagatggaccctttttgggggaggagatccagacctaaagcgggtcctttattggcggtttactgggcgttgggaaaaaaaggacccaagtcgaattcaaataacccgcgttggaaaggcttggatctttcaaggcttaatccttggcctgaagggttaacggagtccgttgccggggggaatcaaaagagtccaggcggggctgccaaggcgtataactccgctgttttgtggggcctagctaatggggttccacatttggggccggttgcttcaatggtcctgacgctggaaattaacccgggaaa

SEQ ID NO: 162653 - DNA, 377 bp, Arabidopsis thaliana columbia
ggtccggccacaggcttccgccgttgtttgccacaaagatgtgaaaccacatattttttgggtggacccctggaccaatggggttaacttttttgttttgggaggtccaaaatttttggccaagggtgacccaaccatataatttatttgctcccgttttattcgggctccaaaactgatctttggccccccagagtttccagcttccatggatttatggccggttggtggggaccgggcagagctttttttgggccagccgttattcccaggagaaaattaagtggatcagttggtggggaccataaaggttctggggcctccaactggggaaaaaattcattgtttgaccccctaattacacaaatttttagtgt

SEQ ID NO: 162654 - DNA, 251 bp, Arabidopsis thaliana columbia
aagaaatcttattataaattcctataattggttaagaaaaagagttggaagttttaataatggtccattttttttggttaggtggccaccattttgaagctttctaacgtttggctttttttatttgttcaagtaattgcccttttgcctttcctttgcctatccgacaattttgttaactttagagctacttattttggcagccccgtttgcaaagcaaatcctgggggccatggggggtttggagaatt

SEQ ID NO: 162655 - DNA, 403 bp, Arabidopsis thaliana columbia
ttttgatcattaaacttttcgaaattttgtttaatggctttcgcaatcgcttttcggtggaattcttaaaccaaggcctttttttttccgtttttttccttggccgccggtttaatttccgactcccgggggattgggtccatcggggaaccagggccggattctttactccggcgtcccgacaccaaaaatgggttttggtttttgggattctaggaaaggaggggattcctttgtggttgggggtggcttaaaaaccgttatggtcagggtgggtcaggggccggaggtcgttagggccacgtttgggcccatcgttaaagccgccggggaaaggctggtcgaactggccatgtccactcaaggggggggcccatgtaaggggatggcccttaaatccaaa

SEQ ID NO: 162656 - DNA, 426 bp, Arabidopsis thaliana columbia
aaacgttcttttaacggccgaacaaaatcgcgacgttgagtttaattcggttggaataagccggaaccataaaagttgggggttccagtccgtgggcaatttcaacggttggggacgggccatacacggggttaacaaacgccgccactgacggtaacgacaggggtaggatccttgagcatggttgggggttgggttggggtaaaaaaggccagggtaccgttggtcctagcgccaaagggtttttgggttgggacaggacatgtaaatttccaagtttggaaggtggcgatccaaagacatttaattacttaaagatcgaaggagctgttagtttaatgccaaaaattaacgggggatcatcaacaacggaaagggcttttggggccaagtgtccaaaagatggcaaaggtttagggttttttt

SEQ ID NO: 162657 - DNA, 305 bp, Arabidopsis thaliana columbia
aaagcggattacgggtcccctttttttaagttaattttttccccgattttctttttttttgggtggatacttttttttttaaatgggggttttttttcgttggcctttaaattttttccagctgatctgatctccgttcccgatggagtttactgttaacgcactcgtcgtcaaggggggctttggaggtgggcttaggggtttaagggggcctgttaaagttaatggccagctggatcttgaaatggttggtcttaaggaaaagaccgctgttttttttaacctttttgcggatcctgaatggg

SEQ ID NO: 162658 - DNA, 249 bp, Arabidopsis thaliana columbia
gaaaacccgggccgaccacacccgtccgtttttttaatttttttggcaaggaagcttttttttcgttggatctcagctgttctaataaggtgcatgatattcgtcgccactgggatggaaccagcaactggggaggcacccacttgggagtcgcaaagccataggttcaagggtccatgcgggagggcataaaactgcgccaacgggggccacaacaaaggctttgtcggaggaaactgccggggattc

SEQ ID NO: 162659 - DNA, 186 bp, Arabidopsis thaliana columbia
tttttggaaccacctggcttaccgccatggttggaactgccggaggggccccacctttttaagccatttttactttttttaggagcttccaaaatgtccactttgttcgatgggaactcctttggccatggttaaaaaaacttccatcggaatcttctggatatatttcaaattttcaagggggct

SEQ ID NO: 162660 - DNA, 455 bp, Arabidopsis thaliana columbia
gaattcccgggcggaccaccccgtccgcggacccgtgggcggttttggagaaaaattatgggcctaaaattctgttgttgtgggtccggttgttcttaccaggaaattttattttaaaaggcattttttgggtttgcaagaagctgtttgcatcgccaaagggatggttccaggatactttgtttggccatggtgggttaacttcggggggcaggagggttccaaaaccagattgggactttactacgttgatttcaaaaaaaacctaccacgttccgggaaagaatccggcaggttttccagggatttcctcagcaaaggggttcgtccatcccggctcaaaaaggatgagctttaagcttattcggtttcaaggggtttttcctatgttttactttgggggggcccaaatatcatggaggtttggttctaataaaaggagttatttttttttt

SEQ ID NO: 162661 - DNA, 459 bp, Arabidopsis thaliana columbia
gaaacccggccgccacacctccgaaatccgccgttgttgggctgcttttctatttgggcctcgggggctcccgggggcattccggttaaggggggtgaacagccagtccggttccgaaaaaaaaggcgttcccaaaaggagggccaaaagaacgggacttacggcccggcctttttggcccaagccgccatttttctggactggttggagggtcccttggtgggggattccggtttggatcctttcggttaaggcaaaccgcccgggttttttaaatccgatatcgattaactaaaccaaaatttggttaaaaccttgtccgtagccttaatcgaaacccgtccggaagttgccgcccccaaatcaaccccgtttaagccgtccaggggggtttccggatttcattgatttagggaaggtaaacttttccacggacggtggtcgatctttcatattctc

SEQ ID NO: 162662 - DNA, 422 bp, Arabidopsis thaliana columbia
tttaaatcctttcctttaatggaggttaattataagattccgattttggccacataagttttccaccaatcctctttggccggccaaacggttttaaggccttccagggacctaatccaaaaggggggcgtttgggccgggggccgggggaccatcgcgtggcccgtaaggtttactccccaaggcattgggtttggcccagaccgtccaaggtcctggggacctttttgggggaacacaccgttttacttaactggggaataccccggggactacggttgggccaccgttggactttgggttgccccggggccatttgttaagaaccgggggctggaggtattccacagcagaggggctttgtggggggctttcggtggcccattccttgaaattttttccaagaccggggttaaattcgg

SEQ ID NO: 162663 - DNA, 430 bp, Arabidopsis thaliana columbia
gggctttagaaaggggcaggaccagaagttttgttgaaactttccaaaacttaccaggatttttccaacgccttaggcaaaaggtttagtttttttaccttaggtaaataaaaatggccattttttttatttactaaaccaggaccctttttataatatatggttggaaattggaaattttattttttaggcacctttggcccccagggaatgaaggatttcttgattgggggtaaatggatcgatcttttaaacggatcagattttgttccaacatatgaagataaaaatggcgactggttgcttgtaggaaacttaccgggggggatgtttgtggtttcatgcaaacgtttccgaataatgaagggttcagaagcaattggactttgtttaagggctttagaaaagggcaggaacagaagtggggttt

SEQ ID NO: 162664 - DNA, 272 bp, Arabidopsis thaliana columbia
ggaccacataagtaaagggggggccttcccttcgtcctaataataaggaacaggtggaggattgtttttacctaccgggaagggatttaaatttggatgcaaaggcatatccaagttgatgggaaagtaaggacggccaagacctaccctgctggtttaagggaggtggggtttatccccaagaccaatgagaacttccgttttttttatgataccaagggacgtttccggtttcattccatcaaggttggggaagcaaaggttcaaacttt

SEQ ID NO: 162665 - DNA, 375 bp, Arabidopsis thaliana columbia
aaaccgggcggaccaacccgtccgaaaccaagggtttcctttatgctcttttctgttactatggtggcctttccggttaaggccattatggtcgttcttttaaacggacttaagtcctccgttgctttccaagccacccgaagggttaacaccgccattatttccataacaggcaacggcggaggagttaacggcttgcaggggtggcctccgatgggaaagaaaaagttggggactttttttaaccttcttgaccttaccgattccgaatgggttaaggaggtggactaccttatccgaaccaggtggattcttggggtggaattcgagttgaagcacggatttgtgtcccgtgggcccggtaactaacccggt

SEQ ID NO: 162666 - DNA, 329 bp, Arabidopsis thaliana columbia
cgggcggaccaacccgtccggttccgttttaaaatccaacattaacatctttaaaggtccggttaatttccttaccctggtttttttcaaaagaaagggttacttaaaggcctttttaacggaaataatccacaatcctggtctgggggttctttttgttcgtgtaattttccgtaatcctttccgtttaaagaaacaaaaggagctttttgtcgccgccaaaggtttttccaccgttcagttttggtattgcggaaagaaagctattttcttcgttggaaatgttttcctttttaattttattctttaaggagttgttgtttgtatct

SEQ ID NO: 162667 - DNA, 294 bp, Arabidopsis thaliana columbia
aaaaaccggggcggaccaaggcttccaaaacaattttggtttcgtcgataaacatattttgaaaaatctaagtaataaatggggtgggactcttttggcggttgttagtaacaataagattaaatccaagttttttggacttaaaatggaaaaaaaaggtgagaaaaggattagcttacggtccaaggttcttttcggtgataaccaaccgaagttaattgactgaagaaaaaaagaacctctgcttaaggtaaaaaataagggtggtttccggaagttgttggccattttaaa

SEQ ID NO: 162668 - DNA, 399 bp, Arabidopsis thaliana columbia
cggggcggacccaggcgtccgtttccaccaaatttaaggcggttaaccattttccttttttacattttcaaacgagggccggaaacgcactttggtttttaacggccgttaatccggttttgtttcttaagccattactccttaacggttttgtttttccgtgggtttttttgggtttttccagaaaggtgggcggcggcagaccaggggtcgttgcagcggttccgggggccacaaccaacatgccgatgaccggagtggggttccagcctttcgaagaggggaagaaggccgatcgggccattccaataacatttaatgcctttttggttcgccagaggtttgccgccgttggcggggcagtctttattgagcaaatcaatggggaatacaacgttt

SEQ ID NO: 162669 - DNA, 332 bp, Arabidopsis thaliana columbia
ccgggcggaccacacccgtccggaaggtttttggtcggaggcaacgggaattttaccggaccggttgaggaggggaaaaagatggggaccacttttaaggaagctaaggttccttaacaggaggttgaaaaggttggggttagccttccttttgttttttttccccgggttaaaaccccattggggtctgatttttttgttgcggaccaaaactgtgggtttaaaaagggaggggctttaactggggaagggggtgcggtaatgcttttaactttggatattccatgggttttccttggtaactttgaaaggagggcaatctttattgaata

SEQ ID NO: 162670 - DNA, 372 bp, Arabidopsis thaliana columbia
gggcggacccagccgtccgagttaaaattaattccaaggaaccagtgttttttttgtttccaaagaaggggaaagctagggcataattgtccaccggggatgaaatttgtaaagggaaaacaaagggtttcttaagggaattattattgcccaagggttaattaccatggagggttttaaaaaaggtgggttttgacaaaaagtaaggggttgtttggttgaagcaaaaaaaaagcttaatttacaagttaacaaagatagataagttggtttctaatggaaccgaagtaacagcctttgtggaaaccggaaaaataaaaaggttaattggagtcaaagccagggaactttttatttgggtaattataaatg

SEQ ID NO: 162671 - DNA, 484 bp, Arabidopsis thaliana columbia
gggcggacccacccgtccggaagaccaagggtttcctttatgcttttttccgttactagggtggcctttccggttagggccattatggtcgttcttttaaacgaactaaattcctccgttgctttcccagccacccgaagggttaacaacaccattacttcaataacaggcaacgggggaggagttaactgcttgcagggggggcctccgatgggaaagaaaaagttggggacttttttttaccttcctgaccttaccgattccgaatgggttaaggaggtggactacctaatccgaaccagggggattcctggggtggaattcaagtggaagcccggttttgggtcccgggggcccggaaactaacccggttcctttgatggacggacctggccatgggggaagtttccttggttgggtggcaccgactccgttcaagggttgaaggaaggggaaagatgcaagagggagtcccccaatgcct

SEQ ID NO: 162672 - DNA, 399 bp, Arabidopsis thaliana columbia
aaggcccgaccaggcgtccaattttccaatggcaatttttgttccaccctttgtttcttcctccttaaaaattttttgccgcaactcttttaattttccggggttttacccccccatttcaacctttggtaaactaaaaaccttaacttttttttcctccttcctccctttttactaataaaccaccacctccgtttttaaatcaactcgtggttctttaaccgtccgccccgttcttggaaagttcaaaaggaaaaaccctaatgtaaccatcgaacccatcggtcatgttgcccatggaaaaactactttaaccgaagttttaaccatggttttggtttccattggttccaccgtccttaaaaagaccaacaagattaacctctccccgaagaaaaa

SEQ ID NO: 162673 - DNA, 441 bp, Arabidopsis thaliana columbia
  unsure (1)..(441): unsure at all n locations
aaacccgggccgacccacccgtccggtcgggcctcncttttttttcctcctttttttttttcaacccctccccgaatcccggggggcttttagaaggcaaatgtatcacattcgtaattttaggatctttaacaaacaatgaatcgccaccccaatcccaatcctttctatgaggccaaaaaaatcgtaaatcctttttcaaaagggggggaaagggttcctgttgcttttaggccagttgaatatggtcaaagcctcaatcctcctgtggatattccatggaataatatgaatgacttttcacaaaaacaaaaaaagcttgttgactgggaagttgacctcaggaaaaaagaaatggttttaaaccgaaaagaggaagcttttgttaaatttggggggcaaatagataataaaaactggccaccgtttttcccaatcatc

SEQ ID NO: 162674 - DNA, 461 bp, Arabidopsis thaliana columbia
cgggcggaccagccttccgttttgggttggaccaacttgaacttgtatattttccaccaaaccttaaaaaatccaaggggtaaaacttaatccatggtggatggcttttcttcgttgttcctggaattttggtcccaaaaccattaggatttggaacctgggttaaggttaagaattggccacaattaccagggggtaaagccattaactgggaaaaccaagccccggggggtactttgccaacaattttgcccatggagtttttacccatggcatttgttgaccaccaaaaaagtttggaaaaaaaccctaagaggaagaagaccccggaagccccatttaacccttttggttactcaaaggaccccaaaaggttcgaggatttgaaagttaaagagatcaaaaacggccggtttgccctgttgccgttggaagaattttttttccaacattcggtttac

SEQ ID NO: 162675 - DNA, 413 bp, Arabidopsis thaliana columbia
acgtaatcgaactaaatcgacctaaaaggtttttcgataatttggttttatttttggaagggcctgaaacttatggccggggaactcgccattgtggttccaaaaaccctggttgaaaaggctccgaggctccaactaaattaacaattaatgggttttggcctgcctttaacaagggttcggggccttaatgtggtaatcgacctgcctttaaagagaaggagatttaaacgttgttggatggttttgaaaagtactggcctagtttaagtgggggttttccataataatccaagggggggaaggggtaattttggggccacaagtggaagaaacatggaactggttcttttcctgtttttaatgaggagattaataacttccttaccacacttaatttttacttgaagcat

SEQ ID NO: 162676 - DNA, 373 bp, Arabidopsis thaliana columbia
  unsure (1)..(373): unsure at all n locations
gaaaaccggggcggaccacagccgtccgttggatttaacatagggggggatggagggttttcgccggaaccggaagttgtacttcggggaccggtaagcaccggcggaggcaaaggatgttgcaggtccgggggtccgggttacggaattcttttggccgttttttttggtccatcgaagaaactaatttacgtacccgccgtttacaccggacctggaatagataaaccggatttnnngccaccgggggatgtagatccaagctcgccttcgttttaaagggtatttaatagattcccaatgccttttgttggtattaagcttaataattctggttggaactcttgtagtttttgcccatggaatgcttttg

SEQ ID NO: 162677 - DNA, 407 bp, Arabidopsis thaliana columbia
gtccgtaaattttcgatctttaaagaaaagttttttttattcaaggaaaaaaaaaccaccggggggttttttaagaaaaggcggcgtcccaaacttttttttgccgtttttgaaaaataaaaaaaaaaaactgggggaaatcctattttgaaggaaaaccccccaaaaagccaagtggagtttcctcaaccaccgtttatttttgtaaaaaaacctccttattttttttttgcttaaggtccaaaaggtaagctcccagtttcaaccaccgataaagttttaggaaaatggccaaaaaaggaagagaaagcttacctgttaaaaactataaaacttccaaagctaaaagaagttccaaagaccacaggaatcaaaggttcctcaaagttgaggaaaagtgaactttt

SEQ ID NO: 162678 - DNA, 414 bp, Arabidopsis thaliana columbia
  unsure (1)..(414): unsure at all n locations
aaaaccgggccgccgaggcttaacagaacccttggcccgtttttaaaccttttcttattaaaaacaacaaccccnattccacccgcctaattattaagattgtggagttnaaaaacaaaaatttttcccgtacccttagcttattaacctaacccttgttacccaaaattaacaccataaattgaccagtccactttttaaaaaccaccacttaacttcttggaatccaaccaaattgttccggcctcctagaaaaaaagtttaaaaattttttcgaccatccagccagttcaattttggaaggtttcttgtaaataaaaaaaccccaaagccttgggttcctttactttttaacttaaaatttaaccacctttttataaatccattcttttttacttgaccaattccatttac

SEQ ID NO: 162679 - DNA, 266 bp, Arabidopsis thaliana columbia
aaggaagccaatggtccggttccgaccgagtaaagtacttggttccattttttggcaagtaaccgagctaccttaccggaaagttccccgaagactacggatggaaaaccgttggactttaagttgatccggaaacattcgaagggaaccgtgggctagaagtaatcaacagaaggtgggctttgctcgaagccctaggctgggttttccctgagcttttggttaggaacggagtaaagttcgaagaggcggtttggttaaaggcc

SEQ ID NO: 162680 - DNA, 250 bp, Arabidopsis thaliana columbia
aaaaccctaattcaaaaaaaggggcctggttttttaaacctttcctttttggtcctcctcctccttggttttgtggtcgtctcctatgcttgcaactgtccccttcctaaaccataaccagcactttacaaacaaccaaaccatccagtcaaaccgcctaaacctcctgcgcgtaaaccacttaaaccaccggcggtaaaaccacctactccaaaacctcccaccgggaaaccccatcttaaacaaccaa

SEQ ID NO: 162681 - DNA, 178 bp, Arabidopsis thaliana columbia
agaggggggggatcaaaggctgggaatcgtttgtatttaaagggaaatgccaggtgtggggttctggattgtcaacactgttttccaggctttgaaaatgtttccggttttgccggatattaggttccaaatgggtaaggggttgcctgggggtttaggggctggaggaaatccagaa

SEQ ID NO: 162682 - DNA, 278 bp, Arabidopsis thaliana columbia
  unsure (1)..(278): unsure at all n locations
ccaaaaacagaaacatggggncttaatcttcctaatgggcttttttttggctttaataaattttttccatcgggggagtactgattctaatgtgttcaaccgctgaatcagggaaataaccgtttcatccttgggatttgcttccgcatttgcccagccaagtttaatggccgattttaaactttttttacggggccgccgatctgcttcctactttaattggaacagcgggttttgggaacgattccgttgactggaaaggggcttgtttttttggg

SEQ ID NO: 162683 - DNA, 402 bp, Arabidopsis thaliana columbia
tttccgggttggaccaaggcgtccgaacacaagttttggcagaagctggggtgtttttgtttttggggtaacctgttttacaaagccggttgggatttgttcggttaaattgggtgccactgggctgggggtttggaaatattgggctggaatctggggcctttactttattttggtccggtcccagtttaagcacccatgattgggtccaaaggactgaaaaacggggcgacttacatctttgattaaggggctaagctggtggtcctttaccaaaattggcttaccgagttaagcaacgttgggttttaaaaaatatatttttttatttaatttaatttgggggggccgtttttgaggttccaagtttacgtccgcgtgcttgcaaggtatttatttttt

SEQ ID NO: 162684 - DNA, 190 bp, Arabidopsis thaliana columbia
  unsure (1)..(190): unsure at all n locations
ggcggaccaatccgtccnaaccaaaaaaaaacccgggaaaccatttctctattctttctattcaatcaacaccaagggcgggggttgccttgggttcctgggataattaattcagctgggctttttaaagagcttacctggttgagtccatctccacttaactctttgttctcgtggggttgggctttgc

SEQ ID NO: 162685 - DNA, 321 bp, Arabidopsis thaliana columbia
cggccccgtgggcaatttttaaaaaccttaaaaacttcttttaaatcctctctaccgggaccaagatgcaaatctttgttaggactctaaccggaaggccattaaccctcgggggggaaggctccgcccccatcgccaccgttaaggccaagacccaggttagggggggctttcctccggatcagcaaaggctttttttcgccggcaggcacttagaggatggccgtccgttggctgtttccattttccagaaggattccaccctccacttggtcctcaggctccgggggggtttgcagattttcgttaaaaccctaacgg

SEQ ID NO: 162686 - DNA, 289 bp, Arabidopsis thaliana columbia
acacccttccgagaaaaagggggtggccaatcaatgctcttttattcgcttcttaaaaaaaagctgtggtgccattgttggaaaagggggtttcatccaaaactgccaatgtcaatctcatgaaaggggaccagaaccagcctgggtttttggcgattcaccctttcggtaaattcccattcctggtcgccggagcctccaaaatcttcaagtcgcggccgaccatgaggtttttagcagagaggtttagttcacagggccctgttcttttggggaagccttttgaaaa

SEQ ID NO: 162687 - DNA, 407 bp, Arabidopsis thaliana columbia
aataatcctggcgataaataaaccaccattcggttgtttggtttcgttccaaagttgagggaggaacctaaggttacccaggggctgcagggaccagttcctggttttaacggggggtttttttaatccttgtaaggaagatccgtagttgttaatccatggcttgatcttgggatgggccctggagctccacagattttaatgggggtggtggggaccactaagggaggcagggtcaattccgagcttgccaaaaggacaggactaataagggtggatcgtttcctttactaataagtggggtcccctaccaactttggttttgttcctggaccattgggggaggacattgaccccattgttgttttagtcatattgcaggaacctgggcttccgggtggtttttt

SEQ ID NO: 162688 - DNA, 317 bp, Arabidopsis thaliana columbia
gaagaaaaaaaatctttttaaggagcttggatgttccatggcgaggtctaatgtccagccaatgctactcctcctggaataactcttttttttaccggttttgcgtggggccatagatttggattactgggccaaaaatggaaacgtttccggacccgccactagcatgggggtctttccatctgttgggcctaacgaaaccccaaccataactataaatttattcggtcctgcaggcaaaaccatccccgggggaacccttgggtacgtagcctttaaagatggggaatttaccggccttttaaaaacttacaacc

SEQ ID NO: 162689 - DNA, 353 bp, Arabidopsis thaliana columbia
ttccgtatcgccgactaacctccggggtttctttcggcggcctttcctttctgtttcctacttggggttcctctctgcgctaacttttttaatccttgggccatatttcccttctctaacttaactcaccaaatttttaggaatccttttcctcctgggatttgggcttttaattaaccttaattcttctgttaagtagaaattttccatggcgaatctatgaaataatttcttcttgttaagtagccattgaaatttgttccattggcgattcgggttttttttttggtggtctccattttttggttttgctccttaaaaatataagacttttttggtttttatattatttt

SEQ ID NO: 162690 - DNA, 371 bp, Arabidopsis thaliana columbia
aaaaaaaaaaaaccacaaaaggtttaaaggttcctttccacaagggttttttcttccctggccttggccggaagggttgggaccctttcccccggggattttgaggtcctgggaggcggccgggtgccattggggaagactgtggccaagccaaagggtccataaggcagcccatggtccggttccgcccgggtaaggtccttggttccattttttggggggtaaccgggctaccttaccgggggagtccccggggccttcggtggggccaccgttggactttaacggttcccgggacatttctagggaacgcggtgctagaatttttccccagaagggggcctatgttgggggccctaggttgggttttc

SEQ ID NO: 162691 - DNA, 327 bp, Arabidopsis thaliana columbia
gggaattccggggcggaccacacccgtccgaattaaccctaaagttaaagctcaatttgttgttaacacatgggttgtaagtggtccaccgcatacaaaaaaattgcggggcatccttcctaaaatattaagccaacttggcccagttaacttggccacccggaagaagctggcaaagcaattccagaaccaagctccaggtgcaggtgttgtcccagcaccattccaagaagaggccgttgttgttgttgtcccaaaccttgtttggggggagactttcgagacccctgctcctgaaaaggctcccaaagctgcttgtttttaaag

SEQ ID NO: 162692 - DNA, 294 bp, Arabidopsis thaliana columbia
aagctttgtgaccaacctctggcttctggctaattttttgagggggagggttttaaatccgttggtgaatctttggggccgaatcctttgcatctggtgggacttttaagggccgggggggtcaactctggtttggaccaactccagtggtggtttaagggacctgctgaccggggggctaaaagattcagagtcctttttcttactgttggtggggtggttttggagggtcctggggtgggatttggggaaacccttgaagccgcccttgttggtttacgggggattggtgtg

SEQ ID NO: 162693 - DNA, 285 bp, Arabidopsis thaliana columbia
cgggcggaccccccgtccgttttaaagtacccataactgttcgaccattttttgtaagaagcacctaaggtaccaagtggtgaggtccctgtattgaagggggatgttattaaccttaaaacagctgttttttccgccaaggctgtaattggaaaattcccaaaggaggaaaaagaaaaggaaaatggggaatcaataaaagttgaaaaggaagcttttgttgccaaggatgatccggaaaaagcaaatcatgttcctgttgaaaagcaaaaggaagtatttgaa

SEQ ID NO: 162694 - DNA, 333 bp, Arabidopsis thaliana columbia
atttcgatcctgatttttcttaagggatccttttggccaataggttttttaaattttcaaaccaaaacccccatcaaattattttccggcccagtttttttttcgattaagccggcccggaaaaccatgggcgtttgggaaccctttcgttctttgggacgttgccgcaaaggttcccagccggatggtggggtttaagccattgagggtgggggttccggttcaaactgctaagtctggtaggaggccgactaagccgcctcctccttttaaagctggggggggggcagggaacgctcctgggggaggccggggtgctggccgtgggggggg

SEQ ID NO: 162695 - DNA, 353 bp, Arabidopsis thaliana columbia
ggggcggacccacccttcctaatgagctggaggaaatctaaggccttttctatagggggttgggggtgcctccacggggggaaccaaaagaccttcctttggttgatccaaaacgtgctggaccactcgaatgttttggggaaaattatgatgaaaccatggttctgttggataaagtcccgggtgtctccatggaactttgggggggcactcttgtggccaatactgtaaaattccgatcccttcaagttattctcaaaccagggctttgcttctgtaatccgccgtataaaaccggttgcgggtgaacctttctttgatttctttaccctacgtgttttttttaatatccc

SEQ ID NO: 162696 - DNA, 329 bp, Arabidopsis thaliana columbia
gagccgaaggtccacagctttttttgtaagatgttgattaatgaggaactgcttgcaagctgggatcagccaccacattccatcgctttccatgaagggcaccacaccaatttccaatcttgggctttccagttaacggaaaacctctcgattttggcagaaggcattgagggggcatgggattctagaaccgggggagggggtctggtcctgagtccagggggaagggccaccattcaggactttgcaggaccagcatcagggggggggggtttttggcaggccagggcgatttccggccatggattccaaggcaccaaatcaggttt

SEQ ID NO: 162697 - DNA, 343 bp, Arabidopsis thaliana columbia
ttaaaattaccaaactttttaaaaacattctttttacttaacaaacaattaaccgagggccaactggcgggtggaataaactttaaggcatgggcttcgttgaccttgacggttacctttttccgggccgtggccaaggttccttaagccaccgggggccgaaggttttccgtagtcagggcctccacgggggacaccacacccagtttagaagtcagggaccagagcagcaccccattggggggggacctattgttaacggttgcagttgcaggggttggttttttggttaaggtagccatggttgaagaagaaaagcccaagcaggggacagaggcggcca

SEQ ID NO: 162698 - DNA, 256 bp, Arabidopsis thaliana columbia
ccagaagtcgacgccaccattggccccgatttaggtggttaagggggcttcaaggaagaagccggggaaggttaccaccccattgtttgggggacgcccaaagcattccggttttgttggcgctttgcctcctaagaaggatctttttggttccatcaaatggcctaggtcaatccgccttaaagggcagaagcgtttccttaagcagaggtggaaggttcctccagcttttaaccagttaaccaggacccttgtt

SEQ ID NO: 162699 - DNA, 202 bp, Arabidopsis thaliana columbia
gttacaccaccgtcaggattaagggcataatttttttgtgctttttttgccatcgctgccattttttctccaagtttctgggggggtaggaaactgaggctgaagaagaagttgcctgttccagctgtgtccagcccagttccgttgttgcccgccttttcagtttttccagatagcccattctggttccggggaggcactc

SEQ ID NO: 162700 - DNA, 249 bp, Arabidopsis thaliana columbia
tgggaacgtacgtgacggaggttccgttgtatggttgggaggagaaccactacaggagctggaagagcgggaaccattttttcattgccgccattggccaccaaatccaaattgtcgtggtttccgaaggcgagcatgactgtaaggggtttttcaggggtgggggctccacttttgttggaaggaaggggatgtccaaggagaaagtggggattgctgttcggattaaaccatggccgaaagggggac

SEQ ID NO: 162701 - DNA, 185 bp, Arabidopsis thaliana columbia
gcctatggttggttacgacaatatgtttgttggtgggggcataaaggggacctgggacaactttagctgggaagggaagaccggttaaccgattatttacaaaagaaaagcgggcaaccctttggttaaccggaaaaaggaatacaggggatttttttggcaggaggagataattccgttcttca

SEQ ID NO: 162702 - DNA, 219 bp, Arabidopsis thaliana columbia
gatttccgggtgtggaccacaggcgtccgagggggtttagcgaaaaatggcgatggccttggttcttcgaaggctttctctttaaatggacaaacccattcgtccttttattcgacccacttaatgttacatgttttttttgcccagtgaagctgttgttgggaaggaaagacctgggtgtacttggccaaaacagcttaacgcaccttaggagggggt

SEQ ID NO: 162703 - DNA, 316 bp, Arabidopsis thaliana columbia
tgaaacgggtgtaggccagaccgtcagggtttgatgttggaaccgaaaaaggactgggtcgggcccgagccctccgcctgaaaccatagggccgggtttcttgggaggaccaaagggtaacaggatggcgtttcctgatttaaagttgggttttactgtttgggggaatgattttatgttttttggcgggggcgtttccccagggcctaatagcttaaaaccgccgttgggggaagaggtgggttttactagtttccggcctttcgtggaagggcttaaagggatggttaagggtcagggcgaggtttaaaatgct

SEQ ID NO: 162704 - DNA, 310 bp, Arabidopsis thaliana columbia
agaagaaaaataaactctttttattataaccaaaacctaatgaatctgggtccctcccaaggtaaaccttgggaaaaccccattgaaccagaattggcttaaagctaatcctttttgagcgcggtgggccaaccaccttgccggaggaaatccttgtattactggccggtttcttccatggtattagggaggttttccacctaaggaagaatctaaacccaaccccctttaaaaggcttatggcatggccaaaaaattttcctcatggggaaaaggagaaaggggggagctaagctggtgtgcaattttt

SEQ ID NO: 162705 - DNA, 380 bp, Arabidopsis thaliana columbia
ttcagaaggatcattctagggggcccaaaatgggttcggaggagagggcttttacctccgggaggtattgggtaacacaacttaaccagacccgtcggtttcttttctttaagccattacctttgaaacaatccagggtttgggtggcaactgggggcagagcacaaaggcttaaagttaaggccctaaagatggacagggttttgacgcggttttccggggttgcttttactgtttcgatggggattccggagatggctgaagctgctggttctggaatctttccttccctaaagaatttctggctcagaattgtttttgggggcctggtcctaactgcaataatgggggtggcgcgcggggtttccaactttgaccct

SEQ ID NO: 162706 - DNA, 314 bp, Arabidopsis thaliana columbia
caactccgcccgccagagccagcttttttaaaatcaaagatgtcggcaccccttccaggaccgggaccggctttggggttttcgggttcctcgaaaatctcaaaaggagtttttttttaaccagcttttaaccgaggctgcataaaaaggtctgtttccgtcgccaagaagaaaaaaagtttaagccttaaaaaatctgaggaagctttcaatgctgttaaaaatctaaggcctgggggggggaattccccggttcaggctttcaaatccgtggggggccaaccggtttggatggatcctgtaaaaggctcaaa

SEQ ID NO: 162707 - DNA, 329 bp, Arabidopsis thaliana columbia
accacttgtttaaaaggagcaggcaagggtttcttttggggtgggccctataacaaaagggattagctggatggttccagaatcttggatgctaataaaggggtttctaatacggcccttttatgccactgaagtccggggggcattggttcggccaagctggtgcgtggatttggcagtttaccttgcattcatcgtttatctaataatgcgaaaaacctaacgtgtttttggcctccgttcagcattgccaaaagagccatgagcgcctcaagaagttttttgaccaaaaaaagggcgggccatttcccttttcggccttaaaaact

SEQ ID NO: 162708 - DNA, 281 bp, Arabidopsis thaliana columbia
ccaaacttaagggcgctggcggccaaggttgcagtttttggattttatgtgggggttccggattactttggtggaaatcctaatattccttttaaccaggacagaccaatccttgtttggataaaagaccatggttgggttaagggctttgaaaccacgaaaccagtccttgaaaccttaaagaccaaaggcttacctgccattgtagccgcagggttgtgttggggtgcaaaagtagggggggaactgtttaaagaagagctttttaaagcagctgggtg

SEQ ID NO: 162709 - DNA, 212 bp, Arabidopsis thaliana columbia
ggataatcgcccttaaccaattccattttttttgcaaaaccaggggaagcccatgggggaccttctaagggataaaagaaaccaaggccaatatggctcggcctcaaaaaattaaagctccaaagtttcatcttggccagttcagggcaaagtttgcaaaactaaggacacactgtttggagcctccaaaagtgctttttgtaggcggtgaa

SEQ ID NO: 162710 - DNA, 396 bp, Arabidopsis thaliana columbia
gtctggatttccggttggacccgccgtccgaaactaataaactggtccgacccaaagctaaccgaaaaacttaaaacccaaatcttataactactttaaaggaatcttaataagggcctaagtaacctaagccaccgttgcattcccatttttaaccggccttaaagcctaaaccttaaattattccgccaccgtcggattccaaactgctgctgtggcataaccgaagcttacagggaagtcatttttaaggaacttcggagtcggggccgtagcggttgcagcttaaattgctttggccggaaacgccatggcattagaagttcttttggaaggaggggatgggtcgttagcttttattcccaacgacttttttatagctaagggggggaagat

SEQ ID NO: 162711 - DNA, 239 bp, Arabidopsis thaliana columbia
ggcggacccacccttcctaaaaaccatgtggaagctttaaactttgtttgtttgggcaaaaagggcaccttcgggaccgtcctttacggaggttcggttaaaagaaccgtcctaaaattcctccagaggggggaggaccatgacccatgttttccctgttgctttcggccaccacatccaaattgttccctgtcacaaaggcaaacatgactctaacggttctttctggggttgtaaca

SEQ ID NO: 162712 - DNA, 326 bp, Arabidopsis thaliana columbia
tttttatttttttccattggagctggaagcatccttagcctaccaaacccttcaccattggcttcaatggctgccgttttaggcaaaactccattcctttttaaaccactaaccaattattttccaaactccgttctccctttggccggggtttccttcctttccaaatccttaccccgccggttaggaccaatccaggccggtttaatcgttcccgccggtggtaagcttgtaaagctcatcggggaagagccaaaccggcaggggaggaaccacaaggcggcggttttgccactttttgagctgacggcaattgacttgcattg

SEQ ID NO: 162713 - DNA, 373 bp, Arabidopsis thaliana columbia
tggatttccggggcggacccacccgtccggtttggataaaaatctttgaatctctccatgtttttttttaataaaaccagggttccttccaggtttcgtccagttggtttttacacctttccttttttaacaaccaactttggtgctcctgtttggaacaccacctcttccatgaccgttggacccaaaggtcctatccttttgggggattcccatctggtggggaagcttgccaatttcgacggggaacggtttccaaagcggttggttcatgccaaaggagccagggctaaaggtttttttgaggtcactcatgttatttttaacctaactggggctgactttttccgagctcccggggttcagactcctg

SEQ ID NO: 162714 - DNA, 368 bp, Arabidopsis thaliana columbia
gttggaattcggggcggacccacccttccgattttaactgggggaccaatcgaaaattgttttgaggatcctaccaaccatttaaggggtttatattttaccccgtggtaggcaacctgttggcttgtaacttgtggaccgaccacttgatcttataactccctgcttgaacggggattaacttttcaaccggttcttttaatttttgcctgggccagaaagattttcttaacaagcccagtttaaccaaggggtcccaagcataaatcgtccttttttggatgtccaagtgccgtttggggaactgtttattgaaaaaccaaccaggattcgggatttgggttttcctgaaggaattgaagcttttt

SEQ ID NO: 162715 - DNA, 386 bp, Arabidopsis thaliana columbia
ccgttttggatttccgggtccgccccacccgtccgtaccaatgaatatcaatggtcctccattgggttttttaattcaactctccttaatggttactttttttgcaccacaggtaaaatttagggctttctttgcctttggggactctttcgtcgccattggaaccaccgactacctggtaaccactgcccgtgccgccatttacccgtttggtttcgactacccgccccgttgacccaccggccgtttttttaacggccttaacattcccgccattttcaggggggctttaggcttgccgtcgactttgccgtaccttatcccgcttttaaccggagaaaatcttttagtcggggctatttttgcctccgcaggattgggaatcc

SEQ ID NO: 162716 - DNA, 348 bp, Arabidopsis thaliana columbia
  unsure (1)..(348): unsure at all n locations
tttttnatttccgggcggccccaccttccgaagcctgtgaagttggggccgcctttgttgtttgtttttgcggttttcctccctcggttgaggatccttccgaaccaccatgctgggaaccaattgttagaagagtccccaaagtccaaagcggttgttctccaagggtgggtgggaataatccatgacttgtttttgagcagaaaaggaggggctttccaggctgttggagggaattttaagccccttaggttccaatgcgttgcgaccatgcctgtttaaccagagctgccggttaccttttggagggatgttaccatttgttctggggttttgctttcttaagca

SEQ ID NO: 162717 - DNA, 250 bp, Arabidopsis thaliana columbia
  unsure (1)..(250): unsure at all n locations
ggcggaccaagacgnccgaaaaaagaccaccacccctaaccaatttttattatttttaacccaaaaaaaccattggggcgagcttttacaacctaaagcggggtcctaaccccaccaccattctttgtccaaactaaagcccaaaacttaaacccctctcctaaagtgtcccttctcgaatctcccaattccactttgggaaatatcctttggtttgaccctgccaaatttaattacttaggaccctttt

SEQ ID NO: 162718 - DNA, 403 bp, Arabidopsis thaliana columbia
  unsure (1)..(403): unsure at all n locations
aggcagcccatggtacggatccgaccgagtcaagtacttgggtccattctctggcgagtcaccgagctaccttaccggagagttccccggagactacggatgggacaccgctggactttcagctgatcccgagacattcgcaaggaaccgtgagctagaagttatccacagcaggtgggctatgctcggagccctaggctgcgtcttccctgagcttttggctaggaacggagtcaagttcggagaggcggtttggttcaaggccggttcacagatctttagcgatggaggactcgattacttgggaaaccctagcttggtccacgctcagagcattttggccatttgggccactcaagttattttgatgggagctgttgaaggctacagagtcncaggaaat

SEQ ID NO: 162719 - DNA, 412 bp, Arabidopsis thaliana columbia
  unsure (1)..(412): unsure at all n locations
anatgtcagtncatggagattgcctattattttaaccgcctcgacggatctactacgggcggcaatttctatgtcagaaggctcaacacaatcaatagagaactcttaaagccttctgcttccgtcgctcttcacacgtcactccaacgcccttgttgatgttttgcctccggaggctgattctagcatctccctgctcagccaatctgagaagcctgacgtctcctacaatgatattggaggatgcgatattcagaaacaggaaattcgtgaggctgttgaattgcctcttacccaccacgagctttacaaacagattggtattgacccacctcgtggagtcttgctctatggacctcctggtactggaaagactatgttggctaaagcttgtgccaatcacacaactgct

SEQ ID NO: 162720 - DNA, 437 bp, Arabidopsis thaliana columbia
caaaccctcattccaaaaaacggggtctcgctctcataacctctcctttctcgtcctgctactgcgtggctcttactgtcagagtcctatgcttgcgactgtacccctactaaaccatcaccagcacctcacaaaccaccaaaacatgcacccaaaccggctaaacctcctgccgtcaaaccacctaaaccaccggcagtgaaaccacctacttcaaaacctgccaccgagcaaccccatgctaaaccaccaaccgtcaaaccccatcctaaaccaccaaccgtaaaaccccaccctaagccacccacgcgaaaaccaccctaccctaaaccacccaccaaacctgaccctcacccaaaacctgccatcgtaaagccaccaaccaagccttctccgtgcacccctaaaccttccaccaaacctaccccgttcacacc

SEQ ID NO: 162721 - DNA, 419 bp, Arabidopsis thaliana columbia
ccaaaaacagaaacatggcgtcttcatcttcctcatcgtcttcttcttcgctttcatcaattctctccatcgtcgtagtactgattctaattgtatcaaccgctgaatcagtgaaatcaccgtttcatcctcgcgatttgcttccgcatttgcccagacaagtctcatggccgattctcaactctctttacggcgccgccgatctgcttcctactttcatcggaacagcgagttctgggaacgattccgttgactggaaaggtgcttgtttctttgagaacaccgcttggttagagtttcataacaagtctggtagcgagtttggtggaggcactcttcacattaaggcggataaggcacatagttggacatgtatggatctttatgtatttgcaactccatatcgtgttacatggact

SEQ ID NO: 162722 - DNA, 427 bp, Arabidopsis thaliana columbia
cggacgcgtgggcaatttctcaaaatcttataaactttctctcaattctctctaccgtgatcaagatgcagatctttgttaagactctcaccggaaagacaatcaccctcgaggtggaaagctccgacaccatcgacaacgttaaggccaagatccaggataaggagggcattcctccggatcagcagaggcttattttcgccggcaagcagctagaggatggccgtacgttggctgattacaatatccagaaggaatccaccctccacttggtcctcaggctccgtggtggtatgcagattttcgttaaaaccctaacgggaaagacgattactcttgaggtggagagttctgacaccatcgacaacgtcaaggccaagatccaagacaaagagggtattcctccggaccagcagaggctgatctt

SEQ ID NO: 162723 - DNA, 387 bp, Arabidopsis thaliana columbia
agaaaaatggtgttgacaatctatgcttctttattcgcttcttcaaagagagctgttgtgacattggtggagaagggagtatcattcgaaactgtcaatgtcgatctcatgaaaggagaacagagacagcctgagtatctcgcgattcagcctttcggtaaaatcccagtcctcgtcgacggagactacaaaatcttcgagtcgcgtgcgatcatgaggtatatagcagagaagtatagatcacaaggacctgatcttttggggaagactattgaagagagaggacaagtagagcaatggttagacgttgaggctacaagttaccatccacccctattggctttaacgctcaacaattgctttgcaccacttattggtttccctgct

SEQ ID NO: 162724 - DNA, 348 bp, Arabidopsis thaliana columbia
  unsure (1)..(348): unsure at all n locations
caaagactcttcaagatccttgcgataaagaaaacattcaatcggctgttacgcttcgatccaaagaggagtgaagaaactaaagataaccataggctgcaacgaccagctcctggtcttaacgagaggattctctcatccttgacaagaagatccgtagctgctcatccatggcatgatcttgagataggacctggagctccacaggattttcaatgtggatgtcgagatcactaaaggaagcaaggtcaaatacgagcttgacaaaaagacaggactcatcaaggtggatcgtattctctactcaatangtagcgtccctcacaactatgggtttgttcctcgcac

SEQ ID NO: 162725 - DNA, 416 bp, Arabidopsis thaliana columbia
gaagaaaaaaaatctttttaaagagctttgaagatccatggcgatgtctcatgtccagcctatgctactcctcctcgtatcactcttcttcttaccggctttgcgtggcgccatagatttcgaatactgcgccaaaaatggaaacgattacggaaccgtcactagcattgtggtctctccatctgttgggcctcacgaaaacccaaccatcactataaatttattcggttctgcaagcaaaaacatccccgcgggaacccttgtgtacgtagcctttagagatggggaatttaccggccttttaaaaacttacaacctttgtgatgtgagtgcatgtaacaatgaagctgagattgaagctggcaccaactttgagttaactctttccgacgttctttatgttggttatgatgagg

SEQ ID NO: 162726 - DNA, 343 bp, Arabidopsis thaliana columbia
ggggcggacccacgcgtccgggttttttttcccttctcttaatctcatctttatttaaaacctttcttctctcaaattggtgtgaaaacatgtctgacggcgagcaccactttgaggccagcgaatccggagcttccaagacctatcctcaatcagccggtaacatccgtaaaggtggtcacatcgtcatcaaaaaccgtccctgcaaggttgttgaggtttctactttcaaaactggcaagcacggtcacgccaaatgtcactttgttgctattgatatcttcactgctaagaagcttgaagatattgttccatcttcccacaattgtgatgttccacatgt

SEQ ID NO: 162727 - DNA, 246 bp, Arabidopsis thaliana columbia
cccacgcgtacgatttagatcgccgaatttttagtaatgtgatgaaaatacggcgcacgtttgctactaccgtagctattgaaagaccttcaggggaccacatcgtccttacgagaaggagcgtcttgattctgaattgaagctggttggtgagtttggtctgcgtaacaagcgtgagctctggagagtgcagtactctcttagcctcacccgttatgctttttgagatcttttgtctcttgataa

SEQ ID NO: 162728 - DNA, 409 bp, Arabidopsis thaliana columbia
ctccgatcgccgactaacctccggagctttcttcggcggtctctcctctctgttttctacttgaggtttctctcttctcttactttttttattctttgtgcatatctctcttctcttactttactcaccaaatttctaggaatactttttctcctgagatttgggcttttaatttagcttaattcttctgttaagtagaaatatatcatggcgaatctatgaaattatttcttctgttaagtagacattgaaatttgttacaatggcgaatcgtgttttttttttggtctgtctccattttttggtattgtctctaagaaaataagacgtttgtggtattcatttaaccctgcgattgtattttctgaactttggttactaacatatttaacttttgggaggcggtttg

SEQ ID NO: 162729 - DNA, 312 bp, Arabidopsis thaliana columbia
  unsure (1)..(312): unsure at all n locations
aaaaaaaaaaaaacacaaaaagtttcaatggtcgcctccacaatggctctctcctcccctgccttcgccggaaaggctgtgaacctttcccccgcggcatctgaagtcctcggaagcggccgtgtgacaatgaggaagactgttgccaagccaaagggtccatcaggcagcccatggtacggatccgaccgagtcaagtacttgggtccattctctggcgagtcaccgagctaccttaccggagagttccccggagactacggatgggacaccgctggactntcagctgatcccgagacattcgcaaggaac

SEQ ID NO: 162730 - DNA, 413 bp, Arabidopsis thaliana columbia
  unsure (1)..(413): unsure at all n locations
cattaaccctaaagttcaagcttcaattgctgctaacacatgggttgtgagtggtacaccacagacgaaaaaattgcaagacattcttcctcagattatcagccaacttggaccagataacttggacaacctgaagaagctagcagagcaattccagaaacaagctccaggtgcaggtgatgtcccagcaacaatccaagaagaggacgatgatgatgatgtcccagatcttgtagtgggagagactttcgagacccctgcttctgaagaggcttccaaagcctgctgcttcttagaggaggaggaagnaagaagagaagagctcacctgcaaaacccatcataaaaaggtttgtcgctcgacctcttctgagcactgtcaagatcttgtttctttaatgcttgcgaacagaa

SEQ ID NO: 162731 - DNA, 406 bp, Arabidopsis thaliana columbia
ggcaccgtcgtctattctaaatccaatctatttagcttgtaaaagctactccgattgggagtgtcttcttcaaatccagacctggacgattaccaacttttgtccttatcgatcgtggagattgttacttcactttgaaagcatggatagctcaacaagctggagcagcagcgatacttgtagctgatagtaaagctgagccattgattacaatggatacacctgaagaagataaatctgatgcggattatcttcagaacattaccattccttctgctctcattactaaaacattgggagacagtataaagtctgctctttccggtggtgatatggttaacatgaaactagattggactgagtcggttccacatcctgatgagcgtgtagagtatgaactgtggac

SEQ ID NO: 162732 - DNA, 416 bp, Arabidopsis thaliana columbia
atttaaagtagccataactgttcgatcataggatggaagaagcaactcaagtaacgagttctgaggtccctgtagtgaaaggtgatgttgatgaccttaagacagctgatatttccgtcaaggctgtgaatggagaagtgccaaaggaggagaaagaagaggaagatggggaattcataaaagttgagaaggaagcttttgatgccaaggatgatgcggagaaagcagatcatgttcctgttgaagagcaaaaggaagttattgaaagaagctcgagtggttcacagagagaactacatgaatcacaagaaaaggcaaaagaactagagctcgaattggaaagagttgcaggggaactaaaacggtatgaatctgaaaatacccatttgaaggatgagcttttgtctgcgaaagag

SEQ ID NO: 162733 - DNA, 416 bp, Arabidopsis thaliana columbia
atttagagtctgattattcttcatggattcgtatggccgatacgtcttttgaatattgaaaacaggaacccgatcagaatggtgtccggaccagcttctctatcgattcagtcggaccggaaaaacaatggcgtgtgtgaacccttgcgatctctgggacgatgacgcagaggatcccagccagattgttgcgtctaagccattgaaggttgtggctccggttcagactgctaagtctggtaagatgccgactaagccgcctgctccttctcaagctgtgagggaggcaaggaacgctcctggtggaggtcgtggtgctggacgtggagggagttatggtcgtggtggacgtgctggaaacaatagggattcaaggaacaatgatggtgctggcgctgaaaactgatatggaggag

SEQ ID NO: 162734 - DNA, 228 bp, Arabidopsis thaliana columbia
gaccacgcgtccgaaaaaggcacctggtcgtttctcttcttacttttatgctaaatgccaagacggacgatcaggagactattcttaccttgggagctcacaatctccttatctctcacgcagaagcagttgaagcttaccggaaatgcgaaaagctgtaaggtgggaagatcggaattgctcataattctgcttggttcgaagcacatgaccttgctgattcataag

SEQ ID NO: 162735 - DNA, 421 bp, Arabidopsis thaliana columbia
cggacgcgtgggcaatttctcaaaatcttaaaaactttctctgaattctctctaccgggatcaagatgcagatctttgttaagactctcaccggaaagacaatcaccctggaggtggaaagctccgacaccatcgacaacgttaaggccaagatccaggataaggagggcattcctccggatcagcagaggcttattttcgccggcaagcagctagaggatggccgtacgttggctgattacaatatccagaaggaatccaccctccacttggtcctcaggctccggggtggtatgcagattttcgttaaaaccctaacgggaaagacgattactcttgaggtggagagttctgacaccatcgacaacgtcaaggccaagatccaagacaaagagggtattcctccggaccagcagaggct

SEQ ID NO: 162736 - DNA, 416 bp, Arabidopsis thaliana columbia
cgtctctgagccgcaggtccacagcattgttagtaagatgatgattaatgaggaactgcatgcaagctgggatcagccaacacgatgcatcgtcttccatgaagtgcaacacagcagattacaatcattggctttccagttaacggagaaactctcgattttggcagaaagcaatgagagggcaatggaatctagaaccggtggaggtggtctggatctgagttcaaggagaagggacaacaatcaggactatgcaggagcagcatcaggtggtggtggatattggcaagacaaggcgaattacggacaaggaagacaaggcaacagatcaggttatggtggaggaagatcatctggacaaaatggtcagtggtcagggcagaaccgaggaggagggtatgcaggaagagttggtt

SEQ ID NO: 162737 - DNA, 417 bp, Arabidopsis thaliana columbia
cctatttataaggaaccaaagaaattgagttttctatgtatacatagagaaagctgtgtgcaatgaaaaatgcaagcacggtttggggaggggttttttaccttttttttttcattttaacaaggagattatctactccatccgactagttccgggttcgagtcccgggcaacccactacggatcgtattcaatcgtattcatatgatttggaaaaaatattcctagagcaattctatttctatgtatgtggattcgcttctaatttatttcatcgattacaaaaaattttttatgaatctaaactaaaaggatcttatccattttacattggtagacaagggaaagaagtgtatcgaggaaacttagaccgagatgtctgcagagagacctgtctttattctttggagcatcgaat

SEQ ID NO: 162738 - DNA, 323 bp, Arabidopsis thaliana columbia
ctcaaattacccaacttcttaaacacattctcattacctcacaaaccattaaccgagagccaactagcgagtagaatcaactatcaagcaatggcatcgatgaccatgaccgctaccttcttcccggccgtcgccaaggttccctcagccaccggcggacgaaggctctccgtagtcagagcctccacgagcgacaacacacccagcttagaagtcaaggaacagagcagcaccacaatgaggagggacctcatgttcacggctgcagctgcagcggtttgttcttggcttaagtagccatggctgaagaagagaagccaagc

SEQ ID NO: 162739 - DNA, 424 bp, Arabidopsis thaliana columbia
ccagaagtcgacgacaacaatggcaccgaataagggagttaaagtggcttcaaagaagaagccggagaaagttaccaacccattgtttgagagacgcccaaagcaattcggtattggtggcgctttgcctcctaagaaggatctttctcgttacatcaaatggcctaagtcaatccgtcttcaaaggcagaagcgtatccttaagcagaggttgaaggttcctccagctcttaaccagttcaccaagacccttgataagaatctcgccaccagcctcttcaagattcttctgaagtataggccagaggacaaagccgcaaagaaggaacgccttttgaacaaggctcaagctgaggcagaaggaaagcctgctgaatccaagaagcccattgttgttaagtatggtctcaaccatgtgacttac

SEQ ID NO: 162740 - DNA, 421 bp, Arabidopsis thaliana columbia
ggtcaacaacgtcgagaataatggcatcatttctttgtgcttcttctgccatcgctgccatttcttctccaagtttcttgggtggtaagaaactgaggctgaagaagaagttgactgttccagctgtgtccaggccagatgcgtcggtgcgcgccgtcgcagctgatccagatagaccaatctggttcccgggaagcactcctccagagtggctagacggtagcctccctggtgacttcggatttgatcctcttggtctttcatcggacccggacagtctaaaatggaacgtacaagccgagatagtccactgccgatgggctatgctaggagccgccgggatattcatcccagagttcctaacgaagatcggaatcctcaacacttcgtcatggtacacggcgggagagcaagagttttt

SEQ ID NO: 162741 - DNA, 264 bp, Arabidopsis thaliana columbia
gctcaacaacgtcaagaataatgtcatcatttttttttgcttcttctgccatcgctgccatcggggtccatgtttcttgggtgggaagaaactaatgctgaagaagaagttgactgttccagccgagttcaggccagatgctttgttgcgcgccgatctatctgatccaaatagaccaatttggttcccgtgaagcactccttttatagtggctagacttgtactctcctgttgactttcgcaattattcctcttggtctttta

SEQ ID NO: 162742 - DNA, 397 bp, Arabidopsis thaliana columbia
ctcttcaatccttttctttcattgttttttttcaaagattacgattatggccacaggaggggttcaacaatactagtggggcggccaaacggctctcaagccctccagcgacctcatccaaaaggcgggcgttttgggcggtggccgtgtgaccatgctttgtaccgtcaagtctactccccaaagcatctggtttggaccagaccgttccaagtacttgggaccattctcggagaacacaccgtcttacttaactggagaataccccggagactacgtgtgggacaccgctggactctcggttgacccggagacattcgctaagaaccgtgagcttgaagtaatccacagcatatgggctatgttgggtgctctcggatgcacattccctgaaatt

SEQ ID NO: 162743 - DNA, 406 bp, Arabidopsis thaliana columbia
ccaaagggtccatcaggcagcccatgttactgatctgaccgagtcaagtacttgggtccattctccggcgagcccccgagctaccttaccggtgagttccccggtgactacggatgggacaccgctggtctatccgccgacccagagaccttcgccaggaaccgtgagctagaagttatccacagcagatgggccatgctcggagccctaggctgcgttttccctgagctattggctaggaacggagtgaagttcggagaagcggtttggttcaaggccggttcacagatcttcagcgacggaggattggactacttgggcaacccgagcttggtccacgctcagagcatcttagccatttgggctactcaagttatcctcatgggagctgttgaaggctacagag

SEQ ID NO: 162744 - DNA, 409 bp, Arabidopsis thaliana columbia
cgggaacgtacgtgacggaggttccgatgtatggatcggcggagaaacactacaagagctggaagagcgagaaccatgtcttcgctgactccattggccaccacattcaaaatgtcgttgttcacgaaggcgaacatgactctcacgggtctatcaggagttgggactccacatatgattggaagaaggagatgttcaaagagaagagagagattgcttgtgcgaattaaacattgacgaaaagaggactggatggtcacgtgatggagcatctcaaagtatttgatatcatctacgaatttattcccaaatctgaagatagctgcgtctgcaaaatcactattatatgtgagaagcgcaacgatgactttgccgaaccaagcggctacatgaaattcgtcaagcaaat

SEQ ID NO: 162745 - DNA, 421 bp, Arabidopsis thaliana columbia
ttccctaccaaaggttgataaggttttttattcttttcagcgctcctgaagccaagagctgggtgtccaagctcagctccttcagaacatcgtatttttgccagtcctcttgcaagaaagttggctgaagattataatgtacctctctcaagcattaaaggcacaggtcctgaaggacggatagtgaaggctgatgtcgaagatttcttagcttcaggcagtaaagaaactactgccaaacctttcaagcaagtggattcaaaggttccagctcttgactatgttgacatccctcacactcagatacgaaaggtcacagtcttacgtttggcattctcaaagcaaactattccttactactacttgaccgtggatacatgtgttgacaaaatgatgggtcttaggagtcaacttattttat

SEQ ID NO: 162746 - DNA, 97 bp, Arabidopsis thaliana columbia
gcctattggtcgttacgacgatatgttgtctgtttggtgcatcaaggtgatctgggaccagtttttcttgtgagtgatgactctattaccctatatt

SEQ ID NO: 162747 - DNA, 416 bp, Arabidopsis thaliana columbia
gagaggcttagcgaaaaatggcgatggccattgcttttcgaaggctttcttcttcaattgacaaacccattcgtcctcttattcgatccacttcatgttacatgtcttctttgcccagtgaagctgttgatgagaaggaaagatctcgtgtcacttggccaaaacagcttaacgcacctttagaggaggttgatcctgagattgctgacattattgagcatgagaaagctagacaatggaagggacttgaacttattccatctgagaacttcacatctgtgtcggtgatgcaagctgttgggtctgtcatgactaacaaatacagtgaaggctatcctggtgccagatactatggaggaaatgagtatatagacatggcagaaaccttatgccagaagcgcgctctttgagctttc

SEQ ID NO: 162748 - DNA, 421 bp, Arabidopsis thaliana columbia
tgaaacgagtgtaagccagtaacgtcagggttagaagttggaaccgcagagagactgtgtcaggcccgagcactccgcctgaaaacatagggacaggtttcctcggaagaccagagagtcacaagattgcgtttcctgatttagagttcggttctactgtatcgaggaatgattctatgtcttcttgcgggagcgattccacagggactcagagcatcagaacgccgttgggagaagagggtggtattactagtatccggactttcgttgaagggcttaaagagatggctaagcgtcaaggcgaggtctcaaatgctgaggattctggtaaaatgaggagggacattggtctggactccatggacagagaatttgagagacagcggcaagagattctggagctatggcaaacttgtaacat

SEQ ID NO: 162749 - DNA, 321 bp, Arabidopsis thaliana columbia
  unsure (1)..(321): unsure at all n locations
cgacccangcgnacgaccattcgtccgaataaatttttttancgttttttttaccgcaaccaccgncacctncaagcgcggtttcttacgtaagggaggctcatcatccaccgtggcaattttttgaggtgtacaaagcattgcctattttactaaccaggaaatggttaaaaggcatggagagttttgatttacaagatatatcatgtcttaatttatatatattattatgtatatattctttctctattatttcactgtttattaatttttatatataattttaattctttttttttttttttattttccttaattttt

SEQ ID NO: 162750 - DNA, 253 bp, Arabidopsis thaliana columbia
  unsure (1)..(253): unsure at all n locations
aaaacngggccgacccacgcgtactttgtttgaanggatttatttactattttttttttcgccaagacaagaangaaagaggtatgttttatttctgaggtgcggccgaacacaacacggcatcttcgtaggaaagcttgtaaaccacactatcttcaatatatatctttggtcacccgtgttaaagaaaaaaaatgacataaactgataataaatgtttcttctgtatttgtatatttttcttcaacttttt

SEQ ID NO: 162751 - DNA, 391 bp, Arabidopsis thaliana columbia
agaagaaaaataaactctttttattttaaccaagacctcatgaatcttggtcactcacaaagtaaaacataggaaaaacacattgaaacagaaatagcttaaagctcatccttcttgagcgcggatggacgaacaccttgactgaggaaatccttgtaatacttgccggattcttccatcgttataaggaagatattcaactaatgaagaatctaaacacagacgcctttagaatgtctatcgcatggccaagaatatttcctcatgggagaaaggagaaaggagtgagtcaagctggtgtgcaattctactacgaccttattgactagctcatataaaatggtattacttcattcgttactgctttttactgtgacacttcacaagattt

SEQ ID NO: 162752 - DNA, 422 bp, Arabidopsis thaliana columbia
cttcgcctctcgctccaagattcttacaaactcctaacccaattccccaattctccattcctctctccatgctctgttttgaagttaaaaaacgcatctttactcaacttgagaactcgaattgctcctcttcaaccacaacgacttcggtccaaaacccttgttttgtctgctcagtccagtttcttgaaagttcttagaactgcgtggaatattgggaaagatggaattgaagctggaaccaatcttgtacctgtttctgtgcctagaccagtagcgagaatctctgtgacaattgcagcattggcggtttcgttggttgttgtcaagtcggttctatcgacagctttctttgtattgggtacaatgggatttgcatatttcttattcatagctttaaacaaagatgaagctcctaaact

SEQ ID NO: 162753 - DNA, 349 bp, Arabidopsis thaliana columbia
ctcagaaagatcaatctagagagaccaaaaagagatcggaagagatggcttctacctccgcgatgtcattggtcacaccacttaaccagacccgttcgtctcctttccttaagccattacctctgaaaccatccaaggctttggttgcaactggaggcagagcacagaggcttcaagttaaggccctcaagatggacaaggctttgaccggtatctccgcggctgctcttactgcttcgatggtgattccggagatagctgaagctgctggttctggaatctctccttccctcaagaatttcttgctcagcattgcttctggtggcctcgtcctcactgtcatcattgg

SEQ ID NO: 162754 - DNA, 420 bp, Arabidopsis thaliana columbia
gataccaactccgaccgccagatacagcgttttatagtatcaaagatgtcggcgacgcttacaggatcgggaactgctttgggggtttcgtgttcctcgaagatctcgaaaagagtttcttcttcaccagcttctaaccgatgctgcatcaagatgtctgtttccgtcgacgagaagaagaaaagtttcagtcttcagaaatctgaggaagctttcaatgctgctaagaatctaatgcctggaggtgtgaattcccctgttcgagcattcaaatccgttggtggacaacctgttttgattgattctgttaaaggctcaaaaatgtgggacattgatggtaatgagtatattgactacgttggctcttggggacctgctattattggccatgctgatgacgaggttcttgcggctctagct

SEQ ID NO: 162755 - DNA, 288 bp, Arabidopsis thaliana columbia
cacacttgtctcaaaggagcaagtcatgggatcatttgtggttggtcctatcacaaaagtgattagctggattgttacagtattcttgatgctcatcaatgggtatcttatactgtccttctatgccactgaagtccggggagcattggttcggtcaagcttgtgcgttgtattggcagtttaccttgcattcatcgtctatcttatcatgcgaaatacctcactgtattctcgccttcgctcagcaatgaccaaaagcacattggcgcctttagaaggtttttgaac

SEQ ID NO: 162756 - DNA, 268 bp, Arabidopsis thaliana columbia
acccgcgcgtccggatgacaccaggattcgtgccgctgttcccatcatctagtactcgatgggtaatggatctaggggtgttctttgcagtcacgttgggccgcccaaaaggtgttactcctaagtacagcttaaagcctcttgtgcccagattgtctgaacttcttggtgttgaggatgtaatggcaaatgactctattggtgaggaagtccataagttggttgctggactacctgaaggaggcgattttgctcttggagaattgtg

SEQ ID NO: 162757 - DNA, 417 bp, Arabidopsis thaliana columbia
cggagatcgcccttcaccaattccactatttttgcaaaaacaagtgaagcacaatgggggtgcatctaaaggattaaagagaggcgaggcctatatggctcggactcagaagaataaagctacagagtatcatcttggtcagcttaagggaaagaatgcaaaacttaaggcccaacctttggggccttcaaaaagggccttgtgaggcggggaaggttttgaaggtaccaagtatggtcatggacgtgttgcacttataggatttcctagtgttggaaagtccacgcttttgacttttttaactggaacacattctgaaacagccttatatgaatttacaacactttacatgcatccctggtgtaattcactacaacgacacaaagattcagctttctgatctttctgggattattg

SEQ ID NO: 162758 - DNA, 414 bp, Arabidopsis thaliana columbia
ccgtgaggtggcggctgatcagcttgaggttcggcagagtcaatgggcttactctaaacccattatagttctcgatatactttggaatttcctatttgtgattgtttcaatcgcgattctagggtttagttctgatgaagatcctgatgttcctcttaggttgtggatcattgggtataatgttcagtgtttgtttcatgttggatgtgtcattgctgagtataaacgtcgccgtgttgctaattctcctcctcctagtggtgaagattcctccaatcacgagtctcttagcggaagtgaagatgaatctgatggctatagcattaacaacactgatgatgatgaccatggaactagtttcactaagcaccttgaatctgcgaataccatgttctcttttgtgtggtggatcat

SEQ ID NO: 162759 - DNA, 413 bp, Arabidopsis thaliana columbia
caaaggaccattacaagacatgccatgaacattagttcaatgacatgctcaagtccaaaggtttggataatcttgagacagaagtcgaagatgtcgattgggaaagcactttctacgttcgtcacctccctcaatccaatctcaatgacatttcagatgtgtctgatgaatacaggacggccatgaaagactttggtaagagactggagaatcttgctgaggatttgttggatctactgtgtgagaatctagggttagagaaagggtatttgaagaaagtgttttatggaacaaaaggcccaacctttgggacaaaggtgagcaattatccaccatgtcctaaaccagagatgatcaaaggtcttagggcccacactgatgcatgaggcatcatcttgttgttttagacgaca

SEQ ID NO: 162760 - DNA, 422 bp, Arabidopsis thaliana columbia
aaactcataaactcgatcgaaccaaagctaaacgaaaaacttaaaacccaaatcttatcactactctaaaagaatcttcatcatggcctcagtaacctcagccaccgttgcaatcccatctttcaccggccttaaagcctcaaccatcaaatcatccgccaccgtcagaatccaaactgctgctgttgcatcaccgaagcttacagtgaagtcatctctaaagaacttcggagtcgcggccgtagcggctgcagcttcaattgctttggccggaaacgccatggcaatagaagttctcttgggaggaggggatgggtcgttagcttttattcccaacgacttctctatagctaaaggagagaagattgtgttcaagaacaacgctggatacccacacaatgttgtcttcgatgaagacgaga

SEQ ID NO: 162761 - DNA, 323 bp, Arabidopsis thaliana columbia
aaaaaacaagtggaagctttaaaacttgagtgttagagagcaaaaatggcgacgtcgggaacgtacgtgacggaagttccgctaaaaggatcggccgagaaatactacaagaggtggaagaacgagaaccatgtcttccctgatgctatcggccaccacatccaaaatgttaccgttcacgaaggcgaacatgactctcacgggtctatcaggagttggaactacacatgggatggaaaggaggaggtgttcaaggagagaagagagattgacgatgtgaccaaaacgttgacgtttagaggacttgagggttacgtgatggt

SEQ ID NO: 162762 - DNA, 231 bp, Arabidopsis thaliana columbia
gcaaagatcaagatctgcattcatgttttatgtatcatccagagctgctcctatagggagcgaagtttttatgagtggacggggtcataatctcaaacaggagcagaattatatgcgcaacaaagagggagcaatgaaagctagcttttttaaccttggatgagttgttgccactgcccgaagagacaaacacccacaagtctatatagtaaaaacgtttgatcagatccc

SEQ ID NO: 162763 - DNA, 420 bp, Arabidopsis thaliana columbia
  unsure (1)..(420): unsure at all n locations
ctctatctctctccattagagcttgaagcagccatagcctaacaaaaccttcaacaatggcttcaatggctgccgtcttaagcaaaactccattcctctctcaaccactaaccaaatcatctncaaactccaatctcccttcggccggggttccttcccttccaaaatcctaccccggccggtaagatcaatccgagccggattaatcgctcccgaccgtggtaagcttgtagagctcatcgtggaagagccaaagcggcgagagaagaaacacgaggcggcggatttgccacgtgttgagctgacggcgattgacttgcaatggatgcatgtattaagcgaaggctgggcaagtccactcggaggtttcatgagagaatccgagttcctccaaactcttcattttaactcgctacgtct

SEQ ID NO: 162764 - DNA, 349 bp, Arabidopsis thaliana columbia
gttttgataaaaatctctgaatctctccaagctctcttctcatcaaaccatggatccttacaagtatcgttcagctagttcttacaactctcccttcttcaccaccaactctggtgctcctgtatggaacaacaactcctccatgaccgttggacccagaggtcctatccttcttgaggattaccatctcgttgagaagcttgccaatttcgacagggaacggattccagagcgtgtggttcatgccagaggagccagtgctaaaggtttctttgaggtcactcatgatatctctaacctcacttgtgctgactttctccgagctcccggtgttcagactcctgtcatt

SEQ ID NO: 162765 - DNA, 313 bp, Arabidopsis thaliana columbia
gcgaaccaacaaaaagtcttcatctttaattatttatatggcttcttcgccttctatgcagatggggcacacttcccgctccattgcccagattgggttcggcgttaagtcgcaattagtttttgcaaatcgaacaactcaatcagtttgctttggagctcgttcctctggaattgcattatctccgagattgcactatgcatcacccattaagcaattttctggtgtttatgctaccaccaagcatcattgaaccgcttgtggataatccatggctgctgaggaagaagaagtatatctgaccttaaggcta

SEQ ID NO: 162766 - DNA, 391 bp, Arabidopsis thaliana columbia
aatcctttcctttcattgtagttaaacaatttttacgattatggccacatcagctatccaacaatcctccttcgccggccaaacggctctcaagccctccagcgacctcatccaaaaggtgggcgtcttgggcggtggccgtgtgaccatgcgtcgtaccgtcaagtctactccccaaagcatctggtatggaccagaccgtcccaagtacttgggaccattctcggagaacacaccgtcttacttaactggagaataccccggagactacggctgggacaccgatggactctcggctgacccggagacattcgctaagaaccgtgagcttgaagtaatccacagcagatgggctttgttgggtgctctcgtgtgcacaattccctgaaat

SEQ ID NO: 162767 - DNA, 410 bp, Arabidopsis thaliana columbia
attttcacttggtgaccaatcgaagaatgtttggaagattctaacagacatgtcaagtgtgtatgatgtagcgcgtcgtaagcgatctgctggcttgttacttgttgaccgcacacttgatcttatcactccctgctgtcacggggattcacttttcgatcgtatcttttcatctttgcctcgggcagaaagattttcttcacaagcacagcttaaacaaggggtcccaagcatcaatcgtccttctcttgatgttcaagtgccgcttggggaactgcttaatgaagaaccaagcaagattcgggattctggtctttctgaaagaattgaaacttttttacgtggctgggattcatatacctctgctccacaaaatgtatgtttgtttaatgaatgtgacaagaaaatta

SEQ ID NO: 162768 - DNA, 418 bp, Arabidopsis thaliana columbia
taacaatgaatatcaattgttctccattagggtttctaatttcactcttcttcattgttacttttcttgcaccacaagtcaaatctagggctttctttgtctttggtgactctctcgtcgacaatggaaacaacgactacctcgtcaccactgcccgtgccgacaattacccgtatggtatcgactacccgacccgtagacccaccggacgtttctctaacggccttaacattcccgacattatcagtgaggctataggcatgccgtcgactttgccgtaccttagcccgcatctcaccggagaaaatcttctagtcggtgctaattttgcctccgcaggaattggaatcctcaacgacactggaattcaattcgtaaacataattagaatttctaaacagatggaatacttcgaaca

SEQ ID NO: 162769 - DNA, 425 bp, Arabidopsis thaliana columbia
gaaaaggtttaggaaaaatgtgttgttgatttgagatttctcgaagtgttggtgagcgattagggttctgtattgtgaatctatcgcgtcgttcgtcggagaatgaatttcgttgtacagagattttagactgaacctaagcagaacttgcaggttacagtttcctttcgtcgatcgattgctgaacttgataggttctttgagtgtttctctgcgatatggcgaaccttccgatccttcaatttgaagagaagatcgtggaaacagtggagaagaattcagtggtagttataattggagaaaccggttctgggaagagtactcagctctttcagatacttcatcgacatggttacacaaagtccggcgtcatcgccatcactcagccccgacgtgttgctgccgtttccgttgccaggcgagtc

SEQ ID NO: 162770 - DNA, 412 bp, Arabidopsis thaliana columbia
aacaatgaatataattgcgcttcattagggtttttaatttgactcttcttcattgttacttatcttgcaccacaagccaaatttagggcttattttgtatttggtgactctcttcgaaacaatggaaacaccaactaccgtcggtactcactgaccgcgccgacaattacccgtatggtatctgactacccggcccgtagacccaccggtcgtttctataacggccttaacattcccgacattattagtgaggctataggcatgcctgccactttggcggaccttaccctgtatcttaccggaaaaatttttttagtaagtgctaattttgtctatcgacgaattgggtttctcatcgacactggaatacaattctttaacataatttgagattctaaacagattgaattct

SEQ ID NO: 162771 - DNA, 400 bp, Arabidopsis thaliana columbia
ttattacttgcgccacactctcaccgcaatttttttttttacaatggctctttactctccggctgggtccggaaaggccgtgaaggtatccccggcggcctccgaagtatctggaaccggccgaatcaccaagcgcaaagcctccaagcccaccggtccatccggcagtccatggaacggatccgatcgagtcaagtacttgggtccattcttcggtgagcctccgagctacctcactggagagttcctcggtgattacgggtgggacactgtcggtctatccgtcgatcccgtgaccttcgctaggaaccgtgagctagaagttattcacagtagatgggccttgcttggagccctatgctgtgtttttccctgagctaatgtgtttgaacggagtgaa

SEQ ID NO: 162772 - DNA, 442 bp, Arabidopsis thaliana columbia
ggaaaaccggccggccacgcgtccgctttcacatctatcttctttggtggcaaacttattttctgatagagagaaacgatggcggggaactctcttatgagctgtgggatagcctccgtgtacccttcgcttctctcttcttccaagtctaaattcgtatccgccggagttccactcccaaacgccgggaatgttggtcgtatcagaatggctgctcactggatgcctggcgagccacgaccagcttaccttgacggttctgctcctggtgactttgggtttgacccacttggacttggagaagttccagcgaaccttgagagatacaaagagtcagagctcatccactgtagatgggctatgcctcgtgtttctgggaatttggttccataagcatttagatatgtaaacttggtttaggctcatgaatgggcttttctac

SEQ ID NO: 162773 - DNA, 272 bp, Arabidopsis thaliana columbia
ttattgttcgtttctatctcaacatgtatttttttacctaggctaagaatggatcgactggtaaatcttggatggaaattgctcttacctatttcccttggtaatctattattaaccacttgattccaactctatctactctaaacttaaaatgaatctaatatattcattatttgtttttaacaagacacagaaccaaagataaaatttttcagagatatttacattatgcttcctattattaccgggttcatgaattatggtcaacaaac

SEQ ID NO: 162774 - DNA, 412 bp, Arabidopsis thaliana columbia
caagaagaacaacaacactaagcaaaaaagaaaagctcaagccgagagagacaatggcatcaacattcacgagctcaagcagtgttcttaccccaacaacattccttggccagactaaagcctcaagctttaacccccttcgtgatgttgtctctctcggatctcccaagtacactatgggaaatgatctttggtatggacctgacagagtgaagtacttaggacccttttccgttcaaactccgtcttacctcaccggagaattccctggcgattatggttgggacaccgccggtttatccgcagaccctgaagcctttgccaaaaacagagctcttgaggtgatccatgggagatgggcaatgttgggagcttttggttgcataacccctgaagttcttcaaaagtgggt

SEQ ID NO: 162775 - DNA, 388 bp, Arabidopsis thaliana columbia
ggcggaccaaggcgtccgggatatgaaaaattttccggggttggggaagaaggagcttaaatcagttcctaagcaggctgtggggtggtttaaggacaattaccctgggtttgttttaaaacaggctttaatcaaggttcctggggggaacctggggtttaatactgggatgggcccgttcatgcccccaagatcaaggggcaggctggggttggctggtccttcgggttcagttgaaaccttattaaaatccatataacccgggcaggttccagtccaatttgggggatggggggtggatccttgcgactgcaatccaaacttttggtgggaggattcagcctttgagatcactgttaagcccggaccaaaccaaactgttgggatc

SEQ ID NO: 162776 - DNA, 381 bp, Arabidopsis thaliana columbia
cggggcgggccacacccgtccgttggtaaaggcataaaggcaccggtttgattttaggttaagcatccttaacatttggaatgggatatttgttatggggggggggctttacaatcccattttgaaccacgtccaacaccaaattgatgaaacccaaatggtgtgggagaaactccaaaccatgaccatctttaactaaccaaattgccattaccgaagtccaatgccaactttttttttccttaacggggttgcctttgccatagtccatgctaacttaaggtttgaaattggtttaaaggcccactacgtgatacttggcctttaatgcatccctcggatttccaagtcctacattaacacaaaggacacaccatccaa

SEQ ID NO: 162777 - DNA, 325 bp, Arabidopsis thaliana columbia
gtccgttgaaaatggacctggtttttttacatttcccaaaagaaaccttaatgtccacaccaatttaagtccacattttaatccaggaagccaaccaccatcaaaaccaatttccatagccatccttttttaattgaagctgatcaaacagtacccttccaaatgaaagagaagatcctttgtttggagctaatgggaatggactaaggaaaggccttttttttaaaccaatgtttttgttaagcccccttggattcaatcaaatcggccttcaatttctttaattaaaagggattttccccaatggccttccaaggattttggg

SEQ ID NO: 162778 - DNA, 402 bp, Arabidopsis thaliana columbia
actttatggaagggggtaggagtaggaggcctaaagggccggttcttaagtccgatgatgggtacttaaagtttttggtaaggtttaaccgttttttgggggggggatttaacagcaccttaaaggttgggattttgaaagggtttttaatgagcaaggtaaacaaagttcctttttaattttttaggttggtaaagttaatgattggcagggttgccaggatggttgggtgggtgggacctataactgatgattggggggttcatgagattccggccatgaaggtaactgcttgggggttaactgagggggttggggttggaatggaaaaagctgttggggagtgcttaacttttgaccagttggttttaagagttccattgggccagaccacagtttttt

SEQ ID NO: 162779 - DNA, 457 bp, Arabidopsis thaliana columbia
tgaaaaaccggggcggaccacagccttccggaaaatatccaaattttgcaattatccaagatcgtcttattggccaacttaggggtttgggggtaataactttggttgaccggtgggttgttaccaaagttatcgaaaatcctaatgtaataaatggcaaacaggttggaatcaaaaggcctattccaaagggtgttgttggcaataagccaagggccataaaaccaaaaaaaattttcgtggggggtttaccttaaacggttccagaaaatgaacttaaggccttttttgccaagtttggaaccggggggaaccaccagttatttggggaccttgaaccaaacaggtccagaggttttggtttggtattttttgttggcaaaaaagtcttaaataatatttttcccaagggaacctatttctttttggcagaacttaaggtggagatcaagaaagt

SEQ ID NO: 162780 - DNA, 369 bp, Arabidopsis thaliana columbia
  unsure (1)..(369): unsure at all n locations
cccggaanncccgggccgaccacagccgtccggggtcttccttttataatcggaattaaccaatcggattctccggtttttggtttttttaattggcgaatctttaaaccaatggggagtctaacctttgttgggtccttaacgattttaaatctccgatgaatcaaatccatcaaaggatccatctttaaaaccgggttccgtaattcgattggctcggtttttggttttccgtttggaatccttaataaagaacccaaattgggggaaaaaggaggggtgtggttattaagggattgggaggtttcccgtccggttatggttaccccaggggtgggtgttttgccattattcgttccggctctcctg

SEQ ID NO: 162781 - DNA, 386 bp, Arabidopsis thaliana columbia
gggcggaccaacccttccggcctgccgaataaaatgtcctcggagtgtcttttttttgaccataagaaaaacttccgggaggccaaaggttcaataagggggccaatgtaccgaatctaaccgagtaaagaccttgggtcaattttccggcaggcccccaagttacctaaccggggagttccccggtgattacggttggaacaccgttggtttatccgccacccaaaaaactttttccggaaaccgtgagttaaaatttatcaacagaaaatgggccatgctcgaagccttaggttgctttttccttgacttattggttaggaacggattgaatttcgaataaccgttttggttaaaggccggttaaaaaattttaatcatcggag

SEQ ID NO: 162782 - DNA, 375 bp, Arabidopsis thaliana columbia
aatcccggggcggaccacagccgtccgaccaaaaaaacctaaaaggttttagagggaaggagggggggggttggagggtaaagaaaaggaggttagagtcgaacttaccaggtttccgaaagggcacccaatcggaccttcggttaaaagggccagggcctccaaagggccaccacttgccccgttgttcaagcccgccaggctagcttaatggtccttttggggggctggaatggctgagttaatagctccgttttggtcccggaccataactgtttggactgtaatgggtgtgaaggggcaaccgaccatgtgtgcttccgtcggaatccaaggattcttttggcctttcggggtgtggacctgggttttcgt

SEQ ID NO: 162783 - DNA, 331 bp, Arabidopsis thaliana columbia
ccgggcggaccgagccgtccaattcgtccaatttgggggaggggatcccaatcattttgaaataaacagcttgtaatatccgacgtactgttctgaagagggttgggactttaattgaaacctaaccatcaatccaagaaatgttcagccaattaagtaaccatttaacagttattttcaggaggaaggcttttttgctttggtccacagttaagggattggccaaaatggatttcacagaaccagaaaccaccatgaccgattttgtgtcaaagtcccaccattcccaatatccaccgtctaataaaaaaggtacctccggggtttagga

SEQ ID NO: 162784 - DNA, 421 bp, Arabidopsis thaliana columbia
ccggggcggcccacacccttccgcttgatttgggcctgggggatcgaccctttgttcttgattcaaggtttttttgcaggaagggtgccttggttaatgcgaccaggtaagccacaccgattccaaaggaccgcttaaggaaccgattagttttccatgaggggcgtttagcgcaccgtccaactccgttaaacgccattataacatacctatggtttcctttgggtttaatcctttcaataattggggtttacttaaacctcctttaacttgaaggattggtccgttccactaacaggaggttcgggatccacttaaccattcggggtcatggtcctcaacttccttcccttggaactttgggcaccttttatgtccttaacaaccgacccgggctggatccaataatcgtggttttggt

SEQ ID NO: 162785 - DNA, 387 bp, Arabidopsis thaliana columbia
ggaaatcccggggcggaccacagccgtccggtggttttcgtcgccgtgggggctggggttgtttattttttaacatcctcaaaaaaacgcggggggtgttgggatccagggaatttaagggagttaaagttggttaagagccataagtttagtaacatgggggccaagttggttttggaactccaaactttaacttttgggtggggtcttccaatgggccaccacataagtggcaggggaagggttggccaggggggggaggttattaagccatccacccggattccgtaggactttgccgtgggacgtttcgaactggtaattaagaggtttccgaagggccggttgtttaatattttaagggggaggcgtgttgaagaccttttt

SEQ ID NO: 162786 - DNA, 375 bp, Arabidopsis thaliana columbia
aacgggcccggaatccggggccgccccacccgtccgtttaattgggccggtcaggattaattttattttttttatttaccccaccaggaggtttctaacttgattctgttttgtaaagtcccccttttttagccaccgcgtttttttttttttcctggtcctcttccgccgccgccgcggttgccttggaaactcccaaacccaaggtttgcttcttcggaggtggaccaccagcccacacgggggcgatctatgcatcgggggcggagcttaagcctttctttcttaaaggatggatggttaacgccatcgttcccggcggtcaattaactccaccacccgacttcgaaaacttccctgggttccttgaggggt

SEQ ID NO: 162787 - DNA, 436 bp, Arabidopsis thaliana columbia
  unsure (1)..(436): unsure at all n locations
ggnccggaatcccggggcggcccacacccgtccggttttccaaattttcgttaaaaccttaacttgaaagacaattccttttgagggggggggtgttaccaccatcgacagggggagggccaaaatccaaaacaaaaagggttttcttccggaccagcaaaggctgattttccccgaaaggcatttgggggatggcaaaacttttgttgcctccattatccaaaaggggtccacctttaatttggttttaaggttccgggggggtttgcaaattttcgttaaaacgttaactggaaaaactataactttgaaggtggaaagttttgccaccattgataccgtgaaacccaaaatccaagacaaaaaggtgtttcttccggaccagcaaaaatggatcttcgccggaaaccaatttgaagatggcagaactttggcc

SEQ ID NO: 162788 - DNA, 463 bp, Arabidopsis thaliana columbia
  unsure (1)..(463): unsure at all n locations
gcccgaaannccggggcggaccgaggcgtccgttaacaccaccaaatttaaaccgtttaactttgggttgaattactaaacctaaatgcccgcttgagcaatggttttttctgcccgggctttccccggtaaggccgtaaagttttcccccggggattttgaagtcctgggaagcggccgggtgccattgaggaaaactgttgccaagccaaagggcccatcaggcagcccatggtccggatctgcccgggtaaggtcctggggtccattttttggcaaataaccgacttaccttaccggaaggttccccggaaactacggttgggccaccgccggcctttaagttgaccccaagccattcgcagggaaccgtgacctagaagttttccacagcagggggcccatgctcggagccctaggctgcgttttccttgagctttgggttagaaacggagtcaagttc

SEQ ID NO: 162789 - DNA, 394 bp, Arabidopsis thaliana columbia
  unsure (1)..(394): unsure at all n locations
gggcggcccacacccgnccgctttaatattaatttccttcctccgcctccttaaaatcaaatcttcctccgccattcaagtttgggggggccagaaccggggaaagggtttcttttagggaaaagcttttaacctccttttccaattaatccctcctttcttcaatctttctctctttcgatttcgatccaggggggttggggaaggaagaaggggaacccccccccaccatcggggttgttccggcgggcccggccaaattcccgactcccattttttttttgggcttttgggggggcacggcagcttccggcgttgttttagggtttattttgggccttggttggctttattttacaatgccttaatttgatttccgcgtttttaagcttcc

SEQ ID NO: 162790 - DNA, 385 bp, Arabidopsis thaliana columbia
  unsure (1)..(385): unsure at all n locations
ggaaanccggggcgggcccacccttccaattttatttcccaaaccacaaaccaaaaaaatttgttttccattgttttttaaacccccgggggggaaacttaattaatcgggggttcccaacttccaataagtttccgttcctttccatcagccaacacacaatcctttttcggtttaaaataaggccccgttcgtggtggccgtgtaacagccatggttccttccaaggtcaagttcataacaccagaaggtgagctaaaggttgagtgtgccaccaccgtttactttcttgatcctgttgaggaagctggaatcaatttgcctaactttggccgggctggttcttgtccaacctgtcctggtaaagtggggtttgaatctgttg

SEQ ID NO: 162791 - DNA, 438 bp, Arabidopsis thaliana columbia
cggggcggcccacagccgtccgcggaactgtttgggatgatggtcctaacgttggggttaaaaaggtgtccttgggccaagggcaggatggaatttaagttggtaggtttgtttccaacaaaagccttgagggggtaacaggaaaagaccttggaaggagtcttttattcggattcgaagagttcgtccttgattatccaagtgaatccataaccgaagtcgatggcccttttgataaaatttttgggggtgatggttaagtcttaactttgttcaggttcaagattattaagcaaacgtttcttccttttggacttgaagttggcccagttttcgaactaaaagaggaaggccacaggatcgttggtttcaatggaagagccgttgtcttgttccacaaaattggagtccatgttcgtccttattccaactgatgat

SEQ ID NO: 162792 - DNA, 454 bp, Arabidopsis thaliana columbia
aaatcccggggcggcgccacacccttccggaaagtacaaccttgttttaaaagattctgaataaaaagagctaaaaggtttcctcaatgttggcaataagccattagggggggtggatttaaaatcctaaaatttttaaacgcccatggattaataactaactatggtaatggaagatgatatggtaaaggggatggttgggtttgataatgaagggggtacctaacagagggtggtggactggcttgccattgtggccaccacctggaagtgatttaataaaacttggttcaaggttttccaattttttcctcttcctctttgtaacatgagggttttaaaaatatcggggaaaacggtttaatggtagtagggttttgaaataaataatcataaccttttcaaaaaaaaataataatttcatttcaatatatattttatttattattattat

SEQ ID NO: 162793 - DNA, 372 bp, Arabidopsis thaliana columbia
  unsure (1)..(372): unsure at all n locations
gggaannccggggcggaccaacccttccgaaaggtaacaaagtccaagaaaattttccatgtgaaaagcccaagaacttctttaacccgggtgcaattttaaaccgatggggttntcttaccaaccaaaagcctttctttaatttaaaggtaaaggacttaaaaaacgaaaaattgcttatttcctttatttttgaattctaagttaaaccaatcgcaactgttaaggaacctttaaaaaactttgttaacaatttgcccaatcaattaaaaaacaacctttggtcctttgcaacaaacttggttccctaaaagtaacccaagtcctattttttttaaaataactttttttcaaattttttaaattctatta

SEQ ID NO: 162794 - DNA, 457 bp, Arabidopsis thaliana columbia
  unsure (1)..(457): unsure at all n locations
ccgaaancccggggcggaccagaggcgtccggtaccttttccagaaaggttcaaccaaattttaaccgtcctataggattaccattgttggattggttccgcccaacgaacgggggttccttccaaccggaaaataaacgttcgtaatcgttttaattccggttttttttttttccacctagaacccttttccgacccccacctatttccgcgggggaggtgaaggatgtcccgatcccaaaaattgataaaaccggccgtttaaccagtcttggacccgaacccaagctcgttttggaaatacttattccccaatccttaaaaggctttgccccaattcgtttttttaagaggggattaaccccaggaggggggcctggttccaagtttgccaggagttctttgttggaatccacccccataacctttgaaggccccccagttaaaccagaaccaa

SEQ ID NO: 162795 - DNA, 280 bp, Arabidopsis thaliana columbia
gggcggaccaagccgtccaaaaccaagggtttccttatacctctctcccgttcctatggtggcctttccgcttaaggcggtgatgttcgttcttttcacggggctaaattcctccgttgctttccaagccacccgaagggttaacaccaccattacttccataacaggcaccggcggaggagttaactgcttccaggtgtggcctccgatgggaaagaaaaagtttgagactttttttaactttcttgacctaaccgattccgaatgggttaaggaagtt

SEQ ID NO: 162796 - DNA, 346 bp, Arabidopsis thaliana columbia
gtcaaatttgttttatggtggtttttgtgttgaagggcggtccaattaatgggatcggtatcaaaaatttttttgcagggttttaattggtccctgcccttggatttttactttatgggggaaggcttttcctaatgttgcaacggtttccagtaaaatttaaaggccggcccaaaaggctgcaagaggttggttccgtaccacccatatccttaacgtgtttcctaataaaatgaataatgatgggcttggttgctttcaataagggggcaaaccttgattttttaaatcaccccatccttaacttaatatataaccggtgggtaaagaaattaccctccttttt

SEQ ID NO: 162797 - DNA, 364 bp, Arabidopsis thaliana columbia
ggctgacctacaaaatgatatttttattgcttccaggaagatccgttttagggctgaaaattttaagggagggatggtgttaacccatttttggggtttggatttaacacccaccaagttaaggtaattgttaaaaaattggcaaactttgattgaaccccatttcattttaaaaacaacaaacggttccaccttgaggatgttttgcatcgctttaacaaaaagacttcttaaccaagtaaagcgtccttgtacccttaaatccacccaatatcctcaaatccgaagaaggaggagggagattttgttaaaggaggtttaattttttgacctaaaggagtttgtgcccaatttaatccaaaag

SEQ ID NO: 162798 - DNA, 393 bp, Arabidopsis thaliana columbia
  unsure (1)..(393): unsure at all n locations
cggggngggccggaggcgtccgaaaaacggatccgtaccttcggaaaaaggtttgctttttattttttcccaacttccaagggcaaggatgttaactggttgttggtggccaatgtccaatggaaaatgtttgtcaagttttgcaaacttttgccctttttaaagggatctgaaccagttgaacttgctccaagggcaatggaaaagtcctgcaagaccagatcttgatttattattaaaaaaaaggagccttcattgttcaccattttgccgggtcctggatttaatatgaattttaataattgattgtggctatgacgtatttatttgtgttgtaatttaaaatcctggttgggtttatagggcagttttttaccagtaagatgtggccaa

SEQ ID NO: 162799 - DNA, 433 bp, Arabidopsis thaliana columbia
ccgggcgggccacagccgtccgttaaaacttttaataaaaatcttggtttttttaccaccaccgaaaaaaatttcctttttgtggaaaaactaaccaatggcggttaaccaaaatccaaagttaaagcttaacccatggtctgttttggccatgtgttgggaataaccagtccacctgaggaaaccaggaaaggttccggtgggggagactcctttgaaaagactgggacccagcctttttaaatccggtttcgttgccaaacactttgaggtggccaattttcctttgttggaaacaataaaggagcgcatcccggagatgtgtgcaccgttattaaatgtgtcttgtgttcaggtttatgatcaccttgttgctgtctttaaagctgaattgatttcttccacttaaaaatttttttcttttattttattt

SEQ ID NO: 162800 - DNA, 381 bp, Arabidopsis thaliana columbia
ccgggcggaccacacccttccgaaaaaaggtaaagagggaaaatggaatcttatattttcgaaaaaaaaggaaagaaagggggggttgttaaccaggggggccgccataaactttaaaaaaccctttaatagtttaccttttaaaaaaaaggttccaaagccaatcaaggaaataaggaagtttcttaaaaagaaaatgggaccaaaggttttaaaattggtttttaaattaaccaaccaattttgtaccaaagttttcaaagttcctccaaggagaattaaattcctatttgttcttataaaaaattttgttgaggttgcaagggaggagttcttcttttttttaattttttgttaaaatcctttttaaaggattttttg

SEQ ID NO: 162801 - DNA, 403 bp, Arabidopsis thaliana columbia
ccggggcggaccgagccgtccgtttttcacaagcactcaatttaaccgtttttttatttttaactaaagttggctttaaaccgtcagagggttaaacccaagggttggtttttttttccataaacgttttcgttaatggcaacccctattaaagcttttttttcttccaccattgggaaaaccagtgatggtttgaaggtccagtctaatgttcaaattggggcaaccattctgttgtttgtggaaccggttgtttttgtcccctaagttccaaaccagggaaaccaggaccatccaaagtctaaaattttggggcgggcggtagcaccaattcattatgttaagttgaaaaatttgggtttaaacccatctttaaaaggacccaattttgggggaaggttct

SEQ ID NO: 162802 - DNA, 244 bp, Arabidopsis thaliana columbia
  unsure (1)..(244): unsure at all n locations
gaatnnnggggcgggccgagccgtccgtttgtttttttggggtttttttcaattttttttattcgcttaaaaaatgcttcccccgggcccggtaaattaagaggggaggaaacctgtgaaacctgaccaccatggtggtggtttcggtgccattggaggaggaagttcccaaggggggggcggccttggtggccacggaggggggggatcccaaggtggaggaggccaatcccaaggaggcttt

SEQ ID NO: 162803 - DNA, 358 bp, Arabidopsis thaliana columbia
  unsure (1)..(358): unsure at all n locations
cggaancccgggccggcccacccgtccgttttgatcattcaacttttcaaaattttgtttaatcgccttcgcaatcgcttttttgtggagattcctaaaacaaggccttgttttttccncttttttccttcgccgccggttttatttccgcctcccgggggatttggtccatcggggaaccagtgccggattctttactccggcgtcccgccaccaaaaatgggttcctgtcctttggatcctaggaaaagaggagattcctctgtggttgggggtggcttaaaaaccgttaatgtcattgttgttcaggtaacggaggccgataaggccccctttttccccatttttaaagcccccg

SEQ ID NO: 162804 - DNA, 433 bp, Arabidopsis thaliana columbia
ggcggcccacacccgtccgagtgggttcccctgggggaattttaaacccgtttaatttggttcctccccaggaggccagggggaaggacttggcaaccggggggtggccatttttggcttttttggggttgggggttaaccacattgggcctggaaagggcccttttgggaatttgtggcaccattggtttgccccatggcccaccattttggtccaacctttaacctaaggagtgaggccggccttatgatctaatccctatttattttccataactttaatgtttgcctgggggggggttcaattttaaagttttgggtttttgagctggattatttgttgacccgtggtagttccatgaccaaatttggattcttaattgtccaggggacctaggttattcaccaaaaattataaaaaaaaattattttt

SEQ ID NO: 162805 - DNA, 454 bp, Arabidopsis thaliana columbia
  unsure (1)..(454): unsure at all n locations
cggnccggaaatcccggggcggccccacccttccgtttaaacctttcctttcaatggaggtaaaccaaggattccaattttggccacttaagttttccaccattcttctttggcgggccaaccggttttaaggccttccagggacctaatccaaaggggggccgtttgggccgggggccgggtgaccttccttggacccgccaggtttactccccaaggcttttggtttggcccagcccgtccaaggtcctggggccctttttgggggaccacaccgcttaacttaactggggattcccccggggcctccggttgggccaccgttggcttttgggttgccccggagccattcgttaggacccgggggctggaagtattccacagcagatggcttatgtggggggctttcggatgcccattccttgaaatcttttccaggaccggtgttaaattc

SEQ ID NO: 162806 - DNA, 448 bp, Arabidopsis thaliana columbia
  unsure (1)..(448): unsure at all n locations
gaatnccggggcggaccacagccgtccgaaacgaaaaaaaagttatggttgaaaagaagagaacctatatttagggaaatggttttggaggcggttcccgtggaaggtttgagggcaggaaccattcaaaatcctccaccccatccgttaatgaagggggcgaggttaaaaaattgcttttctaacaaaccaattttggcaaagtcggtaaccaccgtccggttttaatacataaccgcttagccagtaatgggtttcaggattaagtccaaacctaatcccgttggcgtaaattgcggggtagttgaaatctcatgattcattggggcgtcgggggtgttgagctaaatccggaactattgaaccggcgggatctttggtggtagcataaacccaggggttccttttggcctatactgggaccgtaaggggtcgttccttagggccg

SEQ ID NO: 162807 - DNA, 452 bp, Arabidopsis thaliana columbia
  unsure (1)..(452): unsure at all n locations
gggngggaatccccgggccgcccaacccttccaaccatttttttttattttttccaaaaatacaaccataactgttttttaatctccaggggctttaatggtttttttggtgggggttttttaaacaatggtaatggttattcttcaacccagggccattgttgtcccatttggccttacctccttccaacctgggccttttacccaccaaaaccatttaattggcggttccaaccttaagttaatcctcaccaaatccactgccccaggatttcaatcaaaggggcaatatttgtttgaccattttagtttccacataaagtttccagttgttgccacacccgaatttgtcacagttttttatttataatttaccaccaatgaccttgccaggatagacttgaagttccttggaaccagaacaggtcacccagtttttttacatccaaatg

SEQ ID NO: 162808 - DNA, 392 bp, Arabidopsis thaliana columbia
  unsure (1)..(392): unsure at all n locations
ggnccgaaatccccgggccgcccacacccttccggcaaaatctttttttttaatgccaacttctttaaccaaaaatcaatttttttccatggggaacttccccaagcaggcggggctttccaaaaaaatgtttcaattaatggaccacttcgtaggtggacttccaccgcccggtgacttacccttaaaaaaaaggaattttttttcggccccttataaaaccttgattgaatctttccttccgcattgaaaaattcttttttcaattgaccaaatggaaaaaagcaggaaaacctaaaaccacttttcttttgcaaaggattacatttttaaggtgggaacttacctttttacaacctgttctgggattttaaggcaccttgattcccttt

SEQ ID NO: 162809 - DNA, 429 bp, Arabidopsis thaliana columbia
ccgggcgggccacagccgtccgaaaccaaccactaatttttcaacatcttgattgaaaaaaccaaaccaggttttttagggagctaatgccaatggcggtgggggaacctgtcctaattggctttggtttttctttcttaaccgaagccaaaaaaggtcccaccgaattgccaagcggcttagccactgaacctaaaaaagttgccagaaaaactttaattgtccttgttgcggttgttaaccctaaaaaattttgaatccttgcctttaaaggtggtgccaacttccttgaccctaaatgcttcaatgcttccttcccaggagatttcggtttcaaccaattggttttgggaaaagacccgctttttttaaaatggtccaaaaaggttaacctaatccatgcccaatggccaatgccaccggtttttg

SEQ ID NO: 162810 - DNA, 452 bp, Arabidopsis thaliana columbia
ccggggcggcgccgagccgtccgaaaggcctcgggtggttttgtttagacctaaaattttgtaaactgtccaaaacccacttcggtgaaacggctttgcccaatgcgccaccttccaagttacaatcgtccaatcttcaaccgtttttaacgatcctcctgccattttagccaaagcggaaaagttttttgggggggcggcaggcaggggaccaaacttggtgttgttcccgggggggttattggggggttatcctgggggttttaggttcggtttaccggttggcgttaataccaaaaaaggccttattaggtttcggaggtcccaggcttttgtttttaatgttccgggccttgaagtaccaggatgggttgacttggttgggaaaaaccatgtgtccttggtattgggagccatagagaaggaagggtttcccttttatggcacagttt

SEQ ID NO: 162811 - DNA, 434 bp, Arabidopsis thaliana columbia
  unsure (1)..(434): unsure at all n locations
gggcnggaatcccggggccgcccacacccgtccggccgaatcggccataatagggtttttttttgttccccaagggcctttttaattgggggtaatttttaaaattttggggcttaagacctactcaccattgaataacttcggttaagtcgcaagcccaatcggttttaacttgctaaacttccggttcgaaggttttttgaccaactgggaggcggttaaccattttaaggcattagggaaaccaagagtaaaaggccaggatttgaattgcttagccccgcttggtttaaagtggcctttaataaaaatggccgcttaaacttggttcggggaatgggcctcaatggttttggtgatccggcccaagaagttttccaggagtgtttttttcaaaaagtttaaggaaaaaccgttagtctccaaaatggaaa

SEQ ID NO: 162812 - DNA, 361 bp, Arabidopsis thaliana columbia
gggcggaccacacccttccggttggaacccagggaatccaatggttttaattaaataatcctccaccatcctaagcggggctaatttgcttggggaggtcgggattcctaaccgccttagaattaaaaacctaaaaaaaggtaattcccctattaagccctttccaccaccggattttgcctttaaaaaacctttaaaaagctttttccactttaccaaaactcctgaaaaggtctttgttcctttaaaaaataaacctgttacctgggttttaactcttcatccaactcaatctgttcgtcgtcctttgttccaaaggtttgaaagaattcctccttgtttaccccaatatttttcaaag

SEQ ID NO: 162813 - DNA, 370 bp, Arabidopsis thaliana columbia
  unsure (1)..(370): unsure at all n locations
gaangaaagncccgggcggaccacacccttccgaatccctttggtggttaccaactaattttattttgtggaaaaaacataacttccgatcagggttttaaaccaaatgggggcgaacaacaatccgaaaaaagttaaaaccagttttggaattcgtcctggtaaaggtaaaatgaggaatctccgttccatttttaggaaaggtcctcttgttgtgtttggacctgaaggacccaaaattgtgaaactttttaggatttttcctggtgttgacctttgtaacgttaaaaggtttaccttgttaaaataaccccctgttggcaacctgggtgggttggtaatttgaactaattttttttttaataacctt

SEQ ID NO: 162814 - DNA, 427 bp, Arabidopsis thaliana columbia
cggggcgggccgacccgtccgcaaaaaaaagtattgcttaaaaccaatccattaatcttgttaggttttgggcttacccctggtggcttaagggaacgtggggttgtccacttaaaatttgcaaagtccaattccttaaacaaacctgatgttttaaaaaaaaaaagtgaactctttttaaaatttaacccaatccacaaaaaagtccttgtcctcctccatgggaacctttcaatttttaagtccttaaacgttgttaaatacgtcaccaaggtttggccttccgttccttaaatccttccttttaatccctataaccgcccatttgttcggttttggcctcagtccatcaataacaagtgttttccgccgttgaatccgttgttcgaaccaaaaaacaacaaagggaaattgccgccggtggaaa

SEQ ID NO: 162815 - DNA, 467 bp, Arabidopsis thaliana columbia
  unsure (1)..(467): unsure at all n locations
acgggncgggaattccggggtgggcccagccgtccggaaaggaaaggtaaagtcctattttctttttaaaccaaccattaaaaaggtggcgacctgggttcctttaatcttttttttgggctcaatccaaggcttttgttaaggatttttgggtggaaaacttgaaacgcgttgaaccccttgcgggttaccttggctttcgtccaattaatgtaaaagttccagacttggttttttttggttaaggcactctgggaaccattccaaacttaataaacgccgttgtaacacccgttttggcagttaagttccgggttttgaacggtttaggcttttttccagttagactggattaagttcttaagggggtgatccaaatgcacactaaccttggggcttttgaggtttttttggtcctaacgggttccataaccgttgggttggtttcttcggcaaacgttgtttac

SEQ ID NO: 162816 - DNA, 421 bp, Arabidopsis thaliana columbia
  unsure (1)..(421): unsure at all n locations
cggaanncccgggcgggcccagccgtccgaaaatttaaaaatctaaattttttcaccattttcttttaaaaccggagttgttctaaccggtttgggttcaatggccgccgggagagaaagttttccaccgtttcgccaaaaccggcgccgggaaattttccgtcgccaggttcaaagaagggatccggcctttttaaccaccagatttaccagaggaaccagtaccgttgttaaaccatttcgttctagccggtaccggtttcttagatttggccgatttcttcgcccttttccaaatcggattcgggggagggggtaccattcgaaccgccgtgggcgatttgaaagaaccttttgagttttttgatttggttggtattggagggttcttggctaaggagctttatttatggttgaaaat

SEQ ID NO: 162817 - DNA, 419 bp, Arabidopsis thaliana columbia
cccggtccgcccacacccttccgataaaccactacctaaaaaaccaatatggttgaagggataaagttgccttccttccggtgggcctcattaatgggggcggggccaataaaatcaacccctgccctaacctgggcttaagttaccaccacctggccaccgtccatggcttccttcctcaaaggtggtgtaattcccccaccgtgtggttccgcctttaaaaccctaaccagcttacccaaaacacccccaacccgtaagaaggtttgcaattgctttaaaggtcccgttggaccctaagcttctggtctaaccgctggccggccagttggaattcctaaggcatttgaagtcaatattccttccaaaatcagaaccagcaccaactgcaaaactctgaggggataacctaccaccgg

SEQ ID NO: 162818 - DNA, 443 bp, Arabidopsis thaliana columbia
gggcgggcccacccgtccgaatatttctgcctatttataacttatcttaatcaatttttccccacacaaccaccggtggggatggccttttttttggttggacaacccttttttttgctaaaattgcttatggtttaaatccctttttttttacctcaagctcccatgagggttccttttgcttaaatgcccatgcctcttatgtttagcgggggtggaagctcggttcttcctccattgaggtttccgttcccaatattaactccaccacctatgccatttactccaccacccatccccttgactcaaccacctatgcctatggtcccaccaccattgcccatggtttaaccaccaatgatcccaatgcctccatttccagtcccaagcccattaccagtcccggatatgctttcgccgccgatgccatccgaattggaatt

SEQ ID NO: 162819 - DNA, 426 bp, Arabidopsis thaliana columbia
tgcaattggcaaacggctcaaatctattttctttaaacctttaaaaaaatcttggggaggcctccttccaatgaggggcaggaaggccaaagggctggcaagattccaaagcaaaaccttcttttttttctttttttcgtacctaaaataatttccatttttccccaaaacccattaaaccaggttggaaccaaagaaccaggggtttctttgtttctaaattggccttttttgccccatctttaatctaagcatttttttttttctttttggtgaggcaacttttttacttttttaggaaacgaaacatcctgggcctttttttcttccctccaatcatgggaaacgccgttggccttgttggggaccccatttctttttgggaaaagcattcttccacgttaaatatttaaggctttttttcaa

SEQ ID NO: 162820 - DNA, 277 bp, Arabidopsis thaliana columbia
  unsure (1)..(277): unsure at all n locations
ccgaaanncccgggcggaccacagccgaccggtttttaattttaacaacgcttttaaccaattttatctgggcaatgacttctaccaaaatgttgtgaaaacaccagagtctgagtaggggtttttttggaacctataatggtttttaattttgttatcgaaggggactagataacttaacggaaggttcaattttgccttaatcctttaaactaactcttgttccaagagttccgttttaatatcaacttgtttttttatttctaattccaatttt

SEQ ID NO: 162821 - DNA, 456 bp, Arabidopsis thaliana columbia
cggaatgccagggcggaccacacccgtccggttttggatcggaggcggccccttttttttttttttttaaatttaccaatctttaatttgttttaaaaaccagactccagggccatttttaataatcgctttttaaatcctttaaatccaaattttgtccaatggtttttccagaataacgatttgcagatggatccctgcatttaacgaagttcaagttttgccacgctaaactggggctggaggggaagatggttatttggcatttgatttttaattcccatcgaaagggtaactgaaggggggcttttttttatacttgccacttttgggaccaactttaagttcctggttttccaaaacaattggccctccggttttggtaacttaaatttttccttttctttttttgccctggtagacgttggggtttgaccttgattgatgggactttgg

SEQ ID NO: 162822 - DNA, 431 bp, Arabidopsis thaliana columbia
ccaaaaaagctcctccatttaaagggcgacggattaagttttttaataatttttttgagttggaattcaaaaccggagcggtggttttaatttccttttcctccacaaaacccatggtttttttttcttccttcctaaaccgcggtttttaatttttaattttggtaaaagcctaatggcccgatcccgaacccatttttttggaggccgaaccaccagaaatacccgcaaaggtcgctttcgaccaaccaatggctcccgagggattcgtttttcctccgtttttcgccaaaggaggcgccaggccagaggaggagatcgttcccgttttggaggagctttatggacctgcgtttaggggggggggtttgcttgggaaagatatttattgtggggcctcaaagcttaggaggggtccaggattggggggg

SEQ ID NO: 162823 - DNA, 433 bp, Arabidopsis thaliana columbia
gggaatccccgggccgcgcccacccttccgcccaaatttaataactcctttaaaggatttttaataatggcctaagtaccctaacccacgggggcaatcccatttttgacgggccttaaaccctaaaccataaaataatccgccaccgccaaaatccaaactgttgttgtggcataaccaaactttccagtgaagtaatttttaaaaaacttcggattcgcggccgtaccggttgcagtttaaatggtttgggccgaaacccccatggcattaaaagtttttttggaaggaggggttggttcgttagctttaattcccaacaccttttttttagttaaaggaaaaaaaatttttttcaaaaccacccttggttcccaccacattgttgttttcgatgaaaacaaaatccaaagtggcttcgactgggccaaaa

SEQ ID NO: 162824 - DNA, 449 bp, Arabidopsis thaliana columbia
  unsure (1)..(449): unsure at all n locations
gacccttattctgctactctcatttgtagttgttaaactaaaataacccatttgtgttttaaatctaaaatggctagaannnnctagctttctttgattctctttgttctgtatctgtccactgcagcaatagtcatggctagaaaccttnaagaggaatcaagtggtgatacagagttcattaaagcctcttgtgagacgacgtcgtacccagaccgatgcttccagtctctgtcttcatatgcaagcgagatcaagaagcagccacgtaagcttgctgagaccgcgcttgccgttagcatagcccgagcaanntcagccattacctatgtatcagagatgactgattataaaggaatcacaaagaggcagcacgaggctgtagcggactgtctagaggagatgggagacactgttgacaggttgagcaattcgctgaaggaactgaa

SEQ ID NO: 162825 - DNA, 432 bp, Arabidopsis thaliana columbia
ctgcagcattgagctcgtctctctacattttcccaaagaaaccttcatgtccacaacaatctcaatccacattcttatccacgaaacctaccaccatcaaaaccaatctccatagccatcctctcttcactgtagctgatcagacagtaaccctccagatgaaagagaagatcctctgtctcgagctaatgggaattgactcaggaaaagccctttctctcaacccatgtctctgctcagccccccttgactccatccaatccgtcctccatttccttcaatcaaaaggaatctacccaaatgacctcccaagaatcttggggttgtgtcctaagatcctcacttccgacgtcagaacagaactgtaccctgttttcatgttcctgtcgaatgatctccatgtccctgagaatgcgttcagaagagtgatca

SEQ ID NO: 162826 - DNA, 310 bp, Arabidopsis thaliana columbia
  unsure (1)..(310): unsure at all n locations
gctttaagacagctaaaactaaatacaaagaaacagagatgggtttggttacagaggaggtgagagctaaggcagagatgtacaccggtgatgagatatgtagagagaagacaaagtgtttcctcaaggaaatatctatgcccaatggtttatnaccattgaaggatatagaagaggttgggtatgacagagagtcaggtgttgtatggctgaagcagaagaagagcatcactcacaagttcacagagatagataagcttgtcttctatggaaccgaagtcacagccattgttgagaccgggaaaatcaa

SEQ ID NO: 162827 - DNA, 253 bp, Arabidopsis thaliana columbia
  unsure (1)..(253): unsure at all n locations
gcctgccgcatcagatgtcctcggatgcggtcgtgtgaccattaggaagactgtcgccaagccaaagggtccattatgcngtcgatggtacggatatgattgaggtcagtacttgggtccattctccggcgagcccccgagctacctttctntttagattcccggtgtactctgatgggacaccggtggtctatccgtcgacccatagaccttcgtgcaggaactctgagctagcncttatcctcagctgatg

SEQ ID NO: 162828 - DNA, 306 bp, Arabidopsis thaliana columbia
  unsure (1)..(306): unsure at all n locations
cacagaaaaacctagaaagctctagagagaaagagagagagagatggaaggtaaagaagaagatgttagagtcggagctaacangtttacggagaggcaaccgatcggaacttcggctcagagtgacaaggactacaaagagccaccacctgcnccgttgttcgagcccggcgagctagcttcatggtccttctggagagctgggattgctgagtttatagctacgtttttgttcctgtacatcactgttttgactgttatgggtgtgaagaggtcaccgaacatgtgtgctttccgtcggaattc

SEQ ID NO: 162829 - DNA, 412 bp, Arabidopsis thaliana columbia
  unsure (1)..(412): unsure at all n locations
tctcaatgagccagtcaagattcattataaagtctttatttagcacagcaggaggtttcttacttggatctgctctctcaaattcgccgtctctagccaccgcgttttcttcttcttcctcgtcctcctccgccgccgccgccgtcgtcatggaaactcacaaaaccaaggtttgcatcgtcggaagtggaccagcagcacacacggcggcgatctatgcatcgagagcggagcttaagcctcttctcttcgaaggatggatggctaacgacatcgctcccggcggtcaattaactacaacaaccgacgncgtaatacttcctgggttccctgaaggtattctcggtattgatatcgttgagaaattcagaaaacaatcggagagaatttggactacgatctttacggaaac

SEQ ID NO: 162830 - DNA, 282 bp, Arabidopsis thaliana columbia
  unsure (1)..(282): unsure at all n locations
cgctacagctagagctccgactctcctatcttcgccgccaacgcttccccgcctccgtccttcccaatcctctttgtcccgccgtggatttgcctgtatgtctaatcccaggaatttgggagagctaggatgcacagagtcattcttgccnttgtacaatgtagtggctgcagcgagactcacatctaaccttaatgttaatctgcgagctttctgcgaactctctaacggnacttgaatgcacaaagtggatgcatcagttatcttgaagcagttggagac

SEQ ID NO: 162831 - DNA, 386 bp, Arabidopsis thaliana columbia
  unsure (1)..(386): unsure at all n locations
cttacaacaacaaatcttaaacgttttactttgtgctgcactactcaacctcaatggccgcctcaacaatggctctctcctcccctgctttctccggtaagggcgtcaagctttcccccgcggcatctgaagtccttggaagcggccgtgtgaccatgaggaagactgttgccaagccaaagggcccatcatgcagcccatggtacggatctgaccgtgtcaagtacttgggtccattctctggcgaatcaccgagctaccttaccggagagttccccggagactacggatgggacaccgccggactttcagcttgccttgagaagtncgcaaggaaccgtgaactagaagttatccacagcaggtgggccattgctcggagccct

SEQ ID NO: 162832 - DNA, 324 bp, Arabidopsis thaliana columbia
  unsure (1)..(324): unsure at all n locations
cctttatatttattttcttccttcgtctccttcaaattcaatctttctccgtcattcagatttcgaggagacagagacagtnnnaaggattcttgtaatgaaaagcttttaaacttctctttctatttatccctcctttcttctatctctctcnctctcgatatcgatacaagagagatggagaaagaagaaggagaaacaacaacaacgatcggcgttgttccggctgcgccggctaaattaccgactccgatatatttctctgagcttttgggaggtcacggcagctttcggcgtcgttttatggtttattttgtttttttt

SEQ ID NO: 162833 - DNA, 186 bp, Arabidopsis thaliana columbia
  unsure (1)..(186): unsure at all n locations
gtccgcggaactgaatgggatgatggtgcttacgttgtggttaagaaggggaacgttggacaagcccaagatggaatctcagctgggaagaaaaggnacnacnntgntgtggtgaggaggccacaggagaagaacatggaaagagtactctactcggatggngagagagcgtacttgactatccaa

SEQ ID NO: 162834 - DNA, 163 bp, Arabidopsis thaliana columbia
  unsure (1)..(163): unsure at all n locations
cacgcgtccgggaagtcaacgctgctttcagagattctgcatagaaagagcttaaaggtatactcgatgtctgcgatgagccactagtgtacnnanatctcatatgctcanatttgttaacgaccattgattcatcactcactatggttatgggagatgatat

SEQ ID NO: 162835 - DNA, 417 bp, Arabidopsis thaliana columbia
  unsure (1)..(417): unsure at all n locations
gaaggttacagagtcgcaggaaatgggccattgggagaggccgaggacttgctttaccccggtggcagtttcgacccattgggtttggctaccgacccagaggccttcgctgagttgaaggtaaaggagctcaagaacggaagattggcnatgttctctatgtttggattcttcgttcaagccatcgtcactggtaagggaccgatagagaaccttgctgaccatttggccgatccagtcaacaacaacgcttgggcctttgccaccaactttgttcccggaaagtgagccaagttctatctgtttgtaanntacttgtgtttcaatcttttgaattcgagtgagagacaggaggagaaagagtaggtttgtgtttgtggtgggaggnagagacttttagatgtaaatttgcaaaga

SEQ ID NO: 162836 - DNA, 422 bp, Arabidopsis thaliana columbia
  unsure (1)..(422): unsure at all n locations
aaaaaaaaaaaacacaaaaaagtttcttttgttctcctcaacaatggctctctcctcccctgctttcgccggaaaggttttnaacctgtcccctncatcatttgaagtccttggaagcggccgtgtgacaatgaggaagactgttgccaagccaaagggtccatcaggcagcccatggtacggatccgaccgagtcaagtactngggtccattctctggcgagtcacccagctaccttaccggagagttccctggagactacggatgggacacagctggtctatccgctgaccccgtgacattcgcaaggaaccnatagtgtgatantatccacagcaagtgggccatgctcggagccctaggctgcgtctttcctgagcttttggccaggaacggagtcaagtttggagaggcagtttggt

SEQ ID NO: 162837 - DNA, 77 bp, Arabidopsis thaliana columbia
gttacttctccagtaatgtttcaccagattttcactggtctataggatttacattggttgattcgctccggccaacg

SEQ ID NO: 162838 - DNA, 454 bp, Arabidopsis thaliana columbia
  unsure (1)..(454): unsure at all n locations
agaacaatggcttcctctatgctctcttccgctactatggttgcctctccggctcaggccactatggtcgctcctttcaacccacttaagtcctccgctgcctttccagccacccgcaaggctaacaacgacattacttccatcacaagcaacgncggaagagttaactgcatgcaggtgtggcctccgattggaaagaagaagtttgagactctctcttaccttcctgaccttaccgattccgaattggctaaggaagttgactaccttatccgcaacaagtggattccttgtgttgaattcgagttggagcacggttaattagttatacgtgagcacggtaactcacccggatactatgatggccggtactggacaatgtggaagcttcccttgttcggttgcaccgactccgttcaagtgttgaaagaagtggaaaagtgcaagaaagagt

SEQ ID NO: 162839 - DNA, 356 bp, Arabidopsis thaliana columbia
  unsure (1)..(356): unsure at all n locations
cacgcgtccgcaattaatgcagntgtatatgtagttcacatttcttctatggttggttttttggtggaagcctgttcgagttatggtattccnnnctactatggtctttgcnaggtgtttcattgttcgctgcccttggatttttactttatggtggaaggctttncctaatgttgcaacggtttccagtagaatctaaagggcggcgcaaaaagctgcaagaggttggttacgtgacaaccatatgctttacgtggttcctcatcagatgtatcatgatgtgctttgctgcttttgatgagggggcaaacccttgatgtgttatattttttttttattaacttcatatattactc

SEQ ID NO: 162840 - DNA, 381 bp, Arabidopsis thaliana columbia
  unsure (1)..(381): unsure at all n locations
ccggncagcccacgcgtccgggtttctcttgctgatctacaaaatgatgagtttattttctacaggaagatccgncttagagctgaatatgttcagggagggnnggtgatcacccagttcntgtgtatggatttcacaaccgacatgctaaggtcattggtgaagaaggggcanactttgattgaagcccatgtcgatgtgaaaaccacagacggttacaccttgaggatgtttttcatttccttcataaagagaccagctaaccaattgtagcgttccttgtacgctcaatccagcctaattcgtcatgaccgcataaagattagtagttttttttttattagagannaatcctgagacctcaaggagctagtggctcaa

SEQ ID NO: 162841 - DNA, 292 bp, Arabidopsis thaliana columbia
  unsure (1)..(292): unsure at all n locations
ctcaaactcttcatcaagatctttgttatttttccaacaacgaagaagatgttctctttcttgagagactcaccattncctgcttggcaaaatccgaaggttgagcctcacgcaatgtctgtttttgtcatgtgttgtgaatcagcagttcaactgattgaaaacagggaaagttacggtgagggagactactttgaagagacttggagccagccattctaaatacggtgtcgnngacgaacactttgaggtggccaagtatgcattgttggagacgataaatgaggcattg

SEQ ID NO: 162842 - DNA, 360 bp, Arabidopsis thaliana columbia
  unsure (1)..(360): unsure at all n locations
cttttccaagcactcgacttcagcgtcttcttcatattcacttaagtttgctttgagacgtcaggaggataaacccaaagtctcgttttttcttccattaacgtcttcgttaatggcgacccctattcaagcctcttcttcctccaccattggnnagaccagtgatggcttgaaggtccagtctcatgtttcaattggagcaaacgatctgctgattgttggaccgggtgttcttggacgcttagttgcagaacagtggagacaggaacatccagagtctcaaatctttgggcagacagttacaacaaatcattttttttttttgtgagaattgggtttcaaaccatctcttaaaggaac

SEQ ID NO: 162843 - DNA, 187 bp, Arabidopsis thaliana columbia
  unsure (1)..(187): unsure at all n locations
cgcgtccgtttgctacttttgggtctctttgcatttcttttcatcgnnctcaaaatggctgccgcgggcacggtgaaatcagagagtgnngaaactgtgaaaccnnnncaacaggggggtggattcggagacattggaggaggaagataccaacgaggaggcgggcatggaggccactgggggggtg

SEQ ID NO: 162844 - DNA, 434 bp, Arabidopsis thaliana columbia
ctctgatcattcaacttttcgaaattttgcttcatcgtcttcgtcatcgtctctctgttgaattcctcaaacaatgcctctttctctccgtctttctccttcgccgacggctttatctccgactaccggaggatttggtccatcgaggaaacagtgccggattccttactccggcgtcccgacgacgaagattggtttctgttctttggattctaggaaaagaggagattcctctgttgttaggtgtagcttagaaaccgttaatgtcagtgttggtcaggtgacggaggtcgataaggacacgttctggcccatcgtttatgccgccggtgaaaagcttgtcgtacttgacatgtacactcaatggtgtggtccatgtaaagtgattgcccttaatacaaagctttatcagaaaagtacgacgacgttgtgtt

SEQ ID NO: 162845 - DNA, 193 bp, Arabidopsis thaliana columbia
  unsure (1)..(193): unsure at all n locations
taaagagagagagagcgatagtgagatttatatcaacagatttgaatcgatttctgaaaacatgcagtacaagaatcnnnngaaatcgggtttaaaagtgagcacgctctcgttcggagcgtgggctacgttcgggaaccagctcgatgtnaaagaggcgaaatcgattcttcagcgtcgtcgcgaccatgga

SEQ ID NO: 162846 - DNA, 305 bp, Arabidopsis thaliana columbia
  unsure (1)..(305): unsure at all n locations
agttggttaccctggtggaatctttaacccgcttaactttgctcctacgcaagaggccaaggagaaagagctagcaaacattantttgttgatatnggcttatttagggtttgtggttcaacacaatgtgactggaaaaggaccatttgagaatctattgcagcacttgtctgacccatggcacaacactattgtgcaaaccttcaacttaagagtgaagacagacttatgatctcatacctatctatcttccatcactttcatgtctgtctgagagtgtgtttcatcttagagttcttgggttt

SEQ ID NO: 162847 - DNA, 424 bp, Arabidopsis thaliana columbia
  unsure (1)..(424): unsure at all n locations
ccacgcgtccggagacagacataatggcgttcagcgcttgttttctacaccaaagcgcattggcttcttcaggcgcacgttcatgatnnntctgatcattccagctgnttttgttgctctccaaacctgttcagatcatctgtaaagctcaactgtcttttnnaagacgataactccgccgtctcccgccgacttgctctcactctcctcgtcagctccgctgctgttggttccaaagtatctcctgctgatgccgcctacggtgaagctgcaaacgagtttgtgaagccaaagactaacacatacttcttgccatacaatggtttttttgttagaagtgcatgttccagcaaataggaacccatgcaaagagattgagtatccaggacaagtccttaggttcgaagacaactttcatgctact

SEQ ID NO: 162848 - DNA, 177 bp, Arabidopsis thaliana columbia
  unsure (1)..(177): unsure at all n locations
ctttctgaagtgaactgttgttgttgttctttttggtttcntcgaaagataacctaaaccctatctgaacgggggcnntggactagactaatgtcntcttgtttgttctcagtcacatctccatctgctgcttcttccgtccatacaancactcaaaccttcttgctcttcccaatc

SEQ ID NO: 162849 - DNA, 380 bp, Arabidopsis thaliana columbia
  unsure (1)..(380): unsure at all n locations
cttcaatcctttcctttcattgtagttaaacaaagattacgattatggccacatcagctatccaacaatcctccttcgccggccaaacagctttcaagcccnccagcgacctcatccaaaaggtgggcgtcttgggcggtggccgtgtgaccatccgtcgtaccgtcaagtctactccccaaagcatctggtatggaccagaccgtcccaagtacttgggaccattctcggagaacacaccgtcttacttaactggagaataccccggagactacggctgggacaccgctggactctcggctgacccggagacattcnctaaaaacanngagcttgaagtaatccacagcagatgggctttgttgggtgctcttggatgc

SEQ ID NO: 162850 - DNA, 442 bp, Arabidopsis thaliana columbia
  unsure (1)..(442): unsure at all n locations
gctggaagattgagcggtgttgcgtcacgaatcatgggtggaaacggcgtcgttgcccgatccgtcggttcttctctccgtcaacgcgccggaatgggtctccccgtcggcaaacacatcgtccccgataagccgctatcggtaaacgacgagctgatgtgggacaacgggactgcgtttccagagccttgcatagatcggattgctgataccgtcggaaagtatgaagcattggcatggttgagtggcggattagggttctttgttggtctcggtctgctcgctgttttgaacgacaaagcttctaaggttccatntacaccgagggggtatccatatgacaacctgagagttgagcttggaggagagccatagagacccatctaagtgatctgctcatcaaaacaggaagcgtgttttcttcactgcctttgtctttaaa

SEQ ID NO: 162851 - DNA, 286 bp, Arabidopsis thaliana columbia
  unsure (1)..(286): unsure at all n locations
aaacgaaaaaaaagctaatcgcttgaacagaagaatataccttaactatggacaaggatgttgaagccgtaccctgagaatgattncnngctatggactatcaanntacttcaccacctccggttatcgatggagcgaagcttaagcattgccctttcnacatagcaattatctccaagcccgtaaccactctccggttcttatacatcaccgcccacacagtcatggttaacaatattcagtgcaatactgacaccggctgcgtagatcgcgtgggttgttgaat

SEQ ID NO: 162852 - DNA, 457 bp, Arabidopsis thaliana columbia
  unsure (1)..(457): unsure at all n locations
attatatatagaatctttttttacattatgttttggatttaataatgagtcggcctcaaaaaatttttgttttttataatnatcaaatttctttttttcatatgaatcctctttggttaaacttgggtttagaactagagaatctttatttattttatttttccaattttgggttactaatctagcccatgaaatctggggtaaattgtattgatactgacttcgtaaccagtttttccattgatttacttcggaattcaaaaaggttttatttttcaattcataatgaaagattccgtgttcttgaaaaaaaacctttattttattcttaacaaaaaaggatgttatgcatatgttatattcaagaacagcctttaatttacaaaagttactaactttaatttgtgataatttgtaaaatacatatgcttgtgataaagagcataggtcataactt

SEQ ID NO: 162853 - DNA, 298 bp, Arabidopsis thaliana columbia
  unsure (1)..(298): unsure at all n locations
cgcgtccgatatatatatgaatctttttttacattatgttttttttttaanaangagtcggcctcaaaaaatgggtgttttttataatgnnctgagatccttttanncnattgagtgcctctttggttagacttgggtttagaactagagaatctttatttgntctatgtttccatttctgggttactaatctagcccatgaaatctggggtgaatcgtattgatactgacttcataaccagnntttccattgattcacttcggaattcaaaatggttttatttttcaattcataatt

SEQ ID NO: 162854 - DNA, 307 bp, Arabidopsis thaliana columbia
  unsure (1)..(307): unsure at all n locations
atcatttctctctatctctttctaaaacacttccatgactgtttcttcatctccatgggctctcatggctctcgggggggggggtgcttcaacaatnataatggctattccttcacgcaaggccattgatgtaccatttggtcgtaactccgttctaacttgtgcttttgaccaccagaaacagtttaatggcggttccgaacttcatcttatcctcgacaaatacactggcccaggattttcaatcaaaggggtcatatttgtttggacattttagtatgcacataaagcttccatctggtgacac

SEQ ID NO: 162855 - DNA, 66 bp, Arabidopsis thaliana columbia
gcgagatcttcttctctaatggcgacttccttttgcatgcgtcaatatgtctacatggcgaagctc

SEQ ID NO: 162856 - DNA, 299 bp, Arabidopsis thaliana columbia
  unsure (1)..(299): unsure at all n locations
ccgcgtccgcatccaaacactcatttctccacatcttgtgtgaaaaaaacacagcacgtttattagggatctcatggcgagggcgggcnctgtttgtgtgcctaattttatttgttcttcgttcctcaccggaggcaagagaggtgccacctcattggcgngcggtgttggcactggagctcagagagttggcagcgaaaacatctattgtcgctgctgcggctgttcagcctatggaagttngcatccctgccggttaaggtggtggcatctttcttggccctgcatggctcgatggt

SEQ ID NO: 162857 - DNA, 466 bp, Arabidopsis thaliana columbia
  unsure (1)..(466): unsure at all n locations
caaagactcgagttgatatgtctagtactaaagatatgtcaactgtccaaaacgcaactccttttaacggcgttgccccatccaccaccttgcgagtntcantcgtccaatcctccaccgtctataacgatactcctgccactatagacaaagcgnagaagtatattgtggaggcggcaagcaagggagcagagctagtgttgttcccggaggggtttatcggtggctatcctcgaggttttaggttcggattagcggttggcgttcataacgaataatggcgtgatgagtttcggaagtaccatgcttctgctatnaatgttatttgccctgaagtagcaagattggcttgacgtggctaggaaaaaccatgtgtacttggtttatgggagccattgaagaaggaagggttttcctcctttttgcacatgttttttttttaggtccacaaggtttagtttttggg

SEQ ID NO: 162858 - DNA, 430 bp, Arabidopsis thaliana columbia
  unsure (1)..(430): unsure at all n locations
gtcgcatcggtcatcatagggttttgttttggtgcgcaatggcctcttctatttgctataatatctgagattttcgggcttaagtactactcgacattgtataacttcgggtcagtcgcgagcccgatcgggtcttacttgctaaacgntcgggtcgcagggtatttgtacgacgtggaggcgggtaagcaatataaggcattagggaaaacgagagtagaagggcaagatttgaattgcataggcacgtcttgttttaagttgtcttttataataattgccgctgtaactttgttcggtgtattggtctcgatgagtttatgtgatccggaccaagaagttttacaagagtgatatctacaaaaagtttagagaaaaagcgttagctgccgagatggagatggcagcgccggctgcagccagatctacc

SEQ ID NO: 162859 - DNA, 300 bp, Arabidopsis thaliana columbia
  unsure (1)..(300): unsure at all n locations
gtcggaacccacaggatacagttgtgttcacttgcgcaatctccaacatgcttagctgggctaaccgggcatggggngctcaaatactacaccaccttgggtaacataagctcaagagcgggcccgatcgtgtcatactcgctgaacgnccgggtcggacagtgtatagacgtccaggaggcgggtgagcaatatcaggccttcgggagaacgcgagtagacgggcaagattcgaactgcatacgcacgtcttgcttcaagttgccctttataataatcgccgtcgtaactttgaacggt

SEQ ID NO: 162860 - DNA, 368 bp, Arabidopsis thaliana columbia
  unsure (1)..(368): unsure at all n locations
gatgcctcttgttgttagcgactcagctgaatctgtggagnagacatcagctgcgagcaaggtattgaagcatattttttcttagaacgatgcagnaaaagctaagaacagtattggaattcgtcctggtaaaagtaaaatgaggaatcnttgttacatttctaggaaaggtcctcttgttgtgtttggaactgaaggagccaagattgtgaaagcttttaggaatctaccnggtgttgagctttgtcacgttgagaggcttaacttgttgaaattagcccctggtggtcacctgggtaggtttgtgattnagtgggtcgtgcttttgagaagcttgaatctatctatggctcgttcgagaaaccatc

SEQ ID NO: 162861 - DNA, 441 bp, Arabidopsis thaliana columbia
  unsure (1)..(441): unsure at all n locations
ccagaagaagtcatggctcagaacgatacagtgaagctgataggttcttggtctagcccttattcccttagggcacgtgtggctctacacttgaaatctgncaagtacgagtacttagacgaacctgatgttcttaaagaaaagagtgaactccttctcaaatctaaccccatccacaagaaagtccctgtcctcctccatggtgacctctccatctctgagtccctcaacgttgttcaatacgtcgacgaggcttggccctccgttccttcaatccttccttctgatgcctatgatcgcgcatctgctcggttttgggctcagtacatcgatgacaagtgttttgcggcggtggatgcggtggtcggagcaaaagacgacgaagggaaaatggcggcggtgggaaagctgatggagtgtttggcgatacttgaagaaacg

SEQ ID NO: 162862 - DNA, 402 bp, Arabidopsis thaliana columbia
  unsure (1)..(402): unsure at all n locations
gaaaagaaaagtagagtactatcttcctcttaaacctaccattcaaaatgttgcgtactatcttcctcttatctcttctctnngcgtctagccaatgccncntttcaagagttctgtgtcgcaaacctgaaacgcgctgaaacccctgcgggttccccttgcattcgtcccattcatgtcaaagctacagactttgtcttctctggcttaggcactcctggaaacactacaaacatcatcaacgccgctgtcacacccgctttcgcagctcagttcccgggtctgaacggtctaggcctctctacagctagacttttctttttttttaaaggtgtgatcccaatgcacactcaccctggtgcctctgaggttttctttgtccttactggctccattaccgtt

SEQ ID NO: 162863 - DNA, 430 bp, Arabidopsis thaliana columbia
  unsure (1)..(430): unsure at all n locations
caaatctcaaaatctcaatttcttcaacaatgtcatcgaagaacggagttgttcgtagctggttaggatcaatggacgacatcnaaaatgtcttccaactnatcgacaaaaacggcgacgggaaaatctccgtcgacgagctcaaaaaagtgatccgtgctctctcaccaacagcatcaccagaagaaacagtaacgatgatgaaacaattcgatctagacggtaacggattcatagatctggacgaattcgtcgcgcttttccaaatcggaatcggaggaggaggtaacaatcgaaacgacgtaagcgatttgaannaagtctttttnnttatatgatttggatggtaatggaaggatctcggcgaaagagcttcattcaatgatgaagaacttgggtgagatgtgctctgtgcacgattgtatgaaga

SEQ ID NO: 162864 - DNA, 388 bp, Arabidopsis thaliana columbia
  unsure (1)..(388): unsure at all n locations
ataaaacactacctaagagatcaatatggctggagtgataaaactggcatgcttgctgttggcctgcatgattgtggcccttcctgtcacatcgaacactgtgctaagctgtggctcagttaacagcaacttggcagcgtgcattggcttcttgctccaaggtggtgtcattcccccagcgtgtggctccggcgttaaaaacctcaacagcatagcctagacgaccccagaccgtcagcaagcttgcaattgcattcaaggtgccgctagagccttaggctctggtctcaacgctggccgtgcagctggaattnctatggtgtgtggagtcaatatttcttacaaaatcagcacctgcaccaactgtctaaccgtgaggtgatgagct

SEQ ID NO: 162865 - DNA, 274 bp, Arabidopsis thaliana columbia
  unsure (1)..(274): unsure at all n locations
tgagtcctccaccactggatgcaccgttgagcataatcgaaaaagatccgaatgccgaagatataaagtgggaagatgatatatctctattaaattgtttgtgacttggacattgacctcttctaatcctattcttcctctctctgccttggagtctgaaattatgcaaaactcttcttctcaataaaagccaaggtgttgttgtacttgtagttgcttaaatataaacggctcctttcatgntttaccatttcttcttatcaacaacaattca

SEQ ID NO: 162866 - DNA, 101 bp, Arabidopsis thaliana columbia
  unsure (1)..(101): unsure at all n locations
ccggccggnnncccggtcgaccccgcgtcccatatctctgtcttatatcactttacctttacgactattccacacacaaacacacatagccatgtcctctt

SEQ ID NO: 162867 - DNA, 400 bp, Arabidopsis thaliana columbia
  unsure (1)..(400): unsure at all n locations
ttgcaatttgcaaactgcttcaatccaattttcctaaacctcttagaaaattctgcaaaacccaccaaacaaagaacaccaagatagacaaaaggcnagcaagactacaaagcaaaaccttcttcttcttcttcttctcgttactcaaatcatttccatatatacgcaaaaaccattaagacaagctagaaacaaagaaacatggttttctctgtttctatatttgcctctcttgcaccatacttaatctcagcatttcttcttttccttctcgtcgagcaactctcttaccttttcaagaaacgaaacattcctggctttttgttcgnccctccaatcatcggaaacgccgttgcactcgttcgtgaccccacttccttctgggacaagcaatccttca

SEQ ID NO: 162868 - DNA, 167 bp, Arabidopsis thaliana columbia
  unsure (1)..(167): unsure at all n locations
atgcccaccaagaacaagatattggatgcaatcaaatcgactgtgaattactagccgtactatctgtagtttactgtttacaccccgactgatgtaatcgcatgtctttgttatcaattcgtctaatgtaacactaccgattaactntaatgagnttcaagataacg

SEQ ID NO: 162869 - DNA, 95 bp, Arabidopsis thaliana columbia
  unsure (1)..(95): unsure at all n locations
gcttttgattcttacaacgcctctaaccagatgtcacgtggcaatgacttctaccagaattcttcagaacgacagagtccgnatagtggtgatgt

SEQ ID NO: 162870 - DNA, 449 bp, Arabidopsis thaliana columbia
  unsure (1)..(449): unsure at all n locations
cccaaatcttatcactactctaaaagaatcttcatcatggcctcagtaacctcagccaccgttgcaatcccatctttcaccggccttaaagcctcaaccatcaaatcatccgccaccgtcagaatccaaactgctgctgttgcatcaccgaagcttacagtgaagtcatctctaaagaacttcggagtcgcggccgtagcggctgcagcttcaattgctttggccggaaacgccatggcaatagaagttctcttgggaggaggggatgggtcgttagcttttattcccaacgacttctctatagctaaaggaganaagattgttttcaagaacaacgctggatacccacacaatgttgtcttcgatgaagacgagatcccaagtggcgtcgacgtggccaagatctcgatggacgagcaagatctactcaacggtgcggtagagacgta

SEQ ID NO: 162871 - DNA, 421 bp, Arabidopsis thaliana columbia
  unsure (1)..(421): unsure at all n locations
cccacatcttatcactactctcaaagtttcttcatcatggccccggtaacctcagccaccgttgctatctcaggaagaggccggccttaatgcctntgctgtgaagtcatccgccaccgtcagaatccatactgctgctgttgcatcaccttntcttacagtgaagtcatctctaaagaacttctgtgtctcggccgtatcggctgcagctacaattgctttggccggaaacgccatggcaatagaagttctctttggaggaggggatgggtcgatagctttttttcccaacgacttctctatagctaaaggagttttgggtgcgntcatgaacaacgctggtaacccacacaatgttgtcttctatgaagactatatcccaagtggccgtccttctttgccaagatcttcattgaccatc

SEQ ID NO: 162872 - DNA, 286 bp, Arabidopsis thaliana columbia
aaaaagaaaacacaaaaacaaagattataatggcttcctcaaccatggctttgtcctcccctgccttcgccggaaaggctgtgaagcctgccgcatcagatgtcctcggaagcggccgtgtgaccatgaggaagactgtcgccaagccaaagggtccatcaggcagcccatggtacggatctgaccgagtcaagtacttgggtccattctccggcgagcccccgagctaccttaccggtgagttccccggtgactacggttgggacaccgctggtctattccgcga

SEQ ID NO: 162873 - DNA, 418 bp, Arabidopsis thaliana columbia
ggctagatccttgttgctctcgctaaccctcacattcctcttcgccggaattgtctcagctcgtgactggaacatcctgagccagctcaaaggaaccacaaccaccacgaagactagccaaaccggcgtcacatctttgaaagctcccaacctaaacggatactgtgagagctggagagtcaacgtggagcttaacaacataagggactttaaggtggttccacaggaatgtgtatggttcgtccaaaagtacatgacctcatctcaatacgaagatgacgtggagagagccgtcgatgaagccatcctctacctcggaaaaacttgttgcgagaagaagacatgcgatggcatggatgcttggatctttgacattgatgacactcttctttcaaccattccttaccacaagagcaac

SEQ ID NO: 162874 - DNA, 373 bp, Arabidopsis thaliana columbia
cgaccctcccgtcctcacacgataggggcgggtactagagtgttatctgcagcgacggccgtgacccaaaccacctcctgtttcctcgccaagcaagctttcactcttccggcgaagaaatcctgcggcggatttggtggtctctgcttcagcagaagagctttggtgttgaaatctaagagacctttctcctgcactgccatttacaagcctcaggttacggatcacgatgaaggtccggcctaatccctatgatcatcgagtattattcctcgatggggctggaaagcaggcttgtgcatggcatgacataccattgacctctaacgatggagttttcaactttatagttgaaatacctatagagtctaaa

SEQ ID NO: 162875 - DNA, 450 bp, Arabidopsis thaliana columbia
cgaaaaggctttgacagaaggtgtaaaagcctttgagcctggtttgttggctaaagctaatagagggattctttatgttgatgaagttaatctcttggatgatcatttggttgatgttcttttggattcagctgcttctggttggaatacggttgagagagaagggatttcgatttctcacccggcgaggtttatcttgatcggttcaggaaatccggaagaaggagagcttaggccacagcttcttgatcggtttggtatgcatgcacaagtagggacggttagagatgctgatttacgggtcaagattgttgaagagagagctcgtttcgatagtaacccaaaggatttccgtgactcttacaaaaccgagcaggacaagcttcaagaccagatttcaactgctagggcaacctttcctcgtttcagattgattgggtattgaaggtg

SEQ ID NO: 162876 - DNA, 334 bp, Arabidopsis thaliana columbia
cacaagtgagggagttgttggagtcctttggtggcctcaagggctttgatcttgtaaaagatcgagaaacagggaactctaaaggatatgccttttgtgtgtaccaagatctttctgttacagatatcgcgtgcgctgccctaaatggtttcaagatgggagataagactcttacagtgagacgtgccaaccagggaacaatgctacataagtctgaacaagagaacgttttattgcatgcacagcagcaaatagcttttcagagggttatgttacagcctggtgcataggcaaccactgtggtgtgttcgactcatgttgttactggggttgt

SEQ ID NO: 162877 - DNA, 401 bp, Arabidopsis thaliana columbia
gaccatttcttgttctttggacgaccatcggcgtcagtgttaagtctagagtcttcttcttcttcggcgtagttttttccccggcttgaaaaatgggtctatccttcggaaagttgttcagcaagctctttgcaaagaaagagatgcgtatcctcatggtgggtctcgatgcagctggtaagactacgatcttgtacaagctcaagcttggagagatcgtgactacgattccaaccattggtttcaatgtggagactgtggaatacaagaacattagctttaccgtgtgggatgtcgggggtcaagacaagattcgtccattgtggaggcactacttccaaaacactcagggacttatctttgttgtggacagcaattatcgcgaccgtcttgtcgtagcc

SEQ ID NO: 162878 - DNA, 354 bp, Arabidopsis thaliana columbia
tgttcatggactctctagagttagtctgtattttcttaagactgctgcacataacaacatgctgtttcgagttctctgcacagaggggaggccgtatggaacaggagttctgatatcgagtgagctatcgaagctcgatatcccagtgaaactactgtttgattcagctgtggcgtatagtatggtcgagtgtgacatgatgtttttcagcgcggatggagttgttgaatgtggcggttttatcaacatgatgggtacataccatatcgcactcgtggcacacagtatgaacaaacctctctatgttgctgctgagtgtttcatgttcgctaggctttacccatttgtccaaaa

SEQ ID NO: 162879 - DNA, 465 bp, Arabidopsis thaliana columbia
cggacgcgtgggcaacaaacctcttcttcagtttgatagagatctcacgtttcaaacaacaagaatggcgttccctaaggtatacttcgacatgaccatcgacggccagcccgcgggaaggatcgtgatggagctgtacaccgataagactcccaggactgccgagaatttcagagctctctgcaccggagagaaaggtgttggcggtaccggaaaaccccttcacttcaagggatctaagtttcaccgtgtgatccctaacttcatgtgccagggaggagatttcaccgccgggaacggaacaggcggtgagtcgatctacgggagcaagttcgaggacgagaatttcgagaggaagcacaccggaccggggatcctgtcgatggcgaacgccggtgcaaacacgaacggatctcagttcttcatctgcaccgtgaagaccgattggcttgatgggaagcacgt

SEQ ID NO: 162880 - DNA, 475 bp, Arabidopsis thaliana columbia
  unsure (1)..(475): unsure at all n locations
gttagtcaccaaaaaaaaaaaaaaacacaaaaagtttcaatggccgcctccacaatggctctctcctcccctgccttcgccggaaaggctgtgaacctttcccccgcggcatctgaagtcctcggaagcggccgtgtgacaatgaggaagactgttgccaagccaaagggtccatcaggcagcccatggtacggatccgaccgagtcaagtacttgggtccattctctggcgagtcaccgagctaccttaccggagagttccccggagactacggatgggacaccgctggactttcagctgatcccgagacattcgcaaggaaccgtgagctagaagttatccacagcaagtgggctatgctcggagccctaggctgcgtcttccctgagcttttggctaggaacggagtcaagttcggagaggcggtttgttcaaggccgttcacagatcttnagcgatggaggactcgattac

SEQ ID NO: 162881 - DNA, 471 bp, Arabidopsis thaliana columbia
gtggcgctattggtgtttctatctgaggcctctctctttgaaatcggattggcttctccgaacacagttcctgctttcctctggtctccgcatctccagtctgctaatggtgaattggatgaggctgtaaattatcaggtcatgtctgcaaaggatctagttggttctgttttcactcaaggaggttggtcaaactttctgtgctcagagaagaagcttgagcaacctgttgatgttgcacttgtgttcataggcagagagttactgtcttctgatgtttcttcaaaaaggaactcagatcctgcccttgttaacacattgaataatctatttacagcttccaacttctcattggcattcccatatattgctgctccagaggaagaaaggatggagaatttgctactttcaaggcttaaagaagcttgtcccaacaattgaggagtcagcaatatcgtgttctcagattcg

SEQ ID NO: 162882 - DNA, 371 bp, Arabidopsis thaliana columbia
gaagatgggaagaaagagtacaagataccaaaaggaggtctctttgatataatcatatgccctcactatctatttgagatccttgtgttttggagcttctttctcatctctcagaccatttattcattttctttcgctatgggaacaatgctctatctcattggtcggagttatgctacaagaacttggtatctttccaagtttgatgacttccccaagcatatcaaggctctcattccctttgtattctagagttttgttgttgttgtttcatgtgtctgtataatactttgtagaccttatagtttcttttgtctaagtcgatttcattcttatattcttttgaatttcttgtaatctataataatttt

SEQ ID NO: 162883 - DNA, 467 bp, Arabidopsis thaliana columbia
cttaatctctcctctctgttcttctccgatcattccttattccaaagaaacaaaccatggatctccaaccagaagagcttcaattcttgacaatacctcaactacttcaagaatcaatctcaatcaagaaacgatctccaagaaccttctacctcataaccctctccttcatcttccctctctccttcgctatcctcgctcactcactcttcactcaaccaatcttagccaaactcgacaaatccgacccaccaaactcagatcgttcacgtcatgattggactgttcttctaatcttccagttcagttacttgatcttcctctttgccttctctcttctctcaaccgctgctgttgtcttcaccgtcgcttctctttacaccggaaagcctgtttctttctcgtcaactctctctgcgattcccaaagtctttaaacgactctttataactttcctttgtgttgct

SEQ ID NO: 162884 - DNA, 434 bp, Arabidopsis thaliana columbia
aaaagaagaagagaaacaacaagaagttgtaatggcttcctctatgctctcctccgccgctgtggttacatccccggctcaggccaccatggtcgctccattcaccggcttgaagtcatccgctgcattcccggtcacccgcaagaccaacaaggacatcacttccatcgcaagcaacgggggaagagttagctgcatgaaggtgtggccaccaattggaaagaagaagtttgagactctatcttacctccctgaccttagtgacgtcgaattggctaaggaagttgactaccttctccgcaacaagtggattccttgtgttgaattcgagttagagcacggatttgtgtaccgtgagcacggaaacactcccggatactacgatggacggtactggacaatgtggaagctttcattgttcggatgcaccgact

SEQ ID NO: 162885 - DNA, 356 bp, Arabidopsis thaliana columbia
ctacgagaagctctttggatcaccgattgtgttcgtaacggctctaatctttaagacagtcaaggggaaaacttctgaggctgttggactaacctctggagaagaagctgagcttggaggtggcaaaatcgttggatttcatggaagttcaagtgatttgatccattctgttggagtttatataattccgtctactacaccgctgacttcgccggtatcaggtggtctgaccaaattggaagctcaaggaggtcgtggtggagatgcttgggacgacggtggtgcttatgacaatgtaaagaaagtttatgttggacaaagtgacttttggtgttgtttatgtcaacgtttgatta

SEQ ID NO: 162886 - DNA, 457 bp, Arabidopsis thaliana columbia
caacaacgtcgagaataatggcatcatctctttgtgcttcttctgccatcgctgccatttcttctccaagtttcttgggtggtaagaaactgaggctgaagaagaagttgactgttccagctgtgtccaggccagatgcgtcggtgcgcgccgtcgcagctgatccagatagaccaatctggttcccgggaagcactcctccagagtggctagacggtagcctccctggtgacttcggatttgatcctcttggtctttcatcggacccggacagtctaaaatggaacgtacaagccgagatagttcactgccgatgggctatgctaggagccgccgggatattcatcccagagttcctaacgaagatcggtatcctcaacacttcgtcatggtacacggcggtagagcaagagtatttcacggacataaccacactttttggtcgttgagcttattt

SEQ ID NO: 162887 - DNA, 303 bp, Arabidopsis thaliana columbia
aaaagctatctccgaggttagagcaatggcagctgtgaactgccatttcttccagctatcacgacatctcaaaccttctaggccttctttttcctgctctgcttctcaaccttcacaaaacaacattaaggtaatcataaatggagctgctaaggaaataggtagagcggctgtggtggctgtgactaaggctaggggaatggagttagctggtgctgtcgataatcattctgttggcgaagatataggcttgctgagtgacatggaggagcctttagagacacctgttgtgagtgtgctaac

SEQ ID NO: 162888 - DNA, 473 bp, Arabidopsis thaliana columbia
tatgcagaacattgtgaaagagaggctttcaatgttcacggagaaagaagagaaaatggtgaaaggttccatagattttgtgggaataaaccaatacacgacttattacatgtccgaaccacattccaccaccaaacctaaggatttgggttatcaacaagattggaatgtggaatttggctttgctaagttggggaagccaataggtccaagggcttactcgtcttggttatacaacgtaccatggggaatgtacaaggccttgatgtatatgaaggaacgttacggcaaccctactatgatcctctctgaaaacggtatggatgacccgggaaacgttactctagctcaaggactacatgacaccacgagaatcaagtattacaaagattacttaaccaaccttaagaaagctagggatgatggagccaatgtggttggatattttgcgtggtcattgctagattatttcg

SEQ ID NO: 162889 - DNA, 477 bp, Arabidopsis thaliana columbia
caagcaacggcggaagagttaactgcattcttttgtggcctccgataggaaagaagaagtttgagactctctcttaccttcctgaccttaccgattccgaattggctaaggaagttgactaccttatccgcaacaagtggattccttgtgttgaattcgagttggagcacggatttgtgtaccgtgagcacggtaactcacccggatactatgatggacggtactggacaatgtggaagcttcccttgttcggttgcaccgactccgctcaagtgttgaaggaagtggaagagtgcaagaaggagtaccccaatgccttcattaggatcatcggattcgacaacacccgtcaagtccagtgcatcagtttcattgcctacaagccaccaagcttcaccggttaatttccctttgcttttgtgtaaacctcaaaactttatcccccatctttggatttatcccttggttttctgcttt

SEQ ID NO: 162890 - DNA, 363 bp, Arabidopsis thaliana columbia
cttttaggggaagattgtgtgagtgccctactgttcaaggtgttaaattcgttggtgacggttacactcactgcaaagcctctggagctttgcattgtggtatcaacaatggaggatgctggagagaatcccgaggtggcttcacttactctgcttgcgtagatgatcattcaaaggattgcaaatgcccacttgggttcaagggcgatggagtgaagaactgtgaagatgtggacgagtgcaaagaaaaaacggtgtgccagtgcccagagtgtaaatgtaaaaacacttggggaagttatgaatgcagctgcagcaacggtttgctttacatgcgtgagcacgacacttgcataggttcag

SEQ ID NO: 162891 - DNA, 364 bp, Arabidopsis thaliana columbia
cggtgtctctcaatctccgtcaagcttgacgaatttcaggagctatatataccatggcgctcttgtctcaagcaggaggatcatacactgttgttccttctggagtttgttcaaaggctggaactaaagctgttgtttcgggtggcgtgaggaatttggatgttttgaggatgaaagaagcttttggtagctcctactctaggagtctatctaccaaatcaatgcttctccattctgctaagaggagtaagagagggcatcaattgattgttgcggcatgttctccaacggaagaggctgtagttgcaactgagccgttgtcgagagaggatctctttgtctatcttgcctcttggatgcaaaa

SEQ ID NO: 162892 - DNA, 460 bp, Arabidopsis thaliana columbia
gagactttgtggccatggcagcctctctccaatccaccgctacattcctccagtcggcgaagatcgccaccgctccttctcgcggaagttctcacctccgatcgactcaagccgtcggcaaatcttttgggctcgaaacttcctcggctcgcctcacttgctccttccagtctgactttaaggacttcaccggtaaatgctccgacgctgtcaaaatcgccggattcgctcttgccacctctgctctcgtcgtctcgggagcaagtgcggagggagctccaaagagattgacctatgatgagattcagagcaagacatacatggaagtgaaaggaactggaacggctaaccagtgccctactattgacggtggctctgagactttctcgttcaaacccggaaagtatgcaagaaagaagttctgcttcgagcctacttccttcaccgtcaaggcagacag

SEQ ID NO: 162893 - DNA, 475 bp, Arabidopsis thaliana columbia
gaacaaccaagacaaaaagaacaatggctgcgttgtgcatctccaatggcgagccagctaaggagcagcttctcctccgcttctctttctcagcgtctcgccgtcccgaagggcatctccggtgctcctttcggtgtttctccgaccaaaagagtctcttccttcactgtccgagctgttaaatccgacaagacaacattccaagtagttcaaccaatcaacggtgatccattcatcggaagtttggaaactccggtgacatcaagcccattgatcgcgtggtacctttccaacctccctggataccgtaccgccgtcaaccctctcctccgcggtgtggaagtgggcctggcccatggtttcttcttagtgggcccattcgtcaaagctggcccattaaggaacactgcttacgccgggtcagccgggtctttagccgcggctgggctggtagtcatcctcagcatgtgcctca

SEQ ID NO: 162894 - DNA, 412 bp, Arabidopsis thaliana columbia
tataaaattaatgtttcatttcggatttcaataatttaactatttgaattactaaatcgaagttttgcaaaaaaacaattaatcatgtgaaaacaccaaaaaaaaaaaaaaaaaattatgtatctcatctggatcagctggttttatgaaattatacgtacttatcatatatatttgtataggtggacacatcaatcccgcggtgacgtttgggctattcctagctagcaaggtatcattggttagagctgtgtcgtacatggtggctcagtgtctcggagccacttgtggagttggtttggtgaaagtcttccagtcgacttattacaaccgctacggtggtggagccaacatgctctccgacggatacaatgttggcgttggggttggtgctgagattatcggcactttt

SEQ ID NO: 162895 - DNA, 351 bp, Arabidopsis thaliana columbia
acgcgtccggagacttttaggccatggtagcctttctccattttttctttacattcctccagtcggcgaagagagccaccgctccttctcggggaagttctcaccttcgatcgactcaagccatcggcaaatcttttgggctcgaaacttgctcggctcgcctcacttgctccttccagtctgactttaaggacttcaccggttaatgctccgacgctgtcaaaatcgccggattcgctcttgccacctttgctctcgtcgtctcgggagcatgtgcggtgggagctccaaagagattgtcctatgatgtgattcagagcaagacatacattgaagtgtaaggtactggaa

SEQ ID NO: 162896 - DNA, 482 bp, Arabidopsis thaliana columbia
gtttgttatacaaaaaaaaaagagaagaagaagccagatgtctgagagttttataagtaacgaaaatgaaatcgaccgtcatgatgattttcctcattatctacctcctcatcgccgtgccttgcttcgctaaaggatcggagcaaacggattcagaggtgtacgagatcgattacaggggaccagagactcataactctagacctccaccggaaactatgcacggcaagccaccgtacatccaccataatacctccgccgctgggctcggtgctcatgtaggaggaaagaactagagagagagcgagaccttttccaaggagaagactcagaagttgaagaggaagattacgagagttgtgatatatatatgagtaattaatgatgttaattgatacaaatttatactttaattatttatcatatgaagatgatcatcgatgtgtgatcagtacagttagtgtgaataacacactactctc

SEQ ID NO: 162897 - DNA, 481 bp, Arabidopsis thaliana columbia
gcttctctctctctctcggctccgccgattcctagttccccgattctcggattcttctgaagatttctcatgtcaggctctcttgatcgatttgcgagaccttgttttgaaggagtttcaagcaatgatgagagaagagaaaggagatcagatttcgaagtttcagaggatgagaagaagacaagaatcgggaatttcaatttcaagaagaaagctgcgaaagcttcgagcaaactcagacattcgttgaagaagaaaggtagcagtaggagaagaagcagtgatcgtactttctctcttaccattgaagatattcatgatgttgaggaattgcgagctgttgatgaattccgtaatttactcgtctctgagaatttgcttcctcctacacttgatgattatcacatcatgctgagattcttgaaagctaggaaatttgatattgggaaaaccaagttaatgtggagtaatatgatcaaat

SEQ ID NO: 162898 - DNA, 413 bp, Arabidopsis thaliana columbia
  unsure (1)..(413): unsure at all n locations
ctacaaaatgtttatccaaacattacagagagtgtttttgaaaagaaattgtaagctgtgtttaaaatatgtgtgtgtgtgtgttagtctgaacagagacatttgtgggttagagtagtttcagatagataagagagaagagtctgtagagttgtgatgagtctcgggcaatttcgtggctcattaaaaacgttcaggccaccggtcaccaccgaccattttaaccggttatggagaccgggattggtgggtctgaatgaagtcagtttaaggtttggttttgatttgtccttggtatcaacttatgagggtntatatttatgtagaatagatgattctttgtgtgatccattttctttctaacctttttgtcgtataatttttcttattctatgttttttttttactttttt

SEQ ID NO: 162899 - DNA, 430 bp, Arabidopsis thaliana columbia
ccaaaagaagaagagaaacatcaagaagttgattggcttcctctatgttctcctccaccgctgtggttacctccccggctcaagccaccatggtcgctccattcaccggcttgaagtcatccgcttctttcccggtcacccgcaaggccaacaacgacattacttccatcacaagcaacggaggaagagttagctgcatgaaggtgtggccaccaatcggaaagaagatgtttgagactctatcttacctccctgaccttagtgacgttgaattggctaaagaagttgactaccttcttcgcaacaagtggattccttgagttgaattcgagttggaacacggatttgtgttccgttagcacggtaacactcccggatactatgatggaccattctggacaatgtggaagcttccatagttcggatgcac

SEQ ID NO: 162900 - DNA, 422 bp, Arabidopsis thaliana columbia
  unsure (1)..(422): unsure at all n locations
gccaactctctagcagacggctacaacactgtgttccggactagccgcagagatcattggaacattcgttctcgtctacacagtcttctccgctactgatcccaaacgtaacgctagagactcccacgttccggttttggcgccacttccgattgggtttgcggtgtttatggtacatttggccactattccgatcaccggaaccggcatcaacccggctaggagtttcggagctgccgtaatctataacaagagcaagccatgggatgaccactggatattctgggtgggaccattcattggagctgcgatagctgcattttatcaccaatttgncctaagggcttcaggttccaagtcacttggatccttcagaagtgcagccaacgtttgagttttgccacacaaaaaaaaacctatca

SEQ ID NO: 162901 - DNA, 474 bp, Arabidopsis thaliana columbia
cggacgcgtggggtgattgggaaatcgaggttgcttgttactccgagtgttaaggagaaagctaaggagattgctgagacgtggaagaagagtttggaagagagaggaaggatagagaatgtgaagactcctgatgttcatacgtttttgcagcatcttgttacatttggaattgttaaaagtgaagatcttgctttgtatagaaagcttgttgttggatctgcgtggcgtaaacagatgcctaagcttgcggtttctgttggtttgggtgatcaaatgcctgacatgattgaagaattaatcagcaggggacaacagcttgatgctgttcattttacttatgaagttgggcttgtggataagttccctcctgttcctttgctcaaagcttatctaagggacgcaaagaaagcagcagcttttatcatggaggactctagcaatactggccgagctacgcatctcgtggcgcgc

SEQ ID NO: 162902 - DNA, 451 bp, Arabidopsis thaliana columbia
ggtgagattctcagggggtaggagcagcattggaagtgcacgtgacttgcctcataaattcactctgccatatttggggcactcgaacttggaagaccaatgacacttctcgtaatgtttggtggttatcggtattttcatttggagagagttggcacaacaatcatcatgcgttcgagtcatcggctagacaaggacttgaatggtggcaaatagacatttcgtggtacattgttcggtttttcgaaattatcggtttagcgaccgatgtgaaagtgccaacggaggctcaacgacgtcgtatggctataagtcgttgatggaaattgcgggaagagcatagaaaaagggatctattctatgtaattagaataatttctaatcctaaaagagagttattgttttattttctttattactacttttgaaagtttggggtaacgcaaaggac

SEQ ID NO: 162903 - DNA, 470 bp, Arabidopsis thaliana columbia
  unsure (1)..(470): unsure at all n locations
gttcctggccctgaagtagcaagattggctgacgtggctaggaaaaaccatgtgtacttggtaatgggagccatagagaaggaagggtataccctctattgcacagttcttttctttagtccacagggtcagttcttgggcaagcaccgtaaactcatgcccacaagtttggaacgttgcatttggggccaaggggacggatcaaccatccccgtttacgacactcccattggaaaactcggtgctgctatttgctgggagaataggatgcccctctacagaactgcattgtacgccaaaggcattgagctttattgtgcacctactgctgatggttcgaaagaatggcaatcgtcgatgcttcacattgcgatcgaaggtggatgtttcgtcttgtcggcttgccaattctgccagcgtaaacatttccctgatcatnctgactactngtttaccgattggtacgacga

SEQ ID NO: 162904 - DNA, 453 bp, Arabidopsis thaliana columbia
cgtccacatctttctcctttggtggcaaacacatcgtctgatagagagaaacgatggcgtcgaactcgcttatgagctgtggcatagccgccgtgtacccttcgcttctctcttcttccaagtctaaattcgtatccgccggagttccactcccaaacgccgggaatgttggtcgtatcagaatggctgctcactggatgcctggcgagccacgaccagcttaccttgacggttctgctcctggagactttgggtttgacccacttggacttggagaagttccagcgaaccttgagagatacaaagagtcagagctcatccactgtagatgggctatgctcgctgttcctgagattttggtaccagaagcattaggatatggaaactgggttaaggctcaagaatgggcagcactaccagggggtcaagccacttacttgtgaaacccagtcc

SEQ ID NO: 162905 - DNA, 475 bp, Arabidopsis thaliana columbia
  unsure (1)..(475): unsure at all n locations
caacaaagagagaaattaacatggcgtcttttgcaaccatcgccgccgtacaaccttctgccgccgtgaaaggactaggaggtagctctcttgccggagctaagctcttcatcaaaccttctcgccaaagcttcaaaaccaaatccaccagagctggcgctgtggtggctaagtatggagacaaaagtgtatactttgatttagaagatttgggtaacacaacaggacaatgggatgtgtatggatctgatgctccttctccttataacccacttcagagcaagttctttgagacatttgctgctcctttcacaaagagaggtttgcttctcaaatttttgattcttggaggaggctctttgcttacatatgttagtgcgaactctaccggcgatgttcttccgattaagagaggtcctcaagagccacctaagctcggtcctcgcggcaagctntaaattagctntctaaaatc

SEQ ID NO: 162906 - DNA, 452 bp, Arabidopsis thaliana columbia
agggacatcagttatcgctcgagtatcttgtcaggaatttactgaaactatatgttgacattgagttcacgggttcacacactcagttctatgacaagttcaatattcgccacaacattgccgagcttttagagtatctctggcaggtgcctagtcaccgaaatgcatggagacggattgcaaaagacgaagagaagggcgtgtacttgaacttcttaaacttcttagtcaatgatagcatctatcttctggatgaaagtctaaacaaaattctcgagattaaacaaatcgaggcagacatgtcaaatactgcagagtgggagcagagaccaactcaagagagacaggagagaacaagactcttccattcgcaggagaatattgttagaatcgacatgaagctggcaaatgaagatgtgactatgcttgcatttacatccgaggagatcact

SEQ ID NO: 162907 - DNA, 430 bp, Arabidopsis thaliana columbia
gtctacacctccacactccgacttggttgagatgaagaaagaagagatggcaggacacaaggttgcacatgcgacattgaaagggcctagcgttgtcaaggagttatttatcggtttggcactcggtttagctgctggtggtctttggaagatgcaccattggaacgaacagaggaaaaccagaactttctatgacttgcttgagagaggtgagatcagtgttgtagctgctgaagagtaattaagccgctcaataactggttcctgaagattgtttgatttccatttctgtcttttttttcttttttttgttgggttcttaagaaatatacaaatctgagtatgggatttgttacaaattcagatttgttgtttattcagacattaatctctttttgtttgtttcgagaaattacaaaaggtgtatttt

SEQ ID NO: 162908 - DNA, 251 bp, Arabidopsis thaliana columbia
caccaaacgtatcagtggttgatctcgttgttctggtctcaaagaagacatttgctgaggaagtcaacgctgctttcagagattctgcagagaaagagcttaaaggtatactcgatgtctgcgatgagccactagtgtccgttgatttcagatgctcagatttttcaacgaccattgattcatcactcactatggttatgggagatgatatggttaaggtgattgcttagtttgattaaattatatgtgtg

SEQ ID NO: 162909 - DNA, 454 bp, Arabidopsis thaliana columbia
  unsure (1)..(454): unsure at all n locations
acgcgtccgttcgccggaaataatggctctcccgcgatttctttcttttctcgccgacgncactctctctctttggctcaccaccactgatgcttcctctcgctctctatccactccacctaaaacgaacggactcgacgtcgnttcatctctccagcaaacacaaactatcctctcactcgacccgactcgttcctgactcaccaccaccaaacccgaatccctatccgacccgggtttcttcaattcatcttcaccactatctctagagctttactctcgagacactttcgtcgcgtcacagctcatagactacaatagcttaacactcagtcgacttgagcgcgactcatcccgagtcgccggaatcgtcgcgaagatccgtttcgccgtcgaaggagtcgatagatccgatctcaaaccccgttacaacgatgattcacgattccaaacc

SEQ ID NO: 162910 - DNA, 457 bp, Arabidopsis thaliana columbia
caggaaaagaagaaaaacagacagcggaggactaaatcaactagccacaacacaacgcttcaaatatatattactctgccactttcttcaatcttccttcaaagattcttattacagcgacacacaactcttttccatttagatttttgattttttttggttctctaaaggaggagagaaatgttggctatcttccacgaggcgtttgctcatccgccggaggaactcaacagtccggcatctgagaaatgctctaaacaaccaaaacttccagaagaaaccctaaatgatttcttattacgttaccctctcaacactttctccatgtctttcggacaagctgctgttcttgcttacgttcgtccctctgcttccttctccatccaccagaggttgttttgtggatttgatgacatctactgtctcttctttgggagctagaacaatctgtgtcagc

SEQ ID NO: 162911 - DNA, 475 bp, Arabidopsis thaliana columbia
  unsure (1)..(475): unsure at all n locations
ctctctctaatcaaaaagcttttaacctcagccgttaaatctttctccgatcatgccgaccagaaacatcgccattggtggagtccaagaagaggtctatcaccccaacgcacttagggcggcgctcgctgagtttatctcgactttgatcttcgtcttcgccggctcaggctccggaattgctttcaacaagatcactgacaatggagcaaccactccttccggcctcgtcgccgctgccttagctcatgctttcggtctctttgtcgctgtctctgttggcgctaacatttccggtggccacgttaaccctgccgttaccttcggtgtcttactcggaggtaacatcactctcctccgtggtattctctactggattgctcagcttcttggctccgtcgccgcttgtttcctccttagctntgccaccggtggcgagccaattccagcgttcggtctctctgccggagtcgga

SEQ ID NO: 162912 - DNA, 178 bp, Arabidopsis thaliana columbia
  unsure (1)..(178): unsure at all n locations
tcggtagcaatgagcaaagtgggcaggactttcgtttttaccctgcaagagggaaaaagaggtgagatcaacctttatgttggggaaggaatacttntttaccagagttatatctccccatactctgtgacagtcagtgtgaaaatgtccgttgagcatgacatatactagttgcttt

SEQ ID NO: 162913 - DNA, 467 bp, Arabidopsis thaliana columbia
acaaaacccaattagccggagatggccttatcttccgccgctgctgcagctgcttcttccatcatgggtactcgggtggctcccggtatccatcccggttcaggtcggttcacagccgtgttcggtttcggaaagaagaaggcagctcccaaaaagagtgccaaaaagacggtgactacggaccggcctctttggtacccaggcgccatttctcctgactggcttgatggttccttggttggagattacggttttgatcccttcggtttaggcaaaccggccgagtatcttcaattcgatatcgattcactagaccagaatctggctaagaacttggccggagacgtgatcggaacccgtacggaagctgccgacgccaaatcgacgccgtttcagccgtacagtgaggtgttcggaattcagagattcagggaatgccgactcattcacaggacggtgggcgatgc

SEQ ID NO: 162914 - DNA, 181 bp, Arabidopsis thaliana columbia
tctgcatttgttgcttatgtgaattttgtttggctttagaaaagtctttttaggggtagagacggtattgtagagaggataacaaatctttttccgccttttacgggtttttttttccatgtggggtgagtataaggttgtgataatgcatagttgtactcctttatttgctttttttttt

SEQ ID NO: 162915 - DNA, 471 bp, Arabidopsis thaliana columbia
cacaaatggcgatgacgtcagcagctaccggttttattctcacggccaacgtcccggcggcaataggcggtggttcttcaaagagcaccaccattgtgtctttcttgccgatgagaagcttcggttcaaggctagtagtcagagcggcggaagatacacctccggcaaccgcctcgtcggatagttcttccaccaccgctgctgctgctccggcgaaagttccggccgctaaggctaaacctcctccaattggcccaaagagaggatccaaggtcaagattctaaggaaagaatcatactggtacaagaacgttggatcagttgtggccgttgatcaggacccgaagacccgatatccggttgtggtccggttcgccaaggtgaattacgcgaatatatcgaccaacaactacgcattggacgaggtggaagaagtaaaatgagagacatgggttatctctaaaccggttc

SEQ ID NO: 162916 - DNA, 469 bp, Arabidopsis thaliana columbia
aagctcataaataataaactccaattaagaatggatcaagcggagcttgccaggatcttccaaatgttcgacaggaacggtgatggcaaaatcacgaagcaagagctgaatgattcattggagaatctaggaatctacattccagacaaagacttggtgcagatgatcgagaagattgatctcaacggtgatgggtacgtggacatcgaagagtttggagggttgtaccagacgataatggaggaaagagacgaggaggaagacatgagagaggctttcaacgtgtttgatcagaaccgggacgggttcatcacggtggaagagctaaggtctgtgttagcttccttggggctcaaacaaggaagaaccctagaggattgcaagaggatgataagcaaagttgacgttgatggagatggcatggtgaatttcaaagagtttaaacaaatgatgaaaggtggtggatttg

SEQ ID NO: 162917 - DNA, 445 bp, Arabidopsis thaliana columbia
ggtcgctgcatatgacaaaactcaggggaaaatggccttctttgatccttccaggtctcaagacttcctcttcatatcaggaaccaagatgcgtgggttggcgaagaagaaagagaacccaccagatggtttcatgtgtccctctggttggaaggtgttggttgactactacgacagtctcagtgcagagactggtaatggaagggtttcagaagctgttgcttctgcttgaatgcaaaaggtttccttgtcccacaagattcacatttcctgtttgttagtaactaaactccgtgacaaaaagcttccaataaaaccaatgtaacatctgtgtgttctttgcgtctctgttgtcaaacttgtcgtcgagtcgcatcgatttgtaccatatttgcttattgtgttttaaatgtaacaacatttgtgtataaactatttctcgggg

SEQ ID NO: 162918 - DNA, 470 bp, Arabidopsis thaliana columbia
cagacccggactcgactggatcttctcttctctccttatctctctctatcgacgatcgaactgacttgagtacttcttcttgttttgaccagagctctcacacatacgagtcactataatggaaggcgatcaagagacgaatgtttatactttggtggcaaggaagccttccttcgatctcccaacagcttgccctaattgtcttcctgcttatatatacctgaaattagcccagctaccttttgaacttgcgttcaattcaaccttccctgattcagatgaactgccgtactttgaaagtgatacatatgttgcatataacaatgaagatggaggagttattgaaaaactgaagaaagatgggattggtaatctggactctcagctacagtctctttcggattatttatctttgaaggctcttattgtgtcttggctagaagaagcgcttacctatgagatatgggttg

SEQ ID NO: 162919 - DNA, 348 bp, Arabidopsis thaliana columbia
ttagcattcagcatgactagcgcaagttttttctgtcctcaaaccagaaaatattaggggggttttcttagactacgggaagattcccttgttcatgggttcccgatttcaatggtttgtatgctataaaagagtgcctaaatcaagtgcattaaaggagattgattctggttgcacaacttatgagcgccaggaccatacctacattgtatcaaccagtcattattgggcaccagaagatatattaagttttggtttgagctatccttttgatgtttggatctgtatgatttttatattggcgttagtgcactggtgaagtcattttacctaacacattaaaaccct

SEQ ID NO: 162920 - DNA, 464 bp, Arabidopsis thaliana columbia
caaaaaagtttcaatggccgtctcaacatttgttctctcctcccctgctttcgccggaaaggctgtgaacctttcccctgcgggatcagaagtccttggaagcggccgtgtgacaatgaggaagactgttgccaagccaaagggtccatcaggctgcccatggtacggatccgaccgagtcaagttcttgggtccattctctggcgagtcacccagctaccttaccggagagttccctggagactactgatgggacacagttggtctatccgctgaccccgagacatttgcaaggaaccgttagctataagttattcacaataagtgggccatgctctgagccctaggctgtgtcttccctgatgcttttgccaggatcggtgtcaagtttggagaggcaatttggatcatggctggttcacagatctttagcggtggagggcttgatttcttgggaatccctt

SEQ ID NO: 162921 - DNA, 477 bp, Arabidopsis thaliana columbia
gtcttgtctctcaagaaagctagtccttaaactctatggacatgtctgtacttgaaaggcttaaatgggtacaacagcaacaacagcaactgcaacaagttgtgtcccatagcagtaataattcacctgaacttcttcagatacttcagttccatggaagcaacaatgatgagttgttggagagtagtttcagccaatttcaaatgcttggatctggttttggaccaaactataacatgggttttggtcctccacatgaatccatttcaagaacaagtagctgccatatggaacctgtggatacaatggaggttttgttgaagaccggtgaagaaaccagagccgttgccttgaagaacaagagaaaaccagaggttaagacatgggaagagcaaaagacagagaagaagatcaaagtagaggctgagacagagtcaagcatgaaaggaaaatcaaacatgggaaacactgaagcat

SEQ ID NO: 162922 - DNA, 254 bp, Arabidopsis thaliana columbia
gggccgacccacgtcgtccagtaagagtaagaaaggagtagatagatgctctgtctttctatcgagaagacgagtatatcatgagcttgtaagcagatcgctggacttgttcaacgtgccggattctctaacctgaccggagttcaaggcgccgtttatattcatggagaggatcagtagaagcttgacgtcatttctaatgaggagttccccaactgtttgagatcaagtggtagatcgtgaatcatagtccc

SEQ ID NO: 162923 - DNA, 463 bp, Arabidopsis thaliana columbia
cgggcgcccagctccggagaaagggtcggtttcgaccattcatttagttttgacccgaggtggcacgagggggattcgtggcaggtttatgatccttgcaccgtgctaactgttggagtcttcgacaattggaggatgttctctgacgcctccgatgatagacctgacacacggattgggaagatacggatccgggtgtcgacgttagagagcaacaaagtgtacaccaattcatatcctctgttggttttgttacctagcggtatgaaaaaaatgggtgaaattgaagtggcagtccggtttgcatgcccgtctctgctgcctgatgtttgtgcagcttatggacagccgcttctgcctcggatgcactacataaggcctctatgtgtagcacaacatgatgcattaagaggggccgccacgaaaatgggtacagcttggcttgctcgagcagaccaccatt

SEQ ID NO: 162924 - DNA, 473 bp, Arabidopsis thaliana columbia
ggagatttccagaaggcgtttgaagttttgatctctcttgaggtctggaggctgctcaagaaccgtgacagcatccttgacatggtgaaggataggatcaaagaagaggctctaaggacttacctattcacatactcaagctcttatgagtccttgagtcttgatcagctggccaaaatgtttgacgtctctgagccgcaggtccacagcattgtgagtaagatgatgattaatgaggaactgcatgcaagctgggatcagccaacacgatgcatcgtcttccatgaagtgcaacacagcagattacaatcattggctttccagttaacggagaaactctcgattttggcagaaagcaatgagagggcaatggaatctagaaccggtggaggtggtctggatctgagttcaaggagaagggacaacaatcaggactatgcaggagcagcatcaggtggtggtggatattggca

SEQ ID NO: 162925 - DNA, 466 bp, Arabidopsis thaliana columbia
cacatttgtaacactaattctcaaatcctaaacatgtaaccttcatcaccaatttcactcactagttcttcaattgctagaaaagctcgtttttctccttacctcttcacactcttagccttcattcttttcgtctctgtcctctatggtgaagattttatgtgcatctttggacagctcgagcctaacttcgtcctcccgccttctcgaacacccgaaaagaataagaaatcggagaagcttgcgtttgctattggtaaaacagaggaaagctgtgacgttttcagcgggaaatgggtgagagatgaagtctcccgaccactgtatgaggaatgggagtgtccgtacattcaacctcagcttacatgtcaagaacacggccgtcccgacaaagactaccagttttggcggtggcagcctaatcactgcgatcttccctcgttcaacgcgtcactgatgctggaga

SEQ ID NO: 162926 - DNA, 391 bp, Arabidopsis thaliana columbia
tagatattaacatggagtttttagaaaccattgttgttttccatcctactgccgccagtaaaggacttggaggtagctctcttgccggagctaagctcttcatcaaaccttctcgtcaaagctgtaaaaccaaatccaccagagctggtgctgtggtggctaagcatggagacaaaagtgtatactttggatttataagatttgcgtaacacaccaggacaatgggataggtatggttctgatgctccttctccttataacccacttcagagcaagtgctttgagacatttgctgctcctttcacaaagagaggtttgctcctcaaatctttgattcttggaggaggctctttgcttacatatgttagtgcgaactctaccggcgacgttc

SEQ ID NO: 162927 - DNA, 332 bp, Arabidopsis thaliana columbia
  unsure (1)..(332): unsure at all n locations
cagcaccaangncactcacgaggtcttctattgctagaaaagcgtcgcttttctccttacctcttcacactcttagccttcattcttttcgtctctgtcctctatggagaagattttatgcgcatctttggacagctcgtgcctaacttcgtcctcccgacttctcgaacacccgaaaagaataagaaatcggagaagcttgcgtttgctattggttaaacagaggaaagctgtgacgttttcagcggcaaatgggtgagagatgaagtctcccgaccacttgttgaggaatgggagtgtccgtacattcaaccctcagcttacatgtcaag

SEQ ID NO: 162928 - DNA, 475 bp, Arabidopsis thaliana columbia
ggtagaaagccatggaatcagaagggtactgtgtatagctagacatggtacactacgtggtccgcagttccgaggtggttgtgtaatgcatggacccaaaccaagaagccatgccataaaaatgaataagcaggttcgacggcttggactgaaaatagcattgacagctcgagccgcagaaggaaaactcctcgtgtttgatgatttgggattgcctacgcataaaacaaagaacattgtgaactattacaaccaaatggagaacacaaagaaagtccttgttgtagaaggtggtcctattgatgaaaagctgaagctagccacccaaaatctacactatgtcaacataattccatcaatagggctaaatgtttacagcattctgctacacgatacgcttctgatgtcccgtgatgctgtgaataagatcggtgagcgtatgcacactcctattaaccgttggagagacaacaat

SEQ ID NO: 162929 - DNA, 293 bp, Arabidopsis thaliana columbia
gattctttgcttgcgaagatgagcaacttctatctctgtatgaacatgtccgatctctgcaccgttcttaacgaggaggatcgggccgatcttgttaatgctcttaagaacaagttgcaaaatttggctggacaacactctgatgtccttgaaaacttgactccaccagtcaggaagcgtgtagagtttctaagagatgattcagatccaatatgatgagatggaagcaaaattctttgaagagagagcagctcttgaagctatagtatcataagttatatcagtctttatat

SEQ ID NO: 162930 - DNA, 266 bp, Arabidopsis thaliana columbia
atgaggaagactgttgccaagccaaagggcccatcaggcagcccatggtacggatctgaccgtgtcaagtacttgggtccattctctggcgaatcaccgagctaccttaccggagagttccccggagactacggatgggacaccgccggactttcagctgaccccgagacattcgcaaggaaccgtgaactagaagttatccacagcaggtgggccatggctcggagccctaggctgcgtcttccctgagctttgggctagaaacg

SEQ ID NO: 162931 - DNA, 452 bp, Arabidopsis thaliana columbia
gtggcaaggtctttgggctggcaatgaaatcaatatgattcgaatcattccaacgcaagcaattgagttagggacattcgagtgggtaaaacgtgcaatgacatcagctcaagtgaagttgaagaagattgaggacgccaagattgaaatcggtgattttagtttcagtccgtccatatcgtggatctctcctgttgctgtggctggtgcatctgctggtattgccagtacacttgtttgccatcctctcgaagtcctcaaggatagattgactgtgagccctgagatttatccaagcttaagccttgcaattccaagaatttttagagccgatggaatccgtggattttacgctggcttaggaccaacattggtcgggatgcttccttacagcacatgttattacttcatgtatgacaaaatgaagacctcatactgcaaatccaagaaca

SEQ ID NO: 162932 - DNA, 451 bp, Arabidopsis thaliana columbia
gagagatagagttatggctttggcgatgatgatccgaaacgcagcttcgaagcgaggaatgactccgatctccggtcatttcggtggtttgagatctatgtcttcatggtggaagagcgttgagcctgctcctaaagatccgatcctcggagttaccgaagcttttctcgctgatcctagtcctgaaaaagttaatgttggtgtgggagcatatcgtgatgataatgggaagcctgttgtcttggaatgtgtcagagaagctgagaaaaggcttgctgggagcactttcatggagtaccttcctatgggaggaagtgccaaaatggtggacctaacattgaagcttgcctatggggacaatagtgaatttatcaaagataaaagaattgctgcagttcaaactctgtctggcactggagcctgccggctctttgcagacttccagaaacgt

SEQ ID NO: 162933 - DNA, 446 bp, Arabidopsis thaliana columbia
gtcagggagagcaaaacaaagatcggagaagttgaaaacgattctttcttccaaaccgatgcacatcccacagggttaccatcaagggtcacgctaaagtgatcgaagtcgaaggacctcgcgggaagcttgttcgcgatttcaagcatctcaacctcgatttccagctgatcaaggatccagagactggaaagaagaagcttaagatcgattcgtggtttggaacacgcaaaaccagcgcctccatcagaaccgctcttagccacgtcgataacttgatctccggtgttaccagaggtttccgttacaagatgaggttcgtgtacgcccattttcccatcaacgcctccatcggcggtgacggaaagtctatcgagatccgtaacttccttggcgagaagaaggtgaggaaggtagagatgttggatggtgtaaccattgttcga

SEQ ID NO: 162934 - DNA, 396 bp, Arabidopsis thaliana columbia
cgaagaacatttacacacatcaatggcgtctctgcaactctgcgacggttatcttctcttcaagccctctgtttctcctcgattcctctctcaacgcatttctcatcgcctaatccctaaagcctcatcttctcctcctccatctccatcaccatcatcggcctcttcatccttatctttcaagcggcgggagcttctgtaccaatcggcagctgtatcactctcgctttcttccattggtggaccagcgagggctgatggacagttatccgaatgggaaagagtgtttcttccaatcgatcccggtgttggtcttctcgacattgcttttcgccccgacgaacctagccgggggtttttacttggaacgagacagacttttgttgagactaaaga

SEQ ID NO: 162935 - DNA, 427 bp, Arabidopsis thaliana columbia
cgcgtgcgcgaatgatccacgagaagaagaacaatttctcttagatcgtttgatctgatccaatcgaagaagaagacgggaatcttattcacgcggatgttctcttccgtctttgggaacaaagaagctcgaatcctcgtcctcggtctcgacaatgctggaaaaaccacaatcctctatcggcttcagatgggggaagttgtctctacgattccgactattggatttaacgttgagactttgcagtacaacaatatcaagtttcaggtctgggatttaggtggacaaacaagcatcaggccatactggcgatgctatttcccgaatacacaagcagtgatctatgttgttgactcgagtgatacagatagaatcggggtggcgaaagaggagtttcatgcaattttagaggaagatgaattgaaag

SEQ ID NO: 162936 - DNA, 460 bp, Arabidopsis thaliana columbia
ggaaggcccgggacgacccacgcggacgacaattctttatgtttcgctttaccttatagcccttggaactggcggccttaaatatagtatctgtggctttggggcgggccagattgatgacaactatcctaaagagaaagctcacatggctttcttcttcaacaggtgtcttcttctttattaatatggggacattattgtctgggactgttttagtttacatgcaagatgaagtgggaagatcttgggcttatcgaatctgcactgtctttatggctatagctattgtaatattcttgtgtgggactaagaaataccgctataagaagagccaaggaagtcccgttgtgcaaatattacacgtcatagcagctgcgtgccgaaagaggaatatggcactacctcaaagcattgtttatctttatgaagataaccctgaaggcattagaattgaacattc

SEQ ID NO: 162937 - DNA, 386 bp, Arabidopsis thaliana columbia
gcgaagagatagagaaatggctttggcgattatgattcttttctcaacttcgaagcgaggaatgacggcgggctccattcatttggggggggggagatctatgactttatggagtaagagctttgagcctgctcctaaattatcctatcctctgagttaccgaatcttttctcttttatcctagttcttaaaaacgtaatgttggtgttgtagcatatcttgatgataattcgaagcctctttacttgtaatgtgtcagacaaacttagaatagtctttctgggagcactttcatggactaccttcctatgggaggaggggcctaaattgttaacctaacatttaactcttcctattgttacaatattgtatttttcaatcatata

SEQ ID NO: 162938 - DNA, 413 bp, Arabidopsis thaliana columbia
cgtccggcttttaacctcagccgttaaatctttctccgttcattccgaccagaaacatcgccattggtggggggcaagaagaggtctatggccgcaacgcacttagggcggcgctcgctgagtttatctcgactttgatcttcgtcttcgccggctcaggctccggaattgctttcaacaagatcactgacaatggagcaaccactccttccggcctcgtcgccgctgccttagctcatgctttcggtctctttgtcgctgtctctgttggcgctaacatttccggtggccacgttaaccctgccgttaccttcggtgtcttactcggcggtaacatcactctccttcgtggtattctctactggattgctcagcttcttggctccgtcgccgcttgtttcctccttagcttt

SEQ ID NO: 162939 - DNA, 259 bp, Arabidopsis thaliana columbia
gttcgacccacgcgaccgaccatctggagaagtcgtagatcctccttattttttaaaacccgctgaagaaaacgaacgttgatcagggtttggacgcgggaattgatacacctccacttgcaaaggcttatgaaggagatttctacaattacttaagcataaggttggatgctcaagttgcatatggctcccaccattttcacaacactaaaccatatcttgctcaaggccctatttcaaatataaatacatattcaag

SEQ ID NO: 162940 - DNA, 396 bp, Arabidopsis thaliana columbia
gagcgaaaatgaaaagaatcagaaatggttttttgtaactgaagaggatatcaagagttgccaggtttccagaaccagactctgatagccgtcaaagctcctcatggcacaactttggaagtgcctgatccagatgaagcggctgaccacccacaaaggagatacaggatcattcttagaagtacaatgggacctattgacgtatacctcgtcagcgaatttgaagggaaattcgaagacacaaatgggagtggtgcagcaccaccagcatgcttgcctattgcttctagctcaggatctacagggcaccatgacatctaaaccttaactgttgacaacccagaaactgctattggggctcatgatcatcctcattctcaacccggcgatacctct

SEQ ID NO: 162941 - DNA, 427 bp, Arabidopsis thaliana columbia
tgatcagatagagagtagtgacacgcctgaggataattagcagacgacacctgatggtaaaaccctgaagaaaccgactaagatgctaccgtgtccgagatgcaaaagcatggagaccaagttctgttattacaacaactacaacataaaccagcctcgtcatttctgcaaggcttgtcagagatattggactgctggagggactatgaggaatgttcctgtgggggcaggacgtcgtaagaacaaaagctcatcttctcattaccgtcacatcactatttccgaggctcttgaggctgcgaggcttgacccgggcttacaggcaaacacaagggtcttgagttttggtctcgaagctcagcagcagcacgttgctgctcccatgacacctgtgatgaagctacaagaagatcaaaaggtctcaaac

SEQ ID NO: 162942 - DNA, 391 bp, Arabidopsis thaliana columbia
cgaaatcggagaattagccaaacgatggccgccgactgaatattccgcagcatcttcgagggttgtgatctccggccttgattccgccatcgaacggcgtccttaccacaaaaactgcggatgtgctcttcacgataaatcaagtggcgctgggaaaaatcaaaatcagcgacggccgccgtcttgtcgccgccacggaagctcagagagcatctcgttcccgatccgaaggtcttggagcgaaggcaacataatggctatgaatctcttctcctcatcggcgacttcttctaatcttcaatcgctttcttcggcttctttgctctcaaatctggcatcagatttaccgggggataatgcttggacggaggaaccgggcagatctaataaa

SEQ ID NO: 162943 - DNA, 322 bp, Arabidopsis thaliana columbia
gaagctctcgaaccccatgagggacattaaggttcagaaacttgttctcaacatttccgttggtgagagtggtgatcgtctcactcgtgcctccaaggtgttggagcagctcagtggacaaacccctgtcttctctaaggcgaggtacactgtgaggtcttttggtatcaggcgtaatgagaagattgcgtgttatgtgactgtgagaggtgagaaggcaatgcagcttcttgagagtggtttgaaagttaaggagtatgagcttcttaggaggaacttcagtgacactggttgctttggatttggtatccaagagcacatt

SEQ ID NO: 162944 - DNA, 169 bp, Arabidopsis thaliana columbia
ataattattttactaagaacataaaatccattttcttttctcaagcattacatcaaactcaatattgagagaacaaagggtctatcgtgaacaagctcaagctttacatcaaactcaacagtgacagaacaaagctttttctcacaataaaaaataaaaaatgaaaata

SEQ ID NO: 162945 - DNA, 403 bp, Arabidopsis thaliana columbia
cacagaaaaacctagaaagctctagagagaatgtgagagagagatggaaggtaaagaagaagatgttagagtcggagctaacaagtttccggagaggcaaccgatcggaacttcggctcagagtgacaaggactacaaagagccaccacctgcgccgttgttcgagcccggcgagctagcttcatggtccttctggagagctgggattgctgagtttatagctacgtttttgttcctgtacatcactgttttgactgttatgggtgtgaagaggtcaccgaacatgtgtgcttccgtcggaatccaaggtatcgcttgggctttcggtggtatgatcttcgctctcgtctactgcaccgctggtatcttcggtggacacatcaacccaacggttaccgttcgt

SEQ ID NO: 162946 - DNA, 420 bp, Arabidopsis thaliana columbia
gaaaaaccgggccggcccacgcgtccgctcctttcctttcattgtagttaacgaaaagtttacgataatggcaacatcagctatccaggagtcctccttcgccggccaaacggctctcaagccctccaacgaactcctccgcaaggttggtgtatccggtggtggccgtgtgaccatgcgtcgtaccgtcaagtctactcctcaaagcatctggtacggaccagaccgtcccaagtacttaggaccattctcggagaatacaccgtcctacctaaccggagaataccccggagactactgctgggacaccgctggactctcggctgacccggagacattcgctaagaaccgtgagcttgaaagaatccacagcagatgggctatgttgggtgctcttggatgcacattcccctgaaattc

SEQ ID NO: 162947 - DNA, 417 bp, Arabidopsis thaliana columbia
ccaaaccatcatcatcatcatctcttggtgacataagaaaagagttgaggaacagagaaaatggcagcacaagcacttgtgtcttcttcacttacctcctctgttcagacagctagacagatatttggctcaaaaccagttgcgtctgcctcacagaagaagagttcctttgttgttaaagctgctgcaactccacctgtcaagcaaggagccaacagaccattgtggtttgcttcatcgcagagtctctcttacttggatggcagcttacctggtgactatggattcgaccctcttggtctttcagacccagaaggtactggaggattcattgagccaagatggctagcatacggagagatcatcaacggacggttcgtcatggtgggtgcagctggagctattgcttcttgaatt

SEQ ID NO: 162948 - DNA, 436 bp, Arabidopsis thaliana columbia
ctttcattctatcctaaatcctcatcactcaacctgagctcacaaagctaaacaaaaaaaaaagagcttaggcggagaagaagaggagaccaaaacaccaaacaaacaacaatggctgtctcaactatctactcaacacaagctctcaattcaactcatttcttaacctcttcttcctcctccaaacaagtcttcctctaccgtcgtcaaccacaaaccaaccgtagattcaacacactcatcacttgcgcacaagaaaccatcgtgatcggactagctgctgactctggctgcggcaaaagtacctttatgcggaggctcaccagcgtctttggtggcgctgctaagccaccaaaaggcgggaaccctgattccaacacactcatcagcgacacgaccactgtgatctgtcttgatgattaccattctttggata

SEQ ID NO: 162949 - DNA, 367 bp, Arabidopsis thaliana columbia
gacagctaaaactaaatacaaagaaacagagatgggtttggttacagaggaggtgagagctaaggcagagatgtacaccggagatgagatatgtagagagaagacaaagtgtttcctcaaggaaatatctatgcccaatggtttattaccattgaaggatatagaagaggttgggtatgacagagtcaggtgttgtatggctgaagcagaagaagagcatcactcacaagttcacagagatagataagcttgtcttctatggaaccgaagtcacagccattgttgagaccgggaaaatcaagaagctcactggagtcaaagccaaggaacttttttatttgggtaacttatcaatgagatctattac

SEQ ID NO: 162950 - DNA, 425 bp, Arabidopsis thaliana columbia
gtccaaacaaaaaaatcctctcccaatctccgcttcattcttctcatggacgctctcattgctcagcttcagagacaatttcgtgattacaccatttctctctaccaacaggggtttttggatgatcaatttactgagttgaaaaagctacaagatgatggaagtcctgattttgtgtctgaagtgctttcacttttctttgaagattgtgtgaagcttatcagtaacatggctagagctttggacacgacaggaactgtagattttagtcaggtaggtgctagtgtgcatcaattgaagggtagtagctcaagtgttggtgccaagagggtcaaaactttgtgtgttagcttcaaggaatgttgcgaagctaagaactacgaacggtgtgtgagatgtttgcaataagttgattttgttttcaa

SEQ ID NO: 162951 - DNA, 280 bp, Arabidopsis thaliana columbia
acccaaaaaacagaccaatctctttatttttcagaaacctcactaaaagggttgggtgttatatacacagggaacggcggtgcaagttaccaacgaccaaactgtcctcttcgacatgcaactagccagtgctttcgttcttacgatggctttaaaatccgtcttagagcttgaccttcttgagattatggccatgaatggttataccatgtgtactaccgagatcgcttctaaactttcgaccaaaaatcctgaagctccggtcatgctcgaccgtatc

SEQ ID NO: 162952 - DNA, 403 bp, Arabidopsis thaliana columbia
cgtacgacgacgacaagcctttgatttcatctccaattttttttaccggtttcaacactataccggagtgaaacgaagacgaagaagagggagataacgatgacggagaatttaaagggttttacgttaacacgccgtcaccgttaacgacgaagaaaatgttaacggattccgttactggacacgtggacgttaagctgtcttcagaagctgcaattgtggcggttgggagaggtaacgagacttactctgtgctcatgaaaatcaaatctccgttcgttccgacggcgcgtatatttccggtggatcttgtaacggttattgactttagctgtaggaatattgagatggttaagctagcgatgagggaaggtatattttctctacgagaaacggatcgttt

SEQ ID NO: 162953 - DNA, 414 bp, Arabidopsis thaliana columbia
gactcaaccatggcgtctttggctcagcttttttcgggattgagatgttccccactctcttctgcttctaggttatcgaggagagcttcgaagaactttccccagaacaaatctgcctctgtttctccgactattgtcgccgcggttgcaatgtctagcggtcaaacaaaggagcgtcttgagctgaagaagatgttcgaagatgcttatgaacgatgtagaacttctcctatggaaggtgttgctttcaccgtcgacgatttcgctgctgctattgaacaatacgacttcaattccgaaatcggcactagggtaaaaggaacagtgttcaagactgatgcaaatggtgccatagttgacatttttgcaaagtcatcggcttacttgtgcgtagaacaagcgtgtattcataga

SEQ ID NO: 162954 - DNA, 432 bp, Arabidopsis thaliana columbia
aaactccagaaccctagaattcgaaatctccattgaacccgacaaagcgccatgtcgctcactatcccggcgaatctcggtctcaacccgagatctaacaaatctctcactcaatccgtacctaaatcctccgcaagattcgtctgctccgatgacaaatcctcctcctccacacctcaatccatgaaagctttctccgccgccgtcgccctctcttccatcctcctctctgctcctatgccagctgtcgctgatatctcaggtttgactccttgcaaggactcaaaacagttcgctaaaagagagaagcaacagatcaagaagcttgaatcttctcttaagctctacgctcctgaatctgcccctgctcttgctctcaatgctcagatcgagaaaaccaaacgcaggttcgacaactacgggaagtacgga

SEQ ID NO: 162955 - DNA, 449 bp, Arabidopsis thaliana columbia
atatattaaagaggtttgtgaagacgaaggagtccaaaacctccctcaggagcttccgccttattcagagtgtagaggaggatccaaaagaaaagaggaaaaaatggactatatgtatggaccagggagacaccatctgtttgtaccaggaccagtgaacataccggaaccggtaatccgggcgatgaaccggaacaacgaggattaccggtcaccagccattccggcgcttacgaaaacattgttggaggatgttaagaagatattcaagaccacatcagggacaccttttctgtttcccacgaccgggactggtgcttgggagagtgccttgaccaacacgttatctcctggagacaggattgtttcgtttctgattggacaatttagcttgctctggattgaccagcagaagaggcttaatttcaatgttgatgtggttgagagtg

SEQ ID NO: 162956 - DNA, 273 bp, Arabidopsis thaliana columbia
gcgtacaaactcaaccatgcaatcaacggctctttttttttttcttctgcgaactcaagctctaggttgggtttttaagatatggaggtgacaaaaatagaatcatcccagaacaaatatggctctgatgctcctactattgttgtgagtttgtccgagaagagatcctacgtgaaagctcttaatgtgcaatcaattacaaaggaattcattgatgcttctgaggttacagatacgctagatgtggtggaagttgcagactttgatgaacta

SEQ ID NO: 162957 - DNA, 374 bp, Arabidopsis thaliana columbia
gtcgggcgggcgtacgcaattgaagcgttaaagatatacaaggagagtttattttccagagtatgtcgccaaagttggcgcggaggtttcaagatggggggggggcgtttacctctggtagtcctattattggagagacaagaggaacaggtttgattcttgggactgagtttgtagacaataaatcttcgaacgaaccatttccaccagaatggggtgttggcgcattctttggagccgagtgccagaagcacgggatgttagtccgtgttgcaggtgatggcattttgatgtctccaccgctcattatctcacctgaagagattgatgagttgatttctatctatgggaaagcattgaatgcatcggaagat

SEQ ID NO: 162958 - DNA, 373 bp, Arabidopsis thaliana columbia
ctcagtcataactatgctcaggttcaagactaataagcaaacgtctcctccctttggacttgaagctggcacagtcttcgaactcaaagaggaaggccacaagatcgttggtttccatggaagagccgatgttctgctccacaaaattggagtccatgttcgtcctttatccaactgatgatggagctctttatccttgattccatgcatctaataagttatcaaatctatcttctaaatttctcatatgaggtctcttcatgcctctggtgaatggtgatctttgataagtgttttacgcgttgtctcttgcgatgttgttttttctttgttcttcttgtgctctattttaataaaagaagtttgttcccaa

SEQ ID NO: 162959 - DNA, 439 bp, Arabidopsis thaliana columbia
ctcccatacctactggaggaactggcaccggagtaactggcaccggaactggcaccggaactggcactggaactggcactggcaccggaactggcactggaactggcactggaactggcaccggaggaactggcactggaactggcaccggtactggaggaactggcactggaactggcaccggaggaactggcactggaaccggcactgggactggcactggaaccggcactgggactggcactggaaccggcaccggaggaactggcactggaaccggcaccggaggaactggcactggaaccggcactgggaccggcactgggaccggcaccggaggaactggcactggaaccggaactggtaccggttcaggtgctcagaaattggaagcacatggcaacagtacaggaggtacatcatgggacgatggatccga

SEQ ID NO: 162960 - DNA, 463 bp, Arabidopsis thaliana columbia
gggtcggcgccacgcgtccggagagactcaaaacggcaattagcgaaagtgggcgggaggattcttttccggcgactctttggtgtcttctcttcctctgggctccggtgagaagatggaatcgccttccatctccgacgccgttccacttcacgcaccagaagacgcgaccgcggatttttcccaaccgcaatcgccgttacatgaagttgattcgtttccagttactgaatcctccgatgatgttgttgttaacgtctcggagataccgaatttatctccgtctgatgatgattttgaccacgagcgaaatagcggcgaggatcgcgatcaggatcacggcgagaatccggttgagaccgatggtgttgttgttccaatcgatgagttgaatcagaagatcattagacaggttgaatactactttagtgacgagaatttgcctactgacaaatttcttctg

SEQ ID NO: 162961 - DNA, 446 bp, Arabidopsis thaliana columbia
cacaaaacccaattagccggagatggccgcaacatccgccgctgctgcagctgcttcttccatcatgggtactcgggtggctcccggtatccatcccggttcaggtcggttcacagccgtgttcggtttcggaaagaagaaggcagctcccaaaaagagtgccaaaaagacggtgactacggaccggcctctttggtacccaggcgccatttctcctgactggcttgatggttccttggttggagattacggttttgatcccttcggtttaggcaaaccggccgagtatcttcaattcgatatcgattcactagaccagaatctggctaagaacttggccggagacgtgatcggaacccgtacggaagctgccgacgccaaatcgacgccgtttcagccgtacagtgaggtgttcggaatccagagattcaaggaatgcgaactca

SEQ ID NO: 162962 - DNA, 416 bp, Arabidopsis thaliana columbia
gccatacaatgcaactctctctgtgcatcagcttgtttaaaacgctgacgagtgtatggttttggacgaatgaggctctctacgggatgtgtttccgtaccctcaagctcgctaatcctacctttggtgatcttaaccatctcatctctgctacaatgagtggtgtcacttgctgtcttcgtttccctggccagcttaactctgaccttaggaaactcgctgcgaaccttatcccattcccaaggcttcacttcttcatgggtggtttcgcaccattgacatcgagaggatcacagcaatacagtggctggagtgttcctgaactgacccagcagatgtgggatgcaaagaacatggatgtggctgctgaccctcgtcatggactttacttgacttgcattcgttgtgttccgtgg

SEQ ID NO: 162963 - DNA, 105 bp, Arabidopsis thaliana columbia
ctcaaacaagcaatgaggctcaacatagtggttgtgtttcacatctctactcaaatcggtcgtgtggattactatgggggcgaggacgcctcttaaatttgggat

SEQ ID NO: 162964 - DNA, 397 bp, Arabidopsis thaliana columbia
agacaagcgttgagattaatgtgttacagggtgagagagagttcgtaagagataacaagtctattggtagcttccgtcttgatggtactccacgtggtgcaggtggaatatggaactattaagtaataagtgtactgaaaataagaaatcaataaatcttaaaacgagacgtctaccacaacaaccaaacgaaaaaaaatgattcgattaacctgaatttttgttttgactcaagagttctatatcccttgcccaatccactccgattggaattgactaagcgggtattttttccacattcataggagttcgtctatgtttctgctttacgaatatgatatttttctgggcatttttactaatattaagtgctattcctgttttggcatttctaaat

SEQ ID NO: 162965 - DNA, 473 bp, Arabidopsis thaliana columbia
cccggttcgagcccacgcgtccggtgttgtgacgcatactcgtcgcagtcttgatttatggccgccgcagtttccaccgtcggtgcgcatcaacagagctccggggtgcgttgaacgggtcaggatcaggagctgtatcagccccagcttcaaccttcttgggaaagaaagttgtaactgtgtcgagattcgcacagagcaacaagaagagcaacggatcattcaaggtgttggctgtgaaagaagacaaacaaaccgatggagacagatggagaggtcttgcctacgacacttctgatgatcaacaagacatcaccagaggcaagggtatggttgactctgtcttccaagctcctatgggaaccggaactcaccacgctgtccttagctcatacgaatacgttagccaaggccttaggcagtacaacttggacaacatgatggatgggttttacattgctcctgctttcatg

SEQ ID NO: 162966 - DNA, 426 bp, Arabidopsis thaliana columbia
attaaccaagctcattaaacaataaacacacacacccaaaaaaaaaaatcacgcatcaagaagggaacaataagcacccaattcactcacaacctagctagctagtaaacagtattttctatataccaaaaatggcttcaagttccatagctcttttcttggctctcaatcttctctttttcacaacaatctccgcctgtggtagctgtactccgtgcggcggaggttgcccctctcccaagccaaagccaactcctaaaccaaccccaagccctagctctggctcgagcaagtgccctaaagacaccctcaagctcggtgtctgcgctaatgtgctcaacggcctcctggacttgacccttggcaagccaccggtcgagccatgctgcagcctcatccaaggactcgctgatgttgaggcagccg

SEQ ID NO: 162967 - DNA, 423 bp, Arabidopsis thaliana columbia
gagttccgtaatcattttctcttgttgttcctgttcttgtagctcaagcgaaaaaaatggcgtcggtggatgaagcaccaccaggaaacgccaaggccggtgagaagatcttcaggaccaagtgtgctcagtgtcacaccgtcgaagcaggcgccggtcacaaacaaggacccaatctaaacggtctatttggaagacaatctggtacaactgctggttactcttactctgctgctaacaagaacaaagctgtggaatgggaagagaaggccttgtacgattacttgctcaaccccaagaagtacataccaggtaccaagatggtgttccctgggctaaagaagccgcaagaccgtgctgatctcatcgcctacttgaaggaatctactgcgcctaagtgaatctgatggtggattgattctg

SEQ ID NO: 162968 - DNA, 405 bp, Arabidopsis thaliana columbia
gcggccgaagaaaaaccctagaagccgtaaagtcttacactggtagaggatcggatcacctaactaattgctggttgataatcattatgtggagggatatgattaattttgaggccacggagctgagattagggctaccgggtgggaatcacggaggagaaatggctggaaaaaataatggtaaaagaggattttctgagactgttgatctcaaactgaatctttcatcgacggctatggattcagttttcaaagtcgatttagagaatatgaaggagaaggtcgtaaaaccaccatccaatgcacaagttgggggatgggcaccgtaactatcttttcgtaagatacgtatgtccttctctataccgatcatcggagatgctcacctattgaaacgataatact

SEQ ID NO: 162969 - DNA, 444 bp, Arabidopsis thaliana columbia
ctgattcatcagttttaagtcttcttcatttctcatggatcatcaatccaatggctcatgtcttatcagcttctccagcggggcagatgagagtgcctaaacactcatcagtcattgcatcatcatccaagttatggagctctgttgtgttgaaacagaagaagcagagcaacaacaaagtcagaggctttagagttcttgctctccaatctgataacagtactgtcaatagagttgagactcttctcaatttagacaccaaaccttactctgacaggatcattgctgaatacatttggatcggaggatctggaattgaccttataagcaagtcaaggactatcgaaaagccggtggaggatccttctgagctacctaagtggaactatgatgtgtcgagtaccggtcaagcacctggtgaagatagtgatagggttctatacc

SEQ ID NO: 162970 - DNA, 418 bp, Arabidopsis thaliana columbia
aagaaaaaccctagaagccgaagaatcttttattcgttgtcgatcggatcacctaactggtggctcgttgataatcggggtggggagaaatatgattaattttgaggccacggagctgagattagggctaccgggtgggaatcacggaggagaaatggctggaaaaaataatggtaaaagaggattttctgagactgttgatctcaaactgaatctttcatcgacggctatggattcagtttccaaagtcgatttagagaatatgaaggagaaggtcgtaaaaccaccagccaaggcacaagttgtgggatggccaccggtactatctttccgcaagaacgtcatgtccggccaaaaaccgaccaccggagatgccaccgaaggaaacgataagacttctggcagcagtggagccacc

SEQ ID NO: 162971 - DNA, 418 bp, Arabidopsis thaliana columbia
gttgactggttcctttgtgtttgtgtgcgctcatggtagccgagacaagagatgtggtgtttgtggaccagttcttatggagaagttcgagcaggagataagttcacgtggactttcagacaaaatctttgttttgccgtgttctcatatcggtgggcacaagtatgctggaaatttgattgtcttcagccctgattcagctggaaatgtttctggccattggtatggctatgtgactcctgatgacgtgcctgcaatgcttgatcagcatattgcaaaaggagaaatcattcaaaacctttccagaggccagatgagactaagacccgagggtgaggaagctgagaaagaggatgagcataaaatcccaaacggaaacagtgtaatggtggaagaacgcgaacctgtggagcagaaa

SEQ ID NO: 162972 - DNA, 454 bp, Arabidopsis thaliana columbia
  unsure (1)..(454): unsure at all n locations
cggaaggttttattaacttcatggtatcgggaatttttttttccatcaggttaaaaaacattctggggggagacctttttgcgcggggcgggncaagtctaaagtctcataggaaaggagagtcatctacaaagttcttaaaaggacagatggctatagtggcaatcatatttttgagagagttgcggttgctactgtctcagaaatcgacgttcctaggtttttttaccacccttacaagtggtggtgtgctagggttttacttgtacaagatggtggtcaagagagaaaagggaccaaccttagaagatggcggagaagatgaatcaagcgatgggtttgtaagaagtgaatgataaagaaaaatggggtaagaggaagaagtgttgtcgtcaacatcagcatcatatatgccaaactcttttggtatctttttttaagttgtgtacaattt

SEQ ID NO: 162973 - DNA, 477 bp, Arabidopsis thaliana columbia
  unsure (1)..(477): unsure at all n locations
gaataaccgggtcggcgccgcgcgtccgcggacgcgtgggcggacgcgtccgataaaaccctatttatatttgtttctccaatttcaaaaggcgggacgtgaagaagacgagggaggatgaacattttcagattagctggtgatatgactcacctagccagtgttcttgtcttgcttctcaagatccacaccatcaaatcctgcgctggtgtttcattgaagactcaagaactctatgccattgtctttgcgacgcgttatttggatattttcacgagttttgtgtctctgtacaacacctctatgaagttggtgtttttaggaagttctttttcgattgtgtggtacatgaagtatcataaggccgtccacaggacttacgacagagagcaagatacgtttcgtcattggttccttgtgcttccttgctttctcttagctctnttgatacatgaaaagtttacctttcttgaggta

SEQ ID NO: 162974 - DNA, 449 bp, Arabidopsis thaliana columbia
ctactcagcttggttctagcagaagtgctttgatggcgatgtcaagtgggttgtttgtgaagccaacgaagatgaatcatcaaatggttagaaaagagaagattggattgagaatttcttgtcaagcgtcgagtattccagcagacagagttccagatatggaaaagaggaagactttgaatcttcttcttcttggggctctttctctacctactggctacatgcttgtcccttacgctaccttctttgttcctcctggaaccggaggtggaggtggtggtactccagccaaggatgcccttggaaacgatgtagttgcagcggaatggcttaagactcatggtcccggtgaccgaaccttgacccaaggattaaagggagatccgacttacctagttgtagagaacgacaagactctagcgacatacggtatcaacgcagtgtgcact

SEQ ID NO: 162975 - DNA, 427 bp, Arabidopsis thaliana columbia
ctatgataaagcctcaatggtacgttaactgcatcatgattggaaaggaggctcttgatggggctatcactgatgagggcgggaaactcgagtttgtaccaaagcagtacacagcagaatggagaagatggctagagaacatacgtgactggtgtatttcaagacagctttggtggggacacagaataccagcatggtatgccactctagaggaggatcagctcaaggaggttggtgcatacagtgaccattgggttgttgctagaactgaggacgatgctcgagaagaggctgctcagaaattgttggggaagaagtttgaactcactcgagatcctgatgtacttgatacatggttttcttctgggctctttccattatctgttctgggatggccagatgtaaccgatgactttaaagccttcta

SEQ ID NO: 162976 - DNA, 349 bp, Arabidopsis thaliana columbia
gcgtccgagaagaaactacaatagttaatcaatcaaagttaagtaagagaaatggcagattctaactttgggtgtggctcctgctgggggggtggtgactcttgcagttgcgagaagaactacaacaaggagtgcgacaactgtagctgtggatcaaactgcagctgtgggtcaaactgtaactgttgatgaaattattatgggctaaaatcatatatatggcagaaaaattggggaaaatatgtgttttatgctaagagatgtgtgtgtgttgttggaataaagacgtgaacctctattttccatatcaagggggggggggggtggacttttcccaacttttttattt

SEQ ID NO: 162977 - DNA, 348 bp, Arabidopsis thaliana columbia
ggctgagctgatccatggccgatgggcgatggcagcggttcttgggatcttcgtcggccaggcctggagcggtgtggcatggtttgaagctggagcccagccagacgcgatcgctcccttctcgttcgggtcgcttcttggaacccaattgcttctcatgggttgggtggagagcaaacgatgggtcgatttcttcaacccggattctcaatcggttgagtgggcaacgccatggtcgaagaccgccgagaatttcgcgaactataccggcgatcagggataccccggtgggagattcttcgatccgttgggtctcgccgggaaaaaccgtgacggtgtttatgagcc

SEQ ID NO: 162978 - DNA, 396 bp, Arabidopsis thaliana columbia
acgctctaaagaagaaaatgagattgaaaaccttgttaagggttctaaacagctgaaggataaagctttggagctgcaaaccaacatagagaacgctggtggtgaaaaattaaaaggacaaaaggcaaaggttgagaagattcagactgatatcgacaaaaacaatacagagatcaatcggtgtaatgttcaaatagaaacaaaccagaaactgataaagaagttgacaaaggggattgaagaggctactcgagaaaaagagaggctagagggtgagaaggaaaatttgcatgtgactttcaaagatataacgcagaaagcattcgagatccaagagacgtataagaaaacacagcagttgattgatgagcacaaagacgtgttgactggagcaaa

SEQ ID NO: 162979 - DNA, 441 bp, Arabidopsis thaliana columbia
  unsure (1)..(441): unsure at all n locations
agcagcagttatggccgacgtagcaacaaagtattttatggaagatgaggtgaagaagacggtggcgtctagtttggtggggaagctaganacanacgtggagatcaaggcttcggctgataagtttcaccacatgttcgctgggaaaccacaccatgtctccaaagcaagttcaggcaacattcagggatgtgatctgcacgaaggcgactggggcacagtcggctctatcgtcttctggaattacgtacatgatggggaggcaaaggtggcgaaagagaggatcgaggcggtggatccagataagaacttgatcacgtttagggttatagaatgttatctgatgaaagagtacaagagctttttgttcaccatttaggttaccttttatccttgatgcccttgaagtattttcactttcactctttgtattaaaaatta

SEQ ID NO: 162980 - DNA, 450 bp, Arabidopsis thaliana columbia
tttttcttgaataaaatcagaattacaaacaaatatggttttgcaaaagcttcctctcattgggctgcttttgctcctgaccatcgtcgcctctccagcaaatgcagatggacctgtttgcccgccgtcgaacaaactaagccgggcaagtttccctgaaggttttttatttggcacggctactgcggcataccaggtcgaaggtgcgattaatgaaacttgtcgtggaccagccttatgggacatctactgtagaagatatccagagaggtgcaataacgataacggcgatgtggccgttgatttcttccatcgttataaggaagatatccaactaatgaagaatctaaacacagacgcctttagaatgtctatcgcatggccaagaatatttcctcatgggagaaaggagaaaggagtgagtcaagctggtgtgccattctaccacga

SEQ ID NO: 162981 - DNA, 452 bp, Arabidopsis thaliana columbia
ctctcttcaatcctttcctttcattgtagttaaacaaagattacgattatggccacatcagctatccaacaatcctccttcgccggccaaacggctctcaagccctccagcgacctcatccaaaaggtgggcgtcttgggcggtggccgtgtgaccatgcgtcgtaccgtcaagtctactccccaaagcatctggtatggaccagaccgtcccaagtacttgggaccattctcggagaacacaccgtcttacttaactggagaataccccggagactacggctgggacaccgctggactctcggctgacccggagacattcgctaagaaccgtgagcttgaagtaatccacagcagatgggctatgttgggtgctctcggatgcacattccctgaaattctctccaagaacggtgttaaattcggagaagccgtgtggttcaaggcaggctc

SEQ ID NO: 162982 - DNA, 455 bp, Arabidopsis thaliana columbia
gcggagaaattaacatggcgtcttttgcaaccatcgccgtcgtacaaccttctgccgccgtgaaaggacttggaggtagctctcttgccggagctaagctcttcatcaaaccttctcgccaaagcttcaaaaccaaatccaccagagctggtgctgtggtggctaagtatggagacaaaagtgtatactttgatttagaagatttgggtaacacaacaggacaatgggatgtgtatggatctgatgctccttctccttataacccacttcagagcaagttctttgagacatttgctgctcctttcacaaagagaggtttgcttctcaaatttttgattcttggaggaggctctttgcttacatatgttagtgcgaactctaccggcgatgttcttccgattaagagaggtcctcaagagccacctaagctcggtcctcgcggcaagctttaaatt

SEQ ID NO: 162983 - DNA, 427 bp, Arabidopsis thaliana columbia
cctcaccacaagaagaggaggcagccatcaagaaaaaatatggtggaatactgcccaagaggacgccacatataactaaggatcatgatcgggcttactttgattctgctgattgggctctaggcaagcaaggtggaagccacaaacctaaagggcctcttgaagcacttcgaccaaaacttcagcctactcaacaacatgcacgtgctcggcggactccctatgcatctgctgacaatgatgagtgtatgaatttgcctcctgaggatttgatccagaatggtgatcccatcgaagacaagaacaaggaagaacagtaacgagtagctgcaccctgtctatttggagcgttggcaatcctgggcttgagccaaactgttgccttggtaaataactagagccaatgcctacacttgtggggttgagc

SEQ ID NO: 162984 - DNA, 359 bp, Arabidopsis thaliana columbia
aacattttacacaacatcattcaccaaaatgggaaattgcttgggaaccaagaaaacagcgacaatcatgaacatcaatggcgagagtttcaaactgaaaacgcctgtggaagctggtacagtggttaaagattttccaggccacgttctcttggaatccgaagcagtgaagcgtttaggaatcagagcaaagcccttggagcctcaccaaaacttggaatccaaaaggatttacttcatggttgaacttccaagaacatggaaagagagaactccaagaagggttcggtcgggaatccagatgagtgcgaaagagagattagagaatctgaagctgtctcgtagatcatcatctgatc

SEQ ID NO: 162985 - DNA, 203 bp, Arabidopsis thaliana columbia
  unsure (1)..(203): unsure at all n locations
accgnccgaaataccggtcgaccacgcgtccgcctcgccgtcgaaatcaacatggcgccgtagtaggataaggttccgccaccgtcatcgaaggcggcgaaatccggaggtggaaagcataataagaagaagtggagcaagggaaagcaaaaggagaaggtgaacaacatggtgctgtttgatcaagctacttattacaagct

SEQ ID NO: 162986 - DNA, 404 bp, Arabidopsis thaliana columbia
ggaagaatcgcagaggacaaaccttgatttggattttgtgaaggagaaaataaaggagaaccaggagaagattaagcttaacaaacagcttccttacttagttggcaatatcgttgagattcttgagatgagtccagaggatgatgcaaaggaagatggagcgaatatcgatctggactctcagaggaagggaaagtgtgtcgttctaaaaacatcaactcgtcagaccatcttcctccctgttgttggacttggtgatccagatacattgaagcctggggacttagttggagttaacaaagatagttacttgattctggatactttaccttctgagtatgattcaagagtaaaagcaatggaggtcgacgaaaaacctactgaagactacaatgatatagggg

SEQ ID NO: 162987 - DNA, 436 bp, Arabidopsis thaliana columbia
gctgtttgtataggagcagaggtgggatcaattggtgttggtgggcgatatgataaccttataggaatgtttggaacaaagcaagtccctgcggttgggatgagcctgggaatcgagagagtgtttaacataatggaagaacttaacgagaaacagaaacaagtgattcgaccaacggagacacaggtgttggttagtataatggtggataataaactagcggaagcagcagaactggtaagtcagttatggggtgctaagatcaacgcagagtatctagtgagcaagaggaaagaaaagcatttcaatcgtgcaaaggaatcagggattccttggatggtgatggtaggcgaaaaagaactcagtggaagttttgtgacattgaagaagctcgagaaggaagtgaagagaaagagatcaacatgtatagagatcg

SEQ ID NO: 162988 - DNA, 456 bp, Arabidopsis thaliana columbia
gcgagaaaacaagtagaaactttaaaacgagagagagagaaagaaatggcgacatcgggaacgtacgtgacggaggttccgttgaaaggatcggcggagaaacactacaagagctggaagagcgagaaccatgtcttcgctgacgccattggccaccacatccaaaatgtcgttgttcacgaaggcgaacatgactctcacgggtctatcaggagttgggactacacatatgatggaaagaaggagatgttcaaagagaagagagagatagatgatgagaataaaacattgacgaaaagaggactggatggtcacgtgatggagcatctcaaagtatttgatatcatctacgaatttattcccaaatctgaggatagctgcgtctgcaaaatcactatgatatgggagaagcgcaacgatgactttcccgaaccaagcggctacatgaaattcgtc

SEQ ID NO: 162989 - DNA, 464 bp, Arabidopsis thaliana columbia
cttacgctttctctcactctcgtcaatggcgattaccgcatcttcatctctcccccgtaattgctccttcacaactccgcgaccttcatcattcatccgaggaccgccattagctagaacgctgcctctctatctccgccgtaaccgtcgagtagctctcacttaccgattggaccagaattcgaagcagagaagtggtggaaacgtaagatgcgaggcgacggaggtatcttcttcttcttctgtatccacacctggaaggaattgggtgccggtggtgccgttatcggcgctttcgaaaggtgaacggcgagtggctattcaagactatgagagttcgatatgcagatgcgacagacaacaacttcttcaacaaaagggttgtgtcggttggatcactggtctcagtggttcagggaaaagcactgttgcttgtgcactaagtaaagcattgtttgaaagag

SEQ ID NO: 162990 - DNA, 462 bp, Arabidopsis thaliana columbia
atcagatctagatctaaaagaagagcgtcttcataaacgcccttcttcttcttcgtcttcttccctgcaaatctagtttctagatcttttctttcttccgcgaaacgaaaatgagagagtgcatttcgatccacattggtcaggccggtatccaggtcggaaatgcttgctgggagctttactgtcttgaacatggcattcagcctgatggccagatgccgagtgacaagactgttggcggaggtgacgatgctttcaacaccttcttcagtgagaccggtgcagggaagcacgtcccacgtgctgtctttgttgatcttgagccaactgtgatcgatgaggtcaggactggtacttaccgtcagcttttccaccctgagcaactcatcagcggtaaagaagacgcagctaacaatttcgcccgtgggcattacaccattgggaaagaggatgttgatctgt

SEQ ID NO: 162991 - DNA, 339 bp, Arabidopsis thaliana columbia
cgcgtccgaaaaaaaagagagaagacgcacaccgaataaaacacacaagactccattattctcctgcttctgtcgtctcttcaattatttgctctgagactagctttgattcaaccatggctaatgcagcatcaggaatggcagtccatgatgactgcaagctgaaatttatggaattgaagacgaaaaggacacaccgtttcatcatttacaagattgaggagctgcagaaacaagtgattgttgagaaaatcggtgaaccgggtcaaacccatgaggaccttgctgcaagtcttccaactgatgaatgccggtaggccggggacgattttaaaattt

SEQ ID NO: 162992 - DNA, 208 bp, Arabidopsis thaliana columbia
aaaaaaaaaagatcaatctagatagaccattttttatcggaagagatggcttctacctccgccgtctcatttgtcacaccacttggccatacccgttcgtctcctttccttaagccattacctatgaaaccatccaaggctttggttgcaactggaggcaaaacacagttgttttaagatacggcccttattatgacacatgtttttg

SEQ ID NO: 162993 - DNA, 395 bp, Arabidopsis thaliana columbia
ggaattttctctgaaacgtcacgaacgtgtgaattgtgttaaaaaattcatctcattgatccaaacgtgaaaccctaatttcgaatctctttgctgatttggtgagatctcaatttcggaaagaagatgacgaaggatttcgcagttccacctgtagttttcccctccggtggatcttcaggcggtgctaatgtccagcaacgaagattcccagcgacaccgtttcaaccgccgcgtccctcttcttccgcaatccctttcatgtcattcgacattggatccgcagccgcgtcttccgctacacctgccggaccattcggcgggacaatcgcttcctcttcttcttttggtggaggttcagcttcgtttgaagatgaggagccattactcgacga

SEQ ID NO: 162994 - DNA, 311 bp, Arabidopsis thaliana columbia
cgattcccgtcgacccacctccgctaataattctcaaaagctcacacacagaaacataggaatctataaggaagttttggttgtgggtataacatggtggaagcaaaagatcaagatatggtgatggatgcaatgataaccatccatttactaaaacccaggtgggatctggctttttgtctcaagaaaagctgtaaagcttgcaacttcatcttttccacttcctaaacacctcacttctttcaatcattttctttttttccttaaatctgacctgttgtttgcctaccacttttttttttctcatatgg

SEQ ID NO: 162995 - DNA, 413 bp, Arabidopsis thaliana columbia
caaaaatggagtataggtttcatatctcttgcttttctcttcatcacttcctcttcagctgagttcatcattcaacaggtcacaaagggcagaggaatagagtacaacagttcttacagtctcgaggagaatcttggagtgacaagagagttgagagaagagcgaccatcgagtaagatagggacaataacaagcttctcagtgattaaaggcagaggagaaccctatgaatcctctgtttttggggctgctggttacaaatggagattgggtttgtacgtgaatggtaataaaaacgacggggggaatgatcatatttccctttacgcaaggatcgaagagacaaactctcttccattaagttgggaagggaatgttgatctcaaactctttgtccataatgggaagctaca

SEQ ID NO: 162996 - DNA, 433 bp, Arabidopsis thaliana columbia
attcgttgtgtagcgagtagaaaaaccctagcttgcttgaaggagacatcatcgaggctattgaggatcagagggattcagacttttacccttcctgatcttccttacgattatggcacattggaaccgaacattagtggacagaacatgctgaagaatgaccaccatcatgtcaaatcgtgacattctcaagccaataagggattaaaggcagtggagcaccctatgaatactgtggatgtgaggctgctggttacaaatggagattggttttgtacgtgaatggtaataaaaacgacggtggaaatgatcatatttccctttacgcaaggatcgaagagacaaactctcttccattaggttgggaagtgaatgttgatctcaaactctttggtgcataatgggatgctacacaaatatttgactgttacag

SEQ ID NO: 162997 - DNA, 437 bp, Arabidopsis thaliana columbia
  unsure (1)..(437): unsure at all n locations
agactcattgtgaaggtgttactgactccttctaaaaacaatggcgcgacgggtcgctcaaattcttaccgggctttgtaattattaacggggcaaacaaacttcggctctatgtgccggcattactttctcttccttaacgaccgacctttcttcgagtgaccggaagcagaggcacttccaaacttttcaacccggaacttcgtgtcggcggcattggggggggaccaacaggccgggcaactgcagagactctagcacaaggagggnatcgagacgattctcatcgagcgtaagatggacaatngcaagccctgcggtggcgcgattcctctctgtatggtcggagaattcaacttnngccgtggatattattgatcggagagtgacgaagatgaagatgatttcgccgtcgaacaaatgctgtgatattggtc

SEQ ID NO: 162998 - DNA, 461 bp, Arabidopsis thaliana columbia
gagaagaatagtttgatcatcttgtgagaaaaataatggctgcttcagtgatgctatcttcggtgacattgaaaccagctggtttcacggtggagaagacggcggctagaggattaccgtcgctcacaagagctcgtccctccttcaaaattgtcgccagtggcgtcaagaagatcaagaccgacaagcccttcggaattaacggcagcatggacttgagggacggcgtcgacgcctccggcagaaagggcaagggatacggtgtttacaagtacgtcgacaagtatggagctaacgtcgatggatacagtcctatttacaacgagaacgagtggtcagcgagtggtgacgtgtacaagggaggagtcaccggattggcaatttgggcggtaactctcgccggaattcttgccggaggtgctcttcttgtgtacaacacaagtgctttggcttagtaaatt

SEQ ID NO: 162999 - DNA, 455 bp, Arabidopsis thaliana columbia
cgatatgctagtggtttaacaatgatgtctacatatggaactttgcctcgtccgcaagttccccagtcctatgtgccaatcctggtttcaccctctcaaggctttttacctcctcaaggctgggccccttacatggctgcatctaactccatgtacaatgtgaagaatcaaccttattactccggtagtagtgcatccatggccatggctgtggcattgaaccgtggtttgtcagaaagttctgaccaaccagaatgtcggttttttatgaacaccgggacatgtaaatacggagacgattgcaaatacagccatcccggagtaaggatttcacaaccaccaccaagtcttataaacccttttgttcttccagcgagacctggacaaccagcttgtggtaacttcaggtcttatggattctgcaagtttggaccaaactgcaaattcgaccaccc

SEQ ID NO: 163000 - DNA, 292 bp, Arabidopsis thaliana columbia
gcgacgactagtttagtgaccggactaaaagttgtattaccggttatgttctgtctgatgcgagcgactcttgtctacaccatgatcaccgatggccttcctttacctgatcgtcaagatgtcttcacaccgtaaaacccatttctctatttctctctttcttcattttcacacagagacagagacacacagatatgtgtttattcatgttagtttcgttacgctttttttcagatggttcgttacgacaattttggatttctacattaatcttgtacctatagcggtttgt

SEQ ID NO: 163001 - DNA, 464 bp, Arabidopsis thaliana columbia
aagcaggccaattaaaatggaaggcttaacattgatagtagtgatgatgtcaagctttatgttgggagggcaaggtcagcagataagcacgccatgcacctcctccatgatctctaccttcactccatgtctcaacttcatcaccggaagcagcggcggttccgtcactcccaccgccggctgctgcgactccttgaagacgttgaccaacactggcatgggctgtgcttgcctcatcctcactgctaacgtcccgctgcctactggcttcatcaatcggactctggcgcttgctctacctcgagcctgcaaaatgggcggtgtacctattcaatgtcaagctgcggggactcctctaccagctccaggtcaggttccatttttgattgctccaccacctcaggtgtctgcttttagcccgggagcgtccaaggcggcggggacaacaccaacacaggcacctg

SEQ ID NO: 163002 - DNA, 394 bp, Arabidopsis thaliana columbia
caacaccaacgtagagagcaagacgttgtcactctttggctcgacaaatccactgggagtgggttcaagtctcttcgtccataccggtcgggctactttggtgcttccattaagctccaaccaggcttcactgctggagtggatacatccctctatctctcaaacaaccaagagcattctggagaccacgatgaggtcgatatcgagtttctagggacaacgccagggaagccttattcccttcaaacgaatgtcttcgttaggggaagtggcgaccgaaatgtcattggaagagaaatgaaatttacccttgggtttgaccctactcaagattttcaccattacgcaattttgtggaaccctaaccaaattgtattctttgtagaccatgtac

SEQ ID NO: 163003 - DNA, 485 bp, Arabidopsis thaliana columbia
  unsure (1)..(485): unsure at all n locations
cgggaaggaacggcngggacccacccgtccgaaggaatggcactgagaatgtgggcttcctctacattaaatgctctcaagctctcttcttctgccgccaaatctcatctcttgccagctttctccatctccagatgcttctcctcagtgttggaaggacttaagtatgcaaattcacatgagtgggtgaaacatgaaggctcagttgctacaattggtatcactgaccatgcgcaggaccatttaggagaagttgtgtttgtggagctgcctgaagcaaacagttcagtgagcaaagaaaaaagctttggagctgttgagagtgttaaggccacaagtgagattctatctccaatctctggtgaagtcattgaggttaacacaaagctcaccgagtcacctggtttgatcaactcaagcccttatgaagatggttggatgataaaggtgaaaccgagcagccccgcggagttggaagctctgat

SEQ ID NO: 163004 - DNA, 458 bp, Arabidopsis thaliana columbia
agaaaaggcaatacaaacaattgatgcggacattgctcaacaattgttgttacggagaaagcatagagatggtgctggatcctcctttttcgatccaaacattctatcacagaattccgtcagttttatacccgaatccctccgtccaaaacctggacacctctccctgtctcagcagagagtttatgaggactttgttcaacatccttggcaaaagcagtcgacccaaacttcacacggtttatctgctgcatcaagctcatctggtgatgttgcgcttggtagtggttatggtccagtatcaggaaaagttgcttctgaatttttgtctaatgctggaaacgctcggatggacatggtctcccggccatcagatatttctgtggatggttttgaatcttctccagtctcacttttgagctcacaagtcgatccagctggtgactcatccagtcttc

SEQ ID NO: 163005 - DNA, 300 bp, Arabidopsis thaliana columbia
  unsure (1)..(300): unsure at all n locations
gctttaaagaagaaggaaatatacctgatggtcaattatttagaggaatattctatgcttgtggtatgctaggtgatgttgatgagggactattacactttgagtcaatgtccagagactacggcattgccccttccattgaagactatgtaagcctcgttgagatgtatgcgttacccggatttttagatgaggctttggaatttgtggagagaatgccgatggagccaaatgctgatgttngggaaacattgatgaatctttctcgagttcatggtaatttacatactttagactact

SEQ ID NO: 163006 - DNA, 450 bp, Arabidopsis thaliana columbia
  unsure (1)..(450): unsure at all n locations
gcagctcccaaaaagagtgccaaaaagacggtgactacggaccggcctctttggtacccaggcgccatttctcctgactggcttgatggttccttggttggagattacggttttgatcccttcggtttaagcaaaccggccgagtatcttcaattcgatatcgattcactagaccagaatctggctaagaacttggccggagacgtgatcggaacccgtacggaagctgccgacgccaaatcgacgccgtttcagccgtacagtgaggtgttcggaatccagagattcagggaatgcgaactcatccacggacggtgggcgatgctcgctactctcggcgctctctccgtcgaatggcttaccggcgttacatggcaagacgctggcaaggtggagcttgtagatggatcgtnctactttgggcagccattacctttctcgatctcgaca

SEQ ID NO: 163007 - DNA, 298 bp, Arabidopsis thaliana columbia
acgctttcaacggacttatgtgctcttcttctatatcagacacccgcaaggctaacaacgacatgggttccatcacaagcaacggcggaagagttaactgcatgcaggtgtggcctacgattggaaagaagaagtttgagactctctcttaccttcctgaccttaccgattccgaattggctaaagaagttgactaccttattcgcaacaagtggataccttgtgttgaattcgagttgcagcacggatttgtgtaccgtgagcacagaaactaaccctgatactatgatgagacgga

SEQ ID NO: 163008 - DNA, 455 bp, Arabidopsis thaliana columbia
ggagaataaaactgaggaagaggtatcaatcatcaaagtttcttcccttacttgcatcgatcgggacaactctgatcttcatcaatcagctgttttactcaagcaggcatgtctcgatagtggatttttctatgtcataaatcatggtataagtgaggaactcaaggatgaggctttcgagcacagcaagaagttcttcgctcttcctttggaagagaagatgaaagtcttgagaaacgaaaagtatcgaggctatgcaccattccatgattctctcttagaccctgaaaaccaagtccgaggggactacagagagggttttaccattgggttcgaaggtagcaaagatggtccccattgggataaaccattccatagccccaatatttggcctaaccctgacgttttgcccggatggcgggagaccatggagaaatattatcaagaagcattga

SEQ ID NO: 163009 - DNA, 459 bp, Arabidopsis thaliana columbia
aaaaaaaataaaatgtattccaaatttattcaaatgaggttttcggtaacgtatcaataagctagacccatacttcgagttgttgcatgccataaataaactcgaacgctcaaaaaatccgttggacaggcggattcacatctcttacaaccaacacagtcctcggttcttggagcagaagctatttgcttagctttacatccatcccaaggtatcatttctaatacgtctgtagggcatgctcggacacattgagtacatcctatacaagtatcataaatttttactgaatgtgacataggatcgatagttttttgaatgtcataaattttcaatctagtaaacttctaactgaatggtatattaaaatactagatgaagcaatgatttcctttaatagaatttttgtaatgaattttggctcaattcataaaaaatggggctaaaatactttgattt

SEQ ID NO: 163010 - DNA, 425 bp, Arabidopsis thaliana columbia
ctcaaaccatgctgcttacttcaggcgtcaccgtcggccattttttgaggaacaagagccctttggctcagcccaaagttcaccatctcttcctctctggaaactctccggttgcactaccatctaggagacaatcattcgttcctctcgctctcttcaaacccaaaaccaaagctgctcctaaaaaggttgagaagccgaagagcaaggttgaggatggcatctttggaacgtctggtgggattggtttcacaaaggcgaatgagctattcgttggtcgtgttgctatgatcggtttcgctgcatcgttgcttggtgaggcgttgacgggaaaagggatattagctcagctgaatctggaaaccagggataccgatttacgaagcagagccattgcttctcttcttcatcttgttcactctggt

SEQ ID NO: 163011 - DNA, 468 bp, Arabidopsis thaliana columbia
ggtctatccgctgaccccgagacattcgcatggaaccgtgagctagaagttatccacagcaggtgggccatgctcggagccctaggctgcgtcttccctgagcttttggccaggaacggagtcaagtttggagaggcagtttggttcaaggctggttcacagatcttcagcgatggagggctcgattacttgggaaaccctagcttggttcacgctcagagcattttggccatttgggccacacaagttattttgatgggagccgttgaaggttacagagtcgcaggaaatgggccattgggagaggccggaggacttgctttaccccggtggcagtttcgacccattgggtttggctaccgacccagaggccttcgctgagttgaaggtaaaggagctcaagaacggaagattggctatgttctctatgtttggattcttcgttcaagccatcgtcactggtaaggg

SEQ ID NO: 163012 - DNA, 474 bp, Arabidopsis thaliana columbia
gaaaaaaaaaacaatggcaactcaagccgccgttatcttcaactccgccataacaaccgccggaacctccggcgtcaagaaactccactttttctcaacaacccaccgtcccaaatccctctccttcaccaaaaccgcaatccgcgccgagaaaacagattcctccgccgccgctgctgcagcccccgccacgaaagaagctcccgtgggattcacgccaccgcagctagacccaaacacaccgtctccgatcttcgctggaagcaccggtggtcttctacgtaaagcgcaagtggaagagttctacgttatcacgtggaactcaccgaaagaacagatctttgagatgccgacaggaggagcagcgatcatgagagaaggtccgaatcttctgaagctagcgaggaaagagcagtgtttagctttggggacaaggcttagatccaagtacaagatcacttaccagttttacag

SEQ ID NO: 163013 - DNA, 458 bp, Arabidopsis thaliana columbia
ctctcttctttcttcttcttcaatacaatacaatcaaaagaacagagagataaggttagagcaaaacactgtctgaaacaaacaacaaaaaaatggcttgctctaatctaacaacaatgtgggtttcatcaaaaccatctctttctgctgattcatcttccttatcattccgatctgttctcaagtgcccaactaacacttcctcacctccttcacgagcttcctctgtttcaccactccaagcgtctcttcgtgagctcagagaccgtatcgattcagtcaaaaacactcaaaagatcaccgaagctatgaagcttgtcgctgcagctaaagtcaggagagctcaagaagctgttgtcaatggacgaccattctcagaaaccctagttgaagttctttacaacatcaacgaacagcttcaaaccgatgatgtcgatgttcccttaaccaaagtcaga

SEQ ID NO: 163014 - DNA, 456 bp, Arabidopsis thaliana columbia
cacttaccgaagcatcttctccaagaaagccatgactgatatggacagtacaaatgtctacgcttacatctccatcatcgcactcttcgtctgcattcctcctgccatcatcgttgaaggtcctaaactacttaaccatggtttcgccgacgcgattgctaaagttggaatgactaaattcatctctgatctcttctgggttggaatgttttaccatctctacaatcagctggctaccaataccttggagagggttgcaccgctgactcacgcggttggaaacgttctgaaacgtgtgttcgtgatcggtttctccatcgttatcttcggaaacaagatatcgacacagacaggtataggaacaggaatagccattgctggagttgcaatgtactctatcattaaggccaagatcgaagaagagaaacggcaaggaaagaaagcatagaaagcagc

SEQ ID NO: 163015 - DNA, 411 bp, Arabidopsis thaliana columbia
cttcaagattttcttctctctatctctctgtttctctctgtttctgagatgggtttgtttggaacgaagaagatcgggaagtatgagataggaagaacaatcggagaagggaatttcgcaaaagtgaaacttggttacgacacgaccaatggtacttacgtagctgtcaaaatcatagacaaggctttggttattcaaaagggtcttgagtctcaagtcaagagagagatacgaacgatgaagcttcttaaccatcccaacatcgtccaaatacacgaggtgattggaaccaagacaaagatctgtatagttatggaatacgtttcaggtggtcagctttcagacagacttggaagacagaaaatgaaagaatcagatgctagaaaacttttccaacaattgattgatgct

SEQ ID NO: 163016 - DNA, 459 bp, Arabidopsis thaliana columbia
tctctatccatttactccacagagaaagattcagagaaaacagaagaaactatggcaactcaagccgccggaatcttcagccccgccataacaaccactacttccgccgtcaagaaactccacctcttctcatcaagccaccgtcccaagtctctctccttcaccaaaaccgccatccgcgccgagaaaacagagtcctcctctgctgccccagccgtgaaagaagctccagttggattcactcccccgcagctagacccaaacacaccatcaccaatcttcgccggaagcacaggaggtctcctccgtaaagcacaagtagaggaattttacgtgatcacatggaactcaccgaaaggaccaatctttgagatgccaacaggaggagctgcgataatgagagaaggaccgaatctattgaaactggcgaggaaagaacagtgtttggctttaggtacg

SEQ ID NO: 163017 - DNA, 456 bp, Arabidopsis thaliana columbia
aggaaaactaccaatgacatggtatccacatgattacgtggccaaagtgccaatgacggtaatggccatgagagcatccggtaattatccaggaaggacatacagattctacaaaggtccagtagtatttccatttgggttcggtttaagttacactaccttcactcatagtttggccaaaagcccattggcccaactatcagtttcactctccaatctcaactctgccaataccattctcaactcttcatcacactccatcaaagtgtctcacaccaactgcaattcatttccgaaaatgccccttcacgtcgaagtatcaaacacaggtgaattcgatggaacacacacggtgtttgtatttgctgagccgccgataaacggaataaaaggattgggtgtgaacaaacaattgattgcgttcgagaaggttcatgtcatggcaggggcaaaaca

SEQ ID NO: 163018 - DNA, 243 bp, Arabidopsis thaliana columbia
tgaagttgcttatgtgagagattccttggacatatgagaaagaactcggaagaagataattgggacagagttttgttctgtatgtgtggtggagaaataggtttggatgacttttaggtctctcatgtcagattttatggctgaacaatgtgtatctttatctgtttctggtttcagttgcctcaaatgtaaaaggaaaaaaatcatatgtggatgcaacatgttgatcaatctttgtgtaat

SEQ ID NO: 163019 - DNA, 431 bp, Arabidopsis thaliana columbia
caaaaagcttttaacctcagccgttaaatctttctccgatcatgccgaccagaaacatcgccattggtggagtccaagaagaggtctatcaccccaacgcacttagggcggcgctcgctgagtttatctcgactttgatcttcgtcttcgccggctcaggctccggaattgctttcaacaagatcactgacaatggagcaaccactccttccggcctcgtcgccgctgccttagctcatgctttcggtctctttgtcgctgtctctgttggcgctaacatttccggtggccacgttaaccctgccgttaccttcggtgtcttactcggtggtaacatcactctccttcggggtattctctactggattgctcagcttcttggctccgtcgccgcttgttttctccttagctttgccaccgggggcgagcca

SEQ ID NO: 163020 - DNA, 444 bp, Arabidopsis thaliana columbia
cgattccaccgggttttcagtttgataagttgcctgaagattggagatgtcctacttgtggagctgctcagagtttctttgagagtaaaatggttgagattgctggttttgctcagaatcagcaatatggacttggtggtaatgctcttacctctggtcagaagactggtttaatctttggctctcttttactcttctttgcgctttttttgagtggctatttcattcaatgattaaatattttctcactattactatgttaaatcatgttaccaccaattttataatgtttcaatacaccattcttctcaaaaaaaaaaaaaaataaaaaaaaaaaaaaaaaaaaaaaaaaaaaaaaaaaaaaaaaaaaaaaaaaaaaaaagggggcggccgttttaaaggatccaagcttacttacgcgtgcatgccgacgtataacttttt

SEQ ID NO: 163021 - DNA, 396 bp, Arabidopsis thaliana columbia
agaaaggatttgctctagattgttgaatcgaagatgtcgacaagggaagagaatgtttacatggcgaaattagccgaacaagctgaacgttacgaagaaatggttgaattcatggagaaagttgcgaaaactgttgatgttgaggaactttcagttgaagagaggaatcttctctctgttgcttacaagaacgtgattggagcgagaagagcttcgtggagaatcatttcttcgattgagcagaaagaagagagcaaagggaacgaagatcatgttgctattatcaaggattacagaggaaagattgaatccgagcttagcaaaatctgtgatgggattttgaatgttcttgaagctcatcttattccttctgctttaccagctgaatctaaagtg

SEQ ID NO: 163022 - DNA, 435 bp, Arabidopsis thaliana columbia
  unsure (1)..(435): unsure at all n locations
ctctcagaaagtgttctgttctttttttctttgtaatcactaaatgcttcaaaagtttgtccacaattatatttgaaaaaaatgtctgtatctgtagcagcagagcatgattacataggtttgtcagagtttccaaccatggaagcaacaacaatgtctgacaaaaccaaaaccagagacaataacaacggtctcaatttcaaggctaccgagttaagactcggtttacccggttctgagtcgccggagcgagtcgactcaagattcttggctctcaacaagagtagctgtcccgtgtcaggtgccaaaagggtgttctccgacgctattaacgactctaacaaatgggtcttctctcctggatccactactgctactgntgatgtcggctcgggttctggtccccgtacctccgtcgttaaagatggaaagtcg

SEQ ID NO: 163023 - DNA, 429 bp, Arabidopsis thaliana columbia
  unsure (1)..(429): unsure at all n locations
gatctgatcccaaacctttgttttattgntgntgntctctgctgctttatcagagagcattattatgtacgggagagattcatggggagggtcattggagataaacactgcaaatttcgccaccgaccatgatccgagtccgaatttaaacgatttggatcgggccgctttttcacgttcactagatgagacccaacaaaagtggttacttggtccaacggggcaaaagaaggagaagtacgtcgatctcggttgtattatcgttagccgcaagatcttcgtctggactgttggtactcttgttgccgccgcgttactcgccggattcattaccttgatcgntaaaactgtgccgcgtcatcatcctaagactccgncgccggataattatactatagctctacacaaagctcttaagttcttcaatgc

SEQ ID NO: 163024 - DNA, 342 bp, Arabidopsis thaliana columbia
agtaaacgagcaaaagaagaagagaaacaacatgatgtagtaatggcttcctctatgctctcctccgccgctgtggatacatccgcgggctcaagccaccatggtcgctccattcaccggctcgaagtcatccgctgcattcccggtcacccgcaagaccaacaaggacatcacttccatcgcaagcaacgggggaagagttagctgcatgaaggtgtggccaccaattggaaagaagaagttggagactctatctgaccttcctgaccttagtgacgtcgaattggctaaggaagttatctaccatggggcgggcgcgtggactccttgagttgaattcaa

SEQ ID NO: 163025 - DNA, 386 bp, Arabidopsis thaliana columbia
gcgaggaatcgttgaagaaagcagttgctcatcaacccattagcattgccattgaggctggtggtcgtgcgttccagctctatgattcgggtatatttgatggaagttgtggaacacaactagaccacggagttggggcgggtggataccgaactgagaaacggcaaagattactggattgtgagaaactcatggggtaaaagctggggagagagtggatacctaaggatggcgcgtaacattgcgtttttatcaggaaaatgtggaatcgcgattgaaccttcatacccgataaagaatggcgggggggggcggatcctgtacctttaccgtcattttccatcaatgtttctgaagctcatcttattccttccgcttcaccagct

SEQ ID NO: 163026 - DNA, 454 bp, Arabidopsis thaliana columbia
gtgaaagctggatttttcagaaacttcctcttgcctactggaaaggctcagcttatgactccacttctgctcaaggaattgaagatggaagacgaacggattgaggcagagaagcaaagggtgaaagaagaggcacaacaactggcgatggtattccaaaccgttggtgctttcaaggttaaacgcaaaggcggtaaaggcaaactgatatttggatctgtcacagctcaagacctcgtcgacatcatcaaatcacagctccaaaaggacatcgacaaacgccttgtctctctcccagaaatccgtgaaaccggagaatacatagccgaactcaagcttcaccccgatgtcactgctcgagttaagatcaatgttttcgctaactaaaccttcaacgattcaagactcctactgcatcccaaggaacgtatagagagggaaaagagagtagcct

SEQ ID NO: 163027 - DNA, 311 bp, Arabidopsis thaliana columbia
gtactgagtagtaccagatggttaacgcatcactcatgaacattgctgataacccaaccaacgtccagcttccaggaatgtacaacaaggaagagaacgcacgtgtccccatcatttgcactggtaacgatttctccaccctatacgctcctctcatccgtgatggacgtatggagaagttctactgggccccgacccgtgaagaccgtatcggtgtctgcaagggtatcttcagaactgacaagatcaaggacgaagacattgtcacacttgttgatcagttacgtggttaatctatacatttggtcggc

SEQ ID NO: 163028 - DNA, 386 bp, Arabidopsis thaliana columbia
ttcacattctcttctctctcgatatcatctaaatctctctcgatctcaatttcgcaaaatggctgacaagaagatcagaatcggaatcaacggtttcggaagaatcggtcgtttggttgctagagttgttcttcagagggatgatgttgagctcgtcgctgttaacgatcctttcatcaccaccgagtacatgacatacatgtttaagtatgacagtgttcacggtcagtggaagcaccatgagcttaaggtgaaggatgacaaaactcttctcttcggtgagaagccagtcactgttttcggcatcaggaaccctgacgacatcctatggggtgaggctggagctgacttttgttgtaagttctactggtgttttcactgacaaa

SEQ ID NO: 163029 - DNA, 455 bp, Arabidopsis thaliana columbia
gcaatggccacttcagcaatccaacactcttctttcgctggccaaacgaccctaaagccatccaacgatctcctccgcaaaatcggagcctccaatggcggtggccgcatcatcatgcgtcgtaccgtcaagtctactcctcagagcatctggtacggaccagaccgtcccaaatacctaggaccattttccgaaaacacaccatcatacctaaccggagaataccctggagactacggttgggacaccgctggtctctcagccgatccagaaacattcgcaaagaatcgtgagctcgaagtgatccacagtagatgggcaatgttgggagctttaggctgcaccttccctgaaattctctcaaaaaacggagtcaaattcggtgaagccgtgtggttcaaggcaggatctcaaatcttctcagaaggagggcttgactacctcggaaaccctaa

SEQ ID NO: 163030 - DNA, 473 bp, Arabidopsis thaliana columbia
ctagaaaacaatcatcaggaataaagggttttattacttctattggaaagaaaaaaatctttggaaaatggatcaaacagaggaaccaccactcaacacacaccagcagcacccagaagttgaacatcatgagaatggtgcgactaagatgtttaggaaagtaaaggctagagctaagaagttcaagaacagtctcactaaacatggacaaagcaatgagcatgagcaagatcatgatttggttgaagaagatgatgatgatgacgagctagaacctgaagtgatcgatgcaccaggcgtaacaggtaaacctagagaaactaatgttccagcatcggaggaaattattccaccagggacaaaggtgtttcctgtcgtgtcttccgattacaccaaacccactgaatctgtaccagtacaagaggcctcttacggacacgatgcaccggctcattctgtaaggacgacgttta

SEQ ID NO: 163031 - DNA, 306 bp, Arabidopsis thaliana columbia
tcggaattagcaattgagtgtttggttagacgtccttttcagtttcattcttccatcaaatctgtttgccgatcatggaaatgcgttatctccagtcgttcttttatcaaggaacggataggttttggtaaagctgaatctcttctctgccttgttcaacctctgacttcaccaccgtctccggcgatgatggaaggtggtgagatgagtcagaagaagaaagaggaagaagaaggctagtctcagatgacactatcgctgctacaaccgcgtattactggaacgccactttacggcttaagcgtt

SEQ ID NO: 163032 - DNA, 451 bp, Arabidopsis thaliana columbia
aagagatcacacgtgggaatccaacttaccaattgcaatggcgtcaatgaccatgacatcttcatttctccctaccgtctcaaaccttccggcaaacatctccagcaacagcagacgaagcctcacggtggtcaaagcctccgggagtgaaaacacaaccagcttggagaacaagaagcaagaacagagcatgaagatgaggagggatcttgtcttcacagctgcagctgcagctgtgtgctccttagctaaggtggcaatggcagacgatgagccaaagagaggaacagaagctgccaagaagaagtatgctccagtctgtgtcacaatgcctaccgccaagatatgccgtaactgagtttgctatttaaccagcaactgtatctatgtcgtataactattctcagtgtggttggtaggatcatatttgttaaatctataaaccccgtgt

SEQ ID NO: 163033 - DNA, 309 bp, Arabidopsis thaliana columbia
gcacaaaaccctaatctcacaatctcctacgagatctatcagtctccacgaagatgaaggttgttgccgcatacttgctcgctgttttgagcggaaaagcttcaccaaccagtgccgatatcaagactatccttggatcagttggtgctgagacagaggattctcagattgagcttttgttgaaggaagtgaaaggaaaagatttggctgagttgattgctgctggaagggagaagttagcttcagtgccgtctggtggcggaggtggtgttgcggttgcttctgctacatctggaggtggaggaggtg

SEQ ID NO: 163034 - DNA, 399 bp, Arabidopsis thaliana columbia
gggaagtcttgaatatctagtcctctctatgtcaatatcacggttccacagctcaagctaggctcaagattctgagtgtcattacaactgtgtctgtgtctccaattatgggttgaatgcaatgaagaacccaaagggtacttacttagtcatcaaacaacttctgtaaaaaaacaaaaaaagtgagaaaacaaaaacacactttgttttctttgtatagatgcagaaaatgatctgtcttctgcttctggagattttatctccttattagtctctcttttctttcttcttttagcccttttagtttaatatagtaccacttagatttttttttctcggttatttttttccttgttgtacaaacccttttgcatatcgtcaagattccacattttcttc

SEQ ID NO: 163035 - DNA, 472 bp, Arabidopsis thaliana columbia
cggacgcgtgggttcgtctcttcccctgtaatggcgcttccacacgtagtctcttcaccttcttcaacttcattatctccttccttcaaatccaaaccaccgtttcactcccttagatctttatcaccgacggttgataatcgccggcgttgtaaactcaacagttccttccgatgttcatcttcttcattctccgagaagcatcacaacgcgaaatctccaaaatccgatgatatcgtcgagcttcctctgtttccactcccactcgttctcttccccggagcaatccttcctcttcagatcttcgaattccgttaccgtatcatgatgcacacgctcctccaatctgatctacgattcggcgtagtttactccgattccgtctctggctccgccgcagaagtaggatgtgtaggagaagtcgtgaaacacgagcgtctcgtcgatgatcgattctttctagtctgcaaag

SEQ ID NO: 163036 - DNA, 474 bp, Arabidopsis thaliana columbia
  unsure (1)..(474): unsure at all n locations
gccaaaaagaacaatggcagcgagtgcatctcttattgcgagccacctaaggagcagcttcttctccgcttctctttcttagcggcttgccgtcccgaaaggcattttcggggcttcttttgggggttcttcgaccaaaaaaggctttttctttactggcccagctggtaaattccgccaggccacctttcaaggtggtcaacccatcaaccgggatccattcatcgggaggttggaaacctcgggggcaataaacccattggtccgggggtaccttttcaaccctcctggatacccgaccgncggcaaccctcttcttcgcggtggtgaagtgggcctggcccatggtttcttcttagtgggcccattcgtcaaagctggcccattaaggaacactgcttacgccgggtcagccgggtctttagccgcggctgggctggtagtcatcctcagcatgtgcctcaccatctacgg

SEQ ID NO: 163037 - DNA, 411 bp, Arabidopsis thaliana columbia
accgggatttactgggtcgatcgacccgtgcgcaattttttaaaatcttaaaaactttctcttaattttctctaccgcgatcaaaatgcaaatctttggtaagactcttaccgggaagacaattaccctttaggggggaagcgttcgcaccattgacaaccgttagggcaaaaatcacgattaggggggcctttcttccgattaagcaagggttatttttggccggcaggcagttccaggttggccgaccgtggcttgtttccaatttccaaaaggaatcaaccttcaacttggtcttaggcctccggggggtatgcagatttttcgtaaaaccctaacgggaaagacgattactcttgaggtggggagttctgacaccatcgacaacgtcaaggccaagatccaagacaa

SEQ ID NO: 163038 - DNA, 372 bp, Arabidopsis thaliana columbia
caaatacacaaaatcttaaaaactttctttcatttctctctaccgagatcaagatgcaggggggggttattactctggaccggggggacaatcaccctcgaggtggaaagctccgacaccatcgacaacgttaaggccaagatccaggataaggagggcattcctccggatcagcagaggcttacttttgccgacaagcaactacaggatggccgtacgtaggctgattacaatatccagaaggaatccaccctccacttggtcctcaggctcccggggggtatgcaaattttcgataaaacccttacggggaagacgattactcttgaggtggatagcttctacaccatcgacatactcaaggccaagatc

SEQ ID NO: 163039 - DNA, 226 bp, Arabidopsis thaliana columbia
cggacgcgtgggccgcaatggccgcctttacattgctctctcctctcctgctttgaccggggaggccgttaagctatccggggcggcctccgaagtatttggaaccggccgaatcaccatgcgcaaagcctgcaagcccaccggtccatccggcagcccatggtacggatccgaccgagtcaagtacttgggtccattctccggtgagcctccgagctacctcact

SEQ ID NO: 163040 - DNA, 456 bp, Arabidopsis thaliana columbia
gatcaacggacctcactttgcttcaccaattatagctttggtcacactgatcgagaagggcggggccttcgagaccatccggggcgatctcatgaaaggagaacacaagcagcctgcttatctcgctctacagccttttggtactgttcctgctgttgttgacggtgactacaaaatcttcgagtcccgtgcggtgatgaggtacgtagctgagaagtacaggtcacaaggacctgatcttttggggaaaaccgttgaagacagaggtcaagttgaacaatggcttgatgtggaagcgaccacttaccacccaccgctattgaacttaacgcttcacataatgttcgcatcagtcatgggattcccatctgatgagaagctgatcaaggagagtgaagagaagcttgcgggtgttcttgatgtctacgaggcacatctcttaaagagcaagtactt

SEQ ID NO: 163041 - DNA, 458 bp, Arabidopsis thaliana columbia
gaagaacaatggcttcctctatgctctcttccgctactatggttgcctctccggctcaggccactatggtcgctcctttcaacggacttaagtcctccgctgccttcccagccacccgcaaggctaacaacgacattacttccatcacaagcaacggcggaagagttaactgcatgcaggtgtggcctccgattggaaagaagaagtttgagactctctcttaccttcctgaccttaccgattccgaattggctaaggaagttgactaccttatccgcaacaagtggattccttgtgttgaattcgagttggagcacggatttgtgtaccgtgagcacggtaactcacccggatactatgatggacggtactggacaatgtggaagcttcccttgttcggttgcaccgactccgctcaagtgttgaaagaagtggaagagtgcaagaaggagtacccc

SEQ ID NO: 163042 - DNA, 441 bp, Arabidopsis thaliana columbia
cagaggctaaccgcaaagaaatctgcaagtacctcttcaaagaaggagtttgctttgcgaagaaggatttcaatcttgctaagcatccgttgatcgatgtccccaacctacaagtgattaagcttatgcagagtttcaaatccaaggagtatgttagggagacatttgcctggatgcattactattggtttttgaccaatgaagggatcgagttcttgagaacttatcttaatcttccatctgatgttgttcctgctactttgaagaagtcagctaagcctcgtggtcgtccatttggtggcccacctggtgatcgctcaagaggacctcgccatgaaggaggagaccgtcccaggtttggtgaccgtgatgggtaccgtgcaggtcctcgagctggtggtgagttttgaggtgaaaagggtggagcttccgcagattacc

SEQ ID NO: 163043 - DNA, 315 bp, Arabidopsis thaliana columbia
ccgccgattcccgtcgaccacctcggagactatggttgtgaagttgggcttactgctgatgttggtcagggcataaaagagttagagggtttagaacaaaggctaagctgtgtgctttagtggcgtaggatctacagggagttggagattatttcctgcttaacgtccatttacaaaatctgctggcctcatgtcgccgcattgtagccagtgtgtacacaagttgagctgtccgtgaatgtgtctgaaaggaaagccggtcggtggctaccttttttattaacctacttaagtgggccatggaagaagggaatc

SEQ ID NO: 163044 - DNA, 462 bp, Arabidopsis thaliana columbia
ctttgatctcccatcagttcatcttcttcttcttcttctgatcaaccatggctgctgctataagtgctgcagtctctttaccttcctccaagtcatcctctctcctcaccaaaatctcctctgtatcccctcaaaggattttcctcaagaagagcacagtgtgttacagaagagttgtgtcagtgaaggctcaggtgacaacagatactaccgaggcaccaccagttaaagtagtcaaggagtctaagaaacaggaagaagggattgttgtcaacaaattcaaacctaagaacccttacactggtcgctgccttttgaacaccaagatcaccggtgatgacgctcccggtgagacttggcacattgtcttcaccaccgaaggtgaggttccgtatagagaaggacaatcgataggagtgattccagagggaatagacaagaacgggaagccgcacaagctca

SEQ ID NO: 163045 - DNA, 479 bp, Arabidopsis thaliana columbia
gaagctgatcatcagattgaatcaaagacagactttgacttttctttgtgatcgaagatatggcggatgctttcacagatgaacagatccaagagttttacgaagccttctgtctcatagacaaagattccgatgggttcatcacgaaggagaagctaacgaaagtgatgaagtcgatggggaagaatccaaaggcggaacaactgcaacagatgatgagcgatgttgacatctttggcaacggtggcatcacttttgatgatttcttgtatattatggctcaaaacacttctcaggaatcagcatcggatgagttaattgaggtattcagagtgttcgacagagacggagatggtctcatatctcaacttgagttgggagaaggaatgaaagacatggggatgaagataacagcagaagaagcggagcatatggtccgagaagccgaccttgatggcgatggttttctttctttccac

SEQ ID NO: 163046 - DNA, 443 bp, Arabidopsis thaliana columbia
ggctcgtctacaccgtctacgccacagccgttgaccccaagaacggtagggtcggaacaatcgcaccagtcgccataggtttcatcgttggagctaacatcctcgccggtggagctttcagcggagcttccatgaacccagccgttgctttcggaccagccgtcgtaagctggacgtggaccaaccactgggtttactgggctggtcctcttattggtggtggactcgccggaattatctacgactttgtcttcatcgatgaaaatgcccacgagcaattgcctaccaccgattactgaagacgtcaaattcaacgttgttaatctgatgaatttttcgtgatttgcttttttaatttgcatcgtaatgggtttctggccgttggatcatttttagatgaatctttgtctattgattgatcatttatgtgtctttgggtttgg

SEQ ID NO: 163047 - DNA, 387 bp, Arabidopsis thaliana columbia
ctggtggaatcagaatgggtactcctgctctcactttcagaggctttgttgaggaagactttgccaaagtagctgaatacttcgacaaagctgtgacaatagctctcaaagtcaaatctgaagctcaaggaaccaagttgaaggatttcgtgtcagcaatggaatcctcttcaaccatccaatccgagattgcgaaactgcgccatgaagtcgaggaattcgctaagcagttcccaacaattgggtttgagaaagaaaccatgaagtacaagaactaaactgtttcaccccacaagtgttttctgttatgctttgaattcccatggaatgtatagatgatacatgtaaaactctattttcacgctatgcgaaaaataatgatctgtt

SEQ ID NO: 163048 - DNA, 273 bp, Arabidopsis thaliana columbia
cgctgttcttatggatctggagcctggtaccatggattctctcagatctggtccgttcggtcggattttccgtcctgataactgcgtctttggtcaatctggtgccggaaataactgggcgaaaggtcattacaccgaaggtgctgagttgattgattctgttctcgatgttgtgaggaaggaagctgagaacagcgattgtcttcaaggtttccaagtgtgtcattcattgggaggaggaactggatctggaatgggaactctattgatttc

SEQ ID NO: 163049 - DNA, 421 bp, Arabidopsis thaliana columbia
  unsure (1)..(421): unsure at all n locations
agccaaaagaaaaaaccaatttatgaagaaaataattcattacaaaaccgtgggagacatccattttctccatcttttttttccagatttaatgatgaaaacccccacagaagacaaggttgcaatcagactctgtgacactattacatgacagagaagaaacatatccttcaagagtcaaagcagctcagaggaaagcgtccttctcaagtagtttcaccacatctagctgattgtttagcctggccacatcaatgggatttttattgtccatgttttgctgagttactgcagcaccattctctaggaggaggcttacacactctntccttccataaccagcagcatagtgcaatggtgtgttcttgtttttgtcaatcgcatttgcatttgctccagcatccagaagaacctgagcaca

SEQ ID NO: 163050 - DNA, 468 bp, Arabidopsis thaliana columbia
caagcagtgacttcgatggctggcttacgtggagcatctcaggctgtccttgaaggaagtttacagatcaacggctcaaaccgtttgaacatctcaagagtctcggttgggtctcagagaaccggacttgtgatcagggctcagcagaacgtgtcagtaccagaaagtagtcgccggtcagtgattggactcgtggcggctggtttagccggtggttcattcgttaaagctgttttcgccgaagctattccgatcaaagttggtggtcctccacttccttccggtggcctacctggaacagataactcagaccaagcaagagacttttcattggcattgaaagatagattttacatacaaccattgtcaccaacagaagctgcagctagagccaaagattctgctaaagagatcatcaacgttaagtcatttatcgacaaaaaagcttggccctatgttcagaacgat

SEQ ID NO: 163051 - DNA, 385 bp, Arabidopsis thaliana columbia
gcgtaagcagtagacttcgatggctggcttacgtgtagcatctcaggctgtccttgaaggaagtttacagatcaacggctcaaaccgtttgaacatctcaagagtctcggttgggtctcagagaaccggacttgtgatcagggctcagcagaacgtgtcagtaccagaaagtagtcgccggtcagtgattggactcgtggcggctggtttagccggtggttcattcgttaaagctgttttcgccgaagctattccgatcaaagttggtggtcctccacttccttccggtggcctacctggaacagataactcagaccaagcaagagacttttcattggcattgaaagatagattttacatacaaccattgtcaccaacaaaagct

SEQ ID NO: 163052 - DNA, 351 bp, Arabidopsis thaliana columbia
agaatgacgagcgtgagtgggtgtggttcagtgagtctgataactaaccgcagtgcgttcttgggaaacggacttcaacaccgtgccgttttccttaaaccatggtcgtcttcttcgcttcagtctcggtccatggttgtcgaagccaaaaccaaaaccagcagcgaagacagaatcgcccgccactctcgtatccgtaagaaggttaatggtacaacggagaggccaaggctatgtgttttccgatcaaacaagcatctttatgttcaagtgattgatgataccaagatgcacaccttagcttcagcttccactaagcagaaaccaatctctgaagagttcgactacacc

SEQ ID NO: 163053 - DNA, 463 bp, Arabidopsis thaliana columbia
ggacaagaagatcattggatttcacggtttcgtttttttccatgttaattccattggagctgagtgggtttcaaaatcctgcaccactcctgttccttcaacccctttgaagctgaccgcagaaggtggtgagacaggagctgtatgggacgatggttctcacgatgatgttaagaaagtttatgtaggacaaggccaagatggtgttgcagctgtcaagtttgaatacaaaaatggttctcaggttgtttttggagatgaacgtggaacgagaacattgctaggattcgaagagttcgagcttgaatcagacgaatatataacatccgtggaaggatactacgaaaaaaactttggagttgatactgtagtgacaacgctgattttcaagactagcaagaacaaaacagctggaccgtttgggattgtatctggcacaaagtttgaattcaagaaggaaggt

SEQ ID NO: 163054 - DNA, 463 bp, Arabidopsis thaliana columbia
gaactcttgactgtctctctgcggcgaaaaagagagcgaagcttgaaatctccgattaagccatgaatgctcccgaacgatatgagcgattcgtcgtccctgaaggcaccaagaaggtttcttatgatagggatacgaagatcatcaatgctgcttccttcacggttgagagagaagaccatacgattggaaacattgtccgcatgcaacttcatcgcgacgagaatgtcttgtttgctggataccaacttcctcatcctcttaagtacaaaatcatagtgaggattcacacaacaagccagtcttccccaatgcaagcatacaaccaggccatcaatgacttggacaaggagctcgactacttgaagaaccagtttgaggcagaggtggccaagttttcgaatcagttttaaggaacttggagttctccatcagcacatcggggaaaacgttttacattgtc

SEQ ID NO: 163055 - DNA, 422 bp, Arabidopsis thaliana columbia
  unsure (1)..(422): unsure at all n locations
attacaaacagaactcattagatttttgaacgccggaatattcggaaacacgaaggagacatgtcacacactgccgcaattcgccacaagagccgccatgctcgtcagagtcaacactcttcttcaaggatactccgggatccgattcgagatcctcgaagcgattacaagtcttctcaaccacaacatctntccgtcactacctctccgtggaaccattaccgcctccggcgatctcgttcctctctcttacatcgccggacttctcaccggccgtcctaattccaaagccaccggtcccgacggtgaatcgctaaccgcgaaagaagcttttgagaaagccggaatcagtactggattcttcgatttacaacctaaggaaggtttagctctcngtaaatggcacgcggntggatctggaa

SEQ ID NO: 163056 - DNA, 302 bp, Arabidopsis thaliana columbia
tcgagaatgacgcgcacacacacaccctttctaattagagaagacgcagaacaatcaatggctgggggtatctcttcctctccctgtctatgcaaatcatcctccaagagggatttggggatttcttccgttcctaaatcttctcagatttcgattcatcgatgtcagaagaaatcgatctcacgggagattgtttccgttatggctcctcaaaaggatcggtcttctggaactacaggatcggtgaaaactgggatgacaatgacggagaagattctagctagagcttcggagaagtcatt

SEQ ID NO: 163057 - DNA, 151 bp, Arabidopsis thaliana columbia
gatcgtgatttacttttagttcgtcggagagatttgatcagaatgagcggaggaggagacgtgaacatgagtggtggagacagacgcaagggaacggtgaagtggtttgatacacagaaggggtttggttttattacacctagcaaccgtg

SEQ ID NO: 163058 - DNA, 424 bp, Arabidopsis thaliana columbia
gtaaacccccacacagttattggccgtcggattcaatggaaggattagctatcagagcatctcgaccgtcggttttctgttctattccaggtctcggcggcgattcccaccgaaaacctccaagtgacggtttcctcaagctgcctgcgtcgtctattccggcggacagccgaaaattagtagcgaattctacttcctttcatccaatctcagccgttaacgtctctgctcaagcttccctcaccgctgattttcccgccctttcagaaactatactgaaagagggaagaaataacggaaaagagaaagcagagaacatcgtgtggcacgagagttcgatatgcagatgcgacagacaacaacttcttcaacaaaagggttgtgtcgtttggatcactggtctcagtggtttcaggaaaagcac

SEQ ID NO: 163059 - DNA, 385 bp, Arabidopsis thaliana columbia
gtctcgaagagttttatcatctcttctccgttcatcttccggtagatctgccgccaaattagtcaaccgaaaccccaggcttccttctccttcacccgcgcgtcacgccgctccatgtagctacctcctcggccgcgtcgccgagtatgcgacctcttcaccggcaagctctgctgcgccatcctctgctcctgctaaggatgaggggaaaaagacctatgattacggtggcaaaggtgcgatcgggcgtgtttgtcaggtcatcggtgccattgtcgatgtgagattcgaggatcaggaaggattgcctccgatcatgacatctcttgaggttcaggatcatcccacaaggctggggcttgaggtgtctaatcaattgggtcaa

SEQ ID NO: 163060 - DNA, 443 bp, Arabidopsis thaliana columbia
gcgtttggattcgacgtttgccttattcgtttagctcatcttcttcttcttcttcggcacctctgaattaggttcccagaatccgaaattcctatggaggggacctaaccatggggccaaatggtgtgattgcccgagcgcactctgcttttacttatttgcaaatgggcaaaattcaaatctcttttttgcaacacttttgccctctccaggtttaaacactctcaataagcggagtctaagcatcagatgtgctcttgttgggggagaggagatttcggctaataagagaattgagtactctcttcagtacatacatgggattggtcgaactagggctcgtcagattcttgttgatcttcagatggagaacaagattactaaagacatggctgtggaagaactcatcattcttcgtgatgaagtcttcaagtacatgattg

SEQ ID NO: 163061 - DNA, 165 bp, Arabidopsis thaliana columbia
gagagaactttgcttcaatggagactattgccttttctcgcactcatcgttgctctttgctccttcttcttcgcttctcctcgctctttacaggggaataataagtgtagtcttcttcctcatgatcattactggatctcaagtaaacgcattgtcacacctaat

SEQ ID NO: 163062 - DNA, 260 bp, Arabidopsis thaliana columbia
gacccacgcgtgacgatagactgaatggaagcgtcccatcatcacatttcttgctcaggccgtctaaccgcaacctgagtttgacgacccaggaaaccaaacttcaatggcttgcccagctattcctatgggtcctaaggcaattactgtggtagaacgcggtatccctagcattctaaagagagttgggtcgatttttgaaaaggttgagatggactacgatctgtctgttgtgattagagttaccggttgtccaaacg

SEQ ID NO: 163063 - DNA, 453 bp, Arabidopsis thaliana columbia
gctaaagcttggaccacctggtgaagaagatgatgatgaatcgatgataagacacatgaagaaagaaccaaaagacaaatctatcctctctctcgctggcaaatacttctctccttcttccaccaaaaccacatcccataaaagaactgctcctggtccagtggtgggatggcctccggttcgatccttcaggaagaatttagctagtggaagttcttcaaagcttggaaatgactcaaccacctccaatggtgttaccctcaagaaccaaaagtgtgatgctgctgctaagacaacagaaccaaagagacaaggaggcatgtttgtgaagatcaacatgtatggtgttcccattggacgtatagttgatctcagtgctcataatagctatgagcatgtatcttttacagttgacaagctcttcagaggtttcttgcagctcatagagacttt

SEQ ID NO: 163064 - DNA, 243 bp, Arabidopsis thaliana columbia
cagaattacaaacaaaaatggttttgcaaaagcttcctctcattgggctggttttgcttctgaccatcggcgcctcttcagcaaatgcagatggacctgtttgcccgccgtcgaacaaactaagccgggcaagtttccctgaagggtttttatttggcacgggtactgcggcataccaggtcgaaggtgcgattaatgaaacttgtcgtggaccacccttatgggacatctactgttgaagat

SEQ ID NO: 163065 - DNA, 203 bp, Arabidopsis thaliana columbia
caaaagcctatttgggggatcatcaaccttctatcatcaccatggatccttacaagtatcgtccttcaagcgcgtacaacgccccattctacaccacaaacggtggtgctccagtctccaacaacatctctttcctcaccatcggagaaagaggtccggttctttttggaggattatcatttgatcgagaaaggttgcttatt

SEQ ID NO: 163066 - DNA, 343 bp, Arabidopsis thaliana columbia
cgacccacgcagaacgactgccagagttataccatctctcgttcctatgtctgcctctcgcacctgacgccacatataggcaaccgaaaccccaggactcaattcctttgatgcgtgccgaacgacgctcaagggaaatacctacattaccgcgatgacaagcatgcgacctagagttaactaaattctggtgtgccatcctatggtaatgatgaagatgtagactaaatgttatatgactaccgtgaccaatgtgcgatcgggcgtgtaagtcaggtaattgatgccattgacgatgtgagattctgggatcacgaaggattggctccgatcatgacatctt

SEQ ID NO: 163067 - DNA, 322 bp, Arabidopsis thaliana columbia
acgcgtgatcattgctaacgatcaaggaaacataactacgctcttcttacgttgctttcacctgactccgagaggttgatcggtgacgcagataataattaatttgccgtgaaccttgttaacaccgttttcgtcgctaagaggttgatcggtcgacgtttctctgacagctctgtgcagagtgacatgaatttgtggctattcaagatttaatgcctgacctggtgtctagacaatgatatactttttgatacaagggtgtggagatagagttcgtatctgatgatatttcttccatggtttttatttagatgcttgagat

SEQ ID NO: 163068 - DNA, 291 bp, Arabidopsis thaliana columbia
gcgtacgcgctgagattcactcagctgcttcactgcttgccttcttttgctaagaaggtgattgattcgaaagccaactagaaaagagaagagaaatcatttgctttagagaaacttcatgtggaagtgataatatgatgatacaatgaacctttggaaaaaaataaagaagttttaatttttagaatgcaatgttctttcacctgcaacggtatgtgactgcactgagctatcaatctctttttttctgccttacactttttgtaaaaaagcgtcagattgaatttttta

SEQ ID NO: 163069 - DNA, 354 bp, Arabidopsis thaliana columbia
cgctgagattcactcagctgctttctgctcgccctcttttgctaagaaggtgattgattcgaaagccaactagaaaagagaagagaaatcatttgctttagagaaacttcatgtggaagtgataatatgatgatacaatgatcctttggaaaaaaataaagaagttttaatttttagaatgtaatgttctttcacctgcaatgttatgtgactgcactgagctatcaatctctttttataagcattacacatataaacgatgcgtatcataagctttctttcgctgatggtgaaaaggagaatcttgataagagaaaaaagcttctttgtgggggcggccgttttagaggatcc

SEQ ID NO: 163070 - DNA, 419 bp, Arabidopsis thaliana columbia
attcagatcgccgaatttgcagtaaggagacgaaaatatggtgcacgtttgctactaccgcaactatggaaagaccttcaagggaccacgtcgtccttacgagaaggagcgtcttgattctgaattgaagctggttggtgagtatggtctgcgtaacaagcgtgagctctggagagtgcagtactctcttagccgtatccgtaatgctgctagagatcttttgactcttgatgagaagagtccaagaaggatctttgaaggtgaggctttgctccgtaggatgaaccgttacgggcttcttgatgagagccagaacaagctcgattacgtcttggctttgactgttgagaactttcttgagcgtcgtcttcagactattgtgttcaagtctggtatggctaagtctatccatcactctc

SEQ ID NO: 163071 - DNA, 440 bp, Arabidopsis thaliana columbia
gagttctctgacctttacctcttcaaatggacttcacttctcatccctccaatgactctactcatcataaacgtcattggagtcatagtcggagtctctgatgccatcagcaatggatacgactcgcggggaccgcttttcggaagactgttctttgcactttgggtcatcattcatctttacccgttccttaaaggtttgcttgggaaacaagatagaatgccaaccattattgtcgtctggtccatcctcctggcctcgattcttacacttctttgggtccgggttaatccgtttgtggcgaaaggcggtcctattctcgagatctgtggtttagactgcttgtgattcgattgaccggtggatgggttggtgaaaaaggtttaattcccacggatcaaagagaggtaagagagatatggttttacctctaaaagact

SEQ ID NO: 163072 - DNA, 449 bp, Arabidopsis thaliana columbia
  unsure (1)..(449): unsure at all n locations
gccgaatttgcagtaaggagacgaaaatatggtgcacgtttgctactaccgcaactatggaaagaccttcaagggaccacgtcgtccttacgagaaggagcgtcttgattctgaattgaagctggttggtgagtatggtctgcgtaacaagcgtgagctctggagagtgcagtactctcttagccgtatccgtaatgctgctagagatcttttgactcttgatgagaagagtccaagaaggatctttgaaggtgaggctttgctccgtaggatgaaccgttacgggcttcttgatgagagccagaacaagctcgattacgtcttggctttgactgttgagaactttcttgagcgtcgtcttcagactattgtgttcaagtctggtatggctaagtctatccatcactctcgtgtcctcatcaggcagaggcatatcanggttggaaagc

SEQ ID NO: 163073 - DNA, 480 bp, Arabidopsis thaliana columbia
  unsure (1)..(480): unsure at all n locations
ctcaccggagatattcctgttaatggttccttttcacttttcactccaatcagttttgccaacaccaagttgactccccttcctgcatctccaccgcctcctatctctcctacaccgccatcacctgcagggagtaatagaattactggagcgattgcgggaggagttgctgcaggtgctgcacttctatttgctgttccggccattgcactagcttggtggcgaaggaaaaagccgcaggaccacttctttgatgtaccagctgaagaggacccagaagttcatttaggacaactgaagaggttttcattgcgtgaactacaagttgcttcggataattttagcaacaagaacatattgngtagaggtggttttggtaaagtttataaaggacggttagctgatggtactttagtggccgttaaaaggctaaaagaggagcgcacccaaggtggcgaactgcagtttcagacagaggtt

SEQ ID NO: 163074 - DNA, 366 bp, Arabidopsis thaliana columbia
accggaccggaggttcggcccagacctacgcactctacgctctcgtgaaagtggaatatgccacattcgatccgcgttccggagataatctccgatctagagccgatggcgaacgaaccaggacgtgtgctcgctactggagctgcaggacaaatctgatgtgcggtggtacctatgattgcaaggggtattatgctaggcgctgaccaacctgatatcctacacatggtggatattcatccagctgctgaagctttgaacggtgttaagatggagttgatcgatgctgctcaccgtcttgtgaaaggtgctgttgctacaacagaagccgttgaaggatgtactggagccaatgttgctgttatg

SEQ ID NO: 163075 - DNA, 463 bp, Arabidopsis thaliana columbia
aaaaaaaaaaaaaacacaaaaagtttcaatggccgcctccacaatggctctctcctcccctgccttcgccggaaaggctgtgaacctttcccccgcggcatctgaagtcctcggaagcggccgtgtgacaatgaggaagactgttgccaagccaaagggtccatcaggcagcccatggtacggatccgaccgagtcaagtacttgggtccattctctggcgagtcaccgagctaccttaccggagagttccccggagactacggatgggacaccgctggactttcagctgatcccgagacattcgcaaggaaccgtgagctagaagttatccacagcaggtgggctatgctcggagccctaggctgcgtcttccctgagcttttggctaggaacggagtcaagttcggagaggcggtttggttcaaggccggttcacagatctttagcgatggaggactcgat

SEQ ID NO: 163076 - DNA, 439 bp, Arabidopsis thaliana columbia
atcgacttcatcatcatctctctctcttctcttcgttcctctttctttacacgcttgaaaccctagcaatttcaatttcgtttcctctaatagaatcttcatctttttatggcgtaacgttacacgaatttcaacgatttaggttttttttttttttttttgaagaatcaaacacaaagatagaaacaatgtcaacggagactaccacgggaaattcctcgttaattccagcatcatcatcatcgtcatcctccgacgcaatcgatccagctcctccgtttgatgaaccggaccaggcttattgatgcgagccaggacaagctcgattacgtgtagtctttgactgtcgagaactgtcttgagcggcgaggtcagactattgtgctcaagtctggtatggctaagtctatccatcactctcgtgtgctcatcaggcaga

SEQ ID NO: 163077 - DNA, 459 bp, Arabidopsis thaliana columbia
gcgtctggttctctatcaactctttgcagctcaacttcttcttctctacatcccaactccaaactctcacattctctttcagctaaattatcctccaaagcaaatgtttccgtccaatttctgggaaagaaacagtctccgcttctctcctcaactccgagatttctcactgttatcgccatggctccacctaaacccggaggcaaagctaaaaaagttgtgggagttatcaaacttgctttagaggcgggaaaagcaactccggcaccaccggttggtccggcgcttggttctaagggagttaacattatggctttttgcaaggattataatgcaagaactgctgataaagctggttatatcattcctgttgaaatcactgtcttcgatgataagagcttcacgtttattctcaagaccccgcctgcttcggttttgttgcttaaagctgcaggtgtt

SEQ ID NO: 163078 - DNA, 356 bp, Arabidopsis thaliana columbia
ctcgaagaagaagaaggatcagcaagtgcaattacagtttcgagaagtgtcgatcttcccgatgcactttttcaaggtctaccgaacgatccattcgtgcagatacatgttgctcgcaaaatcacatgcagagctatctagacacgggactcagctctcgaatcagagacttcggatctgcgaggacttctcgccgggaaagaaatagaattggacgaacttcagactcacgttgagtatgtcgaggcttttctttccgatgcgtttcataagctatctctcgctgatggtgaaaaggagaatctgataagagaaaacgctactttgcctgatgctgtcaagagacttcaaagaga

SEQ ID NO: 163079 - DNA, 477 bp, Arabidopsis thaliana columbia
tcggtaaaaaagtagaagaaagaaaaatggtgctaaaggtgcacggacctcactttgcttcaccaaagagagctttggtcacactgatcgagaagggcgctgccttctagaccatccccgccgatctcatgaaaggagaacacaagcagcctgcttatctcgctctacagccttttggtactgttcctgctgttgatgacggagactacaaaatcttcgagtcctgtgcggtgatgaggtacgtagctgagaagtacaggtcacaaggacctgatcttttggggaaaaccgacgaagacacgaggtcaagttgaacaatggcttgatgtggaagcgaccacttaccacccaccgctattgaacttaacgcttgacataatgttcgcatcagtcatgggattcccatctgatgagaagctgatcaaggagagtgaagagaagcttgcggctgttcttgatgtctacgaggcacatctc

SEQ ID NO: 163080 - DNA, 470 bp, Arabidopsis thaliana columbia
ctgtggttgagaaattgaatggcaataccgttgaagggcgtgagataaaggttaacattacagagaaacctatagcatcatcacctgatttatcagttcttcagtctgaggattcagcatttgtagatagcccttacaaagtgtatgttgggaatctagcaaagactgttacaaaagagatgcttgagaatttgttttctgagaaagggaaagtagtaagtgctaaggtttcaagagtacctggaacttccaaatccaccgtgtttggattcggtacgttttcttctgaagaagatgtggaagcagccattgttgctcttaacaattcgttgctggaaggacagaagattcgggtgaataaggcttagcctattggatcataaagaatgtgaaaatgatcgctttgaagagtttttgtaatgcaaatcattagagcttagtgtatcatcttgtattcattctaagttgaa

SEQ ID NO: 163081 - DNA, 480 bp, Arabidopsis thaliana columbia
  unsure (1)..(480): unsure at all n locations
ctaggccatcagcacgtctaactcatgaacattcaaattctgataatctcgggggctcgacaaaagctacacaaaaccggagcaatgataatgggagtggtgaggcaggtagtgtcatcaccgagcagaagggggaaagagatacagaaacgaaagatagcatgcatactgaaagtcatccagcccataagtctagatcgggagttgaggcacctggggaggataaaatagagaaagcaggtgcacattttccagaagatgataaatctagaattgttggtacagctgatgtcacggtcagccaatccccaaaagacataaaaatgtttagagataaggtgaaggccaaactagaggcgaagaaggtccaaggtgaaaagacgagaaagaaggatttggtggatgaggatgatttgatagaaagagaactggaggacgtggaattagctgttgaggatgacanagatatacaaaacaaaa

SEQ ID NO: 163082 - DNA, 420 bp, Arabidopsis thaliana columbia
gtgtttcccttcttcggtttctcatcctcacgtccgccggatttcgaggaaacgaagaagaagaagaacaacaacaacaaaagccttttgagatatggacagcttctggcaattaggtgatgagctacgaggtcagacgagagcatcagaggatcacaaatggtctactgttgcaacgaagctagctgagcaaactagaatgaaaggggagaggatgaacaatcttgatctctccaaaggttacactgagtttagaccaagtgagaaattcagtttccaggagaacaatcttaacttcaacatgttgaatttggatggtaaatttggtgaaagcatcatggggaagacttcgatgcagagcaatgtttataatatgaatactgttttccagaagaatgactttaagagtggaggcaacat

SEQ ID NO: 163083 - DNA, 437 bp, Arabidopsis thaliana columbia
ccttgatgataccgtcaccgatgagaagttgcgcgagttgtttgccgaatttggtacaatcacctcttgcaaggttatgcgggaccctagtggtactagcaaaggatcaggatttgttgccttctctgctgccagtgaagcttcaagagtgctgaatgaaatgaatggtaaaatggttggtggcaaaccgttgtatgttgctcttgcacagaggaaagaagaaaggagggctaagctgcagttttctcaaatgagacctgcttttatccccggtgtgggtcctcgaatgccaatatttacaggtggtgctccaggtcttggacaacagattttttacggtcaaggacctccaccaatcatccctcaccagcctggatttggatatcagcctcagctggttcctggaatgaggccggccttttttggtggaccgatga

SEQ ID NO: 163084 - DNA, 475 bp, Arabidopsis thaliana columbia; identical to SEQ ID NO: 130798

SEQ ID NO: 163085 - DNA, 434 bp, Arabidopsis thaliana columbia
  unsure (1)..(434): unsure at all n locations
aaaaaatctttttaaagagctttgaagatccatggcgatgtctcatgtccagcctatgctactcctcctcgtatcactcttcttcttaccggctttgcgtggcgccatagatttcgaatactgcgccaaaaatggaaacgattacggaaccgtcactagcattgtggtctctccatctgttgggcctcacgaaaacccaaccatcactataaatttattcggttctgcaagcaaaaacatccccgcgggaacccttgtgtacgtagcctttagagatggggaatttaccggccttttaaaaacttacaacctttgtgatgtgagtgcatgtaacaatgaagctgagattgaagctggcaccaactntgagttaactctttccgacgttctttatgttggttatgatgaggaaatcaagtacttcgtatctttgc

SEQ ID NO: 163086 - DNA, 471 bp, Arabidopsis thaliana columbia
cccggcccagcgcgtccgtcgagagtaagagagagagcacaaccaccaaccctcttatcgcctctatctcctctgctaccttaagctgagagagtcacagtctcgtctctatctctcctctttgcctttttccactcactacacgccaaacccgacgacatggcagctacctctctcactgcccctccttctttctccggtctccgccgcatttctcccaagctcgacgctgccgccgtctcctcccaccaatccttcttccaccgcgtcaattcctctacccgtctcgtttcttcctcttcttcttctcatcgctcccccagaggtgttgttgccatggctggatccggaaagtttttcgttggaggaaactggaagtgtaacgggactaaggactccatcgccaagcttatctccgatctcaacagtgcaaccttggaagcagatgtagatgttgttgtgtcaccttca

SEQ ID NO: 163087 - DNA, 484 bp, Arabidopsis thaliana columbia
ccggaattgcaggtccgacccagaccgtccgggactggatttacaaagctggattagcatgaactcgaacttctgcatttacggtctggtctggtctggtactccgcgcgtatcagctgtaggatctgatcgcaaagttttggactatgattactctgattcctcaatatatctatctctttgacaatagtggattctgtgttgagctcttttctaggacagcatttaagctcccgggactagatgggagatggtcagcaaatttctttgttatgccacacttacatggggtttttggtctcgctgcaggtcccaatcaagatcaaaatcaagatcaagatcaagatcgaattctccagtttcacctgtgatatctggttgaaaatgaaaactggccactggctgtacccgaatcgtctcaagcttctcaggctccactgctaatagaatttgattccgatttgggattattatactggtcttc

SEQ ID NO: 163088 - DNA, 390 bp, Arabidopsis thaliana columbia
ttgacgctgatgtcaaaccttcaggagactcagctctctctgttgatggaaagatcatcaagattgtatctgatcgtaacccatctaatctcccctggggggaactaggcattgacttagttatcgaaggaaccggagcgtttgttgacagagacagtgctgggaagcaccttcaggctggagccaagaaggttcttatcactgcacctggaaaaggtgacatcccaacttatgtcgttggtgtcaatgctgaactttacaggcatgaagataccatcatcaggaatgcgtgttgtactactaactgtcttgctccattcgtcaaggttcttgaccagaaatttgggatcataaagggtacaatgacaactactcactcatacacttgtg

SEQ ID NO: 163089 - DNA, 469 bp, Arabidopsis thaliana columbia
cactcaccatgagacaccttagctcacctccatggcctctcctccttctcctcctcctctcttctttcacctccggcgaatcctctctgtccgcagaaaaaaacaaattgcacaccggtggtctcagtagacagagttttcctaaaggattcgtgtttggaaccgccacgtcagcttatcaagtcgaaggcgagactcatcaagacggtcgtggcccaagcatttgggatgccttcgtcaagattcctgggaagatcgccaagaatgccacggctgagataacagtggaccagtatcaccgttacaaggaagatgtggatttgatgaagaaactgaacttcgatgcttacagattttccatttcatggtccaggatattccctgagggaagtggtaaagtcaactggaaaggagttgcttattacaatagattgattgattacatggttcaaaaagggattacacctta

SEQ ID NO: 163090 - DNA, 366 bp, Arabidopsis thaliana columbia
taattttatcagatgggagaaaggagaaaggagtgagtcaagctggtgtgcaattctaccacgacctcatcgacgagctcataaaaaatggttacatatattaatcacttaaaaacgaaaaaaaaaacatttataatctcttacgtattaaacttctctaattttttatttttttctgtaattaggtataactccattcgttactgtttttcactgggacactccacaagatttagaagatgaatatggcggctttttaagcgaaaggattgtgtaagtttttctgttggaaaacgaaccccaatcactttttgttttctttgatatgcgaatataaatggtataattcaacaattttttgcaata

SEQ ID NO: 163091 - DNA, 296 bp, Arabidopsis thaliana columbia
cgcgcccgcacacaacaaaaaatgggtttcattggtaagagtgtatttaggcgagccgtagcgctttggtgcttgacttcctaagacctcactgaccgaatggtcccatatattaatcactttagtgtagcgacggggaatgctacttaccaccacggtcaccaccacccacaccctcctatggtccgactcgcatggcactctgctggaactttcgattggcaatcaaggactggaggagcattagaagaggcaacatggcggctattcaagcgaaaggattgtgtaagtttttt

SEQ ID NO: 163092 - DNA, 454 bp, Arabidopsis thaliana columbia
ccgagacattcgcaaggaaccgtgaactagaagttatccacagcaggtgggccatgctcggagccctaggctgcgtcttccctgagcttttggctagaaacggagtcaagttcggagaggcggtttggttcaaggccggttcacagatcttcagcgatggagggctcgattacttgggaaaccctagcttggttcacgctcagagcattttggccatttgggccacacaagttattttgatgggagccgttgaaggctacagagtcgcaggaaatgggccattgggagaggccgaggacttgctttaccccggtggcagcttcgacccattgggtttggctaccgacccagaggcattcgctgagttgaaggtgaaggagctcaagaacggaagattggctatgttctctatgtttggattcttcgttcaagccatcgtcactggtaagggacc

SEQ ID NO: 163093 - DNA, 427 bp, Arabidopsis thaliana columbia
agcacccgtctcctctacagacaagccattgatgtgcaagaacatgtatggaggtcagtttaagcctccacggcggttaaggagcgacgagcttcccgccattgtcaacgactttagaatcgctgcacgaaacgcgatcgaagctggtaagcaaagtcttttcccctttggatgttagatgatcaagacacttgacatatatacaagtacaggcttcgatggagtggaggttcacggcgcacatggttacctgatcgatcagttcctgaaagacaaagtgaatgacagaagtgaccaatatggtgggtcattagagaaccgctgtagatttgctcttgaagtaatcgaagcagtggtgaacgagatcggttcagatcgtgttggaatcagactctcgccatttgcagattacatggagtcaggagac

SEQ ID NO: 163094 - DNA, 466 bp, Arabidopsis thaliana columbia
cttcaagattttcttctctctatctctctgtttctctctgtttctgagatgggtttgtttggaacgaagaagatcgggaagtatgagataggaagaacaatcggagaagggaatttcgcaaaagtgaaacttggttacgacacgaccaatggtacttacgtagctgtcaaaatcatagacaaggctttggttattcaaaagggtcttgagtctcaagtcaagagagagatacgaacgatgaagcttcttaaccatcccaacatcgtccaaatacacgaggtgattggaaccaagacaaagatctgtatagttatggaatacgtttcaggtggtcagctttcagacagacttggaagacagaaaatgaaagaatcagatgctagaaaacttttccaacaattgattgatgctgttgattattgtcataacagaggagtttatcatagagatcttaagccacaaaact

SEQ ID NO: 163095 - DNA, 296 bp, Arabidopsis thaliana columbia
gtcaggcccctcctgccatgattcctccccagtctgggtatggataccaacagcagcttgttcctggaatgagacctggtgggggtcctgtacccagtttcttcatgcctatggttcagccacagcagcagcgtcctggaggaggaagacatcctgggggaatccaacactcccagcagcaaaatcccatgatgcagcaacagatgcatccaaggggtcggatgttccggtatccccaagggcgtggtggtagtggtgatgttccttcatatgatttgtgcaacaacatgctattg

SEQ ID NO: 163096 - DNA, 445 bp, Arabidopsis thaliana columbia
gctggagatgtgaaggcaaagtttatagtagaggcagttaaccatccaacagatccagatgctgatgagattctgtcgaagaaaggagtgattatacttccagatatctacgcaaacgcaggaggagtgacagtgagttacttcgagtgggtgcagaacattcaaggattcatgtgggaagaggaaaaagtgaacttggagctgcaaaaatacatgactcgagcctttcacaacatcaagacaatgtgccatactcattcttgcaacctccgtatgggagctttcactcttggagttaaccgagtcgctcgagccacccagttgcgtggttgggaagcttaattcagttgaatcccccttatatactctgtttcttgcttgctctgttttccattttttttttttttggatacattgttactgaaaatcattgagctttccgaaa

SEQ ID NO: 163097 - DNA, 459 bp, Arabidopsis thaliana columbia
aaccaagacaaaaagaacaatggcagcgagtgcatctccaatggcgagccagctaaggagcagcttctcctccgcttctctttctcagcgtctcgccgtcccgaagggcatctccggtgctcctttcggtgtttctccgaccaaaagagtctcttccttcactgtccgagctgttaaatccgacaagacaacattccaagtagttcaaccaatcaacggtgatccattcatcggaagtttggaaactccggtgacatcaagcccattgatcgcgtggtacctttccaacctccctggataccgtaccgccgtcaaccctctcctccgcggtgtggaagtgggcctggcccatggtttcttcttagtgggcccattcgtcaaagctggcccattaaggaacactgcttacgccgggtcagccgggtctttagccgcggctgggctggtagtcatcctcag

SEQ ID NO: 163098 - DNA, 464 bp, Arabidopsis thaliana columbia
cggacgcgtgggcgcatttctccagattttattatccttcctcgaaacaagagcttagctaagatgacgaagaactacccaaccgtgagcgaagattacaagaaggctgttgagaagtgcaggaggaagctcagaggtttgatcgctgagaagaactgtgcacccatcatggtccgactcgcatggcactctgctggaactttcgattgtcaatcaaggactggaggtccattcggaacaatgaggtttgacgctgagcaagctcatggagccaacagtggtatccacattgctcttaggttgttggaccccatcagggagcaattccctaccatctcttttgctgatttccatcagcttgctggtgttgtggccgttgaagttactggtggccctgacattccttttcaccctggaagagaggacaagccccaaccacctccagagggtcgtctttctgatgc

SEQ ID NO: 163099 - DNA, 329 bp, Arabidopsis thaliana columbia
aaaaaaaaaacacaaaaagtttcaatggccgccttcattatggctctctcctcccctgccttcgccggaaaggctgtgaacctttcccccgcggcatctgaagtcctcggaagcggccgtgtgacaatgaggaagactgttgccaagccaaagggtccatcaggcagcccatggtacggatccgaccgagtcaagtacttgggtccattctttgtcgagttattgctctaccttaccattgacaatgcatttggagcacggatggtacacctctggacttttagttgatcccgagacattctcatggaacctgttggcaaggagttttt

SEQ ID NO: 163100 - DNA, 75 bp, Arabidopsis thaliana columbia
cgaatatggccacatcagctatccaacaattttctttcgccggacaaacggctctcaagccctccagtgtcctta

SEQ ID NO: 163101 - DNA, 397 bp, Arabidopsis thaliana columbia
cagagataatggcgtacagtgcgtgtttcctacaccagagcgcattggcttcatcagccgcacgatcatcatcttcctcctcatcccagcgtcacgtgtcgctctccaaacctgttcagatcatctgtaaagctcaacagtctcatgaagacgataactccgccgtctcccgccgtcttgctctcactctcctcgtcggcgccgctgctgttggttccaaagtatctcctgctgatgccgcctacggagaagctgcaaacgtgtttgggaagccaaagactaacacagacttcttgccatacaatggagatgggttcaaagtgcaggttccagcataatggatccttatcaaagagattgtttatccaggacattgttcttggttcgaagacttctt

SEQ ID NO: 163102 - DNA, 457 bp, Arabidopsis thaliana columbia
aagtaatcctaactatacaaaacacataacaatatggctccttcaacaaaagttctctctttacttctcttatatgtcgtcgtgtcattagcctccggtgatgagtccatcatcaacgaccatctccaacttccatcggacggcaagtggagaaccgatgaagaagtgaggtccatctacttacaatggtccgcagaacacgggaaaactaacaacaacaacaacggtatcatcaacgaccaagacaaaagattcaatattttcaaagacaacttaagattcatcgatctacacaacgaaaacaacaagaacgctacttacaagcttggtctcaccaaatttaccgatctcactaacgatgagtaccgcaagttgtacctcggggcaagaactgagcccgcccgccgcatcgctaaagccaagaatgtcaaccagaaatactcaaccgctgtaaacg

SEQ ID NO: 163103 - DNA, 403 bp, Arabidopsis thaliana columbia
ctcttcttgaatcaaggtcgtcttcttgaaatcagatctcttcgtgacttctcctgtaaccaacaaagaaccatggagctcctctctagagctcttttcttctttcttctactctcagttctttcttctttctcttcttcaagtttcatttcagatggggtcttcgaatctcagagtttggttcttggcagaaacttgcttcagaccaagaaaagcaagtttcttaaatctctcctcttcccataactttactgttttttatatactttctaatgattccagcaattgattctccttttagtatgaagatcttagtaaagagcttctaattatagacggatccatatatagatagcttgtttccatataatagactacaacccttgattcttgattcctagct

SEQ ID NO: 163104 - DNA, 451 bp, Arabidopsis thaliana columbia
gtgattgaagaaagagagcaaggaatacaagaaatccatcagcaaattggtgaggttaacgagatattcaaagatcttgcggttctggttaacgatcaaggagtcatgatagatgatattggtactcacattgacaactcccgtgctgcaacttcacaaggaaaatctcagcttgtgcaagccgcgaaaacacaaaaatcaaactcctctctgacatgcttgctcttggtgatatttggcattgttctcctgatcgtgattatagtactcgcagcttgatttcgaacagcaagaacatttcgtttgtgtgtgttcattgatcttaaggcatcaatgactggaactacttggtatatattatatgttgaagagaacacttaaaagttgtttttgagtttgtttgtttggatctatttttattttgtttttattttctcaaaaatcttttttt

SEQ ID NO: 163105 - DNA, 224 bp, Arabidopsis thaliana columbia
cttgtaatctccgacgaagaaacacagacttatccatttcgccacttcgacaagcgttctctctttacttctcttatatgtcggcgtgtcattagccttcggtgatgagtccatcatcaacgaccatcttcaacttccattggacggcaagcggagaaccgatgaagaagtgtggtccatctacttacaatggtccgtacatctctttctcactttttttttcc

SEQ ID NO: 163106 - DNA, 461 bp, Arabidopsis thaliana columbia
tgaaacaaacaacaaaaaaatggcttgctctaatctaacaacaatgggggttttatcaaaaccaattttttctggtggttcatctttcctattaatccgatctggtcttaaggggccaacttacaatttcttaacttctttaagaggtttctttggttcaacacttcaagcctctctttgtgagctcagagaccgtgttgattcagacaaaaacactctaaagatcaccgcagctatgtaacttgtcgctgtagctataagggaggagagctcaaaaagctgttgttaatgggcgaccattctcagaaaccctagttgaagttctttacaacatcaacgaacagcttcaaaccgatgatgtcgatgttcccttaaccaaagtcagaccggttaagaaagtagctctcgttgtcgtcaccggtgatcgtggattatgtggtggattcaacaatttcatcatt

SEQ ID NO: 163107 - DNA, 460 bp, Arabidopsis thaliana columbia
aaaaggcgtaaacttttttcacctggctagggttcttggtcgtcgttaactggcatctagtatggctttctgcactaaacttggcggtcactggaaacaaggggtaaatgttccagtgtcatcaatgctcggttctcttcgctacatgtccacaaaactttatattggtggcctgtcccctggaactgacgagcactccttgaaggacgctttctctagcttcaatggagtgacagaggcaagagtcatgacaaacaaagtgaccgggaggtctagaggttatggatttgttaacttcataagcgaggattctgccaactctgctatttcagcaatgaatggacaggagctgaatgggtttaacataagtgtgaacgttgcaaaagattggccaagtttgccattgtctttggatgagagtatagaagaagctgagaagaaagaaaataagatgatgagc

SEQ ID NO: 163108 - DNA, 378 bp, Arabidopsis thaliana columbia
acagattttaaaaaaccccaaaaactttacattcttaacaatttcaaccctatgggcttacttgatcatctctgggatgatactgtcgctggtccacggccagagaacggccttggcaagcttcgtaaacaccataccttcagtttccgacctagctccggcaatgatcaatcggaagctggaagtgcgagatcgtacggtgaggattcgctaccggaaggagcagtgaaagttacacgtagtatcatgataattaaccaccgggttaccaaggcagttcagctccagcttcgcctgccggttcaactccgccgctatcacctttctctccgccgctgtctccgttctctgagcaaacgcaggggggaaaggaaccct

SEQ ID NO: 163109 - DNA, 467 bp, Arabidopsis thaliana columbia
gaagagaaacaacaagaagtagtaatggcttcctctatgctctcctccgccgctgtggttacatccccggctcaggccaccatggtcgctccattcaccggcttgaagtcatccgctgcattcccggtcacccgcaagaccaacaaggacatcacttccatcgcaagcaacgggggaagagttagctgcatgaaggtgtggccaccaattggaaagaagaagtttgagactctatcttacctccctgaccttagtgacgtcgaattggctaaggaagttgactaccttctccgcaacaagtggattccttgtgttgaattcgagttagagcacggatttgtgtaccgtgagcacggaaacactcccggatactacgatggacggtactggacaatgtggaagcttccattgttcggatgcaccgactccgctcaagtgttgaaggaagttgaagaatgcaagaagga

SEQ ID NO: 163110 - DNA, 463 bp, Arabidopsis thaliana columbia
ctcgtcgaaaatggcgtgctcaattggtaacgctttcaggtgttcttctgatacgctgcgttttgctccccgacaacaatgcagcagccgcctaaaccctaatccttcctctttcctctcctttaattcctccccaattctcgcacagaatttgggtgcttcttcttcgtcactttcccgacggactatacgagctagaacaaaaatggctgcgtcggaggcttccattaacgggagcaacaggatgctggtctttgtgccaccacatcctttgatcaaacactggatctctgttctgagaaatgaacaaactccttgtcctgttttcaggaatgcaatagctgaactagggagattactcatgtatgaagcatcacgagagtggctgccaactgttgtgggtgaaataatgtctccaatgggtcctgcttctggtgaattcattgatcctagagagcctatt

SEQ ID NO: 163111 - DNA, 461 bp, Arabidopsis thaliana columbia
gacgaagcaaatcctcccacaaagaatcatccatgggtcgtgttatcagagcacaacgtaagggagctggttccgtcttcaaatcccacactcaccaccgtaaaggtccggccaaattcaggagtctcgatttcggggagagaaatggttatctgaaaggtgttgtgacggagatcattcacgatccaggacgtggtgctccattggctcgtgtagctttccgtcatcctttccgattcaagaagcagaaggagcttttcgttgctgctgaaggtatgtataccggtcagtttctttactgtgggaagaaagctactctcgtcgtcggaaatgttcttcctctcagatctattcctgaaggagctgttatttgtaacgttgaacatcatgttggtgatcgtggtgttttcgctagagcttctggtgattacgccattgttatcgctcacaatcctgataac

SEQ ID NO: 163112 - DNA, 386 bp, Arabidopsis thaliana columbia
  unsure (1)..(386): unsure at all n locations
accggantnaagttccgacccagcgcgtccgaaaaactcttgaatttttcaagaacaaaagaaaatgtactatctttaatggcggccatgaactcgagtgttctcacttgcagctacgcaattgctggctctggctcggtagagcttaaccagaaagttggtttggtgaattcatcatttgtttttggtcagaagaaacagttttatttttctgtgatcaaagcttattgcgttgttgttttatgagtctcttttctttttcataatatttttcttatcaaatgtttttttctaatttttttttttttttatttttattttttgttttttttattcgtattaatctatgtttctttttatttatttttttctttaatacatatttt

SEQ ID NO: 163113 - DNA, 450 bp, Arabidopsis thaliana columbia
cccatagaagctccggcgtctgtcttcgccgctcgtcctcttcgtcctccttctacgaattcgggggagatgtattcgcctgtagaatggaaaagctattttgataaagaagatgatatatcaatcactggctctgatgatgtgtttcatgtgtatatggcaggaaatgaaggacctgttgtcttttgtctccatggtggtggctactctgggctctcgttttctatagtagcaagtaaaattaaggagaaagcacgtgtggttgcgatggacttgagagggcacggtaaatcggtttcggagaacgaattggagttatcgcttgagacaatgagcaatgatgttttggctgtcattaaggaattgtatggagactctcctccagctattgtgctagttggtcacagcatgggaggttcggtcgctgtgcaagttgctgcaaacaaaaca

SEQ ID NO: 163114 - DNA, 464 bp, Arabidopsis thaliana columbia
  unsure (1)..(464): unsure at all n locations
ggatttcaaagggtaggaaaggaggaaagaagaaggctgttgatcccttctccaagaaggattggtatgacgtgaaggctcctggttctttcacgaacaggaatgttgggaagactcttgtttccaggactcagggtaccaagattgcctctgagggactgaaacacagggtgtttgaggtttctcttgctgatctacaaaatgatgaggataatgcctacaggaagatccgtcttagagctgaagatgttcagggaaggaatgtgttgacccagttctggggtatggatttcacaaccgacaagctaaggtcattggtgaagaagtggcagactttgattgaagcccatgtcgatgtgaaaaccacagacggctacaccttgaggatgttctgcatcgccttcacanagagacgtgctaaccaagtgaagcgtacctgttacgctcaatccagccaaatccgt

SEQ ID NO: 163115 - DNA, 426 bp, Arabidopsis thaliana columbia
ctctaatggcagccaccacgagacggttgctttactatgtgtccaaaagattctctaccgccggagtgcggcggagctatggcggtctgccacaatcgaattccaaatctcctccgtcttcttctcaacgattgatggaattggaatctgaattcagtgcccacaattaccatcctgttccggttgtgttttctcgcgcgaatggctcaactatatgggaccctgaaggaaagagatacattgattttcttgcagcttactctgcagttaatcagggacattgtcatcctaagatcatgaaggcattgcaggaacaagtggagaagctcactttaagttcacgagcgttttacaacgataaattcccggtatttgctgagcgtctcacaaacatgttcggttatgatatggtgcttcctatgaaca

SEQ ID NO: 163116 - DNA, 465 bp, Arabidopsis thaliana columbia
gaagaacaatggcttcctctatgctctcttccgctactatggttgcctctccggctcaggccactatggtcgctcctttcaacggacttaagtcctccgctgccttcccagccacccgcaaggctaacaacgacattacttccatcacaagcaacggcggaagagttaactgcatgcaggtgtggcctccgattggaaagaagaagtttgagactctctcttaccttcctgaccttaccgattccgaattggctaaggaagttgactaccttatccgcaacaagtggattccttgtgttgaattcgagttggagcacggatttgtgtaccgtgagcacggtaactcacccggatactatgatggacggtactggacaatgtggaagcttcccttgttcggttgcaccgactccgctcaagtgttgaaggaagtggaagagtgcaagaaggagtaccccaatgcct

SEQ ID NO: 163117 - DNA, 470 bp, Arabidopsis thaliana columbia
caaacagagcttgagaagtattatattagttctctcactaacgttttcatccccggaactcaataccttcctacgcctaccaaccttaaactatgggagctccataagaaagtgaagaactcgatcaaaagaatcatagattcaaggctaaaatcaaaatgtaagacctatggctatggggacgatcttctaggggtcatgttgactgctgcgaaatctaacgagtatgagagaaagatgagaatggatgagatcatagaggaatgcaagaatttctactatgcagggcaaggaactacttcgattctattgacatggactacgatgttactaagcttgcaccaaggttggcaagagaaactcagagaagaggtttttaatgaatgtggtaaagataaaatcccagatacagacaccttctctaaactcaaattgatgaacatggtgttgatggagtcgcttcgtctgta

SEQ ID NO: 163118 - DNA, 443 bp, Arabidopsis thaliana columbia; identical to SEQ ID NO: 131604

SEQ ID NO: 163119 - DNA, 365 bp, Arabidopsis thaliana columbia
cccatagaagctccggcgtctgtcttcgccgctcgtcctcttcgtcctccttctacgaattcgtcggagaagtattcgcctgtagaatggaaaagctattttgataaagaagatgatatatcaatcactggctctgatgatgtgtttcatgtgtatatggcaggaaatgaaggacctgttgtcttttgtctccatggtggtggctactctgggctctcgttttctatagtagcaagtaaaattaaggagaaagcacgtgtggttgcgatggacttgagagggcacggtaaatcggtttcggagaacgaattggagttatcgcttgagacaatgagcaatgatgttttggctgtcattaaagaatt

SEQ ID NO: 163120 - DNA, 401 bp, Arabidopsis thaliana columbia
gttcttgttgctgtagaacacaaacagaacaaacaaataatcaattgaagagtctctcagtcgttaggggaagcaaatagagaaatggctagctttactgcctccgcttccaccgtctccgccgctcgtccggctctccttctcaagcctaccgtcgccatctctgctcctgttcttggtttgcctccaatgggtaagaagaagggaggagtgagatgttcaatggagacaaagcaaggaaacgtctcagtcatgggggctggagtttcagctgcagcaacagctgctttgacggcggtgatgagcaatcccgcgatggctttggttgatgagaggatgttatcagaaggaacaggattaccctttggtcttagcaaacaaccttttgggttggaaacctg

SEQ ID NO: 163121 - DNA, 464 bp, Arabidopsis thaliana columbia
tctctctctcagagaagaaaccaaagaagaagaaaaagctctcaactttcttcgatttcgcagggaactctttcgttaatctcaaactcaatcatgtctaccccagctgaatcttcagactcgaaatcgaagaaagatttcagtactgctattctcgagaggaagaagtctccgaaccgtctcgtcgtcgatgaggctatcaacgatgataactccgtcgtctctcttcaccctgcaaccatggagaagcttcagctcttccgtggtgataccattctcatcaagggtaagaagaggaaggacactgtctgcattgctcttgctgatgagacatgtgaggagccaaagatcagaatgaataaagtagtcagatctaacttgagggttagactgggagatgttatatctgttcaccaatgcccagacgtcaagtacggaaagcgtgttcacatcctgcctgttga

SEQ ID NO: 163122 - DNA, 270 bp, Arabidopsis thaliana columbia
ttcctttatataaagttagaaaaacaaaataaacaaaatagttagaaaaaatctgagaggaacagaagaaacataaaaaaaatgaggccattgagcattaaaccaacatcgttagatgtagctagacatgccacatcagtagaatcatttgggaatcaccgaccgccgatatcgccgtggcactcaccggtgccgtacctattcggaggtcttgcggcgatgttaggccttatagccttcgctttacataccctagtttgttcttacttg

SEQ ID NO: 163123 - DNA, 448 bp, Arabidopsis thaliana columbia
tgaaacaaacaacaaaaaaatggcttgctctaatctaacaacaatgtgggtttcatcaaaaccatctctttctgctgattcatcttccttatcattccgatctgttctcaagtgcccaactaacacttcctcacctccttcacgagcttcctctgtttcaccactccaagcgtctcttcgtgagctcagagaccgtatcgattcagtcaaaaacactcaaaagatcaccgaagctatgaagcttgtcgctgcagctaaagtcaggagagctcaagaagctgttgtcaatggacgaccattctcagaaaccctagttgaagttctttacaacatcaacgaacagcttcaaaccgatgatgtcgatgttcccttaaccaaagtcagaccggttaagaaagtagctctcgttgtcgtcaccggtgatcgtggattatgtggtggattcaac

SEQ ID NO: 163124 - DNA, 449 bp, Arabidopsis thaliana columbia
caagaaagaaagagagctagaatctagttctatccaagagtgttttttagtttctttctccttgttgggatatggaagcttgttgctctgatcttgaagtagacatcaatggagaacaaactatctttctcaataagcaaatcatatgtgcttattctggaacgttaagaaagcttttggggaaatcaactagttccagtggaaatctcaaggtgatcttcaatgatttccccggtggagctgagagtttcgagtttgtatcgaggttttgctacaatgacggtcgagtagctgtgatgccttcgaatgtagttttcttgcattgtgctgctaagtttattgaagtcactaaagtcttggaacaaacagagaagtgtatggaagagattaggtattgggcttggccaggggttcttctttgtctaaaacagtgtcaagaagttgaaaca

SEQ ID NO: 163125 - DNA, 460 bp, Arabidopsis thaliana columbia
atctcctttcctttcattgtagttaacgaaaagattacgataatggcaacatcagctatccagcaatcctccttcgccggccaaacggctctcaagccctccaacgaactcctccgcaaggttggtgtatccggtggtggccgtgtgaccatgcgtcgtaccgtcaagtctactcctcaaagcatctggtacggaccagaccgtcccaagtacttaggaccattctcggagaatacaccgtcctacctaaccggagaataccccggagactacggctgggacaccgctggactctcggctgacccggagacattcgctaagaaccgtgagcttgaagtaatccacagcagatgggctatgttgggtgctctcggatgcacattccctgagattctctccaagaacggtgttaaattcggagaagcccggtggttcaaggcaggttctcagattttctcag

SEQ ID NO: 163126 - DNA, 474 bp, Arabidopsis thaliana columbia
accgcgtcatgtagcagaagtcgtgtgctgctactggaaggatcagagtgagagtgagtccatgtccaaactgaagaaatacatcttccaagttgaagaaggcaaagaaggtagcgatggaagaccatcagttggtccagtgtaccggagtatctttgccaaggacggatttcccgacccgatcgaaggaatggatagttgttgggatgttttccgcatgtctgttgagaagtatccaaacaatccaatgctgggacgccgcgagattgtagatggaaagccgggtaagtatgtctggcaaacataccaagaagtctacgacattgtcatgaaacttggaaattctctcagaagtgttggagttaaggacgaagcaaaatgtggtatctatggtgcaaattctcctgagtggattatcagcatggaggcttgtaatgcacatggactctattgtgtaccgttatatgatacact

SEQ ID NO: 163127 - DNA, 493 bp, Arabidopsis thaliana columbia
ccggcccgtaatcccggtcgccacgcgtccgaatctctctctctcacactcactgtaataaacacaaatgacgagttcttctgaatcaactcgcaagggtctgaccaaaatcgccacgaaccggttgcagaaagagttcatggagtggcaaaccaatcctccttctggtttcaagcacagagtctctgataatctccaacgatggatcattgaagtgcatggagttccaggaactctttacgccaatgaaacttaccaacttcaagttgagttccctgagcattatcctatggaagctccacaggttatctttcagcatccagctccacttcatcctcatatttacagcaacggtcacatttgtttagatgtcttgtatgattcgtggtcaccggcgatgagactaagttccatctgtctcagcattctctcaatgctctccagctcatccgtgaagcaaaagccgaaagacaatgaccattacttgaaaaac

SEQ ID NO: 163128 - DNA, 417 bp, Arabidopsis thaliana columbia
cgaataattcgcaggtacgactgtgggatgtttatgcttaaatacattgatttttacagtagaggattgagtctacaatttagccagaaagacatgccgtacttcaggttaagaacagctaaggagatactgagactgcgagctgactaatagtgcccccatcttggtgacataaccttgctattttacaaagccgattcatattagtttagcagccttatttgcttgggctgtggagaatgctagatatcttcgttgctttcttgaaatatttgtttgattttttcttatctagaagaagttgttgataagcttttagaattctgttttattgtttagtgaaggaataatcttcaattttgtaccctggcctgaggaataattttaagtttggtggaaaattgcagattgttatgc

SEQ ID NO: 163129 - DNA, 144 bp, Arabidopsis thaliana columbia
agggactttgtttcaaatcctacaacactgaagtaacgactatttgtgggtgggcttgctatgcttctgctgtcaccgtttcttgtcatctttatgttggggtatttattcctaaagcatgctgaacagttctacaatcatcca

SEQ ID NO: 163130 - DNA, 459 bp, Arabidopsis thaliana columbia
  unsure (1)..(459): unsure at all n locations
cccatagaagctccggcgtctgtcttcgccgctcgtcctcttcgtcctccttctacgaattcgtcggagaagtattcgcctgtagaatggaaaagctattttgataaagaagatgatatatcaatcactggctctgatgatgtgtttcatgtgtatatggcaggaaatgaaggacctgttgtcttttgtctccatggtggtggctacctctggctctcgttntctatagtagcaagtaaaattaaggagaaaccacgtgtggttgcgatggacttgagagggcacggtaaatcggtttcggagaacgaattggagttatcgcttgagacaatgagcaatgatgttttggctgtcattaaggaattgtatggagactctcctccagctattgtgctagttggtcacagcatgggaggttcggtcgctgtgcaagttgctgcaaacaaaacattgcctagc

SEQ ID NO: 163131 - DNA, 462 bp, Arabidopsis thaliana columbia
tacagagtcgtctgctgctatggaaggatcaaatgatggtggctctgtttccaaaatgctctctggttttcaatcttctgagaacagagctgttgaatcagctgttccacaagttgctcttcaagcatttgcttttctaagtgagaacactgctgcgcagactgttgttgcttccattgcgagtgacccaaaagtatgggatgctgttatggagaataaggatctcatgaaatttcttcagaccaacaaaaccgctgtttcctctcaagttgaatctgacaatgacgaccaatctgaacgttcgagcacgactgagtgtgaagtcgtggaaactaagccaatggaactcttagagattctgcaggacatgaagctaaaagctgttcggttgatggaaaatgtatcttcctactttggtgacttgtttggggtaggatcagttacagaagatggaaaagacaa

SEQ ID NO: 163132 - DNA, 458 bp, Arabidopsis thaliana columbia
gcttcttcttctaccaatctaattcctctcttcagcttcttgtgttgtgacgcatactcgtcgcagtcttgagatatggccgccgcagtttccaccgtcggtgccatcaacagagctccgttgagcttgaacgggtcaggatcaggagctgtatcagccccagcttcaaccttcttgggaaagaaagttgtaactgtgtcgagattcgcacagagcaacaagaagagcaacggatcattcaaggtgttggctgtgaaagaagacaaacaaaccgatggagacagatggagaggtcttgcctacgacacttctgatgatcaacaagacatcaccagaggcaagggtatggttgactctgtcttccaagctcctatgggaaccggaactcaccacgctgtccttagctcatacgaatacgttagccaaggccttaggcagtacaacttggacaacatgat

SEQ ID NO: 163133 - DNA, 415 bp, Arabidopsis thaliana columbia
aaaaaataaatatggagctcgagacctcagtttatcgaccaaacgtcgccgtttatgattctccggatggtgtggaggttcgaggacggtacgaccaaatcttcgccaagattttgacgagagaagctcttagctttgtggctgagttacagagagagtttcgtggccatgtgaagtatgccatggagtgccggagagaggcaagacggcgttataactccggtgccgttcctgggtttgatccttccactaagttcatcagagacggtgattggagctgtgccttcgtccctcctgccgttgctgaccggagagttgagatcaccggtccggtcgagaggaagatgatcatcaacgctcttaactccggagctaaagtctttatggctgatttcgaggacgctttgtcttatgc

SEQ ID NO: 163134 - DNA, 360 bp, Arabidopsis thaliana columbia
gaggaaaaaaccttacccgctcctctaaaacccttgtcttctccgatatctttcctcagctccggtaaagaatgaagattaggttctgtaatggcttcacaaagcctgggtttttgctagttcactttgagccaccatctttttttgccgttagatctcgttcactctctgattccacttatggcaacttatgcaaccacaagaagagacctgggactggaattgttctaactgttcaatgcgctattgcaaatcggagattttcttcacgttctttggattcaccgagaagagaaaggtcttttagatcttttttttttttcgttatgtgtttggggtagagataaggtctaaattttg

SEQ ID NO: 163135 - DNA, 357 bp, Arabidopsis thaliana columbia
caaatgtttggtgtttcgatgagaacattaatctcaccatctcttgctcccttctctctgcgtcggcataaaccctctatcttgtcgaccgctcttcgcttctccttctcaatcaacagcataacccccacagattcacctgcttccaccagttccaccagagagctacaaacgaaagcgacgagggtaacatcatcatcatcatctcagccgctctcctactcatctaccggcgaaatccacgtcgtagtcgggccaatggtctccggtaaaacaacaacacttctcccgcgtatactccccgaaagagaaaccggggaaagaatcgcaatcatcaaattcaacaaagacacaaga

SEQ ID NO: 163136 - DNA, 404 bp, Arabidopsis thaliana columbia
gtggacttctacaggtgacccctatgctaatgtgtgtgactctgctctgcttttgatcgtgggaagctgtaagtcttttgctgagcgtcatggttgggattataaggtcaagaagcccaacacaccattattgaaggtcaagtcttactcggacaacttcaagtggaaaggcaatcctcaaccagaaaactgatgttacaccttcttcaattcttctcgagcaaaagaagaaacctcatttgatattaattctcatgtttctttgtattttagcatctgtgagctttttggttgaaaagaaccattatccatggctatgtttacttattacaataatatgatgatgatgatgaaacacactcctttgatatttcttcatagttttatttttttattatatattt

SEQ ID NO: 163137 - DNA, 448 bp, Arabidopsis thaliana columbia
ggaagaagaagaagaagaccaaagagagtaagtaatggcgaagatcaaacctcaagcattgttgcagcaaagcaagaagaagaaaggaccgtctcggataagcataaccaacatcgtcatttacactttggctgtgcttttgcttgtctttgttctcttctctgcttacagacgttggactcacagatctgagatcccaacgcacaatggtagatcagttcttgaggatgcagccttccctggaatgaagaatgttgatcttccgcggtttgctaccttagatacgggcaaaggttcagtgaccattgaactcttcaaggatactgctcccaatgtggttgaccagttcatgaaattctgtcaagatgggtatttcaaaggtttcttattcagtcgagttgtaaagcattttgtgattcaagccggtgactctgcggagttcgatgct

SEQ ID NO: 163138 - DNA, 352 bp, Arabidopsis thaliana columbia
cacaacgacagatagagagaaacgatggcgtctaactcgcttatgagctgcggcatagccgccgtgtacccttcgcttctctctgcttccaagtctaaattcgtatccgccggagttccactgccaaacgccgggaatgttggtcgtatcagaatggctgctcactggatgcctggcgagccacgaccagcttaccttgacggttctgctcctggtgactttgggtttgacccacttggacttggagaagttccagcgaaccttgagagatacaaagagtcagagctcatccactgtagatgggctatgctcgctgttcctgggattttggtaccagaagcattaggatatg

SEQ ID NO: 163139 - DNA, 463 bp, Arabidopsis thaliana columbia
  unsure (1)..(463): unsure at all n locations
caattattatctaattccgtttcagctcgttctcgccaatacgcgttaccagactacgttggtatctncatttcgaatacggaaagattctcagaaaactctacgaactgggtgcaagacgagttttggtaactggaactggtgcaatgggatgtgctcccgcggagctggctcagcatagccgcaatggcgagtgctatggcgccctccaaacagcagccgctttgttcaatccgcaattagttgatttgatcgcatcagtcaatgctgaaattggtcaagacgtgtttgtagcagccaatgcctatcaaatgaacatggattatctatctaatcctgaacaattttgggtttgtgacaatcaaggtggcatgttgtggacaaggaccgtacaatggcgtatgactattcacaccagtcttgaatttgtgtcctaataggaacttaatatgcgtttgggatg

SEQ ID NO: 163140 - DNA, 436 bp, Arabidopsis thaliana columbia
ccgggaagcactccttcagaggggctagacggtagcctccctggtgacttcggatttgatcctctggggctttcatcggacccggacagtctaaaatggaacgtacaagccgagatagtccactgccgatgggctatgctaggagccgccgggatattcatcccagagttcctaacgaagatcggaatcctcaacactccgtcatggtacacggcgggagagcaagagtatttcacggacaaaaccacactctttgtcgttgagctcattttgatcggatgggcagaaggacgtagatgggccgatatcatcaagcccggtagcgtcaacactgacccagtcttcccaaacaacaaactgacgggcacagacgttggttacccaggtgggttatggttcgacccgtttggtttgggatccggtagcccggctaagc

SEQ ID NO: 163141 - DNA, 277 bp, Arabidopsis thaliana columbia
cggggccgcccaagccgtccgaacagatcatgaaagacattgttggacatagattgtctaaatttacaactgagcagaaagcagaactgaaagcttctaccgatttcgttgggctcaactactatacttcagtgttttcaaaccatttggagaaacctgatccttcaaaaccaagatggatgcaagattctcttattacatgggagtctaagaatgcgcaaaattacgccattggtagcaagcctttgaccgctgcattgaacgtttactcgagagg

SEQ ID NO: 163142 - DNA, 97 bp, Arabidopsis thaliana columbia
  unsure (1)..(97): unsure at all n locations
cggaaggtgtggtggaggctacagtgagccttttagaaagtttggccgntaagaaatggaagggggaggtttatgcaaccattgggaatattttgta

SEQ ID NO: 163143 - DNA, 351 bp, Arabidopsis thaliana columbia
agacacttcactttttctcaacaacccttcgttccaaatccctctgcttcatcaaaaggcggagtccgttccgtgaaaacagattcctacgccgacgctgctgcagcccccgtcacgaaagaagctcccgtgggattcacgccaccgcaggtagacccaaacacaccgtctccgatcttcgctggaagcaccggtggtcttctacgtaaagcgcaagctgaagagttctacgatattacgttggactaactcgaagaacagatctttgagatgccgacaggaggagcagcgatcatgagagaaggttcggatcttttgaagctagcgaggaaagagcagcgattagctttg

SEQ ID NO: 163144 - DNA, 363 bp, Arabidopsis thaliana columbia
gcgattctttcgtctcaacatttagggtttcagtagatcggctgatttcacatccacggtatggcgactcaaatcagcaagaagagaaagtttgtagcggatggcgtattctacgctgaattgaatgaggttctcacaagagagctagcagaggatggttactctggtgttgaggttatcgctactccaatgtttattgtgctcttcttactagctacgttttcttatattttatattatatttaattattcttttagttctatgtcttatattctgtagttacattatcttatatatttctaatatctcgttcaattgtgtctttctcttatttttgtttttatctctttatctttatttat

SEQ ID NO: 163145 - DNA, 483 bp, Arabidopsis thaliana columbia
gcaatgaagaaaatgaaaatgagcagcaacagtgtccatatacctgaagagtttatatttgacgctgggggcggtctggtggatgagaggctcctcttctttgctcaacaagcccagaaacgttgggggaaagctggcatggctaataatgtcatattctcagtagatagaggactctacattaagctaatgctttcaatgggttcagttaatagtttagctgttgatgcatccttatgagcatttgcaccataccatttatcgttcttattgaatgattttatattaattattttttgttttttcggtgttggttgggtatttttccttttattattttcatatttatttttttttttaattttttatttttattttatatttttattttaaattataattttttatcattattaaatttttaatctttaattatgttatatatttttttatttatgtttaattttatattttatttatatt

SEQ ID NO: 163146 - DNA, 460 bp, Arabidopsis thaliana columbia
attctcttctctctcgatatcatctaaatctctctcgatctcaatttcgcaaaatggctgacaagaagatcagaatcggaatcaacggtttcggaagaatcggtcgtttggttgctagagttgttcttcagagggatgatgttgagctcgtcgctgttaacgatcctttcatcaccaccgagtacatgacatacatgtttaagtatgacagtgttcacggtcagtggaagcaccatgagcttaaggtgaaggatgacaaaactcttctcttcggtgagaagccagtcactgttttcggcatcaggaaccctgaggacatcccatggggtgaggctggagctgactttgttgttgagtctactggtgtcttcactgacaaagacaaggctgcttgctcacttgaagggtggtgcttaaaaggttgtcatttcttcccctagcaaagatgcgctcatgtttt

SEQ ID NO: 163147 - DNA, 422 bp, Arabidopsis thaliana columbia
agagagaacaacaaccaaacactcatttcttcacatcttgagagaaaaaaacagagcaagtgtattagagatctcatggcgatggcggtctccggagctgtcctcagtgggcttggttcttcgttcctcaccggaggcaagagaggtgccaccgcattggcaagcggcgtaggcactggagctcagagagttggcaggaaaactcttattgtcgctgctgcggctgctcagcctaagaaatcttggatccctgccgttaaaggtggtggcaacttccttgaccctgaatggctcgatggctcgctaccaggagatttcgggttcgacccattgggtttggggaaagacccggcttttctgaaatggtacagagaggctgagctgatccatggccgatgggcgatggcagcggttcttgggat

SEQ ID NO: 163148 - DNA, 267 bp, Arabidopsis thaliana columbia
ggttacatggaggttactggattcacttctgatgtatgagagcagatatacaaaatggcttctgtgaatctttgttccaacatctctggtcaaattcttgctagcctcatcatgagcccacccaagcctggtgacgactcctatgaatcatacatagcagagaaggatggaattctctcatctttggcaagacgtgcaaagactcttgaagaggctttgaacaagctagagggagttactttctatatagcagttagagcttttttt

SEQ ID NO: 163149 - DNA, 296 bp, Arabidopsis thaliana columbia
gggtccaaccaacccgtccaattattccctgacgcacacacaactgaatttttttctttattctgattgtatctacatatttgcagtacgttctttttttttttggggggggttgctaactcaacggtagagtactcggcttttaagtgcgactagcatcttttacacatttgtatgaagaaaaggattcttccagatctgcggtagagttagtaagaccactactgatccagatatgactgaaaggggaagcaccatgagcttaaagtgaaagatgacaaaactcttcttttttg

SEQ ID NO: 163150 - DNA, 458 bp, Arabidopsis thaliana columbia
aaagaatggcttcaatttctgcaactttgccttcgccattgttactcacacagagaaaatccaatctcacatcgattcaaaaactcccattttctctaactcgaggtacgaatgatctttctccattatctcttactcgaaaccctagcagcatcagtctgatggtgaaagctagtggagaaagctcagattcatcgactgatctcgacgttgttagtacgattcagaatgtttgggataagtctgaagataggttaggtcttattggtttgggttttgctggtattgtagctctttgggcatcattgaatctcatcacggcaatcgacaaattgcccgttatctcgagcggattcgaactagttggtatcttgttctccacgtggttcacatatcgatatctcttgttcaaaccggacagacaggagctttcgaaaattgtcaagaaatcagtagcg

SEQ ID NO: 163151 - DNA, 200 bp, Arabidopsis thaliana columbia
  unsure (1)..(200): unsure at all n locations
aatgaaactgtcataaaggaaactgctgatgctanggtttcatctggcctggctgatttatgagacatacatgtcaatattgaggattgctggtccaatttgttacgcgattcagagggtcaattggttcctcatcctgaaaccttcccatcaggaattaagcttctttcttattttgtgcattcaaagggtcttattct

SEQ ID NO: 163152 - DNA, 366 bp, Arabidopsis thaliana columbia
ttgagatatcgatcttacgaagaagcaattatttcggtcccattgcttaccaagaaggttgtgaagaataggtctgctaagttcatcataccccagagtgaccgtattatcaccgtcaaggaaagctggaggaggcctaagggttttgattctaaggttgataagaaagttttaagttttgtttttgattcctcttgtttgtttcttttttgactagttattttatttctatctatgttttttgtaatctagtaattatctttgttaacattctctcgtttatctttttgtatgttttaatatttaattatatatttttctttctttcgttattaatattattttttctttctttctcttattatt

SEQ ID NO: 163153 - DNA, 267 bp, Arabidopsis thaliana columbia
accgaaacaaaaacaaagagatttaaacaagattagttattatggcgagcttgctagataaagccaaggacttcgtggcggataaactcaccgcgatccctaaaccggagggttcagttacggacgttgacctcaaagacgtgaaccgtgactcagttgagtacttggccaaagtctctgtcaccaatccttacagtcattcgattccgatctgtgagatcagtttcactgtccacagctccggcagggagaatggaaaggggatgt

SEQ ID NO: 163154 - DNA, 403 bp, Arabidopsis thaliana columbia
ggagaactgaaatagcaccagaccaaagagagaaattcttacagagattacagcaagtacagcaaggccatggtaacctcttaggcataccttctttatctggaggaaacgagaagcagttttcttcacaacagcaaaatcctcttttacagcagagctcttccatctctcctcatggaagcttgggaatcggagttcaggcaccaggttttaatgtcatgagttctgcctccttacagcagcaatcaaatgccatgagtcaacaattgggtcagcaaccttctgttgcagatgtagaccatgtcagaaatgatgatcaatcccagcaaaacttacctgatgattcagcttccatagcagcttcaaaagctattcaaagtgaggatgacctctaaggtctatt

SEQ ID NO: 163155 - DNA, 414 bp, Arabidopsis thaliana columbia
gtcaagttgaacaatggcttgatgtggaagcgaccacttaccacccaccgctattgaacttaacgcttcacataatgttcgcatcagtcatgggattcccatctgatgagaagctgatcaaggagagtgaagagaagcttgcgggtgttcttgatgtctacgaggcacatctctcaaagagcaagtacttggccggtgacttcgtgagcttggctgatttggctcacctcccgttcactgattacttggttggtccgattgggaaagcttacatgatcaaagataggaaacacgtgagcgcgtggtgggatgatattagcagccgtcctgcgtggaaagagactgttgccaagtattcattcccagcttaagatgtgttcatcttcttggtgatgtggtttgtgttttatgaga

SEQ ID NO: 163156 - DNA, 397 bp, Arabidopsis thaliana columbia
ctccaaagaacccgacaaagcgccatgtcgctcactatcccggcgaatctcgttctcaacccgagatctaacaaatctctcactcaatccgtacctaaatcctccgcaagattcgtctgctccgatgacaaatcctcctcctccacacctcaatccatgaaagctttctccgccgccgtcgccctctcttccatcctcctctctgctcctatgccagctgtcgctgatatctcaggtttgactccttgcaaggactcaaaacagttcgctaaaagagagaagcaacagatcaagaagcttgaatcttctcttaagctctacgctcctgaatctgcccctgctcttgctctcaatggctagatcgagaaaaccaaacgcaggttcgacaactaccgga

SEQ ID NO: 163157 - DNA, 419 bp, Arabidopsis thaliana columbia
atttcttcaagttcataacgctcggatcaatcaggaagacgaacttgaactttctttttttcatcattacccaaagctatgaggctcacaccaccaatagctccgccgtcatgaatccttctcttccaggtcaacacaagtcagagctccaaaaatggagtcatgcgattgttttgagacgcatgtgaatcaagatgatctgttagtgaagtaccaatacatctcagatgcgttgattgctcttgcatacttctcaatcccactcgagcttatctatttcgtgcaaaagtctgctttcttcccttacaaatgggtgcttatgcagtttggagcctttatcattctctgtggagctacgcatttcatcaacctaatgatgttcttcatgcattccaaagccgttgccattgtcatgacta

SEQ ID NO: 163158 - DNA, 465 bp, Arabidopsis thaliana columbia
acaacaacaaatcttaaacgttttactttgtgctgcactactcaacctcaatggccgcctcaacaatggctctctcctcccctgccttcgccggtaaggccgtcaagctttcccccgcggcatctgaagtccttggaagcggccgtgtgacaatgaggaagactgttgccaagccaaagggcccatcaggcagcccatggtacggatctgaccgtgtcaagtacttgggtccattctctggcgaatcaccgagctaccttaccggagagttccccggagactacggatgggacaccgccggactttcagctgaccccgagacattcgcaaggaaccgtgaactagaagttatccacagcaggtgggccatgctcggagccctaggctgcgtcttccctgagcttttggctagaaacggagtcaagttcggagaggcgggttggttcaaggccgtttcacagatct

SEQ ID NO: 163159 - DNA, 461 bp, Arabidopsis thaliana columbia
ggcttaacggtgttctgtccctccgacagcgctgttggtaagttcatgccgaaattcaaatccctgtctccggcgaacaagactgcgttagtgctttaccacggcatgccggtttaccagtcgttacaaatgcttagatcaggtaacggcgccgttaacacgttagcgacggaaggtaacaacaagtttgatttcaccgttcaaaatgacggagaagacgtgacgctggagacggacgttgtgacggcgaaggtaatggggacgttaaaggatcaagagccattgatagtttacaagatcgataaagtgttgttgcctagagaaatctacaaggccgttaagacgtccgctccagctcctaagtcgagtaagaaaaagcctaagaacgcggaggctgacgccgacggacctagcgccgatgctccgtcagatgatgatgttgaggtggctgacgataaaaa

SEQ ID NO: 163160 - DNA, 319 bp, Arabidopsis thaliana columbia
accttttgctcttccttttgattaatttattgtttgacaatctcctcctccttctccttcttcttcaaagttttgtcgcagtatctattgttcttacagagagaaaggaaagctttagtcttttaccagtttgatccaattctgggtttcactgaaaaaaagttgggagtttgattcttctaactgtagaagaaacagagtcaacagaagaaaactaaaaaagttgagatttttctctcacgcgctcaagaacttgagtatgtcttcttctgtagcagtgttatgggttgctacttcttttctaaattcagacccaatg

SEQ ID NO: 163161 - DNA, 400 bp, Arabidopsis thaliana columbia
aaagtttcaatggccgcctccacaatggctctctcctcccctgccttcgccggaaaggctgtgaacctttcccccgcggcatctgaagtcctcggaagcggccgtgtgacaatgaggaagactgttgccaagccaaagggtccatcaggcagcccatggtacggatccgaccgagtcaagtacttgggtccattctctggcgagtcaccgagctaccttaccggagagttccccggagactacggatgggacaccgctggactttcagctgatcccgagacattcgcaaggaaccgtgagctagaagttatccacagcaggtgggctatgctcggagccctaggctgcgttttccctgagcttttggctaggaacggagtcatgtttggagaggcggttt

SEQ ID NO: 163162 - DNA, 375 bp, Arabidopsis thaliana columbia
ctgaaaacatgcagtacaagaatctggggaaatcgggtttaaaagtgagcacgctctagttcggagcgtgggttacgttcgggaaccaggttgatgtgaaagaagcgaaatcgattcttcagtgttggcgtgatcatggagtcaatttcttcgataccgctggggtttacgctaatggtcgggctgaggagattatgggtcaagcgattcttgaactggattggcgtcgatccgatatcgccatctcataccaagatcttctggggaggatctggtcctaacgatatgggtttatctaggaaacatatggttgaaggcacttaagcttgtctgaaacgacttgatatggattacgctgatgggctctattgtcac

SEQ ID NO: 163163 - DNA, 393 bp, Arabidopsis thaliana columbia
tgagtatgcaagaagctgtttgcatcgacaaagtgaatgttacaggatactttgtatggtcattgttggataacttcgagtggcaagatggttacaaaaacagatttggactctactacgttgatttcaaaaataacctcacacgttacgagaaagaatccggcaagtattacaaggatttcctcagtcaaggtgttcgtccatccgcgctcaagaaggatgagctttaagctatttctgtttcaatgtgtttttcctatgttttactttgtgagtgaccaagattcatgaggtcttggttctaataaaaagagtttatttttcttctcatttttcattgtctacatgatttgccagatctacaaggctctggttataataaaatgatccttt

SEQ ID NO: 163164 - DNA, 303 bp, Arabidopsis thaliana columbia
cagtcactaacaacaacaacaacagtgtggatcatcccagtgactcaaacaccaacaacaataacattgtggatcatccgaatgacataaaaaacaagaacaatgttgacaacaaggacaataacagcagagacaagtaattaaataggaaacactccggtttagatgataccgatctatcggattgtaacttattcttctttcttaaaaaaattgtttaggagcaaacaaagattttatttgttagtgtattcaactgattacatttttagttaaaaaaatggattctttcttaaaaataaa

SEQ ID NO: 163165 - DNA, 346 bp, Arabidopsis thaliana columbia
gaataagaagaaaaagaagaagaagaagaagtatagaagcttatggcaggaggaggaacagaagcgtttcctgatcttggagagcattgccaagaccctgattgcaaattactcgattttctcccttttacttgcgacggctgcaaattggtgttttgtttggagcatagatcatacaagtcacataactgtccgaaatccgatcatgggagcagaacggtttccatctgtgaatcatgttcaatagctattgaaacaactttttttgtttaaaaatgtattcatttctttttttgatatatactaatagatttcttttatttttttttttatattatttttgttt

SEQ ID NO: 163166 - DNA, 462 bp, Arabidopsis thaliana columbia
gttttaagtcttcttcaagtcccagggatcatcaatccaatggctcagatcttagcagcttctccaacatgtcagatgagagtgcctaaacactcatcagccattgcatcatcatccaagttatggagctctgttgtgttgaaacagacgaagcagagcaacaacaaagtcagaggctttagagttcttgctctccaatctgataacagtactgtcaatagagttgagactcttctcaatttagacaccaaaccttactctgacaggatcattgctgaatacatttggatcggaggatctggaattgaccttagaagcaagtcaaggactatcgaaaagccggtggaggatccttctgagctacctaagtggaactatgatggttcgagtaccggtcaagcacctggtgaagatagtgaagtgattctatacccgcaggctatcttcagagatcctttccgt

SEQ ID NO: 163167 - DNA, 432 bp, Arabidopsis thaliana columbia
gttcggagaggcggtttggttcaaggccggttcacatatcttcagcgatggagggctcgattacttgggaaaccctagcttggttcacgctcagagcattttggccatttgggccacacaagttattttgatgggagccgttgaaggctacagagtcgcaggaaatgggccattgggagaggccgaggacttgctttaccccggtggcagcttcgacccattgggtttggctaccgacccagaggcattcgctgagttgaaggtgaaggagctcaagaacggaagattggctatgttctctatgtttggattcttcgttcaagccatcgtcactggtaagggaccgatagagaaccttgctgaccatttggccgatccagttaacaacaacgcatgggccttcgtcaccaactatgtttccggaaagtgagc

SEQ ID NO: 163168 - DNA, 454 bp, Arabidopsis thaliana columbia
cccttctcccaatctcatcttctccgaaaacctttcttctctcaaatttctgtgaaaacatgtctgacgacgagcaccactttgaggccagcgaatccggagcttccaagacctatcctcaatcagccggtaacatccgtaaaggtggtcacatcgtcatcaaaaaccgtccctgcaaggttgttgaggtttcgacttccaaaactggcaagcacggtcacgccaaatgtcactttgttgctattgatatcttcactgctaagaagcttgaagatattgttccatcttcccacaattgtgatgttccacatgtgaaccgtgttgattaccagttgattgatatcactgaggatggcttcgtgagccttctcactgacagtggtggcaccaaggatgatctcaagcttcccaccgatgatggtctcaccgcccagatgaggcttggattcgatga

SEQ ID NO: 163169 - DNA, 461 bp, Arabidopsis thaliana columbia
caacaacaaatcttaaacgttttactttgtgctgcactactcaacctcaatggccgcctcaacaatggctctctcctcccctgccttcgccggtaaggccgtcaagctttcccccgcggcatctgaagtccttggaagcggccgtgtgacaatgaggaagactgttgccaagccaaagggcccatcaggcagcccatggtacggatctgaccgtgtcaagtacttgggtccattctctggcgaatcaccgagctaccttaccggagagttccccggagactacggatgggacaccgccggactttcagctgaccccgagacattcgcaaggaaccgtgaactagaagttatccacagcaggtgggccatgctcggagccctaggctgcgtcttccctgagcttttggctagaaacggagtcaagttcggagaggccggttggttcaaggccggttcacaga

SEQ ID NO: 163170 - DNA, 242 bp, Arabidopsis thaliana columbia
gaccacacgcgtccggtgtccttgtggtagaatcgcgattccgatattcttctccgcgaatccaaatttccgaccagcgggtcgaaatcatcgacacagagcacgacggtaaaatcagcagcgacgatctccgtgcattctacgccggaatcccttccggtgaaaacaacgactagacggtgatcggaacgaaggtatcagtagcggacgcgtacaatgacggtattcgtgtgtttgattgt

SEQ ID NO: 163171 - DNA, 302 bp, Arabidopsis thaliana columbia
gtgtccttctggtagaatcgcgattccgataaccaccaccgtgaatccaaatttccgaccagctttcgaaatcatcgacacagatcacgacggtaaaatcagcagcgacgatctccgtgcattctacgccggaatcccttccggtgaaaacaacgacgagacgatgatcggaacgatgatatcagtagcggacgcgaacaaagacggattcgttgagttcgatgaattcgagaaagttctagaaacgacgccggtttctagatctggtaacggaggagaccattgattgattgaagatgtgt

SEQ ID NO: 163172 - DNA, 411 bp, Arabidopsis thaliana columbia
ctgaaaacatgcagtacaagaatctggggaaattgggtttaaaagtgagcacgctctcgttcggagcgtgggttacgttcgggaaccagctcgatgtgaaagaagcgaaatcgattcttcagtgttgtcgtgatcatggagtcaatttcttcgataacgctgaggtttacgctaatggtcgcgctgaggtgattatgggttaagcgattcgtgaactgggttggcgtcgatccgatattgtcatctctaccaagatcttttggggtggtccttgtctttactattattgttttaattttgtaattatatttgtttgtatgtatctaaagttttttttcattctttcttgtttttgactttactgttgtttattgttattattattctcttgtttcttttttttttttaatt

SEQ ID NO: 163173 - DNA, 409 bp, Arabidopsis thaliana columbia
ctgagttctcaggacttcgaaactcctctgctcttccctttgccaagagatcttcttccgatgagtttgtttccttcgtcagtttccaaacttctgcaatgagaagcaatggtggatacaggaaaggggtgaccgaggccaagataaaggtagccatcaatgggttcggtaggattggtaggaacttcttgaggtgttggcatggtcgtaaggactctcctcttgatgtcgttgtcattaacgacactggtggtgttaaacaagcatcacatctcctcaaatacgactcaactcttggaatctttgacgctgatgtcaaaccttcaggagactcagctctctctgttgatggaaagatcatcaagattgtatctgatcgtaacccatctaatctcccctggggggaact

SEQ ID NO: 163174 - DNA, 461 bp, Arabidopsis thaliana columbia
aaataacatgtggacttaaaaaattgttatgcaaaaagatttgtttttttcattggtcttcttctactacacgcatttgaatcagcagagagattaattcctcagctcggcgattcaattctcagaaaatgcacttaagcatctgagtaagatgagatcagaacgtggggaagatttgtgcttgagaattggagtcaaacaaggaggatgctcgggtatgtcctacacgatggactttgaaaacagagcaaatgcaagaccagatgattccactatcgaataccagggattcactatagtttgtgatccaaagagcatgctctttctttttggaatgcagcttgattacagcgatgctttgattggtggaggcttctctttctcgaaccctaacgctacacaaacctgtggatgttggaagtcttttgctgccgagatgtgaaccagtttcacacattgca

SEQ ID NO: 163175 - DNA, 430 bp, Arabidopsis thaliana columbia
cttgaaggtcaacaacgtcgagaataatggcatcatctctttgtgcttcttctgccatcgctgccatttcttctccaagtttcttgggtggtaagaaactgaggctgaagaagaagttgactgttccagctgtgtccaggccagatgcgtcggtgcgcgccgtcgcagctgatccagatagaccaatctggttcccgggaagcactcctccagagtggctagacggtagcctccctggtgacttcggatttgatcctcttggtctttcatcggacccggacagtctaaaatggaacgtacaagccgagatagtccactgccgatgggctatgctaggagccgccgggatattcatcccagagttcctaacgaagatcggaatccttaacactccgtcatggtacacggcgggagagcaagagtatttcac

SEQ ID NO: 163176 - DNA, 463 bp, Arabidopsis thaliana columbia
ggaagctttacgtagctaacgttggggactcctttgcggttttgggaaaggtcatcaaggccacaggtgaggttaatgcgcttcagctctcagctgagcataacgtgagcatagagtctgtgaggcaggaaatgcactccttacaccctgatgactcccatattgtcgtcttaaaacacaatgtctggcgtgttaagggcattattcaggtatcacgatccataggagacgtgtatcttaagaaatcggagttcaacaaggaacctttgtacacaaagtaccgattgcgggagccaatgaaaagacctatcttgagttgggaaccgtcgataaccgtgcatgatctccaaccagacgatcagtttctgatatttgcatcagacggactttgggagcagcttagcaaccaagaggctgttgaaatcgttcagaaccacccaagaaacgggatagcgaggagact

SEQ ID NO: 163177 - DNA, 244 bp, Arabidopsis thaliana columbia
gaagaacccgtgtccgtcttcgatcatatagaccgaaggttttcttcaatttcaaagtcagtggcgatgtcgcgggctggtcctgaagaaatttatctttcaacatcactcgctagttatctcgatagaaaactacttgtgcttcttagagatggtagaaagctaatgggaacactccgttcctttgatcaattcgccaatgcggatctagaaggtgcgtgcgagagggtaattgatggtgaac

SEQ ID NO: 163178 - DNA, 456 bp, Arabidopsis thaliana columbia
  unsure (1)..(456): unsure at all n locations
gtactctcaagagcccgataatatcaccaaatcttgcaaggcgagaggagccgatctcagggtccacttcaagaacactagagaaacagcgcacgccataaggaagctaccattgaacaaggccaaaaggtacttggaagatgtcatagctcacaagcaagctatccccttcacccgtttctgtcgtggtgttggtcgtaccgctcaggcaaagaacaggcattcgaacggacaaggtcgctggcctgctaaatctgctcaattcgttcttgatcttctcaagaatgctgagagcaatgctgaggtcaaaggtttggatgtcgatgcccttttcatttctcacatccaagtgaaccaagcagcaaaacagaggagaaggacatatcgtgctcatggaagaatcaatccttacatgtcaaacccatgccacattgagtngattttgtcagagaaaga

SEQ ID NO: 163179 - DNA, 448 bp, Arabidopsis thaliana columbia
atcttttcctccgaagaagaagataagaggttgaagaagaagaagatgccaggtccagttattgaggaagtgaatgaggaggctcttatggatgccattaaagagcagatgaagctccagaaggagaacgatgttgttgttgaggatgtgaaagatggagacgaagacgatgatgatgttgatgacgacgacgatgagattgctgatggagctggtgagaatgaggcttccaagcaaagtagaagcgagaagaaaagccgaaaggcgatgctgaaactcggaatgaaacctgttactgatgttagcagagtgactatcaagagatcaaagaatgtgttggttgtcatctcgaagcctgatgtgtttaagagtccgaacttctgagacctatgtgatatttggtgaggctaaaaatgatgacattgagctctcagttacaagcacaagc

SEQ ID NO: 163180 - DNA, 390 bp, Arabidopsis thaliana columbia
gtacgtgcaagagactaaggatcatgaaaggatcagaagccaaaggtttaggctgtggtgtatgagatatatcttcaagaaatctaacagagacacaaaagaacttgaagaaaaatagagtttcttttggttcagagaaatctctgtctgtgcttgggttgtcgggtttctcgggcaagatctatgttcattggattgaatccaattcatagcctttatttacctcatcggtaaaattcaaatgtaaacatgcttaatggtcttaagcatatgaaactggaacctaattacattttgtttcataaacagggcaaatggttgtccttaaatttgtggttatgtgtattacattaacaaaagtgttatgatgattgaagtgtttttttttaa

SEQ ID NO: 163181 - DNA, 307 bp, Arabidopsis thaliana columbia
gcgatccatcttcaattccatcaccgattttcttttccgactgggaataaaatgtcagaggggtactcaatcgagctatacttcgatccagcactaaaaaaccaagtattgaaagcatggaacgtctacgctcgtcgagaaatcaggaccaaatagatcaacactgagtctggtccacacataacactcttgtccacctcctgctttgattcaacgagactagaatccggcatcaaaaactacgtatcctagcatgaaccaatcattgatctcgatctcgactatcggtagcttttatagctacatc

SEQ ID NO: 163182 - DNA, 368 bp, Arabidopsis thaliana columbia
aaggaagaagacgttagagttggagctaattttttcccggagagacaaccaatcggaacatcagctcagagtgacaaggactacaaggaaccaccaccagctccgtttttcgaacctggtgagctttcttcatggtctttttggagagctgggatcgctgagttcatcgctacttttctctttctctacatcactgtttagactgttatgggagtgaaaaggacactctacttttttgctatcttttgatttcaatgtattacttgatcttttatttgtgattatcgtattatttttttcttctatttttgttgtttttcttttttattttttttattttttcggtgattatatttattatgtttata

SEQ ID NO: 163183 - DNA, 452 bp, Arabidopsis thaliana columbia
tctttcaatctctcttgattccaatccattcttcttcaagtgccgggttctcgggtcggatcttctaagtctagctagggataatggctactgtcactactcatgcctcggcctcgattttccgaccttgtacttcaaagccaagattcctcaccggttcttccggtaggttgaaccgcgacttgtcgtttacatcgatcggttcatcggccaaaacgtcgtcgttcaaggttgaagctaagaaaggagaatggttgcccggtttggcatcgcctgattatctcaccggcagtcttgccggtgacaatgggtttgacccgttgggtctagcagaggatccagagaacttgaaatggttcgtccaggcagagctggtcaacggacgatgggctatgctcggtgtcgctgggatgcttttgcccgaagttttcaccaagatcggaatcataaat

SEQ ID NO: 163184 - DNA, 464 bp, Arabidopsis thaliana columbia
attcaaagtcttctgttcttcattcacaaccaaagtcaactgttggtactcctgcatacatcgctccagaggtactgcttcgtcaggaatatgatggcaagattgcagatgtatggtcatgtggtgtgaccttatacgtcatgttggttggagcgtatccgttcgaagatccagaagagccaagagactatcggaaaacaatacagagaatccttagcgttaaatactcaatccctgatgacatacggatatcacctgaatgctgtcatcttatttcaagaatcttcgtggctgatcccgctaccagaataagcataccagagatcaaaacccatagttggttcttgaagaatcttcctgctgatctaatggacgagagccacacaggaagccagttccaggagcctgaacaaccaatgcaaagccttgacacaatcatgcaaatcatctctgaagccacaatt

SEQ ID NO: 163185 - DNA, 351 bp, Arabidopsis thaliana columbia
ctgaaattcaacttctagtcttctcctccaactactggcaaattagggtttctgagttcgagaaaattcgtagcagagtgtgaaaatggaaggaagcaaaagcgaggcagtgttcgattccatgaatctaaatcctcagattttcatcaacgaagcaatcaactccgtcgaagattatgtcgaccaagcttttgacttctatgcccggttcgtctctctcgctattgttgcaaagcttattctaacaaagggttttatttggttcttacttacatttttgcagtgatgcatccaaatctctcaaaatcaaaggatctgataaacaaaagtcacaagctttatcaaatggta

SEQ ID NO: 163186 - DNA, 289 bp, Arabidopsis thaliana columbia
aagagatcatcacgtgggaatccaactaaccaattgtattggcgtcaatgaccatgacatgttcatttgtccctaccgactgaaacctttcggcaaacatcttcagcaacagcagacgaagcctcacggtggtcaaagacttcgggagtgatagcacactgagctaggtgaacatgatgctcgatctgcacatgatgatgcggtgcggttcagtaataagctttctaagaatgacactaggaatattggtgctactggaattgatcgtaggaagagaaagatgggttta

SEQ ID NO: 163187 - DNA, 310 bp, Arabidopsis thaliana columbia
agaaacaaaagtttcctccacttgttgtttcaacataacaaaatcctcccctttcatatgttagttacgaggcgatgggaatcgcatccggcgaactcgccggacctcatcttacagttttttgggaatgaattccacggctacggtgacgatatgcctgagacattgcggaggttgacggagttgctgggttatgagaaggaagaagacggcgccggaatgaatgcagccaagaaaatcgcggcggaattgaatcgccgaaaagatgatataccggccttcagacgcttgcggtgttttgagcttgatc

SEQ ID NO: 163188 - DNA, 343 bp, Arabidopsis thaliana columbia
tgtgcactctccaaccggcgaacgaagaacaggctgtagctgcagtgtctgcttaaatgaagccactatgaagcgattcgcactcgcaccaaaacccacaatggggcgattcggactcataccggatccagaaacgtatctttactggcttttacttctcttcccagcctcatcatcactttcactttcacttcctgtacaatgtacatacgtagtcctaagttcttccctcatttatttaataaaatacatttctttatgttccactttcttatacgtataacattccatttggatgatgtgatcaccatcgtggttatatttatgccatatgatctctttg

SEQ ID NO: 163189 - DNA, 460 bp, Arabidopsis thaliana columbia
tgctagcggtgttatggccctccaggtgcaatgtgtgtttcaaaaggcatatgagaatggaattcgtgaagtcaaagttctgggagccaacatatgaggattgcctcaacctgattgctcgtgttcctgtgtgagctgcatatgtttatcgaaggatgtataagaatggtgattccattccctcagataaatctttggattatggtgcaaatttttcccacatgttgggatttgatgatgaaaaggtgaaagagctcatgaggctttacatcaccatccacagtgatcatgaaggtggaaatgttagtgctcacactggtcacctggttggtagtgcatagttggttcttgaagaatctccctgctgatctaatgaacgagagcaacacaggaagccagttccaggagcctgaacaaccaatgcaaagccttgacacaatcatgcaaattatttttgaag

SEQ ID NO: 163190 - DNA, 462 bp, Arabidopsis thaliana columbia
agagagaacaacaaccaaacactcatttctccacatcttgagagaaaaaaacagagcaagtatattagagatctcatggcgatggcggtctccggagctgtcctcagtgggcttggttcttcgttcctcaccggaggcaagagaggtgccaccgcattggcaagcggcgtaggcactggagctcagagagttggcaggaaaactcttattgtcgctgctgcggctgctcagcctaagaaatcttggatccctgccgttaaaggtggtggcaacttccttgaccctgaatggctcgatggctcgctaccaggagatttcgggttcgacccattgggtttggggaaagacccggcttttctgaaatggtacagagaggctgagctgatccatggccgatgggcgatggcagcggttcttgggatcttcgtcggccaggcctggagcggtgtggcatggtttgaa

SEQ ID NO: 163191 - DNA, 432 bp, Arabidopsis thaliana columbia
gtttcctccaaatttaatccgccgggttaaatttggatgccttttttcttcatgaaaggttggtttgtgaaactcgatgattctctcacgctctggctccgcgcttcatttgtgtggagtctcttcttcagcgccgtcgaagctcttatctcagaggttcaaggtctcgttcgctctcgcttatggctcatctgtttctttccgtttaagctctctcaatcgatctgatagaaaatgggttcgtgggtttgcgtctgctactgaagcagaagtcgagaaaaagggtaatgatactttttttgctgaccatacctgttcttggaagtctcttgggttatcagataatgtctctatagctcttcgagattctgggttcgattgaccatctcttacttaggctgtttgcatactcgttatattgtctgggaaaga

SEQ ID NO: 163192 - DNA, 415 bp, Arabidopsis thaliana columbia
agaaaatggaattgaagctctacaacacgatgacgcaacagaaagaagttttgattccaatcactcctggcaaaatcggattatacgtctgtggtatcaccgcttacgatttcagccatatcggccatgctcgcgccgccgtttccttcgatgttctttacagatacttgaagcatttggattatgatgttacttttgtccgcaatttcactgatgttgatgacaagattattgatcgtgctaataagaatggagaagacccgttagatttgagtaatcggttttgcgatgaatatttggtagatatgggtgctctgcagtgcctccctcccacccaccagcctcgtgtcagcgaacatatggacaacatcattaagatgatagaaaagatcattgagaaagattgtgggtatgt

SEQ ID NO: 163193 - DNA, 466 bp, Arabidopsis thaliana columbia
ctcatcttcaagccatctccgatcatcatcagacaatggcagcagctatggcaacagcaaccaagtgcatgtctctaaacccatctcctcctaaactccaaaaccaaaccaaatccaaaccattcatctccctaccaaccccaccaaaaccaaacgtctctctcgccgtcacaagcaccgccctagccggagccgtcttctcttccctcagctactctgagccagctttagccatccaacagatcgctcagctcgctgcagcaaacgccagtagcgacaaccgtggcttagctcttctccttcccatcgtcccagccattgcatgggtcctttacaacatcctccagccagctattaaccaggtcaacaagatgcgtgagagtaaaggtaatcgtgttggtctaggtaattggtgtggtcttgcagcgtcagggcttttgactccacctccggaggcttatgctgg

SEQ ID NO: 163194 - DNA, 447 bp, Arabidopsis thaliana columbia
  unsure (1)..(447): unsure at all n locations
aaatccctagctattaccttactcgtcgttctcttttgattttcatttcccgaagaagcgttttctcaggatatgcttctcgatctctgagaagaaagggatttgcaaatttgagaattcacattttggattaagatagaaacgatgtcgtctgagtcaccgaatttgcctgctgctgcgggaacagtaccagataatcatcctcctcctcctcctgttgttactgctgcagaagctggaagcgatgattcacctaaaggagtagcatcaaaactatctgctgctgggatttcaaattgggccaaaaacttgaaagttccacagccttttgcttccacacaaaacgactctggtgtcgaaaacaccgagaagtctgcgtttgcaaagtttacaagcgggttaggggttcgtttatcttcgaaatctnctcanacgaatgacactacc

SEQ ID NO: 163195 - DNA, 447 bp, Arabidopsis thaliana columbia
aatcgttgggaaaagtttgatgatacggagtggacaattcttggtgtagaaggagaatctgagagagagagagtcatggaagctctgaaaaccgcaacttttagccctatgtcggtgttatccgagaaaagatcagaaccacgaaagcctttctcgctccctaacctctttccaccaaaatcacagagaccaatctcccaagaaagcttcttgaagagattcaatggtggattggctcttctaacttctgttctaagcagtgcaacagctcctgctaaatccctgacgtacgaggaagctctgcaacaatctatgaccacttcttcatcttttgattcggatggtctgattgaagggatatccaattttgtcacagacaatcctttggttattgccggtggagttgctgcattggctgttccatttgttctgtctcaggttctgaac

SEQ ID NO: 163196 - DNA, 441 bp, Arabidopsis thaliana columbia
atctttttctcattcatcaaaagaaaaaaccaatgcaaaaaaaactcaaaacgtttttgaagataatgatgatgatgacgaagatgtttgttcagatcgctgtggtttgtctattggcgacgatggccgttgtgtccgcccacgagggtcaccaccactatgctccggcttcagcaccaggacccgtatctagctcaaccgttgtttcggccaccaatatgttcaccgtcttggctattgctgccgtggctctcgtcgttggttccaaccactaagttggttattacattcgtcgttttgtttcagcttctatgaaattgttctcttgacttttaatatattgtgaattattctcatttgtttttaactctctctatgttgatctgatttcttgaataaaataaaagtttattgaacgtgtgtttttaacaaataagttct

SEQ ID NO: 163197 - DNA, 397 bp, Arabidopsis thaliana columbia
ataatacagttgttaatcttggaaggaaagatcttagaccgcgtattgaggagacgaaagatgtgaaggacgaagtggaagatgaagaagggagcaagaatgaaggaggaggagacgtaagtactgataaggagaatggtgatgagattgtagagagggaggaggaggaaaaggctgtagaagagaataacgagaaggaagctgaaggtaccgggaatgaagagggaaacgaggattcaaacaatggagaaagtgagaaggttgttgatgagagtgaatgtggaaatgagataagtaatgaggaagctagggagatcaattacaagggagatgatgcgacaagtgaaggtatgcatggtacggaagacaagagcaatgaaatgggtgaagtttacag

SEQ ID NO: 163198 - DNA, 458 bp, Arabidopsis thaliana columbia
gctgaatatcggctttttcttgaaaaaaaccttgatatgagtggtggaggcttggacagccacgcttcggaaaacactgaatatgatatggaagggacgtttcctgatgaagatcatgtttcatccaaaagggatagcagaactcagaacctttctgaaacgattgatgaagaaggtttgggcagagtatcctctgaagctcaagaatatatcttacgtttgcagtcacaattgtcttctgtgaaaaaggaattacaagaaatgagacgaaagaacgctgccctacaaatgcaacaatttgttggcgaagagaagaatgatttgttggactatttacgatctttgcaacctgagaaggtagctgagttgtcagaacctgcggctcctgaggtgaaagagactattcattctgttgttcacggtcttttggcaactctatcaccgaagatgcactctaa

SEQ ID NO: 163199 - DNA, 457 bp, Arabidopsis thaliana columbia
gcccttggctctagaaccgaacgtgactctccatatatgacttttggagtcacaacattgagtttgaagaggagggaagaagtgagctagggattggttcagagtgaacataaatggctctcaaggcattagactacgatactctgaatgaaaacgtcaagaagtgtcagtatgccgtaagaggtgaactttatctccgagcttctgagctgcagaaagaaggcaaaaagattattttcacaaacgttgggaaccctcatgctttaggacagaagccattgacatttcctcgccaggtggttgcgctttgccaagctccgtttctactagatgacccaaatgttggaatgctatttccagctgatgctattgcaagagctaaacattatctttccttgacttcaagcggtttaggtgcttacagtgattcaagaggcctttcaggagttaggaaaga

SEQ ID NO: 163200 - DNA, 462 bp, Arabidopsis thaliana columbia
  unsure (1)..(462): unsure at all n locations
aaaaaaagagagaagaaaaatggtgttgacaatctatgctcctttattcgcttcttcaaagagagctgttgtgacattggtggagaagggagtatcattcgaaactgtcaatgtcgatctcatgaaaggagaacagagacagcctgagtatctcgcgattcagcctttcggtaaaatcccagtcctcgtcgacggagactacaaaatcttcgagtcgcgtgcgatcatgaggtatatagcagagaagtatagatcacaaggacctgatcttttggggaagactattgaagagagaggacaagtagagcaatggttagacgttgaggctacaagttaccatccaccactattggctttaacgctcaacattgtctttgcaccacttatgggtttccctgctgatgagaaangtattaaggagagtgaagagaagcttgcagaagtgcttgatgtctatgaagc

SEQ ID NO: 163201 - DNA, 445 bp, Arabidopsis thaliana columbia
ggcaagatctctatttttcttccaaaaaaggaaaaataaaaagatcataacttcagaatcaaagtttctctttgttcacattgttctatccatctgcacatttgattcatgtagtgactaatctcacagtctcgttctcaaatttactttatctgcttgattcgtttcgtgaatccaaatttagtctgaagagaattaagcttggcgcttctttggtgagaagcaagatggatatcgggtgtaaagttctcgtctttttcacatgtttcctcactgtgacagcagagatttacattgtgactatggaaggagaaccaatcattagttacaaaggtggtgataatggatttgaagcaactgctgtggaatctgatgagaaaattgatactacaagtgaactggtgacatcatacgcccgtcaccttgagaggaagcatgatatgct

SEQ ID NO: 163202 - DNA, 440 bp, Arabidopsis thaliana columbia
gcaggagcatggtttatgcattgtcacattgattcacatttgggatggggataatgatgttcggagatatgaatcgtcttctgtgtttgatttctctgcatctgcctcctccgctaaaaacgccggccttccttcagctgacgacgttttctctcagatttcagggccaccggagtttctaaacaaccgcacagaagcagataatgaagcttcagctagagatgcagaacatgcaaatcgtattagtcgcaaaaagaagaaagttaaaccaaaatgtgttgtcatggaagcaaaacctcaactagtaggaatccatgagagagtaagaaacgatattgatgcacccccatcttcagagagtggtgaaaagcggatatctactgcaaccaatcctaatgcagaagaatctgcagatctcttgaggatgtgtgtgcaatgcg

SEQ ID NO: 163203 - DNA, 327 bp, Arabidopsis thaliana columbia
gtgcctttgaacaacatgtttggctactccacttctctccggtccatgacacaaggaaaaggagaattcacgatggaatacaaagaacattctgctgtgtccaatgaagtccaggctcagctcgtcaatgcttatagcgccagcaaagctactgaataagcaaacccttcaatccaatatattatggtttgttttctcataatgttgacataatttatttatacggttcacacaaccatcaaaatcactcaacataaactgcctaatgggctatgtcagaaaatcacttatgtttattgggccattaggtaggtcacattttttggt

SEQ ID NO: 163204 - DNA, 429 bp, Arabidopsis thaliana columbia
  unsure (1)..(429): unsure at all n locations
gctgctaggtctcgagagaggaaacaggcttatcaggttgagttagagactttggctgccaagttagaggaggagaatgagcagcttttgaaggagattgaagagagcactaaagagagatacaagaagctcatggaggttctgattccggtcgatgagaaaccaaggccaccgtcgaggcccttaagcaggagccattccttggaatggtgaagtgtggtaaaaaaaacttttgtatgtaaaaaaaataaaaacatatgggcttgattactatattataatctatatagtaaagtgatggtgatatggttagtacttagttacctgtaatgtatctaagggatgtaatggataatacatagctttttgctgatttataagatatctatggaccaaannaaaaaaaaaaaaaaaaaaaaaaanaccccc

SEQ ID NO: 163205 - DNA, 269 bp, Arabidopsis thaliana columbia
agaggatgtcaacagaaggaacaggattaccctttggtctaagcaacaacctcttgggttggattctgtttggagtctttggtttgatctggactttcttcttcgtctacacttcatctctcgaggaggatgaagaatctggtctttcactctgaaggaagaatcaatctttcgtcttctcatttccattttcatgtgagaacatgaatcaaaagtgttcacccttctagtttcttgtaattgttaagtaaagactaaaaactattttc

SEQ ID NO: 163206 - DNA, 459 bp, Arabidopsis thaliana columbia
caccaaatctaaaacgttttactttgtgctgcactactcaacctcaatggccgcctcaacaatggctctctcctcccctgccttcgccggtaaggccgtcaagctttcccccgcggcatctgaagtccttggaagcggccgtgtgacaatgaggaagactgttgccaagccaaagggcccatcaggcagcccatggtacggatctgaccgtgtcaagtacttgggtccattctctggcgaatcaccgagctaccttaccggagagttccccggagactacggatgggacaccgccggactttcagctgaccccgagacattcgcaaggaaccgtgaactagaagttatccacagcaggtgggccatgctcggagccctaggctgcgtcttccctgagcttttggctagaaacggagtcaagttcggaggagccggttggttcaaggccggttcacagat

SEQ ID NO: 163207 - DNA, 266 bp, Arabidopsis thaliana columbia
gtccgttgaaactaagaaactctaacagagaatccggatgcttttctctgattcttctactctttcctaatttaccgattttctcgggaatccaaaatcccgtttctctttttctcgagttaaaaaactttcgatctgaagtcaattcagattcttcttggaagctcaaagaagaagaagagagaagagagagagactagtgatttggtttagttcggtggatcagaaaggtctctgctttgatctttgtagtacacgtggcgaaa

SEQ ID NO: 163208 - DNA, 294 bp, Arabidopsis thaliana columbia
ccgacgccgcgcgtacgagaggatgagaatagagagaggaaacagtttattttagaaaaaaaaaaaaaactttaaagaagggaaaaaaaaaggaaaaaaaggtttgatctggactttcttcttcgtctacacttcatctctcgaggagggtgaagaatctggtctttcactctgtaaggagcaacaaacattcaattggttgttcacctttttacatcacttcgactgggaaaaccgtggtaaaaaaaacttttgtatgtaaaaaaaataaaaacatatgggcttgattactat

SEQ ID NO: 163209 - DNA, 241 bp, Arabidopsis thaliana columbia
gtgaagtctgatgagagatccgttgtcgctacggcggttacgactgatacgtctgggattgaggttgatactgtgacggaagctgagcttaaggagaatggatttagaagtacgaggaggacgaagctgatctgtacgatcggaccggcgacttgtggatttgagcagcttgaggcgcttgctgagggaggtatgaatgtggcaaggcttaatatgtgtcacggtacgcgtgattggcacc

SEQ ID NO: 163210 - DNA, 445 bp, Arabidopsis thaliana columbia
agaccctaggtggtgttatgactaagattattccaaggaacaccacactgcctacttctaaatcagaagtcttttcaactgctgctgatggacagacaagtgttgagattaatgtgttgcagggtgagagggagtttgttagggataacaagtctcttggtagcttccgtctagatggtatcccccctgcaccacgtggagttccacaaatcgaagtcaaatttgacattgatgccaatggaattctatctgtcagtgctgttgacaagggcacaggaaagaagcaagacatcaccattactggcgcaagtacattgcccaaggatgaggtagaccaaatggtccaggaggcagaaagatttgcaaaagatgacaaagagaagagagacgcaatcgacacgaaaaaccaagcagattcagtggtgtaccagacagagaagcaact

SEQ ID NO: 163211 - DNA, 421 bp, Arabidopsis thaliana columbia
ccctctctctctttgtctctctatcatcaattatgcaaaaagcaattcgaccatacgagtcaccgtggacgaagaccgtgccgggcaatagcattttccttttaaagaatgaagataaaccatcatcatcatcatcatcattatcatggttaacatcaggatcaccaaagccaacatctataagcaataagagatcaagcaacctagttgtgatggagaatgctgtggtggtgtttgcaaggagaggctgttgtttgggacacgtggcaaaacggctgctactgacacatggcgtgaatccagtggtggttgagattggtgaagaagacaacaacaactacgacaatatcgtaagtgataaagagaaattacctatgatgtacataggaggaaaggtgtttggaggattggaaaatctgat

SEQ ID NO: 163212 - DNA, 118 bp, Arabidopsis thaliana columbia
ggtatggtcaacttgagtgatcatgttattatattttccgttgattgtgtttgatgataatgataacatcttttgatgctttcttcgtttatctctcttatataaaatgcacatgcct

SEQ ID NO: 163213 - DNA, 435 bp, Arabidopsis thaliana columbia
ctcatcttcaagccatctccgatcatcattagtcaatggcagcagctatggcaacagcaacgaggtgcatgtctctaaacccggctcctcctaaactccaaaaccaaaccaaatccaaaccattcatctccctaccaaccccaccaaaaccaaacgtctctctcgccgtcacaagcaccgccctagccggagccgtcttctcttccctcagctactctgagccagctttagccatccaacagatcgctcagctcgctgcagcaaacgccagtagcgaccaaccgggcttagctcttctccttcccatcgtcccagccattgcatgggtcctttacaacatcctccagccagctattaaccaggtcaacaagatgcgtgagagtaaaagtatcgttgttggtctaggtattggtggtggtcttgcagcgtcagggc

SEQ ID NO: 163214 - DNA, 444 bp, Arabidopsis thaliana columbia
catttataccggaacaaatggttatctggatggattagaaattggacaagtaagaaaatttggcgttcaattacgcacttacttaaaaacgaataaacctcagtttcaagaaatcatagcctctaccaagacattaaccgctgaagcagaaagctttttgaaagaaggtattcaagagcaactagaacgtttcctacttcaggagaaagtataaaaaacgaaacggattattcttaatttttgattctttagtcaattttactctgtaattttaattaattttttaagaaattctagaaatagaagtctataagtcaagtatatataatagaaagaagtatctaactaatatctggttaatattaaatcttaaagcattcagaatttctgtctgattctatgtatttcttatcgtttttcgaaatagatattatatataatata

SEQ ID NO: 163215 - DNA, 404 bp, Arabidopsis thaliana columbia
caacaacaaatcttaaacgttttactttgtgctgcactactcaacctcaatggccgcctcaacaatggctctctcctcccctgccttcgccggtaaggccgtcaagctttcccccgcggcatctgaagtccttggaagcggccgtgtgacaatgaggaagactgttgccaagccaaagggcccatcaggcagcccatggtacggatctgaccgtgtcaagtacttgggtccattctctggcgaatcaccgagctaccttaccggagagttccccggagactacggatgggacaccgccggactttcagctgaccccgagacattcgcaaggaaccgtgaactagaagttatccacagcaggtgggccatgctcggagccctaggctgcgtctttcctgagcttt

SEQ ID NO: 163216 - DNA, 429 bp, Arabidopsis thaliana columbia
ctaccacaggttcagatagaagccatcctatggggttttggaacagcgttgggagaacttcctccttactttatctccagagcagcaagtctttccggtggcaaaatgaaagaattggagacatgttctggtgacgataacggattcattgctaaacgcgtaaatcagatcaaaagctggttattgtcgcattcacaatatctcaacttcttcacaatcctgattcttgcttcggttcctaacccattattcgaccttgctggaatcatgtgtggacaattcgagaaaccgttttgggagtttttccttgcaaccttgattggaaaggcaatcatcaagacacatatacagacggttttcatcatatgcgtctgtaataatcagcttcttgactgggtagagaatgagctgatatatattctgagcttt

SEQ ID NO: 163217 - DNA, 448 bp, Arabidopsis thaliana columbia
atcttcttcaacacacactaagaagcttatgcatccatgagaactctcaatgggtttatgctgttttctggaggatcttgcctagaaactatcctcctcccaaatgggatggtcaaggagcttatgatagatcaagagggaacaggagaaactggatcttggtttgggaagatggtttttgcaactttgcagcttctgccgcggaaatgagctccggagaaggtagtggtggcggtggtggctcagcggcttatggaaatagtgattttcaacaataccaagggcttcagcctgaattgttcttcaagatgtctcatgaaatctacaattatggagaagggtctgtgaggataatttttcagcaaaaattaaatgatatttacacaaagaaatataaccttttttctatttatatttttggatatagtactttctctcttttgggttt

SEQ ID NO: 163218 - DNA, 427 bp, Arabidopsis thaliana columbia
ttcctccgtccccttcccctaatccccaaaactcacatataaaaatctctccttttttcatcgaagcatataacacaacaccgacaaggagattcctttaactatggcgaagaaagcaagaattgttataatcggagctggaatggctggtctcacggcggcgaacaagctctacacaagctccaacaacaccttcgagctctcagtcgtcgaaggcggttctagaatcggcggtaggatcaatacctctgagttctcatcagagaagattgagatgggtgccacgtggatccacggaatcggtggaagccctgtttatagaatcgctaaagagactggttctttagtctctgatgagccatgggagtgtatggattccaccattgataaagctaagacctttgctgaaggtgggttcgagattgag

SEQ ID NO: 163219 - DNA, 364 bp, Arabidopsis thaliana columbia
gagagagctttttagcttcacatttcttcactttcacacacttttacttctttctctcttctcttctcttctccagatctgatcccaaacctttgattcattgttgttgttctctgctgctttatcagagagcatcatcatgtacggaagagatccatggggaggtccattggagataaacactgcagattccgccaccgacgatgatcgtagtcggaatttaaacgatttggatcgtgcggctctttcacgtccactagatgagacgcagcagagttggttacttggtccaacggagcagaagaagaagaagtacgtcgatctcggttgtattatcgttagccgcaagatcttcgtctggact

SEQ ID NO: 163220 - DNA, 443 bp, Arabidopsis thaliana columbia
ctttgatccaaaaaaaaattcatctttctatatttgttgcagtgcataagaagattaacacagtgttcacgagagagagagattaaagacagagatttctgggttttaacagtaggaaatgaatattgttggattaagaagcgatcggagaaagtagcaaaaatcgggagaggaaagggatattcgaaaaccctaattttggaagatcattcatttgagagaaaagctgttaaatttgagggctttagatcgaatttgatatctggggttaatgggttttttgaagaagttaacgggtatacttggttttggtcataacgatggtggtggtggtcatggagctgtgagagatgaagatggtgatggtggagataacaacactggaactgtttttggggatggagataaaccttgggaagagaattagacgagatttctttgaa

SEQ ID NO: 163221 - DNA, 391 bp, Arabidopsis thaliana columbia
  unsure (1)..(391): unsure at all n locations
cgtcacggaaagtacatggcttgctgtttgatgtactttggtgatgtcgtccccaaggatgtgaacgcagctgttggcaccatcaagaccaagcgtactattcagtttgtggactggtgtcctactggattcaagtgtggaatcaactaccagccaccaactgttgttccaggaggtgatcttgctaaagtccagagagctgtgtgtatgatctcaaactccaccagtgttgctgaagtgttctcccgtattgatcacaagtttgatcttatgtacgcaaaacgtgctttcgttcactggtatgttggtgagggtatggaagaaggagaatnttcagaggctcgtgaggatcttgcagcattggagaaagattacgaaaaggttggtgctg

SEQ ID NO: 163222 - DNA, 381 bp, Arabidopsis thaliana columbia
cgacaatgcattgtttttcaataagtacaatggaaaacaaagagattagagagagtaacacaaaagcagaaaacaagttccctttttaaacatccttagcaatgagatcaccattgagaaactttctgtaggcagcaacgggccaaatgaaaccacggaagatgatccgactagccaaaggaacattgatgatgatctcttttattgcgggtttcttctcaccactaatagctattaagtagcttgttccaacccacccgatccatccagcaatgttgaggaaaagattccctggagttatgaactcttcccaattccgtttgtcttcgttactatcccggcgaattttgttttcaacccctgatttaacaaaatttttac

SEQ ID NO: 163223 - DNA, 331 bp, Arabidopsis thaliana columbia
ctctctttctttctctctctctctccatctctctctctttctcttgcttttgttgtcactcatctttgttctctattatagtttccattcaagaaaatcgaatataaaccctactacttcgatcgatgttcatatctgtctttatttcaaccaaccaacgaagataggataaaaacatatccacaaaggctagaaaccatgcgaaataaccattcccttcgtctccaattgtggttccgtacactatttactgttggtgtagtcactcttcttatgatccgtgcgtttgtattacaaaacaacaaggaggacgacaaaacaaaagagatta

SEQ ID NO: 163224 - DNA, 445 bp, Arabidopsis thaliana columbia
cgttaggtctcaaaggctctctctgtctctttctcaaaaatcatctgcaggaagtgaatcgtcaaaaccgagtttggaggatctgtcttgaggagtttttttttggttgagaaatggcttcgaaaaggatcttgaaagagctcaaggatctccagaaggatcctccaacttcctgcagtgctggcccagatgctgaagacatgtttcattggcaagctacaataatgggtccatctgatagtccttattcaagcggcgtctttctcgtaaccattcacttccctccggattattctttcaaaccaccaaaggttgcattcaggacaaaagtgttccaccctaatgtcaacagcaatggaagcatttgccttgacattttgaaagaacaatggagtcctgcactcaccatatcgaagggtttgctttcgatatgttcattgttaac

SEQ ID NO: 163225 - DNA, 437 bp, Arabidopsis thaliana columbia
agaatcttgaaaatcagtcatgggttctggaaaagagcgtgacactttcgtctacctcgctaagctctctgagcaagctgagcgttatgaagaaatggtggaatcaatgaaaagtgttgcgaaattgaatgttgatctgacggtggaagagaggaacttactctctgtgggttacaagaacgtgattggttcaaggagagcttcgtggaggatcttctcgtcgattgaacaaaaggaagcagtgaaagggaatgatgttaatgtaaagaggatcaaagagtatatggagaaagttgagttagagctttctaacatatgcattgatattatgtctgtcttagatgagcatctcattccttcggcttccgagggtgaatctactgtcttcttcaacaagatgaaaggtgactattaccgctatcttgctgagttcaaat

SEQ ID NO: 163226 - DNA, 443 bp, Arabidopsis thaliana columbia
  unsure (1)..(443): unsure at all n locations
tcctggttacaaaactcgttacgatgatgttgatctcattaccatcagagaaaacacggaaggagaatacagtggccttgaacatcaggttgttagaggtgtggtggaaagtcttaaaatcattacccgtcaggcgagtttgagagttgcagagtatgcttttctctatgccaagactcatggaagagagagagtttctgctatccacaaagccaacattatgcagaaaactgacggtctctttctcaagtgttgtcgtgaggttgctgagaagtatcctgagatcacttacgaggaggtcgttattgacaactgctgtatgatgcttgtgaaaaacccagcactttttgatgtcttggtgatgccaaacctgtacggtgacattattagcgatctgtgtgccggattggtggaggactaggattgactncaagttgtaatat

SEQ ID NO: 163227 - DNA, 334 bp, Arabidopsis thaliana columbia
agattgatctgatttgctttgttgttttctttctgctacaagtagataaaaaatggcgtggggcattgcagcacgctctttcgtctccgctacagctagagctccgtctctccgatctccggcgccaacgctttcccggcttcggcctttccaatcctctttgccccgccgccgatttgcctctttcactaattccaggaatttgggagagcttggatgcacagaggcattcttgcctctggacaatgttgtggctgcagcgagactcacatctcaccttaatggtaatttgcgaggcgttttggaactctgtaacggggcttgaatgcacaaa

SEQ ID NO: 163228 - DNA, 333 bp, Arabidopsis thaliana columbia
ttcgtttcttgtgagatcatctaaaaaatggcttcgactgtttcgctttctttactcagcggcggcagtggagctcttcaggcgcgttgcgcaagaaccgcgcatgttagcccacgagcggcgcattctaacaaacccgcgctttcttcgttctcgctgaccggcgcctctcgcaggaatctgttattttcgttgacggcagcgacggtagtgacgggacttcagcctgcatcaatggcggagaatattccgttatttggtataagaaagaaacttgagaaagcaggaggaagaagcgggggagatcgtgaaagaaggctttgagacggctga

SEQ ID NO: 163229 - DNA, 441 bp, Arabidopsis thaliana columbia
gcactactcaacctcaatggccgcctcaacaatggctctctcctcccctgccttcgccggtaaggccgtcaagctttcccccgcggcatctgaagtccttggaagcggccgtgtgacaatgaggaagactgttgccaagccaaagggcccatcaggcagcccatggtacggatctgaccgtgtcaagtacttgggtccattctctggcgaatcaccgagctaccttaccggagagttccccggagactacggatgggacaccgccggactttcagctgaccccgagacattcgcaaggaaccgtgaactagaagttatccacagcaagtgggccatgctcggagccctaggctgcgtcttccctgagcttttggctagaaacggagtcaagttcggagaggcggttttggttcaaggccggttcacagatcttcagcgatg

SEQ ID NO: 163230 - DNA, 402 bp, Arabidopsis thaliana columbia
atcttatcaatggcttcctcactcgtctcatcttttcaacccaggtcagcatttttgggagatagaaatgtgttcaaggtctcaagcacaccttttgctcaagtgggttactccagtaagaccattgagtgcaaagaatcaaggataggaaagcaaccgatcgctgtaccttccaatgtaaccattgcattggaaggtcaagacttgaaagtgaagggtccattaggagagctggctttaacttacccacccgaagttgagcttacaaaggaagaatccggtttcttaagggtcaaaaaaaccgtcgaaactagaagagccaaccaaatgcacggccttttcaggacgcttaccgataacatggttgtgggagtatcaaaaggatttgggaaaaagcttata

SEQ ID NO: 163231 - DNA, 429 bp, Arabidopsis thaliana columbia
gagaattggtgtaagagaaacgattgaggttttctcttattatctaaacccaccaagtctttcaggattttagccagagaagcttgagtctttgattagggacatgtcaacctccgccgcttccttgtgttgttcatcaacccaggtcaatgggtttggtcttaggcctgaaaggtcgcttctttaccaacccacttccttttctttctccagaaggagaactcatggaattgtcaaggcctcatctcgggttgataggttttcgaaaagtgatatcattgtttctccctctattctctcggctaatttcgccaaattaggcgagcaggtaaaagcagtggagttggcaggttgtgattggattcatgttgatgtcatggacggtcgttttgttcccaacattactatcggacctctcgtggttgatgc

SEQ ID NO: 163232 - DNA, 340 bp, Arabidopsis thaliana columbia
gcagcaagggaaaagtataattgtggcaggttttgctgaatcgaagaaggatcatggtaatgaaatgattgaaaagttggaagctgggatgcaagatatgcttaagatagtggaagatcgaaaaagagacgcagttgctccaaaacagaaagaaattctcaaatatgttggcggctgagatcttcatgtggggcattcgcagaatagaagaggatatggttgatggctttccatatgaagtgccggaagagtatcggaacatgcctttccttaagggaagagcttgtgtggacattaaggtcaagatcaaggacaatttcaaacatgaggactgtgtggt

SEQ ID NO: 163233 - DNA, 318 bp, Arabidopsis thaliana columbia
gctaaggagaggcgaattcgaatcgagaagatggtgtctgggtcagggatatgttcaaagcgtgtcgttgttgacgcacgtcaccatatgtgtggtcgtcttgcttcgatcatagctaaagagttgctcaatggacagagtgttgttgttgtccgatgtgaggagatttgtttgtctggtggtttggttcgtcagaagatgaagtacatgaggtttcttaggaaacgcatgaacactaaaccttctcatggtcctattcatttccgtgcttcgtctaagatcttttggcgtaccgttcgtgggatgattccacacaag

SEQ ID NO: 163234 - DNA, 410 bp, Arabidopsis thaliana columbia
attaacagttccggatatgccttcgccgccgatgccatccggaatggaatcttcaccttctccaggacccatgccaccggcaatggcggcttcgccggattcaggagctttcaatgttagaaacaacgtcgtaacactttcatgcgttgttggagttgttgcagcccattttctcctcgtttgaaatgattattgaattggtcagcctcgatcgttttcttgtaatttaccttcatttttttccctcaaattattagtggtcatcattttataatatttgagtttgtgtttgatgtacgattcagacatttgtttgcattatgtgcttaataagtttatcgttgactctacttgaagagagactttgtatgtgatgtaaatttcttctatctatggaacattgcattcgt

SEQ ID NO: 163235 - DNA, 388 bp, Arabidopsis thaliana columbia
gtccacatctttctcctttggtggcaaacacatcgactgatagagagaaacgatggcgtcgaactggcttatgagctgtggcatagccgccgtgtccccttcgcttctctcttcttccaagtctaaattcgtatccgccggagttccactcccaaacgccgggaatgttggtcgtatcagaatggctgctcactggatgcctggcgagccacgaccagcttaccttgacggttctgctcctggtgactttgggtttgacccacttgggacttggagaaagttccagcgaaccttgagagatacaaagagtcagagctgatgcactgtagatgggctatgctcgctgttcctggggatttgggaccagaagcattaggatatggaaact

SEQ ID NO: 163236 - DNA, 424 bp, Arabidopsis thaliana columbia
cttctatctctcacaattcagcaatggcttcttcttttgttacctctagcttgaagcctttagccatggccgattcttcctcttctaccattttctcccatccttccatctcctctaccatctcttcctccagaattcgcagctccagtgtttccctccttaccggacgcattaacctgcccctctctttctctcgcgtctctctatctcttaaaaccaaaacccaccttaaaaaatccccctttgtctccttcgttgcccagacttcggattgggctgaagaagggggagaaggaagcgtcgctgttgaggagaccgagaacagtttagagtcacaagatgtgagcgaaggagatgagaacgaatgagatgcgagcgaaagagatgtgagcgaaagagatgagagcgaatgaaatgtgagcga

SEQ ID NO: 163237 - DNA, 445 bp, Arabidopsis thaliana columbia
gggaaccctatctctctcatcttctctcaaaccttcactcgtttcatcaagactcaattcatcttcctccgcatcttcttcttcgtttcctaaaccaaacaatctctacctcaaacccaccaaactcatttcaccacctctcagaacaacttcaccatcgccattgagattcgccaatgcttcaatcgagatgtcgcagacacaggaatcagctattcgcggagctgaatctgacgtcatgggtcttctccttagggaacgaatcgtctttctcggtagtagtatcgacgatttcgtcgctgatgctattatgagtcagttgcttctcttagatgctaaagatccaaagaaagatatcaaactctttatcaattctcctggtggttctctcagtgcaaccatggctatatacgatgtggttcagcttgtgagagctgatgtttcg

SEQ ID NO: 163238 - DNA, 432 bp, Arabidopsis thaliana columbia
agttagtcaccaaaaaaaaaaaaaaaacacaaaaagtttcaatggccgcctccacaatggctctctcctcccctgccttcgccggaaaggctgtgaacctttcccccgcggcatctgaagtcctcggaagcggccgtgtgacaatgaggaagactgttgccaagccaaagggtccatcaggcagcccatggtacggatccgaccgagtcaagtacttgggtccattctctggcgagtcaccgagctaccttaccggagagttccccggagactacggatgggacaccgctggactttcagctgatcccgagacattcgcaaggaaccgtgagctagaagttatccacagcaggtgggctatgctcggagccctaggctgcgtcttccctgagcttttggctaggaacggagtcaagttcggagaggcggttt

SEQ ID NO: 163239 - DNA, 414 bp, Arabidopsis thaliana columbia
ggggaggcaaaggtcaaggtaaatccttccagtgtgagcttgtcatggccaagatgggtatcaacccaatcatgatgagtgctggagagcttgagagtggaaacgcaggagaacccgcaaagcttatccgtcagaggtaccgtgaggcagctgacttgatcaagaagggaaagatgtgttgtctcttcatcaacgatcttgacgctggtgcgggtcgtatgggtggtactactcagtacactgtcaacaaccagatggttaacgcaacactcatgaacattgctgataacccaaccaacgttcagctcccaggaatgtacaacaaggaaagagaacgcacgtgtccccatcatttgcactggtaacgatttctccaccctatacgctccttttatccgtgatggacgtatggag

SEQ ID NO: 163240 - DNA, 351 bp, Arabidopsis thaliana columbia
  unsure (1)..(351): unsure at all n locations
ctcatgctctacgtatccaagatgattccagcctctgacaagggtagattctttgccttcggtcgtgtctttgctggtaaggtttctactggtatgaaggtcagaatcatgggtcccaactatatccctggtgagaagaaggatctgtacactaagagtgttcagaggactgtcatttggatgggtaagaggcaagagacagtggaggatgtcccttgtggtaacactgttgctatggttgggctggatcagttcatcaccaagaatgctacattgactaatgagaaggaagttgatgctcaccccattcgtgctatgaagttatatgagactcctgttgntcgtgatgct

SEQ ID NO: 163241 - DNA, 392 bp, Arabidopsis thaliana columbia
gaagaacaatggcttcctctatgctctcttccgctactatggttgcctctccggctcaggccactatggtcgctcctttcaacggacttaagtcctccgctgccttcccagccacccgcaaggctaacaacgacattacttccatcacaagcaacggcggaagagttaactgcatgcaggtgtggcctccgattggaaagaagaagtttgagactctctcttaccttcctgaccttaccgattccgaattggctaaggaagttgactaccttatccgcaacaagtggattccttgtgttgaattcgagttggagcacggatttgtgtaccgtgagcacggtaactcacccggatactatgatggacggtactggacaatgtggaaagcttcc

SEQ ID NO: 163242 - DNA, 435 bp, Arabidopsis thaliana columbia
agttgcagagcgagaaaaaatggcaaccatgtctgctcttcagagctcttttacttctctttctctatctcccagctcttccttcctcggccagcgtttaatttccccgatttccctctccgtcacttctccggtcaagcccgctgagaacccatgtcttgttcttgcaaagctcaagcgttgggaacgaaaagaatgcaaaccaaacagtcttccgattctccacaaaatgcatgtcaagtttggagatacagtcaaagtaatatctggacgcgacaagggtaaaatcggagaggttactaagattttcactcacaacagtaccattgtgatcaaagatgtgaacctcaaaacaaaacacatgaagagccgagaagagggagagcctggtcaaattgtcaagatagaagcacctatccacagctcaaatgtgat

SEQ ID NO: 163243 - DNA, 447 bp, Arabidopsis thaliana columbia
ctaagctctttctctgaacctacgcttctgctaagctattctaagagaagccagactagcaataaacccttcattttaagcattctgtttccttcttgagaaacctagatattttggtttcttgtatccggtgatgaagatacagtgtgatgtgtgtgagaaagctccggcgacggtgatttgttgcgccgacgaagctgctctctgtcctcaatgcgacatcgagattcacgccgctaacaaactcgttagcaagcaccaacgtcttcatcttaattccctctccaccaaattccctcgttgcgatatctgccaagagaaggcagctttcattttctgtgtagaggatagagctctgctttgcagggactgcgatgaatccatccacgtggcttattctcgatctgctaatcaccagaggttcttagccactgggatcaaagtagc

SEQ ID NO: 163244 - DNA, 382 bp, Arabidopsis thaliana columbia
  unsure (1)..(382): unsure at all n locations
aaaaataattaagagagaaaaaaacaaaaaacattttccatctctctctctctctctctcgcctgcttcaagaaatggatcggcaaagttccgatgacatcatgaaatttctcgacggcatggctagctccgacgatgttctttttggcttcctcgacgaaggaaaccactcaccggaggattataacttcgccgccggcgacgaatccgaagttgacaacgataccaccgattgtaattcagaagagaacagaaaattttggcaagaacacgaacaacttctncaggcgacactgtataggacacgttcaattgagacaaagataagacaagcaactaaggaagcgttgaaagtagttagatcaaagggtttggtatgtgt

SEQ ID NO: 163245 - DNA, 446 bp, Arabidopsis thaliana columbia
  unsure (1)..(446): unsure at all n locations
aaaacaagtagaaactttaaaacgagagagagagaaataaatggcgacatcgggaacgtacgtgacggaggttccgttgaaaggatcggcggagaaacactacaagagctggaagagcgagaaccatgtcttcgctgacgccattggccaccacatccaaaatgtcgttgttcacgaaggcgaacatgactctcacgggtctatcaggagttgggactacacatatgatggaaagaaggagatgttcaaaggagaagagagagatagatgatgagaataaaacattgacgaaaagaggactggatggtcacgtgatggagcatctcaaagtatttgatatcatctacgnaattattcccaaatctgaagatagctgcgtctgcaaaatcactatgatatgggagaagcgcaacgatgactttcccgaaccagcggctacatgaaat

SEQ ID NO: 163246 - DNA, 440 bp, Arabidopsis thaliana columbia
aaaaagaacaatggcagcgagtgcatctccaatggcgagccagctaaggagcagcttctcctccgcttctctttctcagcgtctcgccgtcccgaagggcatctccggtgctcctttcggtgtttctccgaccaaaagagtctcttccttcactgtccgagctgttaaatccgacaagacaacattccaagtagttcaaccaatcaacggtgatccattcatcggaagtttggaaactccggtgacatcaagcccattgatcgcgtggtacctttccaacctccctggataccgtaccgccgtcaaccctctccttcgcggtgtggaagtgggcctggcccatggtttcttcttagtgggcccattcgtcaaagctggcccattaaagaacactgcttacgccgggtcagacgggtctttagccgcggctgggctggtag

SEQ ID NO: 163247 - DNA, 447 bp, Arabidopsis thaliana columbia
gtttcgtctttcgacttatggtttgttttggattagacatgccatcatacggtcaatgacaacttcaaacttcactcgtgtcccatttggacttgaatcggttagagtggagatatataaagcaaagactgagctatggtttgagatgggaagacctccaacggaggacgaggtagttgagagactcaagataacacctgagagataccgtgaagtattgagggctgcaaaaccggttttgtcactaaattcaaaacattcggttactcaagaagaattcatcaacggaatcacagatgttgatggtgttggagctaataacagcagacagcctgctcttctcagctcgctctcgacgatgtgctcgattcattgaagccgaaagagagtctggttattcgacagaggtacggtcttgatggaaaaggcgacaggactctaggagag

SEQ ID NO: 163248 - DNA, 394 bp, Arabidopsis thaliana columbia
atcagcggtaccaacagcaacagaatctgaggcccctagttcttctccatatccgttttccatgatcataatttccggatttgcgtatttgtccttaatgtacttcaacagacttctaaaacctctcgagtaaacgttcaatgcagcggtcaaaggcttgctaccaatggcgtaattttgcgcattcttagactcccatgtaataagagaatcttgcatccatcttggttttgaaggatcaggtttcttcaaatggtttgaaaacactgaagtatagttagtgagcccaacgaaatcggtagaagctttcagttttgctttctgctcaattgtaaatttaggcaatctatgtccaacaatgtcttttatgatctgtggataatctccaaatgta

SEQ ID NO: 163249 - DNA, 427 bp, Arabidopsis thaliana columbia
  unsure (1)..(427): unsure at all n locations
gctacggctactacctctgaccccaagggcttttctgtatactcaggatagcgaagctcctgcgcttgtcttcccttccgcaagaaactttctcaccacgagttcgtgtccatcggctccttccagacttctgcaatgggaagcagtggtggatacaggaaaggtgtgactgaggccaaacttaaagtggccattaatggattcggtcggatcgggaggaacttcctgagatgacggcatggtcgcacagactctgctctngatatcattgccactaatgacactggtggcgtcaagcatgctgcgcatttacttaaatgcgactctactctcgaaatctttgatgctgatgtcaaacctattggagagactgcaatctctgatgatggaatgatcatccaagttgtgtctgaccgaaacccgtctc

SEQ ID NO: 163250 - DNA, 270 bp, Arabidopsis thaliana columbia
cgaggttgaagattaatcggacaaaggagatttgaagagtgggaaaaaccgccaggaggaaggaaccccggtgcgggggagaaagagatattggtgtgccgattaacaccaatgcggtgacacttgtggggcacgcgctctcggggatatcggcgattatggggctgggttggggtatcacatacacaggtggattgggctgggaagctactaacaagaatctcatatttaatctgcatactgttctgatgctcatcggatttataatct

SEQ ID NO: 163251 - DNA, 354 bp, Arabidopsis thaliana columbia
gtttatgtttgagatttagtaatggaatgagttgcatttgatgaaaaccagtagtagaattccctctcatttttgttttgatgagttttcgtttacaaattgcctctctttttattctcagcgacttatggcttatatatttgatttcatctttgacctccaataaataaaagaatcagctacataagaacataacggggacgaacatactaactgaaatcaagtctaagaaaagaaaacctacaaaaataaaaaaggggggggcgcttttaggggtcccaaatttacgatcccttccttgcccggtggtggtttttttatatggtgccctaaattaaattatttggcctgggt

SEQ ID NO: 163252 - DNA, 409 bp, Arabidopsis thaliana columbia
aatctcgcacgaggagacacagtaaacatattccctggtgccatctccagtgatggccgatcatataatgaacagctattcaatgcaggagcagatgtgcttaggagaataggtgaagagggaagaatcattcaagagtttatggagttaggcacaaaagccaaagctgctgcttctgaagctctggatgctgaagctgcacttggggaaataccagacgagttccttgacccaattcagtacacgctaatgagagatccagtaatacttccaagctcaagaatcacagttgatcgtcccatcattcaacgtcatcttctcagcgacaatcatgatccatttaaccgagcacatttgacatcggatatgttgataccggacatcgagttgaaagcgaaaatcgatgagt

SEQ ID NO: 163253 - DNA, 453 bp, Arabidopsis thaliana columbia
cataagtttgtctattaaagatggaatcaaagtcgttctggatcgttactcttcttctctgtggaacaattcaattagcgatttgcagatcagaagagaaaagcacagagaagacgatgatgctaggaggcgttcatgatctccgaggaaatcagaacagtggagagatcgagagtctcgctcgatttgccattcaagaacataacaaacaacagaacaaaattcttgagttcaagaagattgtcaaagcaagggagcaggtagttgcaggaacgatgtaccacttaaccctagaagcaaaagaaggtgatcagactaagaattttgaagccaaagtgtgggtgaagccatggatgaacttcaaacagttgcaggagttcaaggaatcatcttcttgaatttcacttgttcaagttaatgattacaaatgctctgagaggaaataattatatg

SEQ ID NO: 163254 - DNA, 410 bp, Arabidopsis thaliana columbia
ccaaaaaaaagaaaacacaaaaacaaagattattatggcttcctcaaccatggctttgtcctgccctgccttcgccggaaaggctgtgaagcctgccgcatcagatgtcctcggaagcggccgtgtgaccatgaggaagactgtcgccaagccaaagggtccatcaggcagcccatggtacggatctgaccgagtcaagtacttgggtccattctccggcgagcccccgagctaccttaccggtgagttccccggtgactacggatgggacaccgctggtctatccgccgacccagagaccttcgccaggaaccgtgagctagaagttatccacagcagatgggccatgctcggagccctaagctgcggttttcctgagctattggctaggaactgagtgaagttcggag

SEQ ID NO: 163255 - DNA, 403 bp, Arabidopsis thaliana columbia
acaaaacaaaaacaagaatgggtagatccaacgagcaagatctgctctctaccgagatcgttaatcgtgggatcgaaccatccggtcctaacgccggctcaccaacgttctcggttagggtcaggagacgtttgcctgattttcttcagtcggtgaacttgaagtacgtgaaacttggttaccactacctcataaaccatgcggtttatttggcgaccataccggttcttgtgctggtttttagtgctgaggttgggagtttaagcagagaagagatttggaagaagctttgggactatgatcttgcaactgttatcggattcttcggtgtctttgttttaaccgcttgtgtctacttcatgtctcgtcctcgctctggttatcttattgatttcgcttggta

SEQ ID NO: 163256 - DNA, 445 bp, Arabidopsis thaliana columbia
ggacactacgtgatcgaggtccttaccctgtgtacaaagttgttagagatttccatggaaagtttgcgtttatactcttcgatagcgtcaagaaaactgtctttgctgctgctgacgccgatgggagtgtgccgttcttctggggaaccgatgctgaagggcaccttgtgttttctgataacaccgagatggtgaagaaaggttgcgccaaatcttatggtcctttccctaaaggttgtttctttacgtcgtcgggtggattgaggagctttgagcacccaaagaacgagttgaagccagtgccgagagtggacagctcatgtgacgtgtgtggtgcaaccttcaaggttgacgctgagactaaaagagagggtaccaaaatgcctagagtcgatagcttccaaaattgggccggtcatatctaaaccggaaatcatacacaaat

SEQ ID NO: 163257 - DNA, 347 bp, Arabidopsis thaliana columbia
atcaagagtactcactcactcttgacctttttaaaacctttaccaaagctctttcgatgaagccgccaaagtctccagtaagagtttctttgagatgattaataaggagacaagaaaacatttgttaaactctgtcttgaaaaggtaaagatttagcacctgtttctttggattcgaggcttttttgggggtatgtttgttgcttttctttgttctcagaccttttttgaatgatgtaataaatgtttaccaaagttctgttgctacgttactctttttgctacaagttttcttcatgaaatttgtcaacttcaatttcaggaaaagatgagttaaaatattgtttt

SEQ ID NO: 163258 - DNA, 423 bp, Arabidopsis thaliana columbia
caaggttgatctgattgtggatgtgcctttattgggaagactgacattgccgctggagaaatgtggagagatcccaattgcaaagaaacctgatgttgatatcgagaagattaagttccagaagttctctttggaggaaaccgtggcgattctccatgtgaggcttcagaacatgaatgatttcgacttggggctcaatgacttggactgtgaagtttggctgtgtgatgtaagcattgggaaagcagagatcgcggactcgatcaagcttgacaaaaacggaagcggattgattaatgtgccgatgacattccgaccaaaggactttggttctgcgctttgggatatgattcggggtaaaggaacagggtacacaatcaaaggtaatattgatgttgatacaccatttggagctatgaagct

SEQ ID NO: 163259 - DNA, 444 bp, Arabidopsis thaliana columbia
ccggagagttccctggagactacggatgggacacagctggtctatccgctgaccccgagacattcgcaaggaaccgtgagctagaagttatccacagcaggtgggccatgctcggagccctaggctgcgtcttccctgagcttttggccaggaacggagtcaagtttggagaggcagtttggttcaaggctggttcacagatcttcagcgatggagggctcgattacttgggaaaccctagcttggttcacgctcagagcattttggccatttgggccacacaagttattttgatgggagccgttgaaggttacagagtcgcaagaaatgggccattgggagaggccgaggacttgctttaccccggtggcagtttcgacccattgggtttggctaccgacccagaggccttcgctgagttgaaggtaaaggagctcaagaacg

SEQ ID NO: 163260 - DNA, 446 bp, Arabidopsis thaliana columbia
  unsure (1)..(446): unsure at all n locations
ctcgaaaatttcctgcgcctctccgtgtctgtgaaatcgattcaggttaaggatgtcgagagctacatacattatcggtgcccttgcgggatctgcggtagtagcttacgtgtgtgacaaagttatttctgatgataagctttttggaggtactacaccaggaactattactaacaaggaatggggtgctgcgactgaagagagattacaagcatggccaagagttgctggtcctcccgtcgtcatgaaccctatcagtcgccagaatttcatcgtcaagtcacgtcctgaataacttttgatgccttctcgtgcatcgntctcattcgttatggattcattttcgaatatctgctcttttgtgtttgaattgaggatcggctgattgctctagctggttatagtaataatttgtgttgatgcgtaacacattattcggatcaagc

SEQ ID NO: 163261 - DNA, 270 bp, Arabidopsis thaliana columbia
aagacagctaaaactaaatacaaagaaacagttatgggtttggttacagaggaggtgagagctaaggcagagatgtacaccggagatgagatatgtagagagaagacaaagtgtttcctcaaggaaatatctatgcccaatggtttattaccattgaaggatatagaagaggttgggtatgacagagagtcaggtgttgtatggctgaagcagaagaagagcatcactcacaatttcacagagatagataagcttgttttctatggaacc

SEQ ID NO: 163262 - DNA, 447 bp, Arabidopsis thaliana columbia
gagagagacagagagaagatatagagatgggtttggagaagcaagtcatcagacccggcaggggtcccaaacccgctccggggcgaaccgtcaccgtccattgcaccggattcgggaaagatggtgatctatcccagaagttctggagtacaaaggacgagggacaaaaacctttctcgttccaaatcggtaaaggtgctgtgatcaaaggatgggatgaaggcgttatcggaatgcaaattggagaggttgctcgcttgcggtgctcatcggattacgcatatggcgctggtggatttacggcatgggggatccagccaaactctgttctcgactttgaaatcgaagtactgagcgtgcagtaatgatctccccagctcctaaactgtgggtagattattaaacaaccctttatgtttattgcttctgggatctttatgcaacaaa

SEQ ID NO: 163263 - DNA, 409 bp, Arabidopsis thaliana columbia
aatatatcgtcttcttcctcctcgaaccaaattcatcagtctctcctagtctcagcgctcgtgaaaatctgaaactctgcgtgcgaattttcgaagaacattagagatctggtattatctggatccgatctgttcaccatggaggagaagaagacagaatcaaccaacaagaatgttaagaaggccaatctattggaccaccactcgatcaagcacatccttgacgaatccgtctccgatatcgttacgagccgtggctataaggaggatgtgagattgagcaacctcaaactgattttgggaacgattatcatcgttgttgctcttgttgctcaattctacaacaagaaattccctgagaacagggattttttgattggatgcatcgcattggatgtagtgttgaatg

SEQ ID NO: 163264 - DNA, 402 bp, Arabidopsis thaliana columbia
tgaatgttcttaacttggttagagaacccggtttgcctttggttgacgattgggaatgtcttaaatcgatggtacgtgtatttgaagagcattgtggatcactaacgcaatatgggatgaaacatatgcgagcgtttgcaaacgtttgtaacaacggtgtgtccaaagagctgatggaggaagcttctactgcggcatgcggtggttatagtgaggctcgctacacggtgcatccatcaatcttaagctatagcgcctgagagattttgaggcttttctgattttcaagtgtttcgaattataacgttaaagatgtcaaaataaaagaaatgtttagtatgtaaatacgtacgtagcaataaggtcgtctaacttttttttatcgattgttatctttttaat

SEQ ID NO: 163265 - DNA, 454 bp, Arabidopsis thaliana columbia
ccagacactattaactcttgttcttgttatttaaacacctaaccagaaacacactagaaacacacaccaaaaacaatctttcccgctccttcttacaccaaccagagaactagtctatggatccatatagtcatggatcaagcttcatgaacctcttaactagtcaacaagaggctcacaatttagaaaccaatccgtatgatgatgatgtttctccaaaccaagctgcacacacacctaaggtgaaaagagagagaaggaaatggtctgccggtgaagacttggtgcttgtcagtgcttggctcaacacaagtaaagatgcagtaataggcaatgaacaaaagggttatgccttttggtcacgtattgctgcctattacggagcaagtccaaagctcaacggtgtggaaaagagagagacaggtcacataaagcagaggtggactaagatcaa

SEQ ID NO: 163266 - DNA, 442 bp, Arabidopsis thaliana columbia
acaaatcgtgtcatcactttgtggtataggccccctgaattgttacttggtgcaactaaatatggaccagcgattgacatgtggtcagttggatgcatatttgctgaacttttgaatggaaaaccaatcttgcctgggaaaactgagaatgaacaattgaataagatttatgagctttgtggatcacctgatgaaagcaactggcctggagtttccaagatgccttggtataaccaaatgaaatcatctcggcccttaaagagacgcgtaagggagatctacagacactttgatcgccatgcccttgaactacttgagaaaatgttggtacttgacccatctcagagaatatgcgcaaaggatgctcttgatgctgagtacttttggactgatccgctgccatgtgatccaaagagtctaccgacatatgaatcatcacatg

SEQ ID NO: 163267 - DNA, 87 bp, Arabidopsis thaliana columbia
aatatattagaatcaaaagttgtatatatattctaacatatgccctaatatgctttgcgctgaaaaaaaaaaaaaaaaaaaaggaaa

SEQ ID NO: 163268 - DNA, 443 bp, Arabidopsis thaliana columbia
gaagaatagtttgatcatcttgtgagaaaaataatggctgcttcagtgatgctatcttcggtgacattgaaaccagctggtttcacggtggagaagacggcggctagaggattaccgtcgctcacaagagctcgtccctccttcaaaattgtcgccagtggcgtcaagaagatcaagaccgacaagcccttcggaattaacggcagcatggacttgagggacggcgtcgacgcctccggcagaaagggcaagggatacggtgtttacaagtacgtcgacaagtatggagctaacgtcgatggatacagtcctatttacaacgagaacgagtggtcagcgagtggtgacgtgtacaagggaggagtcaccggattggcaatttgggcggtaactctcgccggaattcttgccggaggtgctcttttgtgtacaacacacgtgct

SEQ ID NO: 163269 - DNA, 417 bp, Arabidopsis thaliana columbia; identical to SEQ ID NO: 119755

SEQ ID NO: 163270 - DNA, 378 bp, Arabidopsis thaliana columbia
catgaagaacaacaacactaagcaaaaaagaatagctcaagccgagagagacaatggcatcaacattcacgagctcaagcagtgttcttaccccaacaacattccttggccagactaaagcctcaagctttaacccccttcgtgatgttgtctctctcggatctcccaagtacactatgggaaatgatctttggtatggacctgacagagtgaagtacttaggacccttttccgttcaaactccgtcttacctcaccggagaattccctggcgattatggttgggacaccgccggtttatccgcagaccctgaagcctttgccaaaaacagagctcttgaagtgatccatgggagatgggcaatgttgggagcttttg

SEQ ID NO: 163271 - DNA, 445 bp, Arabidopsis thaliana columbia
atggcttcctctatgttctcctccaccgctgtggttacctccccggctcaagccaccatggtcgctccattcaccggcttgaagtcatccgcttctttcccggtcacccgcaaggccaacaacgacattacttccatcacaagcaacggaggaagagttagctgcatgaaggtgtggccaccaatcggaaagaagaagtttgagactctatcttacctccctgaccttagtgacgttgaattggctaaggaagttgactaccttctccgcaacaagtggattccttgtgttgaattcgagttggagcacggatttgtgtaccgtgagcacggaaacactcccggatactatgatggacgatactggacaatgtggaagcttccattgttcggatgcaccgactccgctcaagtgttgaaagaagttgaagaatgcaagaaggagt

SEQ ID NO: 163272 - DNA, 427 bp, Arabidopsis thaliana columbia
ctaagaactcagaaagagaccaacgacactgtaaatggcggatgaatctccaaagtctatctacgacttcaccgtcaaggatatcggaggtaacgatgtgagtttggaccaatacaaaggcaaaactcttttggttgtaaacgttgcttccaaatgtggtctgacggatgcgaactacaaggaactgaatgttctgtacgagaaatacaaggagcaagggttggagatattagcattcccgtgtaatcagttcttaggacaagaaccaggaaacaatgaagagattcaacaaactgtctgcaccaggttcaaagctgaattccccatctttgacaaggtggatgtgaacggtaagaacacggcaccattatacaagtacttgaaagcagagaaaggaggtttgctcattgatgctatcaaatggaac

SEQ ID NO: 163273 - DNA, 451 bp, Arabidopsis thaliana columbia
  unsure (1)..(451): unsure at all n locations
aaaagagataacacacacaaaaaaaaatggcatcaacctcactcctcaaggcttctccggtgttggacaaatccgaatgggtcaagggacaaagcgttctcttccgtcagccttcttccgcttctgtcgtcctccgcaaccgtgccacctccctcaccgtccgtgccgcttcctcctacgccgatgagcttgttaagacagcgaaaactattgcgtctnccggacgtggaatcttggcgatggacgagtcaaacgcgacttgcgggaaacgtttggattcgatagggctagagaacactgaggcaaatcgtcaagctttccggactttgctggtctctgcaccgggactcggacagtacgtctccggcgcaattctatttgaggagactctgtaccagtctaccaccgaaagcaagaaaatggtcgacgtcctcgtcgagcagaacattgt

SEQ ID NO: 163274 - DNA, 215 bp, Arabidopsis thaliana columbia
tcttaagcctctcgtctttgcctttcgtctcttctctgctcgccgatcgttactccgtcgaaatcaccatggcgccaaagaaggataaggttccaccaccgtcatcaaagccggccaaatctggaggtggaaaacagaagaagaagaagtggagcaagggaaagcaaaaggagaaggtgaacaacatggtgttgtttgatcaaggcacttatgac

SEQ ID NO: 163275 - DNA, 440 bp, Arabidopsis thaliana columbia
aaaatggctcgtcgcgatgttctcctcccttttctttttcttctcgccaccgactccgccggagctgtcgccgaagatgatccagactgtgtatacacattctacctcagaaccggatcgatctggaaagccggaaccgattcgatcatcagcgcaagaatctacgataaggacggtgactacatcggaatcaaaaaccttcaagcttgggctggattaatgggacctgattacaattacttcgagaggggtaatctcgacattttcagtggaagagcaccgtgtttacctagtccgatctgtgccttaaacctaacctccgatggctccggcgatcaccatggttggtacgttaattacgttgagatcacgacggctggtgttcacgcacagtgctcgacgcaggattttgagattgagcaatggctcgctactgatac

SEQ ID NO: 163276 - DNA, 443 bp, Arabidopsis thaliana columbia
gtcgaaatcaccatggcgccaaagaaggataaggtttcaccaccgtcatcaaagccggccaaatctggaggtggaaaacagaagaagaagaagtggagcaagggaaagcaaaaggagaaggtgaacaacatggtgttgtttgatcaaggcacttatgacaagcttctcactgaagctcccaagttcaagctcatcactccatcaatcctctccgaccgtatgaggattaatgggtctcttgcgaggagggcgattagggagctaatggcaaaaggtttgatcaggatggtctctgcacactcgagccagcagatctacactcgtgccaccaacacctaaaaagcgtgacctttcaatggtttggttctcgactcttttcttggtttttgtcttttgatgtatacattaatcatcagaactcttatagttcttttttggttctc

SEQ ID NO: 163277 - DNA, 450 bp, Arabidopsis thaliana columbia
gaaatggttgagtcaaaggttgtagttccagagtcggtgttgaagaagaggaagagagaggaggaatgggctttggagaagaagcagaatgttgaagccgccaagaagaagaacgccgagaacaggaagcttatcttcaaaagagccgagcaatactccaaggaatatgccgagaaggagaaggagttgatctcgttgaaacgcgaggccaagcttaagggaggtttctatgttgaccctgaagctaagctcttgttcatcatccgtatccgtggtatcaatgccattgaccctaagactaagaagattctccagctcttgcgtttgagacagattttcaatggtgttttccttaaagtcaacaaggctacgatgaacatgcttcgccgtgttgagccctatgtcacttacggattccctaacttgaagagtgtcaagggaatgatctac

SEQ ID NO: 163278 - DNA, 439 bp, Arabidopsis thaliana columbia
aaaaagcgtattcctcgtgagcactaacttcttactcattcttcttcttcagctgaatccaaatacccatttccatttttaaccgtggttggattgttttgagagttgaaggaagaagatgacgtctgacggagcaacgtcgacgtcagctgcagctgcagcagcagcgatggcgacgaggaggaaaccgtcgtggagagagagggagaacaatcggagaagagagcggcggagaagagctgttgcggcgaagatttatactggtcttagagctcaaggtaactacaatcttccaaaacattgtgacaacaatgaggttcttaaggctctttgttctgaagctggttgggttgttgaagaagacggaactacttatcgcaagggacacaagcctctacctggtgacatggctggatcatcttctcgagcaactccttac

SEQ ID NO: 163279 - DNA, 434 bp, Arabidopsis thaliana columbia
gctgtagaacacaaacagaacaaacaaataattaattgaagagtctctcagtcgttaggggaagcaaatagagaaatggctagctttactgcctccgcttccaccgtctccgccgctcgtccggctctccttctcaagcctaccgtcgccatctctgctcctgttcttggtttgcctccaatgggtaagaagaagggaggagtgagatgttcaatggagacaaagcaaggaaacgtctcagtcatgggggctggagtttcagctgcagcaacagctgctttgacggcggtgatgagcaatcccgcgatggctttggttgatgagaggatgtcaacagaaggaacaggattaccctttggtctaagcaacaacctcttgggttggattctgtttggaggctttggtttgatctggactttcttcttcgactacac

SEQ ID NO: 163280 - DNA, 426 bp, Arabidopsis thaliana columbia
gctgtgaacctttcccccgcggcatctgaagttctcggaagcggccgtgtgacaatgaggaagactgttgccaagccaaagggtccatcaggcagcccatggtacggatccgaccgagtcaagtacttgggtccattctctggcgagtcaccgagctaccttaccggaaagttccccggagactacggatgggacaccgctggactttcagctgatcccgagacattcgcaaggaaccgtgagctagaagttatccacagcaggtgggctatgctcggagccctaggctgcgtcttccctgagcttttggctaggaacggagtcaagttcggagaggcggtttggttcaaggccggttcacagatctttagcgatggaggactcgattacttgggaaaccctagcttggccacgctcagagcattt

SEQ ID NO: 163281 - DNA, 408 bp, Arabidopsis thaliana columbia
aaagaacccataatgtttagagtgaccggaactctctcggcggcatcatctccagcggtggcggcggcgtctttctccgccgctctaagactttccataactcccactctcgctatcgcctctcctccccatctccgttggttctcgaagttttctcgtcaatttctcggcggacgcatctcttcactccgaccacgcattccttctccgtgcccgattcgactctctggtttcccggctctcaaaatgagagcttcgtttagcagtgggagtagtggaagtagtgcaagtagagagattctggtgcagcatttgcttgttaagaataatgatgttgagctctttgccgaactccaaaagaaattcttggatggagaggagatgagtgatcttgcggctgagtattcg

SEQ ID NO: 163282 - DNA, 433 bp, Arabidopsis thaliana columbia
cactactctaaaagaatcttcatcatggccttattaacctcagccaccgttgcaatcccatctttcaccggccttaaagcctcaaccatcaaatcatccgccaccgtcagaatccaaactgctgctgttgcatcaccgaagcttacagtgaagtcatctctaaagaacttcggagtcgcggccgtagcggctgcagcttcaattgctttggccggaaacgccatggcaatagaagttctcttgggaggaggggatgggtcgttagcttttattcccaacgacttctctatagctaaaggagagaagattgtgttcaagaacaacgctggatacccacacaatgttgtcttcgatgaagacgagatcccaagtggcgtcgacgtggccaagatctcgatggacgagcaagatctactcaacggtgcgggagaga

SEQ ID NO: 163283 - DNA, 363 bp, Arabidopsis thaliana columbia
gtttagaagaagcaatggccacttcagtaatttaacactcttctttcgctggccaaacgaggctaaagccatccaacgatctcctccgcaaaatcggagcctccaatggcggtggccgcatcatcatgcgtcgtaccgtcaagtctactcctcagagcatctggtacggaccagaccgtcccaaatacctaggaccattttccgaaaacacaccatcatacctaaccggagaataccctggagactacggttgggacaccgctggtctctcagccgatccagaaacattcgcaaagaatcgtgagctcgaagtgatccacagtagatgggcaatgttgggagctttaggctgcaccttccctg

SEQ ID NO: 163284 - DNA, 471 bp, Arabidopsis thaliana columbia
  unsure (1)..(471): unsure at all n locations
accggantggaaggcccgggccggcccacgcgtccggagtcttgaaggtcaacaacgtcgagaataatggcatcatctctttgtgcttcttctgccggcgctgccatttcttctccaagtttcttgggtggtaagaaactgaggctgaagaagaagttgactgttccagctgtgtccaggccagatgcgtcggtgcgcgccgtcgcagctgatccagatagaccaatctggttcccgggaagcactcctccagagtggctagacggtagcctccctggtgacttcggatttgatcctcttggtctttcatcggacccggacagtctaaaatggaacgtacaagccgagatagtccactgccgatgggctatgctaggagccgccgggatattcatcccagagttcctaacgaagatcggaatcctcaacactccgtcatggtacacggcgggagagcaagagtatttcacg

SEQ ID NO: 163285 - DNA, 451 bp, Arabidopsis thaliana columbia
gagaaaggagaaaggagtgagtcaagctggtgtgcaattctaccacgacctcatcgacgagctcataaaaaatggtataactccattcgttactgtttttcactgggacactccacaagatttagaagatgaatatggcggctttttaagcgaaaggattgtgaaggatttccgagagtatgcagattttgttttccaagaatacgggggaaaagtgaaacattggatcactttcaatgagccatgggttttctcgcacgctggctatgacgtaggcaaaaaggcacctggtcgttgctcttcttacgtcaatgctaaatgccaagacggacgatcaggatacgaggcttaccttgtcactcacaatctccttatctctcacgcagaagcagttgaagcttaccggaaatgcgaaaagtgtaaaggtgggaagatcggaattgcacatagt

SEQ ID NO: 163286 - DNA, 303 bp, Arabidopsis thaliana columbia
agaagagaaacaacaagaagaagttatggctttctttatgctctcctccgaccctgtggatacatgggcggatcaggccaccatggtcgctccattcaccggcttgaagtcatccgctgcattcccggtcacccgcaagaccaacatggacatgacttccatcgtaagcaactggggaagagttagctgcatgaatgtgtggccaccaattgtaaagaagaacgtcgagactctatattacctccctgaccgtagggacggcgaattggctaatgaagttgactactcttttctaaacaaggg

SEQ ID NO: 163287 - DNA, 336 bp, Arabidopsis thaliana columbia
tagtgccgggccgttcatagggcacttgcgcgagggttgttgcatatgccctgctatgcaacaaacatgcgtttctataatggatctcctgtgctcacgagacgaagcaggatcggcttgcacctggtgctattagtggcgatgtatacttggttcacgtcacacggattggcattctcgtcctatgcgtaatcacgcaagttcggatggcccatctgttttctacttcgtttggcgtccctcggaagtatataggattttgctatggctaaaatttgcatatagctctgccaaagatgacccggacctaagtgaagaagaaaaaaaggttatact

SEQ ID NO: 163288 - DNA, 468 bp, Arabidopsis thaliana columbia
  unsure (1)..(468): unsure at all n locations
ccggaatggaaggacccgggccaggccgcacgcgtaacggagtcgttgaaggtcaacaacgtcacacttttatgtactcttctatatgtgttcgtcactgggggagctacgtgtgtgaagtttggttcanatgcacagtacgttgcagtcggttcgatggaccgtaacctacggatatttggtcttcctggtgatgaaaaagccaacgtcgatgatgactctgcgcaagactcgtgaacaatccgtaaaaaactcagacagaacattccaaatgtccatctgcagtgttatctcgctcaaatttctcaagttctgttgtatcttacagtatttgcagcaatgggggagaatttcataagtgcgggtcatgagtgagtggtgattgtgatcatcctcgctacctcttggaattcaaacaatgacactcacaaaccctcgagttttcttataggctcttttaatcgcttt

SEQ ID NO: 163289 - DNA, 447 bp, Arabidopsis thaliana columbia
ttgccttctgggcttcacgattctcacgacatttgtttatcttctccgatttccacgtccatggatctcagtcaatgttccttaatctctcttttcgattagtccaatctccactaatctctgacctcagatcgcttccgacgccgctgaactgtgtccgtcttgatctgtgtttaggagaaagcttctagggtttttgttttggttgctgagtagaatttgttggatctgaaacggaaatcaaaatgggctttttcagtacgatactaggattttgtggatttggagttgggatttcattgggacttgttattggttacgttctcttcgtctacttgctccccaacgacgtcaaggatcctgaaattcgttcaatagctgaccaagatcccaaagctatgctacggatgcttccagagatacctctatgggtcaaaaatccggatt

SEQ ID NO: 163290 - DNA, 447 bp, Arabidopsis thaliana columbia
agaatagtttgatcatcttgtgagaaaaataatggctgcttcagtgatgctatcttcggtgacattgaaaccagctggtttcacggtggagaagacggcggctagaggattaccgtcgctcacaagagctcgtccctccttcaaaattgtcgccagtggcgtcaagaagatcaagaccgacaagcccttcggaattaacggcagcatggacttgagggacggcgtcgacgcctccggcagaaagggcaagggatacggtgtttacaagtacgtcgacaagtatggagctaacgtcgatggatacagtcctatttacaacgagaacgagtggtcagcgagtggtgacgtgtacaagggaggagtcaccggattggcaatttgggcggtaactctcgccggaattcttgccggaggtgctcttcttgtgtacaacacaagtgctttggc

SEQ ID NO: 163291 - DNA, 328 bp, Arabidopsis thaliana columbia
tcttttttttttttttttgaagcatatctattgttttgtggtaccactttagatcagaaccttacaagagttgaaatacaaagggtaaatacatatgttggcaaggaaaacaatccttccaagaactaagccggggagcacaagacatcttccggggactaagacagatctaatggggaaaaaacccaaattaaagaacaacaatgatactaaacctaaactttcaagattcattactaaaaaaactcaaaactgaaaagcaaagtctaaatccaaattttttaaattaaagcaggattggaaccttttgatctatccaaagggaaat

SEQ ID NO: 163292 - DNA, 230 bp, Arabidopsis thaliana columbia
tctctctatctctctctatctctctcatttcttcctgcgtcaatggcgactcaaggtcaggttatcacttgcaaagctgcggtggcttacgagccgaacaagcctttggtcatcgaagatgtgcaaggggctccacctcaagctggtgaggttcggatcaagatcctctacactggtctttgtcacaccgacgcttacacttggagcggcaaggatcccgaaaggctctt

SEQ ID NO: 163293 - DNA, 254 bp, Arabidopsis thaliana columbia
aatctctcaccattgtttttctctgcaaaacttaagaaacaaaaaaagaaaaatcggagaaaccaagaaaaaagaaatgggaaggggagaagcaggagaaaagaaggctttaggatgggctggaagagatccttctgggggtctttttccttacttctacactttaaggggcacaagagccgatgatggggatataaagggtatatgctggggaatatgccatactggtattcaacaaattaaaaatgatcttg

SEQ ID NO: 163294 - DNA, 317 bp, Arabidopsis thaliana columbia
aatctctctccctcactctaacaccaaaagaagtagaagcattttccaaagagaaagagagagaaatgggttccaagattgtccaagctttcttgatgttggctctattcgccacttcagcactcgctcaagcccctgcttctacttccaccggcacttcttcttccgcaactcccccttcagtcgcaactccttctccagtggctaccccaccacctgctgcaacccctggcccagccacgccaccacctgctgcaaccccagctcctgccactactccaccgtcaggtgctccttctcctgctgatgttcccacc

SEQ ID NO: 163295 - DNA, 399 bp, Arabidopsis thaliana columbia
agaaaaacaaaatggcttcgatgggtggattacacggtgcttctccggcggttcttgaaggaagcttaaagatcaatggctccagccgtctgaatggctctggaagagtggcggtggctcaaaggtctagacttgtcgtcagagctcagcagagtgaggagacttctcgccggtccgtgattgggcttgttgctgctggtttagctggtggctcgtttgttcaggctgtcctcgccgatgctatttcgatcaaaggtggccctcctccagcttcctttcggtggccttcctgggacagataactcagaccaagcaagagactttgcattggcattgaaagacaggttttacttacagccattgccaccaacagaagctgcagctagagccaaagaatct

SEQ ID NO: 163296 - DNA, 312 bp, Arabidopsis thaliana columbia
gtcaagtcttttagagctgcaagcaaagtcatgcctcttatttctaaagcattaacgctaccacctggtatgaaatatagatgtccagctcctatagtagctgctagagctgcactttcgaagactgctttggtcaaaagtcttcgccctcagcctttacctgaaaagatgcttgcaatcgctctcatgggaatggctgcaaatgtgcctctaggtgtatggagagaacacacaaagaagtttttgcctgcatggtttttggctgtccatgctgctgtgccttttatagcaatgcttaagaaatctgttctg

SEQ ID NO: 163297 - DNA, 274 bp, Arabidopsis thaliana columbia
ctacttgggtatattcctgggatcatatacgccatttatgtcctcaccaaatgatttaccatctatcatcatctccttgaacagctgttccgtcgtgttctcctatctttgtgactgattcagcgtttctttttctttcatcagagtttttatgtttcaagtaatttaattaatcatcactgttgtgtttgcattgttatataaatgttgtgttgatataaaaaaaaaaaaaaaaaaaaaaatataaataatatatttatattatatttttttt

SEQ ID NO: 163298 - DNA, 250 bp, Arabidopsis thaliana columbia
ctcgtcttctaggttaatccaatttcgtcgattcatgaagttcacaattctcccatcggaaaattcttcgtaatcgacgacgaagagatcatgagtaccgtcggaggtatagagcagttgatacctgattccgtttcaacgtcgttcatcgaaacggtgaacggttcgcaccagttcacgattcaaggttactctctagccaaaggcatgagccctgggaagtttatacagagcgatatcttctccgttg

SEQ ID NO: 163299 - DNA, 215 bp, Arabidopsis thaliana columbia
ccaaaaaaaaagaaaacacaaaaacaaagattattatggcttcctcaaccatggctttgtcctcccctgccttcgccggaaaggctgtgaagcctgccgcatcagatgtcctcggaagcggccgtgtgaccatgaggaagactggcgccaagccaaagggttcattaagcaggccatggtacggatctgaccgagtcaaggacttgggtccattc

SEQ ID NO: 163300 - DNA, 293 bp, Arabidopsis thaliana columbia
aaatacacaacttgtaacttcaaatagattactttcaaagaagagagagagaaagaaagatggagaagaacatgaagtttccagtagtagacttgtccaagctcaatggggaagagagagaccaaaccatggctctaatcaatgaagcttgtgagaattggggcttctttgagatagtgaaccatggattaccacatgacttaatggaccagatcgaggaagatgacaaaggaccattacaagacatgccaagaacaaaaagttaatggcatgctcaagtccaaaggtttgga

SEQ ID NO: 163301 - DNA, 410 bp, Arabidopsis thaliana columbia
  unsure (1)..(410): unsure at all n locations
gaaaaaatggataaaagattggagtcttcaaggtttgaaatgctcttgtgaccggtggcactaaaggcatcggggaagctgttgtggaggaactgtcaattttgtgagcaagagtccacacatgtgctagagacgagactcagcttcaagaacgtttacgtgaatggcaagaaaaagggtttcaggtcaccacttctatctgcgacgtttctttgcgtgagcaacgagagaaactcatggaaaccgtttcctctctcttccaaggaaaactcaacattctcgtaagtgtatacatattagcttctcctncccgggcttgggatttacaagaaccaaaccatgttgtgttttaattacctttttttttttgaaagatgttttaggtgtgggctatacatatcttatatata

SEQ ID NO: 163302 - DNA, 240 bp, Arabidopsis thaliana columbia
catatggttgcagcccattgacatcactcagccaggtgtttacaccagtgtcattggttgccatatcgctactatctaccactatggatttgccacccttatgttgcggaggtatgtcgatgctgatcgagagttcaacaagattctacattacatcttcaagactaagcagtaccatcaaaagtcacctcagtacgagcaattactcaagaagaatgagcagatgtacgctttgcttgc

SEQ ID NO: 163303 - DNA, 203 bp, Arabidopsis thaliana columbia
ttttcacaaaagccatgtgctgttttctccatttggatcaaaatggttgctgggaacaattaaaacaagggcgttacactctttgcatcaatggtcaacaacaacaacaacatctaagggactaacattcatcttgggggtcatcaaaaggaaccagcttttgtcaaacctgtatccgagacacgaaaggggcctttactttt

SEQ ID NO: 163304 - DNA, 453 bp, Arabidopsis thaliana columbia
ctgttgtagaaccttacaacagtgttctctcaacgcattcccttcttgaacatacggatgtagctgtcctcttggataacgaagccatctatgacatttgccgcagatccctagatatcgagaggccaacctacacaaacttgaacaggttgatatcacagatcatttcatccttgacaacatctttgaggtttgatggtgccatcaacgtggatatcactgagttccagaccaatcttgtcccaatatccccgtatccatttcatgctgtcatcttatgcaccagtcatcttagccgccaaggcttaccacgagcagctatcagtccctgagatcaccaatgccgtttttgagccagctagcatgatggcaaagtgtgacccgagacacggaaagtacatggccttgtgtttgatgtaccgaggagatgttgttcccaaagatgttaatgct

SEQ ID NO: 163305 - DNA, 445 bp, Arabidopsis thaliana columbia
  unsure (1)..(445): unsure at all n locations
ataagatctttctctctctgacgacgcaatccctaatttctggttctccgttcgtcggcggagaagatgggattcctttccaataaaatctccagagacgatgtgaaaccaggcgatcacatctattcatggcgtcaagcctacatttacgctcatcacggaatctatgtaggtaatggacaagtcaaccattttactcgtggtgatggtcaagagactggaactgggactttcttggacaacatcattgttagttcatctcataatcatggagacaacccatgtcctgattgtggagatcgatccaatcttggcggtgttatatcttcctgccttgaatgtttccttgccggaggtgatctctatgtctttgagtacagtgtttccnctgctatctttcttgccaaacctcgaggcggcgtatgcactatagcatcttcagatc

SEQ ID NO: 163306 - DNA, 291 bp, Arabidopsis thaliana columbia
  unsure (1)..(291): unsure at all n locations
aacaaaatttgtttgttcgtttgatctttcttaaaaatatgaaaattaacatcagagattccaccatggtccggcctgccaccgagacaccaatcactaatctttggaactccaacgtcgaccttgtcatccccagattccatacccctagtgtctacttctacagacccaccggcgcttncaatttctttgaccctcaggtcatgaaggaagctctttccaagcccttgtccctttttaccctatggctggtcgcttgaagagagacgatgatggtcgtattgagatcga

SEQ ID NO: 163307 - DNA, 306 bp, Arabidopsis thaliana columbia
cggacgcgtgggggaacaatcccattaggacggtatggaaaagctgaagaagtggctggcttggtagaattcttggctctcagtcctgcagccagttacataaccggacaggcattcaccattgatggaggtattgctatctagacatttggtatgagtcggcttttgtttagttaaaacaatttggtaaaagagacaaagttgagttctttttagcacttggtcggattgctattttgcggtttctgttaagaaatatgtaacacttactgcttaaactacgtatttggtcactttcagaaacta

SEQ ID NO: 163308 - DNA, 370 bp, Arabidopsis thaliana columbia
aagccattcaagtttgcttggaaggaggtcttctggtattgtttcagaggtaaatggagaggggttttctcatgtggggtgggtgttttaagttttatctttttttttttaattacgattttatatgttttttgttatttttttcattttttatttttttttttttttttaaattttttttttttttttttttatttttatttttatttttatttattttttttttttttttttttttttttttttattttttttatatgtttgttttttttttttatttttttttttttttttttttttttttttttttttttatttttttttttttttattttttttttttttttttatttttatttatttttttttt

SEQ ID NO: 163309 - DNA, 265 bp, Arabidopsis thaliana columbia
cgaacacttacaaaaaaaaatctctttgtggagctttagcgatcgtaacaatggcgaacgaggtgattcttcttgatttctggccgagtatgttcgggatgaggacaaggatcgcattgagggagaaaggtgttgaatttgagtacagagaagaagatctaaggaacaagagtcccttggcttttcagatgaatccgattcacaagaagattcctgtttctatccacaacggcaaaccggttaacgaatttattatccaggttca

SEQ ID NO: 163310 - DNA, 176 bp, Arabidopsis thaliana columbia
tcgcgctttttggccgaggaaggataaagagagacgccatgggaagaagacctgcgaggtgttaccgtcagatcaagggtaagccatacccaaagtctcgctactgtcgtggtgtgccagatccaaaaatcaagatctacgatgttggtatgaaaaggaagggtgttgattagttt

SEQ ID NO: 163311 - DNA, 385 bp, Arabidopsis thaliana columbia
cttgtgatcacttgcagctatggccacacatgcagctctcgccgtctcaagaatcccggtcacacagcgactgcagtctaagagtgccattcactctttccctgctcaatgctcctccaagaggctagaagtcgctgaattctccggtctgcgtatgagtagtatcggtggggaagcatctttcttcgatgctgtagctgcacaaatcatccctaaggctgtgacaacatcaactcctgttagaggagagacagtggcgaaactgaaagttgcgattaacggttttggaaggattggtaggaactttcttaggtgttggcatggtcgtaaagactctcctctcgaagttgttgtacttaacgacagtggtggtgtcaagaatgca

SEQ ID NO: 163312 - DNA, 279 bp, Arabidopsis thaliana columbia
cttttctcctccatcaaaatcctccgacgatgacaaccatagctgcagctggcctcaacgtcgcgactccacgagtggtcgttcgacctgtggctcgtgtattaggtccggtccggttgaattacccgtggaaattcggttcgatgaagcggatggttgtggttaaggctacatcggaaggagagatatcggagaaggtggagaagagtatacaagaagctaaggagacatgcgctgatgatccggtgagcggggagtgtgtagcggcttgggacgagg

SEQ ID NO: 163313 - DNA, 291 bp, Arabidopsis thaliana columbia
tcgcggacgcgtgggccagcaaggtagcagggtgttcttagccgaagtggaaatgcttagtcgtcttcatcacagaaacctcgtgaatttaattggtatttgtatcgaagatcgtaaccgttccctggtttatgaactcataccaaatggcagcgttgaatctcacctccacgggattgataaagcatcttcgcctttagattgggatgctcggttgaagatagctcttggtgcggcccgtggtttagcgtatttacacgaagactcgagcccgtgagttatacacagaga

SEQ ID NO: 163314 - DNA, 315 bp, Arabidopsis thaliana columbia
gaaagaaatctttaaaaaaaaagggtttttcagccatttcaggggatgccatgggaatatgtcctagcttctcaatctcttaatacctatcaagagaatcatgttcgttggtctcagtctccagattctcacactttctctgttgatcttcctgggttaaggaaagaagaaataaaagttgagatcgaagattcgatatacttaatcatacgaacggaggcaacccctatgtcgcctccggatcagcctttgaagacttttaagaggaaatttcggttgccggaatcgatagatatgatcggaatatcagctggc

SEQ ID NO: 163315 - DNA, 269 bp, Arabidopsis thaliana columbia
cctttaagctcaatctcgccactggagtctcaatcgggaaagatctccatcttctccggaggaaaaacggatccgtaaatcgtgaatttttaaacagagaagaatcaattcaatggaggaagagaaagcttctgctgcacagagcttaatcgatgtagttaacgagattgctgcgatttctgattatcggataacagtgaagaagctttgttataatctagcgaggagattaaagctgcttgttcctatgtttgaggaaattagagaaa

SEQ ID NO: 163316 - DNA, 271 bp, Arabidopsis thaliana columbia
  unsure (1)..(271): unsure at all n locations
ncttcttcttcttcttctttctcttcctaatatcttttttctctccccaattttctcatcgagcacggaatcttcttcttcttcgtcttccttctctcaagaacagattttttttaaacgagcttgatcaataaattctctcaagatctatggcggaagagcatcgatgtcagacaccagaaagcaaccgtctctgtgttaacaactgtggctttctcggcagctccgtcacccttgaatctctgttctaattggtacggcgatctttgtc

SEQ ID NO: 163317 - DNA, 91 bp, Arabidopsis thaliana columbia
ggttactgggcaaagagcttagcaggatcttgagagggcatgccgggagcattataataaacggtgttggggtattgggggggggggcttt

SEQ ID NO: 163318 - DNA, 324 bp, Arabidopsis thaliana columbia
ctcagaaagatcaatctagagagaccaaaaagagatcggaagagatggcttctacctccgcgatgtcattggtcacaccacttaaccagacccgttcgtctcctttccttaagccattacctctgaaaccatccaaggctttggttgcaactggaggcagagcacagaggcttcaagttaaggccctcaagatggacaaggctttgaccggtatctccgcggctgctcttactgcttcgatggtgattccggagatagctgaagctgctggttctggaatctctccttcccttaagaatttcttgctcagcattgcttctggtg

SEQ ID NO: 163319 - DNA, 464 bp, Arabidopsis thaliana columbia
ctcttgaatttttcaagaacaaaagaaaaagacatctttaatggcggccatgaactcgagtgttctcacttgcagctacgcaattgctggctctggctcggtagagcttaaccagaaagttggtttggtgaattcatcagttgggtttggtcagaagaaacagatgattatgcctgtgatcaaagctcaacgcgttgttggtgatgatgttgatggatctaatggaagacgatcagccatggttttcttagcagctacactcttctccactgctgctgtttctgcttctgctaatgctggcgtcattgacgaatacctcgagaggagcaaaaccaacaaagaacttaatgataagaagagattggcaacaagtggagcaaactttgcgagagcattcactgttcaattcggtagctgcaagttccctgagaatttcactggctgccaagatcttgccaagcaaa

SEQ ID NO: 163320 - DNA, 321 bp, Arabidopsis thaliana columbia
gatagagtcaaagacaatgtgtgcggtggtgactcgcgcctcatcattagaataccgaaacagtttctctctgatcacaacaagatgatcaacaagaagaagaagaagaaggccaagattacttcttcctcttcttcgtccgggattgatcttgaagtcaatggaaacaacgtcgattcgtattcttcagagcaatatccgcttaggaaatgtatgcactgtgaggtcaccaagactccacagtggaggcttggtccaatgggtccaaagacactttgcaatgcgtgcggtgtacgttacaaatcagggaggctttttccg

SEQ ID NO: 163321 - DNA, 347 bp, Arabidopsis thaliana columbia
aaaacacccaccacatcaccgtcttcttcaacataatttaccaccagagatcgcagatatttcttcattctatctctctcttttagatccgattcgatgccgtcccgtagacgtaccctcctcaaggtcatcatcctcggtgatagcggggtgggaaaaacctctttgatgaatcagtatgttaataaaaagttcagcaaccagtacaaggcaaccattggagccgacttcttgaccaaggaagtacagtttggagatcgacttttcactttacagatctgggatacagctggacaggaaaggtttcagagccttggtgtagccttttaccggggtgctgattgctg

SEQ ID NO: 163322 - DNA, 230 bp, Arabidopsis thaliana columbia
aacaacctagctagctagtaaacagttttttctttttaccaaaaagggcttcagttccatagctctttttttggctctcaatcttctctttttcacaacaatctccgcctggggtagctgtactccgtgcggcggaggttgcccctctcccaagccaaaggcaactctctaaccaaccccaagccctagctcttgctcgagcaagtgccctaaagacaccctcaagctcg

SEQ ID NO: 163323 - DNA, 385 bp, Arabidopsis thaliana columbia
cacctatccacttctcatctcttcgttatcccctctctctaatggctaacgaagaactcactgagtcacagcaacaagaagacccaagtcaacaattacccaatgcagatgaagaaaagggctcagactccgactcaaactcagactcagacgcatcatcccaatcctccggcgacgatttctacatctccgagtcagaaaatgaagcagaaggagacaacacaatcttcaactacgtaagaccaagtgacataccttctgacccaaacgcaaacccagaaaccaacattcgccgattcaatcgagtcctcgatggcaaacgagtgaagcgtatgcaagaaggagaagaagataatacacttttatgagatctttgatttcctaa

SEQ ID NO: 163324 - DNA, 211 bp, Arabidopsis thaliana columbia
ctcaaaaaactcttgaatttttcaagaacaaaagaaaaagacatctttaatggcggccatgaactcgagtgttctcacttgcagctacgcaattgctggctctggctcggtagagcttaaccagaaagttggtttggtgaattcatcagttgggtttggtcagaagaaacagatgattatgcctgtgatcaaagctcatcccgttgttggt

SEQ ID NO: 163325 - DNA, 344 bp, Arabidopsis thaliana columbia
aagtagtagaagctgtcagaagacaacgtgaaggatttgtcaagtgatttgcagaaactaattgatgtatacatgaagaagatagaggagctctacaaacagaaagaaaaggaattgatgaaggtgtgaccataatggttgttaggggaggtgttgtatttattatatttttttattatatttttatttatttgttttttttattattattttattattttttttatattattttaaggtttttattttaaatttatttatatatttgttattttttttatttttttgttaatttataattgattttttgtgtgtttattattatttattattattttttatag

SEQ ID NO: 163326 - DNA, 416 bp, Arabidopsis thaliana columbia
ctagagagaaatggggagatctatggtgctaatctcggcggttgtactggcttttctagtggcggcgccgataccagaagtaacagccaagaaatatttagtcggcgacaaaaagttctggaaccccaacattaactataccctatgggctcaaggcaaacatttctacgtcggagactggctttattttgtgttctatagagaccaacacaacattcttgaggtaaacaaggctgattatgaaaaatgtatctccaaccgcccaatacgtaattatacacgtggagctgggagagatatttgtcctctctatgagacttgacgttattatctacttgatggaagaggtggttggcgtcaaggcattatactagatgttttaatttggaaacttcttcttcttccttattcttttt

SEQ ID NO: 163327 - DNA, 383 bp, Arabidopsis thaliana columbia
tcttcttcattttccttccttctcacttcaaatccataatcgctctacttctctctctctctctagattcgaaaaaatggcgaaactggtgatgttgttggttctctgtatcttaccggcgatagccatggcggcaaggaggggaaatattggaaagaatacaatggtggttcaaggtagcacctactgtgacatttgcaaattcggcttcgagactcctgaatccttctacttcatccccggtgcaacggtgaagctatcatgcaaagacaggaagacaatggaagaggtttacacagacaaagctgtatcagacaaagaaggaaagtttaagttcattgtccacgacgatcacagagaccagatgtgcgatgttttgcttg

SEQ ID NO: 163328 - DNA, 341 bp, Arabidopsis thaliana columbia
gcactctccgccaccttcttccctaattctctctctctcgctacctctctacgtgataaacaagaatggcgactgtacgaatctcctccactagcatgaccaaggccgttcttagaagccagacaaccaacaagctcattactaacaagagctacaacttatctgttggatcaacgaaaagggtttcgagatcttttggtttgaaatgctcagcgaattctggtggtgctacgatgtcggcggtatacaaggtcaagctcttaggacctgatggtcaagaagatgagtttgaggttcaagatgatcagtacatcttggatgcagctgaagaggcaggagtt

SEQ ID NO: 163329 - DNA, 348 bp, Arabidopsis thaliana columbia
gccaaagggtccatcaggcagcccatggtacggatctgaccgagtcaagtacttgggtccattctccggcgagcccccgagctaccttaccggtgagttccccggtgactacggatgggacaccgctggtctatccgccgacccagagaccttcgccaggaaccgtgagctagaagttatccacagcagatgggccatgctcggagccctaggctgcgttttccctgagctattggctaggaacggagtgaagttcggagaagcggtttggttcaaggccggttcacagatcttcagcgacggaggattggactacttgggcaacccgagcttggtccacgctcagag

SEQ ID NO: 163330 - DNA, 214 bp, Arabidopsis thaliana columbia
atggcgtcttttagcaaccatcgtcgccgtacaaccttctgccgccgtgaaaggacttggaggtagctctgttgccgtagctaagctcttcatcaaaccttctcgccaaagcttcaaaaccaaatccaccagagctggtgctgtggtggctaactttgtaatcatatgactttactatattttagcacattctttttaacccctaatttcatta

SEQ ID NO: 163331 - DNA, 209 bp, Arabidopsis thaliana columbia
  unsure (1)..(209): unsure at all n locations
nggaccactagttctaccaatgtccgaacaacttctctttttcgcgactcttgtggcccgaaaagtcttcaaagtcaagaaaataaagccttacattcctgatttcaagctagctttcgagcatttctgtatccacgcgggaggtagagccgtgctcgacgagattgagaagaacttggatttatccgaatggcacatggagccatcga

SEQ ID NO: 163332 - DNA, 346 bp, Arabidopsis thaliana columbia
caaaaaaaagaaaacacaaaaacaaagattataatggcttcctcaaccatggctttgtcctcccctgccttcgccggaaaggctgtgaagcctgccgcatcagatgtcctcggaagcggccgtgtgaccatgaggaagactgtcgccaagccaaagggtccatcaggcagcccatggtacggatctgaccgagtcaagtacttgggtccattctccggcgagcccccgagctaccttaccggtgagttccccggtgactacggatgggacaccgctggtctatccgccgacccagagaccttcgccaggaaccgtgagctagaagttattcacagcagatgggcca

SEQ ID NO: 163333 - DNA, 333 bp, Arabidopsis thaliana columbia
cgcgtccgaaaagatcgagaaactgcgttgactttgggtgctaatcttgagaatttagggtttggggttgacaaaaaatgagggaatgcttggcaccatcatcaaaagaagcatgagagtgaatagggaaaaaacctccgattacgcaaacaatcaggaatgtaataaacccagaacagaatcgtgtaattgaatcttgattacaaatccttgtaattacgcaaaataaggttgatagtcatggctgcattgatctctctgacatttttaatgttacagattgctattgtaaatcttgtatactcttttgttatgttggttatgaagttatct

SEQ ID NO: 163334 - DNA, 79 bp, Arabidopsis thaliana columbia
gagagagagagagagagagagagagataaagggtcgataaggtctttttccgtttccttgacctctctgggatttggat

SEQ ID NO: 163335 - DNA, 370 bp, Arabidopsis thaliana columbia
cggacgcgtgggcaaggagagaagagagaaagagagaaagagagacagagataatggcgtacagtgcgtgtttcctacaccagagcgcattggcttcatcagccgcacgatcatcatcttcctcctcatcccagcgtcacgtgtcgctctccaaacctgttcagatcatctgtaaagctcaacagtctcatgaagaccataactccgccgtctcccgccgtcttgctctcactctcctcgtcggcgccgctgctgttggttccaaagtatctcctgctgatgcccgcctacggtgaagctgcaaacgtgtttgggaagccaaagacgaacacagactttttgccatacaatggagatgggttcaaagtgc

SEQ ID NO: 163336 - DNA, 385 bp, Arabidopsis thaliana columbia
acctcaaagggtcacaaagggtgtgtagcagcattggcgtctgttgcttcttcaactactctcatctcttctccctcttctagggtttttccagcaaagtcttcactttcctctccatctgtttctttccttcgaaccctttcttctccttccgcatctgcttctctccgctccggatttgctcgacgctcttccctcagctccacttctcgtcggagctttgctgtcaaagcccaggccgatgatcttccactgggttggaaacaaggcgcctgattttgaggcagaggctgtgtttgatcaagagttcatcaaggttaagctctctgattacatggaaaagaagtatgtgattctctttttctacccattggactttactttc

SEQ ID NO: 163337 - DNA, 390 bp, Arabidopsis thaliana columbia
cctaaacccccaaaaaccccgaaatcgcctaagaaggctcctgccgtgaaacccacttgtcctaccgacacacttaagcttggtgtttgcgcagacttattgggcctagttaacgttgttgttggttctccaccaaagactccttgttgtacacttcttcaaggtcttgctaatcttgaagctgcggtttgtctctgcaccgctcttaaagccaatgtcttggggattaatctcaatgttcctattgatctaaccttgctgttgaactattgtggcaagaaagttcctcatggtttccaatgtttctgaagatttgagactttaaaagagaaaaatctctttggtttgctatgtttttatatgtttggttctactggtatctattggttt

SEQ ID NO: 163338 - DNA, 402 bp, Arabidopsis thaliana columbia
caagttagtcaccaaaaaaaaaaaaaaacacaaaaagtttcaatggccgcctccacaatggctctctcctcccctgccttcgccggaaaggctgtgaacctttcccccgcggcatctgaagtcctcggaagcggccgtgtgacaatgaggaagactgttgccaagccaaagggtccatcaggcagcccatggtacggatccgaccgagtcaagtacttgggtccattctctggcgagtcaccgagctaccttaccggagagttccccggagactacggatgggacaccgctggactttcagctgatcccgagacattcgcaaggaaccgtgagctagaagttatccacagcaggtgggctatgctcggagccctaggctgcgtctttccctgagcttttggc

SEQ ID NO: 163339 - DNA, 184 bp, Arabidopsis thaliana columbia
ttctctaaatcctttcctttaatggaggttaaccaaagattccgattttggccccataagttttccaccattcctccttggccggccaaacggttttaaagccctccagggacctaatccaaaaggggggcgttttgggcgggggccgggtgaccatgcgtcggcccgtcaagtttactcccca

SEQ ID NO: 163340 - DNA, 355 bp, Arabidopsis thaliana columbia
tctgagaaagagagaaagagagatctcaatggcggcgataacaagcgcggtgatagcaatagccggaataatcttgggatggataacgatagagttagcttgtaagccttgcctggagtcgggccgtgaagccatcgacagatctctcaatcccgattacgatcctgatgaccaagacgtcgactcatcttccgatgttcgtgctcctctcatccctaatcatcctcccgataattccgatcctgatcccaccaccgcgatcaagtccgtctgatcgatcttgagttttgttttgtgatttgctatccttttgaaaaagttgccaatttaagttgatctggtgttgaattttatt

SEQ ID NO: 163341 - DNA, 387 bp, Arabidopsis thaliana columbia
gtttaatgttccttttgagttcaacttcatagccaaaaaatgggaaaccatcactcttgatgaacttatgatcaatccaggagagacaacggtcgtcaactgcattcatcggttacaatacactcctgatgaaactgtgtcattagactctccaagagacacggttctgaagctattcagagatatcaatcctgacctctttgtgtttgcagagattaacggaatgtacaactctcctttcttcatgacgaggttccgagaagcgctttttcattactcttcactctttgacatgtttgacaccacaatacacgcagaggatgagtacataaacaggtcactgctggagagagagttacttgtgagagacgcgatgagcgtgatttt

SEQ ID NO: 163342 - DNA, 337 bp, Arabidopsis thaliana columbia
gggagaggccgaggacttgctttaccccggtgtctgcttcgacccattgggtttggctaccggcccagaggcattcgctgagttgaaggtgaaggagctcaagaacggaagattggctatgttctctatgtttggattcttcgttcaagccatcgtcactggtaagggaccgatagagaaccttgctgaccatttggccgatccagttaacaacaacgcatgggccttcgccaccaactttgtttccggaaagtgagccaagttttatctttattctgcttcagtttttgcttctttagtgttagaggagaaagagagcttgtttcgatggaaaatt

SEQ ID NO: 163343 - DNA, 394 bp, Arabidopsis thaliana columbia
aaattcacaacaaatctgtttaaaaacaaccaatcaaaacccaacattgcttctcaacaaaaagagcaaagcaaaagattttgcgagagaaaaaaaagaaaatggatttgttcaagatccttcttcttgtgttcttcgtgaacataagtttctgcttcgctgcagatccatattctttctataacttcgaagtctcttacattactgcttctcctcttggtgtccctcaacaggtcattgctataaatggaaagtttcctggtcctacaatcaatgttacaaccaatgaaaatctggttgttaatgtcagaaacaagttagaccagggacttcttctttattggaatggaatccaacagagacgtgtgtcatggcatgatggagtttttgtaac

SEQ ID NO: 163344 - DNA, 269 bp, Arabidopsis thaliana columbia
aattacatttacgctttcttgcaatcaaattttccgatcttaagttcagaagacgatgtcagaggtggaaatagagaacgctgctacgatcgaaggaaacaccgctgcggatgcgccggtgacggatgcggccgttgagaagaagcctgcagcgaaaggacgaaagacgaagaatgttaaggaagtgaaggggaagaagactggtgctgccgcttcgaagaagagaactggttcatctcattctacttacgaagaggtggtttagggtg

SEQ ID NO: 163345 - DNA, 427 bp, Arabidopsis thaliana columbia
aaacgttttactttgtgctgcactactcaacctcaatggccgcctcaacaatggctctctcctcccctgccttcgccggtaaggccgtcaagctttcccccgcggcatctgaagtccttggaagcggccgtgtgacaatgaggaagactgttgccaagccaaagggcccatcaggcagcccatggtacggatctgaccgtgtcaagtacttgggtccattctctggcgaatcaccgagctaccttaccggagagttccccggagactacggatgggacaccgccggactttcagctgaccccgagacattcgcaaggaaccgtgaactagaagttatccacagcaggtgggccatgctcggagccctaggctgcgtcttccctgagcttttggctagaaacggagtcaagttcggagaggcggtttg

SEQ ID NO: 163346 - DNA, 401 bp, Arabidopsis thaliana columbia
aaagaggaagagaaccaccaggaggtagtaagggcttcctctatgctctcctccgccgctgtggttacatccccggctcaggccaccatggtcgctccattcaccggcttgaagtcatccgctgcattcccggtcacccgcaagaccaacaaggacatcacttccatcgcaagcaacgggggaagagttagctgcatgaaggtgtggccaccaattggaaagaagaagtttgagactctatcttacctccctgaccttagtgacgtcgaattggctaaggaagttgactaccttctccgcaacaagtggattccttggggtgaattcgagttagagcacggatttgtgtaccgtgagcacggaaacactcccggatactacgatggacggtactggacaat

SEQ ID NO: 163347 - DNA, 290 bp, Arabidopsis thaliana columbia; identical to SEQ ID NO: 131646

SEQ ID NO: 163348 - DNA, 407 bp, Arabidopsis thaliana columbia
gccaaccagaggattgctaggatttcagctcatctcactcctcagatggaggccaagaactctgtaatcggacgggaaaactgcagagctaaaggtggtaatccaggattcaaagtagcaattcttggagctgcaggtggaattggacaatctttatctttgctgatgaagatgaaccctcttgtctctttacttcatctctacgatgttgtcaatgctcctggcgtcactgctgacgtcagtcatatggacactggagctgttgtccgcgggttcttgggagcgaagcagcttgaggacgcgctaacgggtatggatcttgtgatcataccagccggtataccgaggaaaccagggatgacccgcgatgatcctgttaaaatcaatgctggggatggtaaaacact

SEQ ID NO: 163349 - DNA, 301 bp, Arabidopsis thaliana columbia
acggctggtgcagccggaatcattgtatcaaaccatggagctcgccagcttgactatgtcccagcaaccatctcggcccttgaagaggttgtcaaagcgacacaaggacgaattcctgtcttcttggatggtggtgttcgacgtggcactgatgtcttcaaagcacttgcacttggagcctccgggatatttattggaagaccagtggtattctcattggcagctgaaggagaggctggagttagaaaggtgcttcaaatgctacgtgatgagttcgagctgaccatggcactgagtgggt

SEQ ID NO: 163350 - DNA, 415 bp, Arabidopsis thaliana columbia
atcacatcttattaactaaagagccttttacttgcgccacactctcaccgcaatggccgcctcgacaatggctctctcctctcctgctttgaccggaaaggccgttaagctatccccggcggcctccgaagtatttggaaccggccgaatcaccatgcgcaaagcctccaagcccaccggtccatccggcagcccatggtacggatccgaccgagtcaagtacttgggtccattctccggtgagcctccgagctacctcactggagagttccccggtgattacgggtgggacactgccggtctatccgccgatcccgagaccttcgctaggaaccgtgagctagaagttatccacagcagatgggccatgctcggagccctaggctgcgttttccctgagctattggctaggaac

SEQ ID NO: 163351 - DNA, 418 bp, Arabidopsis thaliana columbia
gcctgcagtaccgatctcgcagtttccggctagaccgcacccggaagatgacatggcaaaatatacagcgaagacgcttaatgatccccgaacgttgaataaaactgtgtatgttagacctaccgacaacattctcacacaaatggaactagttcagatatgggagaaactaaccgaaaaagagttggagaagacctatgtttcaggaaacgactttcttgctgacattgaagataaggagatatcacaccaagcgggactaggacacttttatcacatatactacgaaggttgtctcacagatcatgaagttggagacgacgaagaagctactaaactctatccggatgtgaagtacaaacgcatggatgaatatttgaaaattttcgtataatgttacatatatgtgaaacacatc

SEQ ID NO: 163352 - DNA, 332 bp, Arabidopsis thaliana columbia
acctactcaatctcagatctcgttaaacctagatacctcgagaaaaaccgtatcaatggcgccgaaagcagagaagaagcccgctgagaagaaaccagcttccgagaagccggtggaggagaaatcaaaagccgagaaagctccggcggagaagaaaccaaaggccggaaagaagctcccgaaggaagctggtgccggaggcgacaagaagaaaaagatgaagaagaagagtgtcgagacttacaagatctacattttcaagggtgcttaagcaagttcatcccgatttcggaatctctaacatagcgatggggatcatgtaacattttatt

SEQ ID NO: 163353 - DNA, 300 bp, Arabidopsis thaliana columbia
gaaaagagtaatagcgcggcggagccatggttctcaagactgagctttgccgattcagtggccagaaaatttaccctggtagagggatcagatttatccgatcggactctcaggtgtttttgtttatcaacttcaaatgtaagacgtattcccacatcatgttgtatccatcttatctttgctgtactgctatgtaccgattgcatgcacatgaaggacccatcctcttttgctgttatttttttttttttttcattttattatattttatctctgtgtcctcttgtgtagttttttttt

SEQ ID NO: 163354 - DNA, 448 bp, Arabidopsis thaliana columbia
cctccttcttcaatctctctattctcttactaacgttatttcttcaatctcattgatcaaaaaaaaccaaaaccctaatctgcaaaaatctcaatttcctccaaaagtttcagtttttaaaaatgggttttcttcttttgtaacgaaaaaatgtgtcaaactttgaattgaccatttttttttataaggattcgatgaagaaattgagaagctattactcaaatgtgagacatcatcagaatcaccatcatcatcaccatcatcatagcaacattgtttcttcagagaggaaatggatatttttccctctattgattggttcaatcttcgctttgttcttactcttcctcacaacaaccctaacttcaccaaccggaggagtccgatttctcccttttacccgaccccgtttgtaaccggatctggttcatagctttcgtggatccaa

SEQ ID NO: 163355 - DNA, 292 bp, Arabidopsis thaliana columbia
agaacaatggcttcctctatgctctcttccgctactatggttgcctctccggctcaggccactatggtcgctcctttcaacggacttaagtcctccgctgccttcccagccacccgcaaggctaacaacgacattacttccatcacaagcaacggcggaagagttaactgcatgcaggtgtggcctccgattggaaagaagaagtttgagactctctcttaccttcctgaccttaccgattccgaattggctaaggaagttgactaccttatccggaacaagtggattcctt

SEQ ID NO: 163356 - DNA, 237 bp, Arabidopsis thaliana columbia
  unsure (1)..(237): unsure at all n locations
gtcgaccacgcgtccgtaaaagttgtgagagctgtttcgtcgctttgattgaaatggcgtcgtcttctccaactcaggtggctcacgtcccgattcctccggaaccagnaggaaggtctccgacacaagaagctaatgagccaccagttccgatttacattgtgacggatccgtttcaacttcctgctgatttcctaaacccttctcctgaaaagaaattggttatccggttttgac

SEQ ID NO: 163357 - DNA, 105 bp, Arabidopsis thaliana columbia
  unsure (1)..(105): unsure at all n locations
caaggcagggaaatacactttcttcatgccaaaattcatcttctacgcgacttacttatncgggaaaaatcggtactggagatacatcacaatctacagcacctc

SEQ ID NO: 163358 - DNA, 297 bp, Arabidopsis thaliana columbia
atctttctcctttggtggcaaacacaacgacagatagagagaaacgatggcgtcgaactcgcttatgagctgtggcatagccgccgtgtacccttcgcttctctcttcttccaagtctaaattcgcatgcgccggagttccactcccaaacgccgggaatgttggtcgcatgagactggctggtcactggttgcctggcgagccacaagctgattaccatgacgtgaatgactgtcaagccatgctctgttcttcgtttttatgcctatcggtttatgtgacattgtaccttaatgt

SEQ ID NO: 163359 - DNA, 428 bp, Arabidopsis thaliana columbia
  unsure (1)..(428): unsure at all n locations
gaaacaacaagaagtagtaatggcttcctctatgctctcctccgccgctgtggttacatccccggctcaggccaccatggtcgctccattcaccggcttgaagtcatccgctgcattcccggtcacccgcaagaccaacaaggacatcacttccatcgcaagcaacgggggaagagttagctgcatgaaggtgtggccaccaattggaaagaagaagtttgagactctatcttacctncctgaccttagtgacgtcgaattggctaaggaagttgactaccttctccgcaacaagtggattccttgtgttgaattcgagttagagcacggatttgtgtaccgtgagcacggaaacactcccggatactacgatggacggtactggacaatgtggaagctttcattgttcggatgcaccgactccgctc

SEQ ID NO: 163360 - DNA, 327 bp, Arabidopsis thaliana columbia
gtccgatggttctcaagactgagctttgccgattcagtggccataaaatttaccctggtagagggatcagattgtatccgatcggactctcaggtgtttttgtttctcaactccaaatgtaagaggtatttccacaacaagctgaagccatctaagctttgctggactgctatgtaccgaaagcagcacatgaaggacgcagcacaagaggctgtgaagagaaggagacgtgcaactaagaagccttactcaaggtcgattgtcggggctactttggaggtcatccataagaagcgagcatagaagccttgagttcgagatgcccgt

SEQ ID NO: 163361 - DNA, 304 bp, Arabidopsis thaliana columbia
  unsure (1)..(304): unsure at all n locations
gcgttgcaccaaatctagtccacacagatgagcgagagccagctgcttttgggccttcattgaagcctgagtgcaaggaggcaatgagcacaacaccgttccaaaccgtggttgagaacttttacatgacaaactcgatcacaggagcatcaaagatcatggcgcagtgcagtgccgtgctcttgaaaaagtgagagctttaacttgggttttcacattttcttttcttttcgcaaaaataaagatacttgattcttcgtttgcttgtccctctttattaagaccttttgntttaagccctgag

SEQ ID NO: 163362 - DNA, 477 bp, Arabidopsis thaliana columbia
  unsure (1)..(477): unsure at all n locations
ccgagatctaacaaatctctcactcaatccgtactctaaatcctccgcaagattcgtctgctccgatgacaaatcctcctcctccacacctcaatccatgaaagctttctccgccgccgtcgccctctcttccatcctcctctctgctcctatgccagctgtcgctgatatctcaggtttgactccttgcaaggactcaaaacagttcgctaaaagagagaagcaacagatcaagaagcttgaatcttctcttaagctctacgctcctgaatctgcccctgctcttgctctcaatgctcagatcgagaaaaccaaacgcaggttcgacaactacgggaagtacggattgttatgcgggtcagacggnttaccgcacttgatagtgaacggagaccagcggcattggggagagtcaattacttcagggattctttcctctcaatgctggatggaaccggtggtttgaagaagctcctt

SEQ ID NO: 163363 - DNA, 449 bp, Arabidopsis thaliana columbia
cttcactctctctaatcaaaaagcttttaacctcagccgttaaatctttctccgatcatgccgaccagaaacatcgccattggtggagtccaagaagaggtctatcaccccaacgcacttagggcggcgctcgctgagtttatctcgactttgatcttcgtcttcgccggctcaggctccggaattgctttcaacaagatcactgacaatggagcaaccactccttccggcctcgtcgccgctgccttagctcatgctttcggtctctttgtcgctgtctctgttggcgctaacatttccggtggccacgttaaccctgccgttaccttcggtgtcttactcggtggtaacatcactctcctgcgtggtattctctactggattgctcagcttattggcttcgtcgacggttggtttcttccttgctttgccaccggttggctagccaa

SEQ ID NO: 163364 - DNA, 302 bp, Arabidopsis thaliana columbia
tcttaactaacatcatctctctccctttctctttctgcaatttctatattacaatgggtcctttttgtgtgtactgtacctcgcttttctccatttcttagtattgggttttggaaaccattgattcatgtcttgtttcattagatcttgctctggatttcccagatctatggatctgcatgtgggttttggtcaaaaatgtctaatggtgttgcaattccctaaaggaattcatctttatccatttcaccttatttttgtttctggatctttgaaatggatgacgatgggtttcgtaattg

SEQ ID NO: 163365 - DNA, 385 bp, Arabidopsis thaliana columbia
atctttttctcattcatcaaaagaaaaaaccaatgcaaaaaaaactcaaaacgtttttgaagataatgatgatgatgacgaagatgtttgttcagatcgctgtggtttgtctattggcgacgatggccgttgtgtccgcccacgagggtcaccaccaccatgctccggctccagcaccaggacccgcatctagctcaaccgttgtttcggccaccaatatgttcaccgtcttggctattgctgccgtggctctcgtcgttggttccaaccactaagttggttattacattcgtcgttttgtttcggtgtctatgaaattgatctcttgactttaatatatttggtactcttctcattcgtttctcaactcattccgggtcgacct

SEQ ID NO: 163366 - DNA, 314 bp, Arabidopsis thaliana columbia
gccgggttctcgggtcggatcttctaagtctagctagggataatggctactgtcactactcatgcctcggcctcgattttccgaccttgtacttcaaagccaagattcctcaccggttcttccggtaggttgaaccgcgacttgtcgtttacatcgatcggttcatcggccaaaacgtcgtcgttcaaggttgaagctaagaaaggagaatggttgcccggtttggcatcgcctgattatctcaccggcagtcttgccggtgacaatgggtttgacccgttgggtctagcataggatccagagaacttgtatat

SEQ ID NO: 163367 - DNA, 423 bp, Arabidopsis thaliana columbia
cggacgcgtggggaaagagaaaaaactgaaactcaacttatgctttgtttcttttttaatttgaaagcaatgtcttctactgaccacgaagaagttacccttccgtttcatcatcatcctttatcatgtggtacttttgagtcttacactttccgctccatattatctatcccgaagctaagaaatggcatatacaactgctatcactgcaaggagtgcagcttgacgtttcacaaagaatgggctgacagcttcttcagccagcaatttatctgcaatcacgttctcaagatcttccgccgggctaagacaccattagttgacagtacagatgaccacttttgtcatttttgtcgaagcaagcttaagttaaagcatttccggtgcacgatatgcaacataagcgtgggtagagaatgtgtg

SEQ ID NO: 163368 - DNA, 343 bp, Arabidopsis thaliana columbia
caccttacttggcaaacactcaacgaagaaaggagagagagacggtaatggcgatcaagaacattctcgcccttgtggttcttcttagcgtggttggagtttctgtcgccattccacagttgcttgacctcgactactaccggtctaagtgtcccaaggcagaggaaattgttcgtggtgtcacaagacaatatgtttctcgccagaaaacccttgccgctaaacttctaaagatgcatttccatgattgtttcgtcagaggatgtgatgtgtccgttcttttgaaatctgcaaagaatgattcgataagagacgctgtccccaacctgaccctgtaagttta

SEQ ID NO: 163369 - DNA, 425 bp, Arabidopsis thaliana columbia
  unsure (1)..(425): unsure at all n locations
gaagaagaaaaaataatggggcgtttggattatttagcgttgaagaccgacgacgtcgttacggtggcgttagtcaattccgatatggaggagctcaaggtcgctgcgaagaaactgtttagcgatgtttcgaagcttggtggattaggcttcggggtttcttttctcaaattcctcgtttctttcgctgccatttacttgttaattttggatcgtaccaattggaaaaccaagatgcttcattcactcctaataccatacatcttccttagccttcctagtgtcattttcaacttttctcagtggagatgttgggaaatgggattgctttccnttgcggttgttcttagacttttttttcccttagtattttcccaaatttggctttgagatgtccagtttttcttgatccttgctacttgtta

SEQ ID NO: 163370 - DNA, 284 bp, Arabidopsis thaliana columbia
ggaatccggtgaatcgaaactagatgtccctcaatctgtctcgtctttcgcttctctcgtccccacgtatctcgatttcaactcacgctcctcggaaaggatacgtttgttgctctatgaagtcttatagattatctgaacttagttcttcccaagttgatagtttgaagtcacgccctcgcattgacttctcttctattttcgccactgtgaacccgattatcgatgctgttcgtagcaatggggataatgctgtcaaagaatacacttgaagatttgacaaa

SEQ ID NO: 163371 - DNA, 402 bp, Arabidopsis thaliana columbia
  unsure (1)..(402): unsure at all n locations
gtctggaaacagctgtatctaactttttcccttttctctatgattctgttgtgaataatgcagagccgccgtgagctcaggcgccaccgtaacgaagaacaaacctgaaggagaaaaataagccatgggatgtgcggcgtccaagctcgataacgaagatgctgtacggcgttgtaaggatcgccgccgtctgatgaaagaagctgtctacgctcgtcatcatctcgccgccgctcacgccgattactgccgatcgcttcgtatcactggatctgctctttcctcattcgcctccggtgagcctctctctgtatctgatcaaactcncggctgttttcctccatactccccctccttcgctttctgaacaatctccggctaaatttgtcccttcacgttttt

SEQ ID NO: 163372 - DNA, 371 bp, Arabidopsis thaliana columbia
gtcttagcccatgaactaggccatctgaagtgtgatcacggcgtgtggctcacatttgcaaatattcttactcttggggcttatacagttcctgcttttgggcaaatgatagctcgaaccttggaagaacagttacttcgttggctacgttcagcagagctgacttgtgatcgcgcagcactactcgtcgcccaagatccaaaggttgttgtatctgttctgatgaaattagccggaggatgtccatcaatcgctgatcagctaaatgttgacgcatttctagaacaagcccgttcatatgacaaagctttttcaagccccttgggatggtacataagaaatgctcagactagtcaactttcgcatccatt

SEQ ID NO: 163373 - DNA, 407 bp, Arabidopsis thaliana columbia
aaaagaagaagatagctcctgaagacaaaaatggcggtttctctcccgaactcgtttcttcagattagcccatgtgttccttctctgcaattaagaaagccggtgatggcggcagtgaaaggaggaaaacaatcggtgagaagaagcagcaatacggtggttcagataacgtgtacctagaaggaattgcatgctgaattccacgaagacgcaaaggtttactgcaatggagagctggtgatgactacaggaggaacaaagaaagagtatgtggttgatgtatggtcaggtaaccatccgttttacctcgggaatcgttcggctttgatggttgatgctgattaaagggggaagtttcctaggaggtcggtgtgctttctgagattatagtgattaccgtgcttaag

SEQ ID NO: 163374 - DNA, 216 bp, Arabidopsis thaliana columbia
ctgaactagatgacagttatgagaatatgcgtatgtttccctggaatcaaccgagtattgttcccgaatgcttgttgtcgagtctacaaaagttcacctggtcgcagtacttaggaagaacacaagacagagatattgcggtttacatcttgaaaaacgcttgatgcttaaggaatgcatcaatctgtttttatacatgtttgtttcaagaactta

SEQ ID NO: 163375 - DNA, 418 bp, Arabidopsis thaliana columbia
gcttttgacaatgggccacagacacagcaagtccaaatcctccgatccgccaccgtcctcctcctcctcttcctccggcaacgtagtccaccatgttaaacctgccggagaacgccgcggatcatccggttccggaaccgtcggatcgtcaggctccggaacaggcggatctcgttccaccacatctactcagcagaatggtcggatcttaggtcggccgatggaggaagtacggagaacctatgagtttggtcgtgagcttggtcgtggccagtttggtgtcacgtacctcgtaactcacaaagagacgaaacaacaggtcgcttgcaagtcaatccctacgcgccgccttgttcacaaaagacgacattgaagatgttcgccgtgaagtccagattatgcaccatctcagcggtca

SEQ ID NO: 163376 - DNA, 425 bp, Arabidopsis thaliana columbia
  unsure (1)..(425): unsure at all n locations
attatccttcctcgaaacaagagcttagctaagatgacgaagaactacccaaccgtgagcgaagattacaagaaggctgttgagaagtgcaggaggaagctcagaggtttgatcgctgagaagaactgtgcacccatcatggtccgactcgcatggcactctgctggaactttcgattgtcaatcaaggactggaggtccattcggaacaatgaggtttgacgctgagcaagctcatggagccaacagtggtatccacattgctcttaggttgttggaccccatcagggagcaattccctaccatctcttttgctgatttccatcagcttgctggtgttgtggncgntgaagttactggtggccctgacattccttttcaccctggaagagaggacaagccccatccacctccagagggtcgcct

SEQ ID NO: 163377 - DNA, 410 bp, Arabidopsis thaliana columbia
gcaactcaaatcttaaacgtttactttgtgctgcactactcaacctcaatggccgcctcaacaatggctctctcctcccctgccttcgccggtaaggccgtcaagctttcccccgcggcatctgaagtccttggaagcggccgtgtgacaatgaggaagactgttgccaagccaaagggcccatcaggcagcccatggtacggatctgaccgtgtcaagtacttgggtccattctctggcgaatcaccgagctaccttaccggagagttccccggagactacggatgggacaccgccggactttcagctgaccccgagacattctcatggaaccgtgaactagaagttattcacagcaagtgggccatgcttggagccctaggctgggtcttccctgagctttggggcta

SEQ ID NO: 163378 - DNA, 480 bp, Arabidopsis thaliana columbia
  unsure (1)..(480): unsure at all n locations
tctctctaagcttcttcttctaccaatctaattcctctcttcagcttcttgtgttgtgacgcatactcgtcgcagtcttgagatatggccgccgcagtttccaccgtcggtgccatcaacagagctccgttgagcttgaacgggtcaggatcaggagctgtatcagccccagcttcaaccttcttgggaaagaaagttgtaactgtgtcgagattcgcacagagcaacaagaagagcaacggatcattcaaggtgttggctgtgaaagaagacaaacaaaccgatggagacagatggggaggtcttgcctacgacacttctgatgatcaacangacatcaccagaggcaaggggtatgttgactctgtcttccaagctcctatgggaaccggaactcaccacgctgtccttagctcatacgaatacgttagccaaggcctttagcagtacaacttggacaacatgatgggatggtttaca

SEQ ID NO: 163379 - DNA, 367 bp, Arabidopsis thaliana columbia
cggacgcgtggggaccaccaaccaaacactcatttttccacatcttgagagaaaaaaacagagcaggtttattagagatctcatggcgatggcggtctccggagctgtcctcagtgggcttggttcttcgttcctcaccggaggcaagagaggtgccaccgcattggcaagcggcgtaggcactggagctcagagagttggcaggaaaactcttattgtcgctgctgcggctgctcaacctaagaaatcttggatccctgccgttaaaggtggtggcaacttccttgaccctgaatggctcgatggctccgttaccagaaaatttcgggttcgacccatttcgtttggggaaagaacccggcttttt

SEQ ID NO: 163380 - DNA, 410 bp, Arabidopsis thaliana columbia
cgtccggccaaatccacacccgcggggtcttctggtccatccttggttccccttttcctttctcactgtttctgccttacttaaaggctcaatctttgcttcaaattcaacccatctctttttcctcccttccctcacaatcaaaatcttaattctcagcttctggttttgtcgaaaatggaaggcggttccgctagtggatcggcttcggctttgtcaaacgatgaaaaatctcgtcgtttcttgtgaggattcttcttctcctatagggaatgagcttgagcttggtcttacgttgagccttggtcgcaaaggggtatcgagattgtagggtttacgctgatgattcttcttcttcttcatcatctttcttctctgagcagagctagcgtaattgctgggatcaagag

SEQ ID NO: 163381 - DNA, 362 bp, Arabidopsis thaliana columbia
agcttcttcttctaccaatctaattcctctcttcagcttcttgtgttgtgacgcatactcgtcgcagtcttgagatatggccgccgcagtttccaccgtcggtgccatcaacagagctccgttgagcttgaacgggtcaggatcaggagctgtatcagccccagcttcaaccttcttgggaaagaaagttgtaactgtgtcgagattcgcacagagcaacaagaagagcaacggatcattcaaggtgttggctgtgaaagaagacaaacaaaccgatggagacagatggagaggtcttgcctacgacacttctgatgatcaacaagacatcaccagaggcaaggggtatggttgactctgtc

SEQ ID NO: 163382 - DNA, 431 bp, Arabidopsis thaliana columbia
gattaatctccgacgaaatctatgagccaatgaagagaatctgcaacggaaattattacaatgtggatccatctaacacacaatgtttgaaacttactgaagaatatcataagtgcactgccaaaataaatatccatcacatattaacaccagattgcgatgtaaccaatgtaacatctcctgattgttattattatccatatcatctcattgaatgttgggctaacgacgagagcgttcgcgaagctcttcatattgaaaagggtagtaaaggaaaatgggcgcgatgtaatcggactattccatacaatcacgacattgtaagcagcataccatatcacatgaataacagcatcagtggataccgatctcttatttaaagtggtgatcacgacaatttcggtcctttttttgcaactcaagcctggata

SEQ ID NO: 163383 - DNA, 422 bp, Arabidopsis thaliana columbia
  unsure (1)..(422): unsure at all n locations
ggcaacgcattattgacacgtgtcttttcatttctcttcttccggcgttttctctccgccgtttcgccaccgtacgtgacaatgtctgtttctctctccgccgcctctcacttactctgttcctccaccagagtctctctttcccccgccgtcacctcttcgtcctcgtcccctgtcgttgctctttcttcctctacatcgccacattctcttggaagcgtcgcatcttcttctctgtttcctcactcctccttcgtgcttcagaaaaaacatccgatcaatgggacgagcacgaggatgatttcaccaaaatgtgccgcttctgatgcagctcaattgataagcgctaaagaagatatcaaagttcttctccggactaagntttgccatcccatcttggttagaattgggtggcccgatgc

SEQ ID NO: 163384 - DNA, 482 bp, Arabidopsis thaliana columbia
aagacctctcagcagccaacgacagttatcaaagcttaagccgttttagggttttatccttttgctgagatccaatcatggcggatgttgaaccagaggttgctgctgctggagttcccaagaagaggacgtttaagaagtttgccttcaaaggagttgatctcgatgctcttctcgatatgtctactgatgatcttgtcaagctcttctcttctcgtattcgtagaaggttctctagaggtttgacaaggaagccaatggctctgattaagaagctgaggaaagcgaaaagggaggcaccacatggtgagaagccagaaccagtgagaacccacttgaggaacatgatcatcgtccctgaaatgattggaagcatcattggagtgtacaacggaaagactttcaaccaggttgagatcaagcctgagatgattggtcactacctggctgagttctctatctcatacaagccggtcaagcac

SEQ ID NO: 163385 - DNA, 317 bp, Arabidopsis thaliana columbia
caaattctgagatctgtaaaagatgagcgacggtgacgacgctgctagacgccgtaccgcggcggtgactgattaccggaagaagctccttcatcacaaggagctcgaatcccgtgtccgaacagctagggagaatttaagagcagctaagaaggaattcaacaaaactgaggatgatttgaagtctcttcaaagcgttggccagattattggagaagtactacgatctcttgataactagcgattgacttgttttggtatagttgtttccccattgttttgtgttttgtttctcctttttcctattgcctatttct

SEQ ID NO: 163386 - DNA, 303 bp, Arabidopsis thaliana columbia
taaaaactccgatggatcggcaaaattccgatgacatcatgagatttctcgatggaatggctagctccgacgacgttcttttcggttttcttgacgaaggaaaccagtcaccggaagatttctccgtaaacctcaacgccggcgaagatgacggtgacgaagacgacaacaataacaattctgaagataacaaagctttttggcagtaacacgaacaacttcttcaggggacactgtataggacaagtttcattgagacaaagattagacaagctacaaaagaagcgttgaaacaagttaaat

SEQ ID NO: 163387 - DNA, 344 bp, Arabidopsis thaliana columbia
ataaaagttaaagccatggctgcatctttctctgtcccctctatgataatggaagaagaagggagattcgaagcggaggttgcggaagtgcagacttggtggagctcagagaggttcaagctaacaaggcgcccttacactgcccgtgacgtggtggctctacgtggccatctcaagcaaggctatgcttcgaacgagatggctaagaagctgtggagaacgctcaaaagccatcaagccaacggtacggcctttcgcaccttcggagcgttggaccctgttcaggtgaccatgatggctaaacatttggacaccatctatgcctttggttggcagtgctcgtt

SEQ ID NO: 163388 - DNA, 386 bp, Arabidopsis thaliana columbia
aaaaagttaaaaattttttatttatatattttttttgagtacgcgtacttgtcaataaaaaaaataaaatgtattccaaatttattcaaatgaggttttcggtaacgtatcaataagctagacccatacttcgagttgtttcatgccataaataaactcgaacgctcaaaaaaatccgttggacaggcggattcacatctcttacaaccaacacagtcctcggttcttggagcagaagctatttgcttagctttacatccatcccaaggtatcatttctaatacgtctgtagggcatgctcggacacattgagttcatcctatacaagtatcataaatttttactgaatgtgacataagatccatagttttttgaatgtcataaat

SEQ ID NO: 163389 - DNA, 405 bp, Arabidopsis thaliana columbia
caactaacttgaagaataaggaattgattggaaaatctgacccttatgctaccatctacattcgtcctgtattcaagtataaaacaaaggcaatcgagaacaatctgaatcctgtctgggatcaaacattcgaattgattgcagaggacaaagaaacccagtcgctcactgtagaggtatttgataaagacgtaggtcaagatgagcgccttggacttgtgaaacttcccttaagcagtttggaagccggagttacaaaagaactggagctaaatctgttgtcttcacttgatactttgaaagtaaaagataagaaagatagaggaagcataactcttaaggtacattatcatgagttcaacaaagaggagcaaatggctgcgttggaagacgagaagaagatca

SEQ ID NO: 163390 - DNA, 377 bp, Arabidopsis thaliana columbia
atccgaccgagtcaagtacttgggtccattctccggtgagcctccgagctacctcactggagagttccccggtgattacgggtgggacactgccggtctatccgccgatcccgagaccttcgctaggaaccgtgagctagaagttatccacagcagatgggccatgctcggagccctaggctgcgttttccctgagctattggctaggaacggagtgaagttcggagaagcggtttggttcaaggcttggtcacagatcttcagcgacgggaggattggactacttgggcaacccgagccttggccacgctcagagcattttaaccatttgagctactcaagttatcctcatgggagctgttgagggctacagagtc

SEQ ID NO: 163391 - DNA, 216 bp, Arabidopsis thaliana columbia
tcgccgatagttcgacctggaggtttttgggttctttcttttccacctgtgaactataatagacgatggcgtggattgaacacaaccatggaagatcaaaaatctgactacaacaaggcttaatcacttttaacctccatgtgttttaaaaaggacgctcaaaaaaatgacataaccctgtggcagaaactttcaaacaaattttgctttgacaaa

SEQ ID NO: 163392 - DNA, 316 bp, Arabidopsis thaliana columbia
agagaattaaagtcattcattatttggggaatgtagaagaagctcctttcctacagacgccatcattaacaacatcctcttaagcttctgcgattctctccgtttgtcggaagatttcacgacgattcttcaatccttatccgaaccggagaaatcatgtcggacgctttgatcaatggattggctggagctggtggtgggatcattgctcagcttctcacttatcctcttcaaactgtaaatacgcgccaacagacggagcgggatctgaagagggagaagaggaaacttggaactatcgaacacatgtgtcagg

SEQ ID NO: 163393 - DNA, 221 bp, Arabidopsis thaliana columbia
aaaaaatcaattgaagagtctctcagtcgttaggggaagcaaatagagaaatggctagctttactgcctccgcttccaccgtctccgccgctcgtccggctctccttctcaagcctaccgtcgccatctctgctcctgttcttggtttgcctccaatgggtaagaagaagggaggagtgagatgttcaatggagacatagcaaggaaacgtctcactcatg

SEQ ID NO: 163394 - DNA, 487 bp, Arabidopsis thaliana columbia
cggacgcgtgggagaaaaaccaaaagaagaagagaaacaacaagaagaagtaatggcttcctctatgttctcctccaccgctgtggttacctccccggctcaagccaccatggtcgctccattcaccggcttgaagtcatccgcttctttcccggtcacccgcaaggccaacaacgacattacttccatcacaagcaacggaggaagagttagctgcatgaaggtgtggccaccaatcggaaagaagaagtttgagactctatcttacctccctgaccttagtgacgttgaattggctaaggaaggtgactaccttctccgcaacaagtggattccttgtgttgaattcgagttggagcacggatttgtgtaccgtgagcacggaaacactcccggatactatgatggacgatactggacaatgtggaagcttccattgttcggatgcaccgactccgctcaagtgttgaaggaagttgaagaatgc

SEQ ID NO: 163395 - DNA, 348 bp, Arabidopsis thaliana columbia
aaacaacaacaaagagagaaattaacatggcgtcttttgcaaccatcgccgccgtacaaccttctgccgccgtgaaaggacttggaggtagctctcttgccggagctaagctcttcatcaaaccttctcgccaaagcttcaaaaccaaatccaccagagctggtgctgtggtggctaagtatggagacaaaagtgtatactttgatttagaagatttgggtaacacaacaggacaatgggatgtgtatggatctgatgctccttctccttataacccacttcatagcaagtcctttgagacatttgctgctcctttcacaaagagaggtttgtttcttaaaatttttg

SEQ ID NO: 163396 - DNA, 470 bp, Arabidopsis thaliana columbia
gcgatctgtcacaggccactgaacttgcacaatacatggtatcgagttgtgggatgagtgaggcaataggaccagttcatataaaagaaagaccaagctctgatatgcaatcacgcattgatgccgaggttgtgaagcttcttagagaagcatatgagagagtgaaatctctcttgaaacggcatgagaagcagctacacacgttagcaaacgcacttctagagtatgaaacgctaaccgcagaggacataaagcgtattctccttccaaagcaggaaggcgagaaatttgaagagcaacaacaagaagaaggagacttggtattggcctaatcacatcattcattaccataaacacacttctttgggtgaaaaagggagattcaaagctttgtacagagtaaatctcccatagctttttacaacaacaaccaaaagaaaaacatatgaaattattgatctcatgttaca

SEQ ID NO: 163397 - DNA, 274 bp, Arabidopsis thaliana columbia
cttttgtcactcatcttcacaggaaacaatggtgtttgtgaagtcctccaaatcgaatgcttacttcaagaggtaccaagtgaagttcaggagaaggagagatgggaagactgattacagggcaaggatccgtcttatcaatcaagacaagaacaagtacaacacccctaagtaccgttttgttgttcgatttaccaacaaagacattgtggcacatattgtatctgcaagcatagctgcggtcatagttaaagcttatttttacttacatgaa

SEQ ID NO: 163398 - DNA, 326 bp, Arabidopsis thaliana columbia
tcaacgacgacgagccatggcttcaactttcagcggcgatgaaactgctcctttcttcggattccttggcgctgccgccgctctcgttttctcctgtatgggagcagcgtacgggacagcgaagagcggggttggtgtagcgtcgatgggtgtgatgagaccagagcttgtgacgaattagattgatcctgatgcaaaggcgtgtagatttagtgacttatggtttgtccacctaacattttagaaataatttgatacattctttattacaccctcatactttaaatttctttttaatctaattattaaatgataatattaatatc

SEQ ID NO: 163399 - DNA, 473 bp, Arabidopsis thaliana columbia
acctaatggtcctgtgtctgaggaggccttagacaaggttcgcaatgtcttggagaaaatcaagccgtctgatgttggtctcgaacaggaagctcaattggtgcgtaattggcctggtcctgggaacgagcgtaatggaaaccatcattctctgccagcaataaaataccttcagttacatgagtgtgacagcttctcgattggaattttctgcatgccacctgggtctatcataccactttataatcatccaggcatgacagtgctaagcaagcttgtttatggttcaatgcacgttaagtcatatgattgggctgagcctgaccaatcagaggctagacgatccattacaagcaagacccgcgaagctggtcaaggatattgatatgacttcccctagcccagcaaccactctatatccaacaaccggtggcaacattcattgtttcaaagccattactcattgtgcaatc

SEQ ID NO: 163400 - DNA, 308 bp, Arabidopsis thaliana columbia
cttgttttctctaaatttttcaaaaaacctttagaattttcatttttttacgattccgatgttaactgtttctccggctccagtactcatcggaaacaactcaaaggatacttacatggcggcagatttcgcagattttacgacggaagacttgccggactttacgacggtcggggatttttccgatgatcttcttgatggaatcgattactacgacgatccttttattgtgattcgatggagacgatgttcttgcatatctgttgctagcatgctagattattgttcaatgttctttgaaggcttat

SEQ ID NO: 163401 - DNA, 373 bp, Arabidopsis thaliana columbia
ctcttacattttgaaaccctaatttctcttcttttccccaaaaaaaaaatgtctgaagttgagtaccggtgctttgtcggcggccttgcctgggccaccaatgatgaagatcttcaaaggacgttctcacagttcggcgacgttatcgattctaagatcattaacgaccgcgagagtggaagatcaaggggattcggattcgtcaccttcaaggacgagaaagccatgagggatgcgattgaagagatgaacggtaaagagctcgatggacgtgtcatcaccgtgaacgaggctcagtcgagaggtagcggcggtggcggaggaggccgtggtggaagcggttgtggttaccgcagcggaggcggtggtggat

SEQ ID NO: 163402 - DNA, 488 bp, Arabidopsis thaliana columbia
cggacgcgtggtcaagaagaacaacaacactaatcaattaagaaaagctcaagccgagagagacagtggcatcaacattcacgagcgcaagcagtgttcttaccccaacaacatttcttggccagactaaagcctcaagctttaacccacttcgtgatgttgtctctctcggatctcccaagtacactatgggaaatgatctttggtatggacctgacagagtgaagtacttatgacccttttccggtcaaacatctagttaccttaccgtcgaaatacgtgggggagatatttgtagagcaatcaccctgtagaagggagaccttgttttggtcttaatacattattcattaccataaacaccactttttgggtgaaaaagggagattcaaagctttgtctatttatatttaacattcaattactattttattcattatttattaattaatttttttatttatttatttttcttattactaatattt

SEQ ID NO: 163403 - DNA, 437 bp, Arabidopsis thaliana columbia
tactcgggccagagatgagaagcacaggagaagtgatgagcatcagttctgaattctcaagtgcgtttgcaatggctcagatcgctgcaggtcaaaagctacctctatcaggcacagtcttcctcagcttaaacgatatgaccaaaccgcacctggagaaaatcgcggtgtccttcctcgagcttgggttcaaaatagttgccacctcgggaacagctcatttcctggaactgaaaggcattccagtggagagagtgttgaagttgcatgaaggaagaccacatgctgctgatatggtggcgaatggtcagatccatttgatgttgatcacaagctcgggtgatgctcttgatcagaaagatgggagacagctcatacaaatggctctagcatacaaggtacctgttttaaccactgttgctggtgcattggccact

SEQ ID NO: 163404 - DNA, 284 bp, Arabidopsis thaliana columbia
gacttggactagtgcggctttgactgacgagaacacttgctccgatgggttctcgggtcgggttatggatgggaggatcaagaactcggttcgggctagaatcatgaacgtgggacatgaaaccagcaacgctttgtccttgattaatgcctttgctaaaacttactaatttaaaactatattttgtcctgtaaaatatatatatagataaatgtaatgtcttgctaagagtttgatgtgatatatttttttcgaaaaaaaaaaaaaaagggcggtcgttctat

SEQ ID NO: 163405 - DNA, 414 bp, Arabidopsis thaliana columbia
gccattaacgagagtgagagagagagacacacacacagcgagtgaaaatgtctccggagaagaagagtcaaaacttccctccaataacggaatgcagagacggagagtacgattcgatagccgccgatcttgacgggactctgcttctctcaagaagctccttcccttacttcatgctcgtcgctgttgaagctggaagccttttacgtggactaatcctccttctctcgttaccattcgtcattatctcttacctattcgtatccgaatctcttggtatccagatcctcatcttcatctcattcgctggtctcaaaatccgcgatatcgaacttgtctcttcggcagttcttccacggtttttacgcggcggatgtgaggaaagacaagtttttgaggtgtttgataaggtgt

SEQ ID NO: 163406 - DNA, 431 bp, Arabidopsis thaliana columbia
cagatactgaaccctgcttacctcttcctcaacctctttggactaactcttgtcgctaagcttcaagccgagaagtatatcaaaaaatctggcatcaactatactatagtaaggcctggtggtcttaaaaacgatcctccaactggaaatgttgtcatggagccagaggatactctatatgaagggagtatatcgagagacctggtcgcagaagttgcagtggaagctttacttcaagaggaatcatctttcaaggttgtggagatagttgctcgtgccgaagctccaaaacgttcctacaaagatctatttgcctctgttaaaggacaataaactagaatgtaatgagtctcatgctcaaaccttttatttctcttatgtcttgagtacaacaaacagattacatagacttttgcgcataaattgagttc

SEQ ID NO: 163407 - DNA, 351 bp, Arabidopsis thaliana columbia
gcaaagcccgtgactttggtaaagcagggttaggtaaggggctttgatatccttttcgagagttgaaaaggttggggtaatatggcaggctttaaaaatgacaagacataatggtttccctgtaattgatgagccacctttcacagaagcttctgagctatgtgggattgccttgagatctcatctccttgtgcttctccaagggaagaaattctcgaagcagagaacaacttttggttcacaaattctgagaagttgcaaagcccgtgactttggtaaagcagggttaggtaaggggctcaagattgaagatttggatctaagtgaggaggagatgtagatgtttgttgt

SEQ ID NO: 163408 - DNA, 460 bp, Arabidopsis thaliana columbia
  unsure (1)..(460): unsure at all n locations
ctttaaaagaaattcgtaagtactatcaagaagcagaagatggcccaaaaggtggaagcacaaggagggaaaggagccaacctatgggacgatggatcgacacatgacgccgtgaccaagattcagctcgcagcaggcatagacggaattcaatatgttcagtttgattatgtcaagaacggacaacccgaacaagctcctcttcgtggtaccaaaggccgtgttctcccagctgatccgtttgtgattaaccatccagacgaacatctagtttctgtagaaggttggtatagccctgaaggtatcattcaaggaattaagttcatctccaacaagaagacttctgatgtcattggatccgatgagggtactcacttcactctacaagttaaagacaagaagatcattggctttcatgggtcctgccggnggcaatcttaattctcttggggcttacttt

SEQ ID NO: 163409 - DNA, 357 bp, Arabidopsis thaliana columbia
aaaaacatcgcacaagaaaataaaagatttgtagaatcaactaagaaaatggctagcactatgatgactacattgcctcagttcaatggtcttcgagccaccaaaatctctgcagctcctgtacaaggcctggcaagtgttcagcccatgagacgcaagggaaatggagctttgggtgcaaagtgtgacttcatcggttcatcaacaaatctgataatggtaacgtcgacgaccctgatgttgttcgcggggagattcggacttgcgccatcagccaatatgaaggcgacagctggacttaagttggaggcacgtgactcacgtctacaaacgggtgacccggccgggttcacgctt

SEQ ID NO: 163410 - DNA, 447 bp, Arabidopsis thaliana columbia
aaccaaacactcatttctccacatcttgagagaaaaaaacagagcaagtatattagagatctcatggcgatggcggtctccggagctgtcctcagtgggcttggttcttcgttcctcaccggaggcaagagaggtgccaccgcattggcaagcggcgtaggcactggagctcagagagttggcaggaaaactcttattgtcgctgctgcggctgctcagcctaagaaatcttggatccctgccgttaaaggtggtggcaacttccttgaccctgaatggctcgatggctcgctaccaggagatttcgggttcgacccattgggtttggggaaagacccggtttttctgaaatggtacagagaggctgagctgatccatggccgatgggcgatggcagcggttcttgggatcttcgtcggccaggcctggagcggtgtggcatggttt

SEQ ID NO: 163411 - DNA, 237 bp, Arabidopsis thaliana columbia
cgtccgtcttctgataggttgtaaaaggcattcgctttcgattgttggttgtcgatttctacgccccaaggggggacctgggtactgttcccaagctccacctggattcttattgatgtgaagctcgcataacttgtgaatcgatgctgccacagaaacttctgttgtatgtgggaatgccctgagatctcatttccttgtgcttctccaagggaagaaatttttgaagcatagtac

SEQ ID NO: 163412 - DNA, 489 bp, Arabidopsis thaliana columbia
cgaaacagtgagagagacagagagaagatatagagatgggtgtggagaagcaagtcatcagacccggcaacggtcccaaacccgctccgggccaaaccgtcaccgtccattgcaccggattcgggaaagatggtgatctatcccagaagttctggagtacaaaggacgagggacaaaaacctttctcgttccaaatcggtaaaggtgctgtgatcaaaggatgggatgaaggcgttatcggaatgcaaattggagaggttgctcgcttgcggtgctcatcggattacgcatatggcgctggtggatttccggcatgggggatccagccaaactctgttctcgactttgaaatcgaagtactgagcgtgcagtaatgatcttcccagctcctaaactgtgggtagattattaaacaaacccttattgttattgcttctgggatctttatgcaacaaaaactttggatgtcattgctcttctaaaactttg

SEQ ID NO: 163413 - DNA, 364 bp, Arabidopsis thaliana columbia
aaaatccactataagagattcgtaaccgtaagtgatggccctcaaggtggaagctaaaggtggaaaggtagggatccagtgggatgatggatctgactatcatgatgtaacaaagatatatgtacgaggtggtcttgaaggtattcagttcatcaagtttgagtatgtcaaggctgggaaaaaggttattggaccaatccatggtgcttctggtcgtggtttcacagagacgtttgagatcaacaatttggaaaaagaatatttgttatctattgagggttactacaacgcatctaccggtgtgatacaatgtcttcagttcataacttacaagaagacttattatcccaatcggatacaatga

SEQ ID NO: 163414 - DNA, 416 bp, Arabidopsis thaliana columbia
ctccgttctctgctgctctttcatttcatctcctctcgttgactctcctccttctctcgccttcttctctccgattccacgattcctcactgtccgaatcgcgactagctttagatcgagctctaggtttccggccaccaaaatccgcaagtcttcactcgccgccgtgatgtttccggaaaattcggttttatcagatgtctgcgcgtttggagtcactagcatcgttgcgttctcgtgcctcggtttctggggagagattggcaaacgtggcatcttcgaccagaaactcatccggaagcttgtgcatataaatattgggctagtttttatgctttgctggccgcttttcagttctggaatccaaggagcacttttcgcatctcttgtacctggactcaatatagtaaggatgc

SEQ ID NO: 163415 - DNA, 293 bp, Arabidopsis thaliana columbia
cgaagaacatcatcgtcctcctccaaagaggagctttcatttccaaatctataattctctcacagatcaggatcaaacatgggtttccttataacaaccctaatcttcgtcgtcgttgggataattgcttctctatgcgttagaatctgctgcaacagaggcccctccacgaatctgctacatcttaccttggtcattactgcgacggtctgctgttggatgatgtgggcaattgtatatattgcacagatgaatcctctgattgtccccattctaagcgaaacagagtagat

SEQ ID NO: 163416 - DNA, 475 bp, Arabidopsis thaliana columbia
agattcgcgagttcttcgttctgcctttttttttttttttgtgtgttcgagagatgtctgcctttgaagacgattccttcgtcatactcaacgatgatgcgtctgagtctgttccagtctcaggctcttttgacgccactgattctttctcagctttcgacggctcactccaagtcgaggactccgtcgacgatgtttttgcagcgccgtcttctgactacggtgcttactccaacggtgacggcatcttcggatccaacggggatcacgacggtcctatcttgccaccaccgtcggagatggaatcagatgagggatttgctcttagagaatggagaagacaaaatgcaattcaacttgaggagaaggagaagagagaaaaggaattgttgaagcaaattattgaggaagctgatcaatacaaagaagagtttcataagaagaatgaagtaacttgtgaaaacaacaaagcagc

SEQ ID NO: 163417 - DNA, 427 bp, Arabidopsis thaliana columbia
taaagatattcgtctgattgttctctctcaaattggctcatcctctccattcaattcatcccaagtaccaaagcaagctacttcgatcttcctcttactactctcgtttctaattattgttgttatcttaaatgggttcatctgagaagagatcaaaggatatcatgagtgacataccaactttcagtgcagagaatttgcagaacaatttgaaagtcattcaaaacagccggacgtttctgtctatcatagctggtgtcttagcaggaataattggattcaatggcttgattggttttgtattttactttgtggggatgttgatcacatctgcttggctcatggctaaggcaggattctcagctgacttggactttgattcgggggatcgggttctttttgacggattttcttggaggccttatgt

SEQ ID NO: 163418 - DNA, 417 bp, Arabidopsis thaliana columbia
ttaaggttttatatctgggaaaaaactcgcatccgcttcaatgactaagggaacgggaagtttcggaaagagaagaaacaagagtcacacactctgtgtcagatgtggccgtcgcagtttccacatccagaagagtcgttgctctgcttgtgcttatcccgccgctcgcaagaggacttacaactggagtgtgaaggcaatccgtagaaagactactggaactggaaggatgaggtatcttcgcaatgtgcctcgcaggttcaagaccggtttcagagagggtaccgaagccaagccaaggaacaagggagttgcttcatcagcttaaactgtttttgagcatcaagggagagagaattctgagtttggtgttcacaagattactacttttaagtgtctgattatgactatcttttt

SEQ ID NO: 163419 - DNA, 411 bp, Arabidopsis thaliana columbia
caaaaaaaaaactcaagagagactttgtggccatggcagcctctctccaatccaccgctacattcctccagtcggcgaagatcgccaccgctccttctcgcggaagttctcacctccgatcgactcaagccgtcggcaaatcttttgggctcgaaacttcctcggctcgcctcacttgctccttccagtctgactttaaggacttcaccggtaaatgctccgacgctgtcaaaatcgccggattcgctcttgccacctctgctctcgtcgtctcgggagcaagtgcggagggagctccaaagagattgacctcatgagattcagagcaagacatacattggagtgaaaggaactggaacggctaaccagtgccctactattgacggtgggtctgagactttctcgttcaaa

SEQ ID NO: 163420 - DNA, 200 bp, Arabidopsis thaliana columbia
aagccactgttactgtcggaagattgtgaggaacgttgtgccgagagctactactgaagttggtgaagctcctgccactactaccgaagctgagactactgagttacctgaaatcggcaagactgctcaagaagcttgggagaaaggggatgacaagtaccctattggttctcttgcctttgctggtgtaggggctcttt

SEQ ID NO: 163421 - DNA, 428 bp, Arabidopsis thaliana columbia
tcagattcttcttcttcctcgcagatcgatttttttttgaagctaaatctcaaaaatggagaacgacgcaggtcaggtcacagagctctacattccaaggaaatgctcggcaacaaacagaatgatcacatcaaaggatcatgcttcagttcagcttaacattggtcatcttgatgctaatggtctctacactggccaattcaccacttttgctctctgcggatttgtccgtgctcagggagacgcagacagtggcgtggacaggctctggcagaagaagaaggtcgaagctaaacaacagtgagagacaatctgacaatgtcataagctcttgtttgttttttgaggtttcgatttattagctatgtgggtttgtcattgaattgaaaatgttagtttctttttatgcgaattcatggtttcggatt

SEQ ID NO: 163422 - DNA, 447 bp, Arabidopsis thaliana columbia
  unsure (1)..(447): unsure at all n locations
tcttcaagtgccgggttctcgggtcggatcttctaagtctagctagggataatggctactgtcactactcatgcctcggcctcgatttttccgaccttgtacttcaaagccaagattcctcaccggttcttccggtaggttgaaccgcgacttgtcgtttacatcgatcggttcatcggccaaaacgtcgtcgttcaaggttgaagctaagaaaggagaatggttgcccggtttggcatcgcctgattatctcaccggcagtcttgccggtgacaatgggtttgacccgttgggtctagcagaggatccagagaacttgaaatggttcgtccaggcagagctggtcaacggacgatgggctatgctcggtgtcgctgggatgcttttgcncgaagttttcaccaagatcggaatcataaatgttcctgagtggtacgatgctgggaa

SEQ ID NO: 163423 - DNA, 486 bp, Arabidopsis thaliana columbia
  unsure (1)..(486): unsure at all n locations
cggacgcgtggggcgaaaagtgtaaaggtgggaagatcggaattgcacatagtcctgcttggttcgaagcacatgaccttgctgattcacaagacggtgcgtccatcgaccgtgcacttgactttattttgggatggcatctagacacaactacatttggagattatccacagatcatgaaagacattgttggacatagattgcctaaatttacaactgagcagaaagcaaaactgaaagcttctaccgatttcgttgggctcaactactatacttcagtgttttcaaaccatttggagaaacctgatccttcaaaaccaagatggatgcaagattctcttattacatgggagtctaagaatgcgcanaattacgccattggtagcaagcctttgaccgctgcattgaaacgttactngagaaggttttagaagtcctgtgaagtacattaaggacaaatacgcaaatccggaaaatatgatcatg

SEQ ID NO: 163424 - DNA, 451 bp, Arabidopsis thaliana columbia
agaaattcgtaagtactatcaagaagcagaagatggcccaaaaggtggaagcacaaggagggaaaggagccaacctatgggacgatggatcgacacatgacgccgtgaccaagattcagctcgcagcaggcatagacggaattcaatatgttcagtttgattatgtcaagaacggacaacccgaacaagctcctcttcgtggtaccaaaggccgtgttctcccagctgatccgtttgtgattaaccatccagacgaacatctagtttctgtagaaggttggtatagccctgaaggtatcattcaaggaattaagttcatctccaacaagaagacttctgatgtcattggatccgatgagggtactcacttcactctacaagttaaagacaagaagatcattggctttcatgggtctgccgggggcaatcttaattctcttggggcttactt

SEQ ID NO: 163425 - DNA, 404 bp, Arabidopsis thaliana columbia
  unsure (1)..(404): unsure at all n locations
aaaaaaaactcaagagagactttgtggccatggcagcctctctccaatccaccgctacattcctccagtcggcgaagatcgccaccgctccttctcgcggaagttctcacctccgatcgactcaagccgtcggcaaatcttttgggctcgaaacttcctcggctcgcctcacttgctccttccagtctgactttaaggacttcaccggtaaatgctccgacgctgtcaaaatcgccggattcgctcttgccacctctgctctcgtcgtctcgggagcaagtgcggagggagctccaaagagattgacctatgatgagattcagagcaagacataccttgaagtgaaaggaactggaacggctaaccagtgccctactattgacggtggctctgagactntctcg

SEQ ID NO: 163426 - DNA, 403 bp, Arabidopsis thaliana columbia
caatttccaagcagagatgacggtgaagataaggctcgcgcgtcttggttgtaaacaccgacccttctatcgtgtagttgtcgccgatgaaaaatcgcgcagggacggtaaacaaatcgaggtgttaggcttttatgatccactccaaggcaaagaagatgcggatagagtgagcctcaaattcgacagaatcaagtactggttatctgttggagctcaaccaacagacacagtggaaagcatgcttttcagggccggtttgataccaccaaagcctatggtagtgggcggttcgaaaaatgggcagaagtctacgagccaacatgtttcacccattacaggtgaaatcttgaactaagagtgttgatgcgttgagcaagaaagagccttttgtgtctgtgtg

SEQ ID NO: 163427 - DNA, 268 bp, Arabidopsis thaliana columbia
ccagcttttccagtcgattcgagaagagtgcgagcaaatgcagcccgagctttgattttcttctgtaatttcgtgaccaacaaggaacctcttctttgatttattgctgattgtttttcttctaatagacgtttctgcagaaatctctacgtctactgtgtatatttacaattcgcaacgcaatttggtgtttgttattaataaaggcataagaggttttggtcaaaacacaaaaaaagaattgatgacaaaatcaaagacaagatcc

SEQ ID NO: 163428 - DNA, 382 bp, Arabidopsis thaliana columbia
  unsure (1)..(382): unsure at all n locations
cggacgcgtgggcggacgcgtgggtgggcagtgattataacttcgtctccgtgtctgttcaagctcccattcttgtggccttcacgcttcaggaacaaagaccagtatctctctgaaagactacttctcggaaattttcgtctccatggcacccgtgagggggattcttggcttgcaaagggcagtgtccatttggaaggaaagtaacagactgactccagctttgagatcattcagcactcaagctgcatccacttncaccactccacagnctnctncaccttctncgnctncggaaaagactcatttcggtggtctcaaggatgaagatcggatttttactaatctctatggtctgcatgacccatttctcaaaggcgcg

SEQ ID NO: 163429 - DNA, 254 bp, Arabidopsis thaliana columbia
gaaaaacctagaaagctctagagagaaagagagagagagtatggaaggtaaagaagaagatgttagagtcggagctaacaagtttccggagaggcaaccgatcggaacttcggctcagagtgacaaggactacaaagagccaccacctgcgccgttgttcgagcccggcgagctagcttcatggtccttttggagagctgggattgctgagtttatagctacgtttttgttcctgtacatcactgaattgactg

SEQ ID NO: 163430 - DNA, 242 bp, Arabidopsis thaliana columbia
agtagcagagcgagaaatagtggcaaccatgtctgctctacagagctcatagactacccggtgtgtatctcccagctctgtgttgctgggccagcgtttaattacgccgcttgccctgtacgacacttctacggtcaagcccgctgagaacccatgtcttgatcttgcaaagctcaagcgttgggaacgaaaagaatgcaaaccaaacagtcttccgattctccacaaaatgcatgtcaagg

SEQ ID NO: 163431 - DNA, 420 bp, Arabidopsis thaliana columbia
caggacttcgaaactcctctgctcttccctttgccaagagatcttcttccgatgagtttgtttccttcgtcagtttccaaacttctgcaatgagaagcaatggtggatacaggaaaggggtgaccgaggccaagataaaggtagccatcaatgggttcggtaggattggtaggaacttcttgaggtgttggcatggtcgtaaggactctcctcttgatgtcgttgtcattaacgacactggtggtgttaaacaagcatcacatctcctcaaatacgactcaactcttggaatctttgacgctgatgtcaaaccttcaggagactcagctctctctgttgatggaaagatcatcaagaatggatctgatcgtaacccatctaatctcccctggggggaactaggcattgacttagttatcg

SEQ ID NO: 163432 - DNA, 442 bp, Arabidopsis thaliana columbia
gtccgtacatttccaatttataaaagttaaagccatggctgcatctttctctgtcccctctatgataatggaagaagaagggagattcgaagcggaggttgcggaagtgcagacttggtggagctcagagaggttcaagctaacaaggcgcccttacactgcccgtgacgtggtggctctacgtggccatctcaagcaaggctatgcttcgaacgagatggctaagaagctgtggagaacgctcaaaagccatcaagccaacggtacggcctctcgcaccttcggagcggttggaccctgttcaggtgaccatgatggctaaacatttggacaccatctatgtctctggttggcagtgctcgtccactcacacatccactaatgagcctggtcctgatcttgctgattatccgtacgacaccgttcctaacaaggttgaaca

SEQ ID NO: 163433 - DNA, 419 bp, Arabidopsis thaliana columbia
cgaacactaagcaaaaaagaaaagctcaagccgagagagacaatggcatcaacattcacgagctcaagcagtgttcttaccccaacaacattccttggccagagtgaagtacttaggacccttttccgttcaaactccgtcttacctcaccggagaattccctggcgattatggttgggacaccgccggtttatccgcagaccctgaagcctttgccaaaaacagagctcttgaggtgatccatgggagatgggcaatgttgggagcttttggttgcataacccctgaagttcttcaaaagtgggtccgtgtggacttcaaagaaccagtctggttcaaagccggttcacaaatcttctccgaaggcggtttggactacttaggcaacccaaacctagtccatgctcagagcattttag

SEQ ID NO: 163434 - DNA, 434 bp, Arabidopsis thaliana columbia
actctatcttacctccctgaccttactgacgtctaattggctaaggaagttgactaccttctccgcaacaaatggattccttgtgttgaattcgagttggagcacggatttgtgtaccgtgagcacggaaacactcccggatactacgatggacggtactggacaatgtggaagcttccattgttcggatgcaccgactccgctcaagtgttgaaggaagttgaagaatgcaagaaggagtacccgggcgccttcattaggatcatcggattcgacaacacccgtcaagtccaatgcatcagtttcattgcctacaagcccccaagcttcactgatgcttaaatccttttctggaatattcaatgttgactatccggaacccaattttgtatggtcaatgtaaatttaagtaattattttgccaaagtgaaaaa

SEQ ID NO: 163435 - DNA, 491 bp, Arabidopsis thaliana columbia
  unsure (1)..(491): unsure at all n locations
gtccgttcacgaggatctgttataccttcgcgccaattcacgatatctagaggaaatggaaatgtgtatcagttagctgtctttgaagctgagaaatcgaaaaaagaagcaagcttggaggctttcaagcatcaagaagttgtaaaagagaaaaatgaggcaacaaggaaggtgagcacaagaaggaagaggaacacaagaaacacgttgacgagcacaagagtggtgagcacaaagaaggtattgttgacaagatcaaagacaagatccacggtggtgaaggtaaaagccacgacggagaaggcaaaagccacgacggtgagaagaaaaagaagaaggacaagaaggagaagaaacatcatgatgatggtcaccacagcagcagcagtgacagcgacagcgattaaaggtggagaattnagaggatcgcttgaataaaacagatctgggtctggctattattaattaatggttgctgatgttcttatcat

SEQ ID NO: 163436 - DNA, 132 bp, Arabidopsis thaliana columbia
gtaattgatccgatctaggaaaagatgggaggaggtgatcatgggcatggagcataatgaggcgatttcagagccaaagtctggagtatgactggtggtcctaactgtatgcccatacattgtcgtttgaac

SEQ ID NO: 163437 - DNA, 326 bp, Arabidopsis thaliana columbia
ctcaaagaattattcattcaggcatcttctcaattttttgtttgtgaaaaaaacccacatcaaaagatctctcatttattcgtttcgtttctgctgttttgagtgtcgggttcgttttagctgtaatctttttttccggcgttcgatttgaaaaaatccggggaacaggtgatcggaatcacggctatacacgggatatcacggggtgttagctcacatgtccatattgtccgacagaagggttgtttaatcgaaactaatcctttgccgcacggaggacgtggagctctgccgtctgaaggcggcagcccttccgatctcctctt

SEQ ID NO: 163438 - DNA, 455 bp, Arabidopsis thaliana columbia
ctctattcgtcgtcgacctattttcctcagccatggctcgtcgggaaaaacaagagaatctctaagggtaggaagggaggaaagaagaaggctgttgatcctttctccaagaaagattggtatgatgttaaggctccttcaatcttcactcacaggaatgttggaaagacacttgtttccagaactcagggtaccaaaattgcctcagaaggcttgaaacacagagtttttgaggtttctcttgctgatcttcaaggtgatgaggataacgcttacaggaagatccgtctcagagctgaagatgtccagggcaggaacgttctgtgccaattctggggcatggacttcaccaccgataaaacttaggtcattggttaagaagtggcagactttgattgaggctcatgttgatgttaaaaccaccgacagttacactctcaggctattctgtatcg

SEQ ID NO: 163439 - DNA, 236 bp, Arabidopsis thaliana columbia
cagaaacatggctgaggcttctgatttgttggtatggtctaagaaggataaccgtcgttttctccatgttgtctaccgcgttggtgatcttgatcgcaccattgagttttacactgaggtctttggtatgaagctgttgaggaaaagagatatccctgaggagaagtattctaatgcttttcttggttttggacctgaaacatctaactttggtgaggagctcacatattaaccat

SEQ ID NO: 163440 - DNA, 418 bp, Arabidopsis thaliana columbia
gtgagataataatccaaaaaaaaaatccatatttttgccaacgtttttagacgatcaaatggcttacactaaccaaatttcagcggttgtgtttctagcggttgcgattgctccgctattagctgagccacagtcaacgatgtttccagagatgactcctgaatgtgccacggttatgcctgacctgctcgaaaagtgttttgcaaccggtagtgtgacgccaacagaagattgctgcaccgatctaaaatccgcaacctcaacgcaagtgacttgtctttgtgataactacatagcaaaccccgccgtttcaaacatcaccggaccttactccaaagcaatcacaactaaatgtggcggttttcgacaaatacctttggtgacggtactagtaaaggaggagaagaaaagaaaggag

SEQ ID NO: 163441 - DNA, 209 bp, Arabidopsis thaliana columbia
aaacaaaccagaaaaaggaatggcactgttaaattgggcttcctctacagcaaatgctgtcaagctctcttcttctgcctgcaaagctcatctcttgccagctttctccatctccagatgcttctcctcagtgttggaaggacttaagtatgcaaattcacatgagtgggtgaaacatgaaggctcagttgctacaattggtatcactg

SEQ ID NO: 163442 - DNA, 221 bp, Arabidopsis thaliana columbia
catctttcaatctctcttgattccaatccattcttctttaagtgccgggttctcgggtcggatcttcgaagtctagctagggataatggcgtactgtcactactcatgcctcggcctcgattttccgaccttgtacttcaaagccaagattcctcaccggttcttccggtaggttgaaccgcgacttgtcgtttacatcgatcggttcatcggccaaaacg

SEQ ID NO: 163443 - DNA, 245 bp, Arabidopsis thaliana columbia
gattagagaaatagaaaaatcaaaagaagctttggcaaagagctaaagatcaaagcttttgtttgagaatgagattgtggattgtgagtgtactcgtgcttacacaccttgtccatggagctctctgttgggggaaggatggtcactacactgtgtgcaaattaactgtgggattctttgtggatgattctattgctgctgtgcataatcttctgtctgaatatttttgttggtgtgccttcttt

SEQ ID NO: 163444 - DNA, 455 bp, Arabidopsis thaliana columbia
agagaaaacagaagaaactatggcaactcaagccgccggaatcttcagccccgccataacaaccactacttccgccgtcaagaaactccacctcttctcatcaagccaccgtcccaagtctctctccttcaccaaaaccgccatccgcgccgagaaaacagagtcctcctctgctgccccagccgtgaaagaagctccagttggattcactcccccgcagctagacccaaacacaccaatcaccaatcttcgccggaagcacaggaggtctcctccgtaaagcacaagtagaggaattttacgtgatcacatggaactcaccgaaagaacaaatctttgagatgccaacaggaggagctgcgataatgagagaaggaccgaatctattgaaactggcgaggaaagaacagtgtttggctttaggtacgaggttgaggtcaaagtacaagatcact

SEQ ID NO: 163445 - DNA, 364 bp, Arabidopsis thaliana columbia
agctcaccgatcgattcttccaatgctcttctaattcttaagtaattttccagatccaacctttctcagattcgctctttcccgagaaaatttgaagaaacagagattcatcattttctcttcctctcaaaaatcagatctgcaaaactctcagatcactcatgggtttgatttcaaaccctacccgtttgattctcgtcgccaccatcttcttcctcgtttcttcaatctccggtcaggattctgtcgctgagaacaatgagagacaagaatctgaaggatctggtaaagagcttggtcgtcgtggaatggttggtactgaacgaattggagttgatactgttgtagacaatattggggcctc

SEQ ID NO: 163446 - DNA, 219 bp, Arabidopsis thaliana columbia
tcgaccacgcgtcgcgtttatcgatcatgaagatcagacttagcatatcttttttactcttatcatacacagtggctacggtggccgcacaacaatgcgggcgtcaaggcggtgttcgaacttgtcccggtaacatctgctgcagtcagtacggttactgtggtaccaccgcggactactgttcttcgaccaacaactgtcagagcatttgttggggaa

SEQ ID NO: 163447 - DNA, 374 bp, Arabidopsis thaliana columbia
ctctatcattccgcccactaatattaccggaactctgtgacagtgagagtccaagtgccattcaggagcagaagctccgcttgggtctcctttgatgggaaagaccggaaacagcttgaagcaggggatgcactagtgtgtagcatggcaccatggcccgtctcaaccgcttgtcaagttgaatccactaacgacttcttacgcagcatccacgatggtcttcactggaacctaagaaagactcaatctgctgatggaccttagaaacaaattcctccagcttttttctctttcattcttaaccaataaccatatatagtctcgacgtctatctatctatctatatgcatattgtaaaaagggaaatggaaagg

SEQ ID NO: 163448 - DNA, 338 bp, Arabidopsis thaliana columbia
  unsure (1)..(338): unsure at all n locations
ggaggaacaacggtaagaaattgatggctgtcagtancgtcaagcacgccatggagattatccgcctcttgtctgacttgaaccgagagttcaggtcatcattgacgccattgtcaacagtggtccacgtgaagatgctaccagaattggatctgctggtgttgttaggagacaagctgttgatatctctcctataagacgttgtaaccaggctatatttttgattaccactggtgctcgtgatgctgctttcataaacattaagactatagttgtgtgccttgctgatgaatttttcaaagcatctcatgggggtgtgggtacaacttatttgtcat

SEQ ID NO: 163449 - DNA, 290 bp, Arabidopsis thaliana columbia
gacgacggagggtggtgcaatccgccgcgcgagcttgttgatctcgccatgcctatgttcctcaagatcggtctataccgtgcaggcattgtccccttctcctatcgcagggtaccttgtcggaagataggagggataagattcacagtaaacggattcagatacttcaatcttgttctggtaactaacgttgccggcgccggagatattaacggagttagcgtaaagggatcaaagacagattggttgaggatgattcttaactggtatcacgtacttggcaattcatt

SEQ ID NO: 163450 - DNA, 276 bp, Arabidopsis thaliana columbia
aaaagaagaagagaaacaacaagaagttgttatggcttcctctatgctctcctccgccgctgtggttacatccccggctcaggccaccatggtcgctccattcaccggcttgaagtcatccgctgcattcccggtcacccgcaagaccaacaaggacatcacttccatcgcaagcaacgggggaagagttagctgcatgaaggtgtggccaccaattggaaagaagaaagttgagactctatcttaccttcctgaccttagtgacgtcgaattggc

SEQ ID NO: 163451 - DNA, 226 bp, Arabidopsis thaliana columbia
aacagattttaaaaaaccccaaaaactttacattcttaacaatttcaaccctatgggctggacttgatcatctctgggatgatactgtcgctggtccacggccagagaacggccttggcaagcttcgtaaacaccataccttcagtttccgacctagctccggcaatgatcaatcggaagctggaagtgcgagatcgtacggtgaggattcgctaccggaagaagc

SEQ ID NO: 163452 - DNA, 222 bp, Arabidopsis thaliana columbia
cggacgcgtgggttcagcttcttgtgttgagtcgcatactcgtcgcagtcttgagatatggccgccgcattttccaccgtgggggccatcaacatatctcctttgagcttgaacggttcaggatcaggatctgtatcatccccagcttcaaccttcttgtgaaagaaagttttttctttgtctagattcgctacatagcatcattatttgcatcccatcttt

SEQ ID NO: 163453 - DNA, 357 bp, Arabidopsis thaliana columbia
cggacgcgtggggttgtgtattgagcttcatctccttcaaatggcttccttatcaaccacttggctaagcttcaaagctccgtgcaccacaatttcacaggttttaaggaaagcctcaagttctcagtctgtgacctttggtcgtttcacgtcttcaacaaagagccttcgtcttcaaatcagttgtgccgcgaaagcagagacggtgcagaaagtgagtgacattgtaaaagaacaattggctttagctgctgatgttccgctcactgctgaatccaagttctctgctcttggtgccgattctctcgacaccgtggagatagtgatggcgttggaggaataagttaacataagtgt

SEQ ID NO: 163454 - DNA, 438 bp, Arabidopsis thaliana columbia
  unsure (1)..(438): unsure at all n locations
gccgagctgctacccaaatagtcttatagcaactaaaccttttactgtatttcagtgaagggagatgaccagtgcagagatgtgcaaggangaaatagtatgcgttgaagctatcgaacgcgagtttgaagctgctacaaaaggtcttgaagagctaaaggctaatgattcaaccggcgacaaggatgatgatgaacacgttgcaaggagaaaaattatgcttgaagctattgaacgcgagtttgaagccgcgacaaaaggccttgaagagttaaagaatgaatcagaacaagctgaaaacaagagaaacagtatgttggaagcattcgaacgcgaatttgaagctgctacaaatgcaaaggctaatggagaaaactctgcaaagaatccatcaaccataagtactacagtgcagaaatcttctggcggatacaatgc

SEQ ID NO: 163455 - DNA, 300 bp, Arabidopsis thaliana columbia
attttgttggagaagctgaatgcgattgacatgtattttgagattaagctttctgagcttgatgatgcctttgggaagaaggggagaacggttggaagaggagattagagagctggctgaagacagaaatgctttgacagagaagaaaagacaacctttatacagaaaaggatatgatgtgcatgtgatagatgtaaaaaaagtttgtaaggtcacaaagggtggcagggttgaaaggtacactgcattgatggtttgcgtgaactatgaaggtatcattgtttttgctatagcataatc

SEQ ID NO: 163456 - DNA, 385 bp, Arabidopsis thaliana columbia
  unsure (1)..(385): unsure at all n locations
atgcatttccgtgtattatccatagcattgcgtatgtctgggggagatgatagccactctggtacagtaggaggtaagttagaatgggaacgcgaaatgactttaggttttgtttatttattactctattatttttttgtaatatatcttacttttttttttatttattattatatacttatatatttatttttttgtgtttattcctttttcttatagtttttaatattaatnnnannttttatattctttattttctattattttatttttttcttacttttatttttatttatatttttattttagtgggtgggtggtgtgtgtttttattttattttatatttttatattttttatttagtaatattttttttattatttt

SEQ ID NO: 163457 - DNA, 352 bp, Arabidopsis thaliana columbia
gcagagctgacttgtgatcgcgcagcactatctttcgcccaagatccaaaggttgttgtatctggtctgatgaaattagccggaggatgtccatcaatcgctgatcagctaaatgttgacgcatttctagaacaagcccgttcatatgacaaagcttcttcaagccccttgggatggtacataagaaatgctcagactagtcaactttcgcatccattgccggttcttcgtgcacgtgagattgatgagtggtccaggagtctcgagtacaaaagtctcctgaaacgggcaaatcgaaaaagcacattacagatggtttagtgacgttgttaaagatttaaaaggttggaag

SEQ ID NO: 163458 - DNA, 213 bp, Arabidopsis thaliana columbia
cgtccgtgctgaacacaaagatgatctgatctcgttcgtgtggaatactcgtttaaccattaggttggacctcaataagaagaccacaattcttcaggaagaaaacgatgggcatgtgattgtagtccaagttttcagggctttgcatgctgtgtatgtcagtgtgagctgtattgcacctttgacaccgggagtgggtaggttatcatgccg

SEQ ID NO: 163459 - DNA, 439 bp, Arabidopsis thaliana columbia
cgtgaatcagatcggaaaaatggaatcttttttgttcacatctgaatccgtcaacgagggacatcccgacaagctttgtgatcagatctccgacgctatcctcgatgcttgccttgaacaagaccctgagagcaaagttgcttgtgagacttgtaccaagactaacatggtcatggtttttggagaaatcaccaccaaggctaacgttgattacgagcagattgttcgtaaaacatgccgtgagattggattcgtctctgctgacgttggtctagatgctgacaattgcaaggttctggttaacattgagcaacagagtcctgacattgcacaaggtgttcatggtcatctcaccaaaaagccaaaggaggttggagctggtgaccaaggtcacatgtttgggtatgctacttatgagacttcagagcttatgcctttt

SEQ ID NO: 163460 - DNA, 232 bp, Arabidopsis thaliana columbia
cacacggcgatggcgtcgcttatactcggagcttctctgcgagtcaccgtcgcattaccttcctcacggttatcatcttctcactctgaaactgccggtgtctctctctcttgcttcactcatcaattctctctctccacttcctcatccagctcaattccactcgtgtactgtggcagaggtgaccggaaaacagcttaagggaagcgtttcaatcactcttttgggaatg

SEQ ID NO: 163461 - DNA, 297 bp, Arabidopsis thaliana columbia
caatctctctcctaaatcaatcaatctttgtactttcatttagccagaacaaaaaaaatggtggagcaaaagagatacgctctgtttctagcgactttggactcagagttcgtgaagaaaacttacggaggataccacaacgtgttcgtgacgacgttcggagacgaaggagagcattgggactcctttagagtcgtcagcggagagtttcctgacgagaaagatctggagaaatacgatggcttcgttatcagcggaagctctcacgatgcctttgagaatgatgattggatcctt

SEQ ID NO: 163462 - DNA, 236 bp, Arabidopsis thaliana columbia
gtgagataaaggcggagtctctctccagttatttttctcatccatcgattcttagagttcaaaatggttgatcaagttcagcaccccactattgcgcagaaagctgccgggcagttcatgcgttcaagtgttttcaaggacgttcaagtgggttaccagaggccttctatgtatcaaagacatgcaacctacggaaactactccaatgctgcattttaatttccttcgacatcccg

SEQ ID NO: 163463 - DNA, 218 bp, Arabidopsis thaliana columbia
ctccatcttctacttctgcaatctgaagaaaaattaaatgaagaagttagcgagaaaatggcggagaactcgtcgtgacgaagatgatgataagttcgtccttcctacttctgaagacgtcgattctcggcctattgatacgcaagagcaggaggagtacgttcggtatcttgaggaagctcatgctcagcaaagtcttcaatggaggagcgtgtttg

SEQ ID NO: 163464 - DNA, 208 bp, Arabidopsis thaliana columbia
  unsure (1)..(208): unsure at all n locations
gagctaagtttgacgctgacagtgcacgttcttcnggtctcctttcccaagaactttgacattggaaaatatacttttgtatggaagattgtgctggatgaatcagcacatgagaaaggttacctaactgagacctaaacacaggtgacgactgcagccaaaagccttattcttcaaatcagttgtgccgcgaaagcagagtcggtgc

SEQ ID NO: 163465 - DNA, 453 bp, Arabidopsis thaliana columbia
cggacgcgtgggcaaaaaccctaacttctctgtgtcttttcgaatccgatagcgtgcgataatggccaatagtaatcttccccgacgaatcatcaaggaaactcaacgtctgcttagtgaacctgctcctgggataagtgcgtctccatcagaggaaaatatgagatatttcaatgttatgattcttggtcctactcaatctccttatgaaggaggagttttcaagttggagctctttttgcctgaagaatatcctatggcagctcccaaggttaggtttctcaccaagatttaccatcctaacatcgacaagcttggaagaatctgccttgacatactgaaagacaagtggagtcctgcactacaaatacgaactgtgctcttgagtatccaagctcttttaagtgcaccaaacccagatgatcctctgtctgagaacataacttagcattg

SEQ ID NO: 163466 - DNA, 243 bp, Arabidopsis thaliana columbia
  unsure (1)..(243): unsure at all n locations
cagaaatggcgaaatcactcctttgttcatcaatcntaaaccctttcttctccaccactctctgctcttcgaagaagaaccaaagggcatactcgggaaacagcaagaaccagacatcgtcgtctctgttatggaaaagaagggaactgtcgcttggatttatgagcagcttagctgcgattggcctcgagagtaatgacagaagaagacacgacgcgaatgcagcgatccttggagctgaag

SEQ ID NO: 163467 - DNA, 152 bp, Arabidopsis thaliana columbia
gagaacaacaaccaaacactcatttctctctttttagagaaaaaaacagagcagtatattagagatctcatggcgatggcggctccggagctgcctcagggcttggtcttcgtcctcaccggtgcttggaggtcctccgattggctagcggc

SEQ ID NO: 163468 - DNA, 207 bp, Arabidopsis thaliana columbia
aagccaaggacaagaaaaaaaaaaaagagtcgctcattttcttctcattttttttttggtgttgacgaagaaaccaaaaaaaaaaaaaatgagagagatccttcatatccaaggcggtcaatgtggaaaccagatcggagcaaagttctgggaagtgatctgcgacgaacactgtattgatcacaccggtcaatacgttagcgattc

SEQ ID NO: 163469 - DNA, 283 bp, Arabidopsis thaliana columbia
attgtttgctgtggtggatgatatgttctgttctctccaaggacatatagagaacgttccaattcttaagcaacaatatggactaaccaaaacagctacagaggttaccattgtgattgaagcctacagaactctaagagatcgtggtccgtattcagctgaacaagttgttagagattttcaaggcaaattcgggtttatgctctatgactgctccacacaaaatgtcttccttgccggggatgttgatgggagtgcttcattctctttttattttgttcat

SEQ ID NO: 163470 - DNA, 191 bp, Arabidopsis thaliana columbia
aaacgagcaaaagaagaagagaaacaacatgatgtagtaatggcttcctctatgctctcctccgccgctgtggttacatccccggctcaggccaccatggtcgctccattcaccggcttgaagtcatccgctgcattcccggtcacccgcaagaccaacaaggacataactttcattggaaggcaacgggg

SEQ ID NO: 163471 - DNA, 399 bp, Arabidopsis thaliana columbia
aaagaacaaaggcagggagtgcatctccaatggttagccagctaaggagcagcttctgcttcggttctctttctcagcgtctcgccgcccccaaaggcatctccggtgctccttacggagtttctccgaccaaaagagcatctctcttcactgaccgagctgttaaatgcgacacgacatcattgcaagtagttcaaccaatcaacggagatccatgcatcggtagtacgtaaactacggtgccatcaagcccatggatcgcgtggtaccttaccaacctccctgcatgccgtaccgtcgtgaaccctctcctccgcggcgcggaagtgtgcccggcccacgcgttctccttagcgggcccattcatgaacgctgcccgcacaaggaacactgtttacg

SEQ ID NO: 163472 - DNA, 268 bp, Arabidopsis thaliana columbia
tcgcaaacttttattatgatcaagcctgacggcgtcctgatagtactcatcggtgaagccatctgcaggggtgacaacaaggctttcagtgggccccttctccagttcgcaacaacactcagccctatctcggcctatccccttgatttctaatccatcctgccattttcctccttttccttataatatatcctatctaaactcatatttaacgctaattcttacaaaccattacactctttcattctaccttatcccttacttcctt

SEQ ID NO: 163473 - DNA, 302 bp, Arabidopsis thaliana columbia
aaaaaaagctattgtttgaaagaagaagaagttatctatggcaaaggatgtggaagccgttcccggagaaggatttcagacaagagactatcaagatccgccaccagctccgtttattgatggagcggagctaaagaagtggtctttctacagagcagttatcgcagagttcgtatccactctcctcttcttatacatcaccgtgttgacagtcattggttacaagattcatgcccgatcctgatgccggtggcgtatattgcgtcggcgttatgcctcactctttatttcttacagtcttt

SEQ ID NO: 163474 - DNA, 365 bp, Arabidopsis thaliana columbia
ccatggcagaatcagaatgatttgtatgaagaaacccttagagctgttggggtatcaggagtggaagtcggaaccacagtttatattaccaaccttgatcagggagtgacaaatgaagatataagggaactctatgctgaaattggagagctgaaaagatatgcaattcactatgacaaaaatgggcgtccaagtggatcggctgaagttgtgtatatgagaagaagtgatgcaattcaagctatgaggaaatacaataatgtacttttggatggaaggcctatgaaactggagattcttggtggaaatactgaatctgctcctgtcgcagctcgggttaatgtgactggattgaatggaaggat

SEQ ID NO: 163475 - DNA, 334 bp, Arabidopsis thaliana columbia
ccaataatgatctccatttctgttattttcccctgaaattttcgcaaaccctaaaaagagagagaaacataaaaatctccattgaaacagattggattgagcaagagaaagagatcatgtatttctaaaaagagagagaaatcctctgatctcctctctgattcgatcgagatcgcatcatttccctaatgatttcaaaaacctaaaacgatctcttcttttttttcgcttcgatctccattgaaaaggatgatttcaaatccaagtttattatcgtacacttgcattgcgaaaggaaccgtagttctcgcggagttcgtttcaaggcaagagc

SEQ ID NO: 163476 - DNA, 295 bp, Arabidopsis thaliana columbia
agagaaggaagaagaagaagaagaagaagtaaaatactatggagaatgagagggaaaagcaggtttacttggctaagctctccgagcaaaccgaaagatacgatgaaatggtggaggcgatgaagaaagttgctcagcttgatgtggagctaactgtggaagagaggaatcttgtatctgtagggtacaagaatgtgattggtgcaaggagagcatcatggtgaatactatctttcattgagcagaaggaagagtccaaggggaatgatgataatgtctagaggcttatgattta

SEQ ID NO: 163477 - DNA, 466 bp, Arabidopsis thaliana columbia
caaaaaaaagaaaacacaaaaacaaagattataatggcttcctcaaccatggctttgtcctcccctggcttcgccggaaaggctgtgaagcctgccgcatcagatgtcctcggaagcggccgtgtgaccatgaggaagactgtcgccaagccaaagggtccatcaggcagcccatggtacggatctgaccgagtcaagtacttgggtccattctccggcgagcccccgagctaccttaccggtgagttccccggtgactacggatgggacaccgctggtctatccgccgacccagagaccttcgccaggaaccgtgagccagaagttatccacagcagatgggccatgcttcgagccctaggcttggttttccctgagctattggctaggaaacggagtgaagttcggaggagcgggtttggtcaaggcccgttcacagatcttcagcgacggaggattggactac

SEQ ID NO: 163478 - DNA, 406 bp, Arabidopsis thaliana columbia
taattgtttctgttttgtttttgtttctgtgttattcttccgaggcttgaagctcaatagctatggcttctccttcagtctcttcctcttcaaccatcatcgattcaagagctcctccttctcgactagcctccgcctccgcctcttctccgtcgtgcatttcacttcccacacttccgattcagtctcatacccgtgccgctaaagccactgcttactgtcggaagattgtgaggaacgttgtgacgagagctactactgaagttggtgaagctcctgccactactaccgaagctgagactactgagttacctgaaatcgtcaagactgctcaagaagcttgggagaaagtggatgacaagtacgctattggttctcttgcctttgctggggtagtggctctttg

SEQ ID NO: 163479 - DNA, 327 bp, Arabidopsis thaliana columbia
aaacgacaaactctgtctcagagcttatactcttaccagcgccatcgacgcggttggtgatatcgacctcgtcgtcaaaggttacttcaaagacgttcatccaaggtttcccaatggtggactcatgtctcaacacttagactcgttaccaatcgggtcaatgatagatatcaaaggtccactagggctcatccagtaccaaggcaaaggcatcttcctggtcagcggcaaacctaagtttgccaagaaactagctacgctcgccggaggaacaggcattacttctatctaccaaatcatttcgtggtatattgagcttaagtattc

SEQ ID NO: 163480 - DNA, 465 bp, Arabidopsis thaliana columbia
ccaagcttctagaagatcattcattcatcacttatactatctcttcccaaattattgattttttttacccatttctctcatcgcacggtgatattgagaatcgccgacctgaatcgatcggaaaactttctctgattaccggcggtcaacaccgctgaacacatatgtttgtttgacgacctcttctctccgcgatctttacctcaacaacgagatctgtttccacgaaagaaaggaggatgtcgacgccagcaaggaagaggttaatgagggatttcaagaggttgcagcaagacccacctgcgggtattagtggtgctccacaggacaacaacattatgctctggaatgctgtcatatttgggcctgatgacacaccatgggatggaggactttcaaactcttactgcagttctttgaagattatccaaataaccacaacaagtcggtttgtgtcacggatgt

SEQ ID NO: 163481 - DNA, 445 bp, Arabidopsis thaliana columbia
gaattacaaacaaaaatggttttgcaaaagcttcctctcattgggctgcttttgctcctgaccatcgtcgcctctccagcaaatgcagatggacctgtttgcccgccgtcgaacaaactaagccgggcaagtttccctgaaggttttttatttggcacggctactgcggcataccaggtcgaaggtgcgattaatgaaacttgtcgtggaccagccttatgggacatctactgtagaagatatccagagaggtgcaataacgataacggcgatgtggccgttgatttcttccatcgttataaggaagatatccaactaatgaagaatctaaacacagacgcctttagaatgtctatcgcatggccaagaatatttcctcatgggagaaaggagaaaggagtgagtcaagcttgtgtgcaattctaccacgacctcatcgacgagc

SEQ ID NO: 163482 - DNA, 458 bp, Arabidopsis thaliana columbia
aataaaggttgtacattttactctttgattgttcacatttgcttatgatgagttttttttttttttgttttactttttttcattttgttcaatagattgcacaaattctagggaaacctgacttggctccagctgcttgggtgagaaaactcgtcactttgtgtgatcaagctcctgccacaccatttgatgccgttcgagttgtcctggagaaagagttaggtaaaagcatcgaacaagtgtttgaaacatttgatgagaagcctcttggctctgcttctattgctcaggtacaccgagcaagagtaaagggtgacaagagggatgttgttgtaaaggtccaacatcctggcgttgagaagttgatgatggttgatatcagaaacttgcaaatatttgcattatacatgcagaaaactgatttcaaatttgacttgttctccatgacaaaggaaata

SEQ ID NO: 163483 - DNA, 306 bp, Arabidopsis thaliana columbia
  unsure (1)..(306): unsure at all n locations
cttctttgtccattgaattttttttatttgattgaatctgatctgtgggagagagaggattcaaaaaccagattagggtttttagttattcaaatttttnttaaataaatcattgattccttacaactcattaacatcatctttttcgtctgtacattttatcttctcacacttactgatttattcttttaccctaatttttttcatcattattacttctgtcggaagattgtgaggaacgttgtaactagagctactacttaagtttgtttaacttctttctttttattctcttttctcctatct

SEQ ID NO: 163484 - DNA, 439 bp, Arabidopsis thaliana columbia
caagagtgaaaatggcgtcgtacacagtctcctttatccctttgacgctctctaatcctcggatctttgtttcgagacagaatggatctccctcgtcttcttctcggattcctctaacgtcttctctgttaggtaagaagcttctggcgacacaaccgtcgcatcgctgcttcgtccccaagctccggtgcttgacctcggccagcacggtcttaaacgtccctattgcgcaaccggagaatggttcttcggataagatcccaaagtcggcgagagctataaagtcacttgcaatgggagaattggaggctaggaagctcaagtatccaagtaccgggaccgaagccattctcatgggtattttagtcgaaggcactagcacagttgctaagttcctgagggggaatggagtcacacttttcaagggtcgagatgagac

SEQ ID NO: 163485 - DNA, 277 bp, Arabidopsis thaliana columbia
acttttagcatcattttttcttgcatctgttggctgcttcctgggtcagataactcctccaggagcagctgtatgtgtactagcgtgtcccagattgccaatcttggagagagcataataggtgtttcttttcaagacaaagaaggattcaaatggctaaacaatgatgtagtcaacgtgatcaacataagcttgggaagcattgtggcgattttgatgcaacagtttatactccagaactgggtcaagtaaaacctgccacgaaggtcatgtattt

SEQ ID NO: 163486 - DNA, 171 bp, Arabidopsis thaliana columbia
accctttggatctttcttctcgatcaattatccattttgcccagattttttccagaagctcatcgaattcatcgaatcacaatgtttgaaatttggtttcactgttgctgagtgtgtttggaggagaagcttgattggttcggtgtttcaactgttgaagattataagagt

SEQ ID NO: 163487 - DNA, 468 bp, Arabidopsis thaliana columbia
ctcttcaatcctttcctttcattgtagttaaacaaagattacgattatggccacatcagctatccaacaatcctccttcgccggccaaacggctctcaagccctccagcgacctcatccaaaaggtgggcgtcttgggcggtggccgtgtgaccatgcgtcgtaccgtcaagtctactccccaaagcatctggtatggaccagaccgtcccaagtacttgggaccattctcggagaacacaccgtcttacttaactggagaatatcccggagactacggctgggacaccgctggactctcggctgacccggagacattcgctaagaaccgtgagcttgaagtaatccacagcagatgggctatgttgggtgctctcggatgcacattccctgaaattctctccaagaacggtgttaaattcggagaagcccggtggttcaaggcaggctctcagattttctcagaagg

SEQ ID NO: 163488 - DNA, 403 bp, Arabidopsis thaliana columbia
aaaactcgtcggttgccataactgtcaggaaattctctcacatagaagagttaggattcgactatgcttataacgcatcgctgcataatgtcatggactttctagcagctgaagataacagtaaaggcacggttttctttcggacttcgactcccgatcatttccaaaacggggaatggcatagtggcgggacgtgtaagcaaacagagccggtgagcgatgaggagattgagattaaggatgtacataagatactaaaagatattgagattgatcagttcaagagggcggttagagagaagactaaccaggacggtgggaatctaaagcttttggatttcacccggatgttgctgacccgaccggacggtcatccgggtgagtaccgacagttcaagccgtt

SEQ ID NO: 163489 - DNA, 418 bp, Arabidopsis thaliana columbia
ataaaaaaaaaaaaaacacaaaaaagtttcaatggccgtctcaacaatggctctctcctcccctgctttcgccggaaaggctgtgaacctttcccctgcggcatcagaagtccttggaagcggccgtgtgacaatgaggaagactgttgccaagccaaagggtccatcaggcagcccatggtacggatccgaccgagtcaagtacttgggtccattctctggcgagtcacccagctaccttaccggagagttccctggagactacggatgggacacagctggtctatccgctgaccccgagacattcgcaaggaaccgtgagctagaagttatccacaggaaggtgggccatgctcggagccctaggctgcgtcttccctgagcttttggccaggaacggagtcaagtttggagaggc

SEQ ID NO: 163490 - DNA, 453 bp, Arabidopsis thaliana columbia
caaacctctttagaaaaatgtcgtcagcttattgttcctccgccgtggctgtatccgccgcaggcaccgcttcctccgccgctacctttaatccattactctcctcccactccaattcccaactcttctatcgctttacaccaaaatccttcaaactcgttgccaattgccctaatccactaatcctccactcaaatatccgccgccaccgcttcttctgcgccgccgaaaccgaagctagttccgccgatgatgaaatccaggcatcagtagaagaagaagaagaggtagaagaagaaggagatgaaggtgaagaagaagtagaggaagaaaaacagacgacgcaagcgagtggtgaagaagggaggctttacgttgggaatttaccttacacaatcacttcttctgagctctctcagatttttggaggagctggaactgtcggcgatgttc

SEQ ID NO: 163491 - DNA, 426 bp, Arabidopsis thaliana columbia
caattgtgggtgatgggaccacacaagaagcagtgaactagcgtgttgtacagattaggaatcttattgagcaagcggagcaagactacgagaaggaaaaattaaatgagagaattgcgaagctctctggtggagttgctgtaattcaggttggagctcaaactgagacagagctcaaagaaaagaagctgagagtggaagatgctcttaatgctacaaaggctgctgttgaggaaggtattgtcgttggtggtggtgcactctgctccggcttgcatcaaaggtcgatgccatcaaggatacccttgaaaatgatgaagaaaaggttggagcggaaattgttaaaagagcactgagttaccctctgaaattgatagctaagaatgctggtgttaatggaagtgttgtcagcgagaaggtgctggc

SEQ ID NO: 163492 - DNA, 376 bp, Arabidopsis thaliana columbia
aacaatggcttcctctatgctctcttccgctactatggttgcctctccggctcaggccactatggtcgctcctttcaacggacttaagtcctccgctgccttcccagccacccgcaaggctaacaacgacattacttccatcacaagcaacggcggaagagttaactgcatgcaggtgtggcctccgattggaaagaagaagtttgagactctctcttaccttcctgaccttaccgattccgaattggctaaggaagttgactaccttatccgcaacaagtggattccttgtgttgaattcgagttggagcacggatttgtgtaccgtgagcacggtaactcacccggatactatgatggacggtactggacaatg

SEQ ID NO: 163493 - DNA, 295 bp, Arabidopsis thaliana columbia
ctcttcgaaactcaatttgtgaaatttgggggctaaaggatgaagggtttagtgtctactggggggaaaggttccgacaagtgcaggatgcccacttgtgttaacttgctacctattcgattgcacattcatttctaagatcacaagcacaatgatgcgtataatctgaacccttgagacccctacaatgaaaatgaataattttgccactgtatcttacattactgaccttaccgactatccatttgtctaaagaaagttgactacctatttagtaacaaagtgatttcacttt

SEQ ID NO: 163494 - DNA, 452 bp, Arabidopsis thaliana columbia
aaagatctctctacttcaataaatctccaccttactttaagaacaagaaaaacacagtattaacaaatggcaggaatcaaagttttcggtcacccagcttccacagccactagaagagttctcatcgctcttcacgagaagaatgtcgactttgaattcgttcatgtcgagctcaaagatggtgaacacaagaaagagcctttcatccttcgcaacccctttggtaaagttccagcctttgaagatggagacttcaagattttcgaatcaagagcaattactcaatacatagctcatgaattctcagacaaaggaaacaaccttctctcaactggcaaggacatggcgatcatagccatgggcattgaaattgagtcgcatgagtttgacccagttggttcaaagctttgttgggagcaagtcttaaagcctttgtatggtatgaccacaga

SEQ ID NO: 163495 - DNA, 390 bp, Arabidopsis thaliana columbia
agagagaccaaaaagagatcggaagagatggtctttacctccgcgatgtcattggtcacaccacttaaccagacccgttcgtctcctttccttaagccattacctctgaaaccatccaaggctttggttgcaactggaggcagagcacagaggcttcaagttaaggccctcaagatggacaaggctttgaccggtatctccgcggctgctcttactgcttcgatggtgattccggagatagctgaagctgctggttctggaatctctccttccctcaagaatttcttgctcagcattgcttctggtggcctcgttctcactggcattatatggtgtcgtcggcggcgtcttcaactttgaccctgtcaagaaaacctaagacctatatat

SEQ ID NO: 163496 - DNA, 318 bp, Arabidopsis thaliana columbia
ccacgcgttcgaatcagaatacctctggaggcagttgagataacttttggacctggagcaccattttcgaaagagtctcttgctgaagctaagataaaattagaagccttggacaagaaagatagggaaagaagaagaacggctgagttaaaaaacaaccttgaatcttatatatatgctaccaaagagaagctggaaacacccgagtttgaaaagatatccacccaagaagagcgcaaggcgtttggttgaaaagcttggtgagggggcaggattggctttacatggatggagaaagatgctaatgccacaaagttt

SEQ ID NO: 163497 - DNA, 430 bp, Arabidopsis thaliana columbia
agcgtttactgtgagtctctcaaagaaaccaatggcttagaaaagagataacacacacaaaaaaaaatggcatcaacctcactcctcaaggcttctccggtgttggacaaatccgaatgggtcaagggacaaagcgttctcttccgtcagccttcttccgcttctgtcgtcctccgcaaccgtgccaccttcctcaccgttcgtgccgctttcttctacgccgatgagcttgttaagacagcgaaaactattgcgtctccccgacgtggaatcttggcgatggacgagtcaaacgcgacttgcgggaaacgtttggattcgattgggctagagaacactgtggcaaatcgtcaagctttccggactttgctggtcttttgaccgggactcggacagtacgtcttcggcgcaattctatttgaggagactc

SEQ ID NO: 163498 - DNA, 432 bp, Arabidopsis thaliana columbia
gacagctaaaactaaatacaaagaaacagagatgggtttggttacagaggaggtgagagctaaggcagagatgtacaccggagatgagatatgtagagagaagacaaagtgtttcctcaaggaaatatctatgcccaatggtttattaccattgaaggatatagaagaggttgggtatgacagagagtcaggtgttgtatggctgaagcagaagaagagcatcactcacaagttcacagagatagataagcttgtctcctatggaaccgaagtcacagccattgttgagaccgggaaaatcaagaagctcactggagtcaaagccaaggaacttcttatttgggtcactatcaatgagatctataccgaggaaccccctaccaagatcacgttcaagacaccgaccacactgtccaggacttttccggtcac

SEQ ID NO: 163499 - DNA, 442 bp, Arabidopsis thaliana columbia
  unsure (1)..(442): unsure at all n locations
gcgtgcgagaagatatccagagaggtgcaataacgataacggcgttgtggccgttgatttcttccatcgttataaggaagatatccaactaatgaagaatctaaacacagacgcctttagaatgtctatcgcatggccaagaatatttcctcatgggagaaaggagaaaggagtgagtcaagctggtgtgcaattctaccacgacctcatcgacgagctcataaaaaatggtataactccattcgttactgtttttcactgggacactccacaagatttagaagatgaatatggcggctttttaagcgaaaggattgtgaaggatttccgagagtatgcagattttgttttccaagaatacggtggaaaagtgaaacattggatcactttcaatgagccatgngttttctcgcacgctggctatgacgtatgcaaaaaggca

SEQ ID NO: 163500 - DNA, 436 bp, Arabidopsis thaliana columbia
tcgagcccacgcgtccgggtgcttcaaggatcattggcattgacatcgatagcattatgtatgaaactgcaaagaagtttggtgttaacgaatttgtgaacccaaaggatcacgacaagccaattcaggaagtgattgtcgatctcactgatggcggtgttgactacagctttgagtgcatcgggaatgtctccgtgatgagagctgcattggagtgctgtcacaagggatggggaacttcggtcatagttggtgttgcagcatcaggacaagagatatcaactcgtccgttccaactcgtgactggccgtgtgtggaaaggaacagcttttggtggtttcaagagtcgaacccaagtgccttgggttgtagaaaagtacatgaacaaggagataaaagtggttgaatacataacacacaacttggccttgggaga

SEQ ID NO: 163501 - DNA, 458 bp, Arabidopsis thaliana columbia
cgtacgatctcagatagatcaatctagagagaccaaaaagagatcttaagagatggcttctacctccgcgatgtcattggtcacaccacttaaccagacccgttcgtctcctttccttaagccattacctctgaaaccatccaaggctttggttgcaactggaggcagagcacagaggcttcaagttaaggccctcaagatggacaaggctttgaccggtatctccgcggctgctcttactgcttcgatggtgattccggagatagctgaagctgctggttctggaatctctccttccctcaagaatttcttgctcagcattgcttctgggtggcctcgtcctcactgtcatcattggtgtcgtcgtcggcgtctccaactttgacccttgcaagagaacctaagacctatatatctttcttacatcattattggaatctggtctccttctggggatt

SEQ ID NO: 163502 - DNA, 464 bp, Arabidopsis thaliana columbia
ggctaacaacgacattacttccatcacaagcaacggcggaagagttaactgcatgcaggtgtggcctccgattggaaagaagaagtttgagactctctcttaccttcctgaccttaccgattccgaattggctaaggaagttgactaccttatccgcaacaagtggattccttgtgttgaattcgagttggagcacggatttgtgtaccgtgagcacggtaactcacccggatactatgatggacggtactggacaatgtggaagcttcccttgttcggttgcaccgactccgctcaagtgttgaaggaagtggaagagtgcaagaaggagtaccccaatgccttcattaggatcatcggattcgacaacacccgtcaagtccagtgcattaagttcattgcctacaagccaccaagcttcaccggttaatttccctttgcttttgtgtaaacctcaaaacttt

SEQ ID NO: 163503 - DNA, 416 bp, Arabidopsis thaliana columbia
  unsure (1)..(416): unsure at all n locations
ccggccggaancccggncgaccacgcgtccgatcacacacaaggagagaagagagaaagagagatagagtgacagagataatggcgtacagtgcgtgttggctacaccagagcgcattggcttcatcagccgcacgatcatcatcttactcctcatcccagcgtcacgtgtcgctctccaaacctgttcagatcatctgtaaagctcaacagtctcatgaagacgataactccgccgtctcccgccgtcttgctctcactctcctcgacggcgccgctgctgatggttccaaagtatctgctgctgatgccgcctacggtgaagctgcaaacgtgtttgggaagccaaagacgaacacagacttcttgccatacaatggagatgggttcaaagtgcaggttccagcaaaatggaac

SEQ ID NO: 163504 - DNA, 425 bp, Arabidopsis thaliana columbia
tgacgctgatggcaaagaacatgtcgcttgttctattggaactgggcctgtggattcagcttacaaggcagtagatcttatcgtaaaggaaccggctactctgcttgagtactcaatgaatgcagtaacagaaggcattgatgccatcgcaaccacaagagttcttatccgtggaagcaacaaatactcatctacaaacgcaataactggtgaagaggttcaaagaacctttagtggaactggagcaggaatggatattgtggtgtcaagcgtcaaagcttatgttggagctttgaacaaaatgatggacttcaaagaaaaaccccgccacaaaaatcccttcccaaaaaaacagagtcgctgcctgaattaaaaatctttccggcaaataccaaaaagtcagacagaagtaggttcttttattt

SEQ ID NO: 163505 - DNA, 457 bp, Arabidopsis thaliana columbia
tcctgcgtatgatctgttatccaaaatgctggaatatgatcctctaaagcggatcacggcttcacaagcactagaacacgagtatttccgaatggatcctctcccaggacggaacgcatttgtagccagccaaccgatggagaagaatgtgaattacccaactcgtccagtagatacaaacaccgatttcgaaggcacgacaagcatcaatccgcctcaagcagtagcagcaggaaacgtagcagggaacatggcaggagctcatggaatgggcagtagatcgatgccaagaccaatggttgcacataacatgcagaggatgcagcaatctcaaggcatgatggcttataatttcccggcacaggcagggcttaacccgagtgttccgctgcagcagcagcgcgggatggctcaaccgcaccagcagcaacagctaagaaggaaagatcccggaatg

SEQ ID NO: 163506 - DNA, 64 bp, Arabidopsis thaliana columbia
atagaacattacatattctatcggattctcaactgtctgatgaaataaatatgtaatgttctat

SEQ ID NO: 163507 - DNA, 373 bp, Arabidopsis thaliana columbia
gccggggaaatcaaaaaaccaaaaatccaatctttggtttcttacttctacgattggggtgtttcctcaaacccaaatgtctcgtctcccgattttaatcgcttcgtgtctcttcctctcttcactcaccgccgccgtcgtcaccgccgccgaatccgatactccgacggcttattcactcctccaaagctacaacttccccgtcggaatccttccaaaaggagtcgtagcttatgatttagacacaacaacaggcaaattccatgcgtatttcaacgattcatgtagcttcaatcttgttggttcttaccaattgaattacaaatcaacaatcagtggttacatctgcgagaacaagctcaagaaattgact

SEQ ID NO: 163508 - DNA, 445 bp, Arabidopsis thaliana columbia
  unsure (1)..(445): unsure at all n locations
tgcgtccacgcgtctcgaacacagaagatgacgttaggcatttgtctttctgaaatcgccagatcccgaaaacaccaacgaatgtgcgtcaggagaacaatcggatccgagaatccgattcctgaatctcatcacacgctcaccaaagcntgatnntccaccgtcgttgaacccgagtgaagaatagctttctgatcaccggaatcactcggccccaggacggatcatactctgacggagttctcttctcggaaaaggctacgaagttcatggtctgatccgtcgatcatcgaatttcaacacccagcgaatcaaccatatctacatcgatccacacaatgtcaacaaagctctgatgaaactccactacgccgatctcaccgacgcttactctctccgtcggtggatcgatgtgatcaaacctgacgaagtttataacctagct

SEQ ID NO: 163509 - DNA, 396 bp, Arabidopsis thaliana columbia
cgtccaattaatccgaatggcacatggagccatcgaggatgacgttgaaccggtttggtaacacttcgagtagctcactttggtatgagcttgcgtatagtgaagctaaaggaaggattaagagaggagataggacttggcagattgcttttggatcgggttttaagtgtaatagtgcagtttggaaagctttgagaacgattgatccaatggacgagaagactaatccatggattgatgagattgatgactttcctgttcaagttcctaggatcactcccattacatcgtcgtagtgttttaaattcttttggagaactaatttgttatgttttattaaatgtaataacttacgtgatttgatatttttttattatcttaatatatatgattgcc

SEQ ID NO: 163510 - DNA, 300 bp, Arabidopsis thaliana columbia
  unsure (1)..(300): unsure at all n locations
gtcgtcatgatccttgtgttgttccacgagcngtgccaatggtggaagcaatggtggctctagttcttgtggatcaattgatggcgcaatacgcacaatgccatttgtttccaataaatccagagttgcaggaaccgaaatgattgcgcgtggtcgtcatgatccttgtgttgttccacgagctgtgccaatggtggaagcaatggtggntctagttcttgtggatcaattgatggcgcaatacacacaatgccactttttttcaataaatccagagttgccaggacctttttatgtaca

SEQ ID NO: 163511 - DNA, 465 bp, Arabidopsis thaliana columbia
gatggaacaaaactatgagacagacgaatgggacaggagattcaaagagttagaaaaatcggattgaaatgtgaaatctgggacttgtgaccttttgctgttatatgctaagttacgtagcagctcacacatcatccgcaacacagaattttcccaacaacgtaaaaacattcatggacgctggagttaaagcggatgacacaagccatggcacatactgtttagacattctttctctctctgagacagaaaataactggtttattgaggtctcttaagctctagtggtaatagaccattttgtgatgctccgtaacacaacaagcttggtcttgtttaaatcattcaggagatcccagtattgcttgttcctgagagttactacaaatgcaacaatagattatgtacattaatttgtatatacgaaagtgcaaattcttgcttaaaaaaaaaaaaaacataaaa

SEQ ID NO: 163512 - DNA, 455 bp, Arabidopsis thaliana columbia
gggagggaggagagtgtagcagatcggcgaaaatgacatccagattcaagaagaacaggaagaagagaggtcacgtcagcgccggacatggacgtatcggtaagcaccgtaagcatcccggaggtcgtggtaacgctggaggtatgcatcaccacaggatcctcttcgacaagtaccatccaggttacttcggtaaagttggtatgaggtatttccacaagctgaggaacaagttcttctgcccaatcgttaacctcgacaagctttggtcactcgtccctgaagatgtgaaggcgaaatcaaccaaggacaatgttccgttgatcgatgtgactcaacatggtttcttcaaggttttgggtaaaggtcatttgcctgagaacaagccgttcgttgtgaaggcgaagcttatttcgaagactgctgagaagaagaataaagaagctggcggtgct

SEQ ID NO: 163513 - DNA, 359 bp, Arabidopsis thaliana columbia
caaccatggcgtctctcgctctctccggctcctgctctctcgctttccctctcaaatctcgatctctctctctccctcgtcctccttcttcctctctcaatttgacgaaacctctccgatctctcgattctcgcttctccttactcaaatctccacttcccgtctctttacgccggagatcatcaactctcgttaaagcctcttccaccgtcgcttcagcttcctcttctccaactcctcctttggttccagctccggttccatggcaaggagctgccattaagcctcttctcgcttcgatcgctactggtttgattctatggttcgttccagtccccgaaggtgtcactcgcaacgcg

SEQ ID NO: 163514 - DNA, 317 bp, Arabidopsis thaliana columbia
cttcttcgttgcagcttcgtggaaattattttctctttctcttccattattatcttaaagtgagaaatcaataagatgttggagaaagagtttttcacggagtatggtgaagcaagtcaatatcagatccaagaagttgttggcaaaggaagctacggagttgttgcttctgcggaatgtccacacacgggaggcaaagtagccatcaagaagatgacaaatgtgtttgaacatgtctcaaatgctattccgatccttagagagatcaagcttttcaagcttttttgacatcctgatattgtggagatcaagctttt

SEQ ID NO: 163515 - DNA, 208 bp, Arabidopsis thaliana columbia
gtccaacttccaggaggtgaacgtgtgccattcctttttacagtcaaacagcttgacgcctcaggcagaccagacagcttcaccggaaaattcttggttccatcgtaccgtggctcttccttcttggacccaaagggccgtggtggatccacaggatatgacaacgccgtggcattgccagctggaggcagaggaaacgaggaggagc

SEQ ID NO: 163516 - DNA, 431 bp, Arabidopsis thaliana columbia
  unsure (1)..(431): unsure at all n locations
catatctctgtctatatatcactttacataaactactattccacacacaaacacacatagccatggcctcttctttctcttcacaagccttcttcttgctcacattgtctatggttttaattcctttctctttagctcaagctcccatgatggctccttctggctcaatgtccatgccgcctatgtctagcggcggnggaagctcggttcctcctccagtgatgtctccgatgccaatgatgactccaccacctatgcctatgactccaccacccatgcccatgactccaccacctatgcctatggctccaccaccaatgcccatggcttcaccaccaatgatgccaatgactccatctacaagcccaagcccattaacagttccggatattccttcgccgccgatgccattccgaatggaatctttacct

SEQ ID NO: 163517 - DNA, 413 bp, Arabidopsis thaliana columbia
  unsure (1)..(413): unsure at all n locations
cccacgcgtccgggaccctgagcaaggagctcttttcatagtcaaagagatcaagaacgggagattagccatgtttgcgatgctcggtttctttatccaagcgtatgttaccggagaaggtcctgttgagaaccttgcaaagcatctcagtgatccttttggaaacaacttgcttaccgtcatcgctggaactgccgagagagctcccactctctaagccatttctactttttttaagagcttccaaaatgtacactttgttcgattggaactcctttttgacaatgttaaaaaaacttccatctgaatcttcttgatatatttcaaattnaaaaaaaaaaaaaaaaaaataaataaaaatataaataaaaaatatattaattataataataattaaaataattttttttttt

SEQ ID NO: 163518 - DNA, 465 bp, Arabidopsis thaliana columbia
ccagagtaaagcttgaaactttggactaaaagaatggcgtctttgggtgtgtcggaaatgcttgggactccccttaacttcagggcagtttcaagatcgtctgctccgttggcatcaagcccatccacgttcaagactgttgctctcttctctaagaaaaagccagctcctgctaagtccaaggctgtctctgagactagcgatgagctcgccaagtggtatggtcctgacaggagaattttcttgcctgatggtcttttggatagatcagagatcccagagtacttaaacggtgaagttgctggagattatggttatgacccatttgggtcttggaaagaagcctgagaactttgctaaataccaagcttttgaattgatccatgcgagatgggctatgttaggagcagctggtttcatcattcctgaagctttaaacaaatatggcgctaactgtggccctga

SEQ ID NO: 163519 - DNA, 458 bp, Arabidopsis thaliana columbia
agagaacccaccattgaaattgggggaagaagatatgagaggctaacacacaaaaaaaaaaaaaccgtgctttttcgctggctgactcgggcccttgtcggcttacttcgccggaaatctgaattatccttttgccggagactacttacccttctctttcttcatcttcgaaacgggtttttaaagctcagctcttggtgacgccgtcgtgagagagagagagattgaagtagaagaagaagaaattgaggttgagagatgtatgtagtgcctccgcctcagcgatctgattctggatccaatggtgatttaagggtttaccaaacttggaaaggcagcaatatattctttcttcagggaaggtttgtatttgggccagatgttagatcactggcgctgaccatttgtctcattgctgtccctgttacaattttctgcatctttgtcgcaaggaagct

SEQ ID NO: 163520 - DNA, 394 bp, Arabidopsis thaliana columbia
  unsure (1)..(394): unsure at all n locations
cacgccgtcncccgcttattccaaattttttcaaacccacgttgcgaaaattcttgaatcgagatcttctcttttcaatcgaaaaaaaangaaaggatttgcttctacgattcgttcgaatcgaagaatgtcgacaacgggaacgagaatgtttacatngtgcgaaattagcccgaacaacgctgaacgttaccgaagaaatggttgaattcatggagaaagttgcgaaaactgttgatgttgaggaactttcagttgaagagaggaatcttctctctgttgcttacaagaacgtgattggagcgagaagagcttcgtggagaatcatttcttcgattgagcagaaagaagagagcaaagggaacgaagatcatgttgctattatcaaggatta

SEQ ID NO: 163521 - DNA, 391 bp, Arabidopsis thaliana columbia
gctgaaagaagtgatgttcccaatatcgacaagaagaagtaccttgttccagctgatctaactgttgggcaatttgtgtatgttgtccgtaaaagaatcaagctgagtgccgaaaaggctatcttcgtctttgtgaagaacacattgcctccaactgctgcaatgatgtctgcaatctatgatgagaacaaagacgaagatgggtttctctacatgacttacagtggagagaacacctttggtttggtttaaatgtgtgccttccaatgcttttgtgctgatgtgtatattatatgctcttttataacactatgaatatgcaaaagttatatgtactactattaatgtaaatgttgctttgaaattaagttgttagtttgggttttacttt

SEQ ID NO: 163522 - DNA, 421 bp, Arabidopsis thaliana columbia
tctatattttactctataacacaaacatgactgtttcttcatctccatgggctctcatggctctctttctaatggattcttcaacaatggtaatggctattcctccacgcaaggccattgatgtaccatttggtcgtaactacgtcccaacttgggcttttgaccaccagaaacagttcaatggcggttccgaacttcagcttatcctcgacaaatacactggcacaggatttcaatcaaaggggtcatatttgtttggacattttagtatgcacataaagcttccagctggtgacacagccggagttgtcacagctttctatctatcatctaccaacaatgagcatgacgagatagactttgagttccttggaaacaaaaacaggacaaccaagctatattacagacaaatgtattcaca

SEQ ID NO: 163523 - DNA, 472 bp, Arabidopsis thaliana columbia
cacttatacgatctcttcccaaattattgattttttttacccatttctctcatcgcacggtgatattgagaatcgccgacctgaatcgatcggaaaactttctctgattaccggcggtcaacaccgctgaacacatatgtttgtttgacgacctcttctctccgcgatctttacctcaacaacgagatctgtttccacgaaagaaaggaggatgtcgacgccagcaaggaagaggttaatgagggatttcaagaggttgcagcaagacccacctgcgggtattagtggtgctccacaggacaacaacattatgctctggaatgctgtcatatttgggcctgatgacacaccatgggatggaggtactttcaaactctcactgcagttctctgaagattatcccaataaaccaccaacaagtcggtttgtgtcacggatgtttcatcctaatatttatgcagatgggagtatc

SEQ ID NO: 163524 - DNA, 383 bp, Arabidopsis thaliana columbia
ctcatcttcaagccatctccgatcatcatcagacattggcagcagctatggcaacagcaaccaagtgcatgtctctaaacccatctgctcctaaactccaaaaccaaaccaaatccaaaccattcatctccctaccaaccccaccaaaaccaaacgtctctctcgccgtcacaagcaccgccctagccggagccgtcttctcttccctcagctactctgagccagctttagccatccaacagatcgctcagctcgctgcagcaaacgccagtagcgacaaccgtggcttagctcttctccttcccatcgtcccagccattgcatgggtcctttacaacatcctccagccagctattaaccaggtcaacaagatgcgtgagagt

SEQ ID NO: 163525 - DNA, 288 bp, Arabidopsis thaliana columbia
cttctctctctggtagccatggcttcggctactttctctgtggccaaaccatctcttcaggggtgttctgagttctcaggacttcgaaactcctctgctcttccctttgccaagagatcttcttccgatgagtttgtttccttcgtcagtttccaaacttctgcaatgagaagcaatggtggatacaggaaaggggtgaccgaggccaagataaaggtagccatcaatgggttcggtaggattggtaggaacttcttgaggtgttggcatggttcgaaaggactctcc

SEQ ID NO: 163526 - DNA, 573 bp, Arabidopsis thaliana columbia
  unsure (1)..(573): unsure at all n locations
ntcggacctcacgcgnntccgcagcccaacgaccagtnntatcaaaangcttaagnctcgttttacggcgttttaatcctttttgcttgagaaatccacatcattggcggatgggttgaaccacgacggttgcttgctttgctggnacgttcccaacgaacgacggacccgtttaangnnaagtttggccttttcaaannggagtnntgatcntnncgatgcttttcttctcngnnatatgtcntttactcgatgatacnnttgtcaacgacttcttcttctttnnctcgtannttcgtacgaacggggttcttcttagagngggtttgaccaangnggaagcncanatgngctttcttgattaangnnaagcttgaggaaaagcnngaaaagggagtgcnnaccacaagtgtggaggaagccatgaacccagtgggagaacccactttgaggggaacattgatcatcgtcctctggaaatgatttggaaagcattcatttggagtgtaccaacggaaaagactttcaaccaaggttgagatcaaagcctgagatgattggtcactacctggc

SEQ ID NO: 163527 - DNA, 305 bp, Arabidopsis thaliana columbia
caaaccagagatagagagaggtttagcgaaaaatggcgatggccatggctcttcgaaggctttgttcttcaattgacaaacccatgcgtcctcttattcgatccacttcatgttacatgtcttctttgcccagagaagctgttgatgagaaggaaagatctcgtgtcacttggccaaaacagcttaacgcacctttagaggggggtgatcctgagattgctgacattattgagcatgagaaagctagacaatggaagggacttgaacttattccatctgagaacttcacatctgtgtcggtgatg

SEQ ID NO: 163528 - DNA, 474 bp, Arabidopsis thaliana columbia
  unsure (1)..(474): unsure at all n locations
gaaaaaactcccttcttttctcaaaggagagaggattgaagttttaagagtggagctttacgaggggaacactgcgcctccggactaccttactgagagtgagctgatatctctcatggagaagcatggcataggcacagatgcatcaatagctgtacatataaacaacattggtgaacgtaattatgttcaggtccaatctgggaggaaaatggttccaacggcgttaggaatcacgctaataagaggctatcagtgtattgatccagacctttgcttaccagacatccggagttttatcgagcaacaaatcactcttgttgccaagggccaagctgatcattcacacgttgtgcagcatgtgattcagcaattccggcgtaaattcagttattttgttcaacagatcgaacacatggatgccctctttgaagcacagntctctcctttggctgaatctggtccggctttaaa

SEQ ID NO: 163529 - DNA, 468 bp, Arabidopsis thaliana columbia
  unsure (1)..(468): unsure at all n locations
gcgatttcttgtggaacaattcagattgtgtgtttagcccacgaggattggaaaaacatgtcgtgttcgcctgacacagagcggggactgatatgaccgacccaatctttagcatgttctacacacagaatgagttgtttagggacatccacatgttacagtcaaaggatctatgactgtgccacagcatgattgcgttgggatcttgtacgatgaaactaaatgcaacaactgaaatgatgccagtcacatggccaagtttcactgacattcacccttttgctcctgttgaacaagcacaaggttatcaggaaatgttcgaaaatttgggtgacctcttgtgtacgatcactgngtttgactctttctcgttgcaacctaatgctggtgctgctggtgagtatgccgggcttatggttatccgcgcatatcacatgtcaagaggagatcatcaccgtaatgtgtgta

SEQ ID NO: 163530 - DNA, 265 bp, Arabidopsis thaliana columbia
ctctatcttacctccctgaccttagtgacgttgaattggctaaggaagatgactacctgctccgcaacaagtggattccttgtgttgaattcgagttggagcacggatttgtgtaccgtgagcacggaaacactcccggatactatgatggacgatactggacaatgtggaagcttccattgttcggatgcaccgactccgctcaagtgttgaaggaagttgaaaaatgcaagatggtgtaccctggggcttttattaggatcat

SEQ ID NO: 163531 - DNA, 401 bp, Arabidopsis thaliana columbia
attaacgagagtgagagagagagacacacacacagcgagtgaaaatgtctccggagaagaagaggcaaaacttccctccaataacggaatgcagagacggagagtacgattcgatagccgccgatcttgacgggactctgcttctctcaagaagctccttcccttacttcatgctcgtcgctgttgaagctggaagccttttacgtggactaatcctccttctctcgttaccattcgtcattatctcttacctattcgtatccgaatctcttggtatccagatcctcatcttcatctcattcgctggtctcaaaatccgcgatatcgaacttgtctctcgcgcagttcttccacggtttcactcggtggatgtgaggaaagacaggtttgaggtgtttata

SEQ ID NO: 163532 - DNA, 465 bp, Arabidopsis thaliana columbia
  unsure (1)..(465): unsure at all n locations
cggacgcgtggggcatatttcgatcgtgacaacgttgccctcaagggtctcgccaagtttttcaaggaatcgagtgtggaagaacgagagcacgctgagctgttgatggagtatcagaacaaacgtggtgggagggtcaagttacagcccatggtgttgcctcagtctgagtttgatcatcctgagaaaggagatgctctctatgctatggagttggctctttcattggagaaactagtcaatgaaaagctcctaaacctgcacagtgtggcttccaagaacgatgatgtccagttggcagattntattgagagtgtgtttctgaacgaacaggtggaagccattaagaaaatctcagaatatgtttctcaacttaggagacttggcaaaggacatggaacatggcatttcgatcaggagcttcttggggctgctgcttaatctgagttttagctggaatctcgc

SEQ ID NO: 163533 - DNA, 315 bp, Arabidopsis thaliana columbia
ctctaatcaaaaagcttttaacctcagccgttaattttttttccgaatcatggccgaccagaaaacatcgccattgggggggtccaagaagggggtctatcaaccccaacgcacttagggcggcgctcgctgaggtttatctcgactttgatcttcgtcttcgccggctcaagctccggaattgctttcaacaagatcactgacaatggagcaaccactccttccggcctcgtcgccgctgccttagctcatgctttcggactctttgacgctgactctgttggcgctaacatttccggtggccacgtttctcct

SEQ ID NO: 163534 - DNA, 364 bp, Arabidopsis thaliana columbia
gcgtttcagctagccggaatctacaagaacgtgattgttactgacacgagctcaaagcaacttgaatttgctgcaaagctgaccaacgtccgatacgagatcactacaccgacgaaggcttcatagaagatcgggaaggtagtagcacctgaatcatcagttgatttagtcaccgtcgctcaagcccttcattggttcgacctcacgaacttttacagcaacgtgaaacacgtgctcaagaaacccaacggagtaatcgccgcctggtgctacaccaatccggaagttaacgacgccgtggacaaggtctttcaacggttgtacgatgagaaacttgttcctcattgggatctagcgcgacggc

SEQ ID NO: 163535 - DNA, 371 bp, Arabidopsis thaliana columbia
gcgtgaaatttcttgtcgaaaaatccagattttgtgtttatgtcgacgagaattgggaaaaatgtcgtgttcgcatgatcacaactgcgaagatcatgagtgttcttacgattggactctctacacacacattgatctgttcaaggtcatagcatctgaatgaatctgtttcgggatgtgcgaaccccagcttgaaagcgtgggaacagcgattacactcttctggggagcatttggagagcaatgagggagaccctgaattgcttgtttttgtaccatttacatcagacgttaagatcacacacggatatcaggaaatggtcgaaaatttggcagacctcttgtgtacgatcactgtgtttgactttttc

SEQ ID NO: 163536 - DNA, 262 bp, Arabidopsis thaliana columbia
cggacgcgtgggcgaatcgaatcgatctcatcttcaaaaatcttgtattcaaagatttgattttctgggtttcttctgtattatctcgatatttgaaaaaaatggcgaaggaaattgaatcagcgacagatttaggtgatactaacatcaaaggagttcttgttcatggaggaagatattttcaatacaatgtttatggaaacttgtttgaagtttctaataagtatgttcctcctattcgacctattggtagaggagctta

SEQ ID NO: 163537 - DNA, 428 bp, Arabidopsis thaliana columbia
gtcatctagtcccattctctgtccataacaatgaatatcaattgttctccattagggtttctaatttcactcttcttcattgttacttttcttgcaccacaagtcaaatctagggctttctttgtctttggtgactctctcgtcgacaatggaaacaacgactacctcgtcaccactgcccgtgccgacaattacccgtatggtatcgactacccgacccgtagacccaccggacgtttctctaacggccttaacattcccgacattatcagtgaggctataggcatgccgtcgactttgccgtaccttagcccgcatctcaccggagaaaatcttctagtcggtgctaattttgcctccgcaggaattggaatcctcaacgacactggaattcaattcgtaaacataattagaatttctaaacagat

SEQ ID NO: 163538 - DNA, 467 bp, Arabidopsis thaliana columbia
agaagatgaaggtgatagataagatccagtcattagccgacgaaggcaaaacagcgttttccttcgaattcttcccaccaaagacagaagatggagtcgacaatctctttgagagaatggatcgaatggttgcttatggtccaacgttttgcgatatcacttggggagctggtggatctaccgcagatctaacgcttgatatagcttcgaggatgcaaaacgttgtttgtgttgagagtatgatgcatcttacgtgtactaacatgcctgttgagaagattgatcatgctcttgagactattagatctaatgggattcagaatgtgcttgctcttagaggtgatcctcctcatggtcaagataagtttgttcaggttgaaggtggttttgattgtgctttggatctttgtaatcacattcgtagcaagtatggggattactttggtatcactgtcgctgggtattct

SEQ ID NO: 163539 - DNA, 344 bp, Arabidopsis thaliana columbia
gaaagatcaatctagagagaccaaaaagagatctttagagatggcttctacctccgcgatgtcattggtcacaccacttaaccagacccgttcgtctcctttccttaagccattacctctgaaaccatccaaggctttggttgcaactggaggcagagcacagaggcttcaagttaaggccctcaagatggacaaggctttgaccggtatctacgcggctgctcttactgcttcgatggtgattccggagatagctgaagctgctgggtctggaaactcttcttcccttcagaattcattgctcagcattgcttctggtggccttgttctcactgttataattc

SEQ ID NO: 163540 - DNA, 279 bp, Arabidopsis thaliana columbia
agcttcttcttctaccaatctaattcctctctttatgcttcttgtgttgtgacgcatactcgtcgcagtcttgagatatggccgcgcgcagtttccaccgtcggtgccatcaacagagctccgttgagcttgaacgggtcaggatcaggagctgtatcagccccagcttcaacctttttgggaaagaaagttgtaactgtgtcgtgatttgtacagagcatcaagatgagttacggatcattcaaggcgttgtctgcttaagattgtcatacttaccga

SEQ ID NO: 163541 - DNA, 314 bp, Arabidopsis thaliana columbia
ccggtcgaccacgcgtccgaacaacggctgcctatatgctctctaccgctactttggttgcctctacggctcaggccactatggtcgctcctttcaacggactgaagtcctccgctgccttcccagccacccgcaaggctaacaacgacattacttccatcacaagcaacggcggaagagttaactgcatgcaggtgtggcctccgattggaaagaagaagtttgagactctctcttaccttcctgaccttaccgattccgaattggctaaggaagttgactaccttatccgcaacaagtggattccttgtgtt

SEQ ID NO: 163542 - DNA, 439 bp, Arabidopsis thaliana columbia
gtttgatcatcttgtgagaaaaataatggctgcttcagtgatgctatcttcggggaaattgaaaccagcctggtttcacggtggagaagacggcggctagaggattaccgtcgctcacaagagctcgtccctccttcaaaattgtcgccagtggcgtcaagaagatcaagaccgacaagcccttcggaattaacggcagcatggacttgagggacggcgtcgacgcctccggcagaaagggcaagggatacggtgtttacaagtacgtcgacaagtatggagctaacgtcgatggatacagtcctatttacaacgagaacgagtggtcagcgagtggtgacgtgtacaagggaggagtcaccggattggcaatttgggcggtaactctcgccggaattcttgccggaggtgctcttcttgtgtacaacacaagtgcttt

SEQ ID NO: 163543 - DNA, 445 bp, Arabidopsis thaliana columbia
  unsure (1)..(445): unsure at all n locations
gtccggtctccaacttaagggttatctccattgatgaagaacagattgctgcaaaccttgtcaagaacggacctcttgctgtagccatcaacgctggctatatgcagacttacattggaggagtctcatgcccttacatatgcaccaggaggctcaaccacggtgtcttattggttggctatggagcggcaggttacgctccggctaggttcaaggagaagccttactggatcatcaagaactcgtggngagagacttgtggtgaaaatggtttctacaaaatctgcaaaggccgtaacatttgtggtgttgacagtatggtctccactgttgcagccacccgctcaaccaccgcccattaagcatctcgtcaataagttttaattactttggtgatttgtatgagcgagctctctntgcgctgctgactctctctatntatctc

SEQ ID NO: 163544 - DNA, 391 bp, Arabidopsis thaliana columbia
tatacatggttcagcaccagatatagcctggacaagacaaggcaaacccattggccaccattctcagcgcggcgatgcttctgaagtatggacttggagaagaaaaggctgcaaagaggattgaagacgctgtcgtggatgctctgaacaaagggttcagaaccggagacatctactcccctggaaataaactggtgggatgcaaggaaatgggtgacgaggttctcaaatcagtggaatccaaagttccagctactggttaagtttattgatgatttgaagcacttgaaaaagtttgtgtagcacttggttttacggtcacttatatgctaatccatgcaacattgtaccttttataataaataaattatttgggatcgattctgcaaaa

SEQ ID NO: 163545 - DNA, 466 bp, Arabidopsis thaliana columbia
aaaagaagaagagaaccaacaggaagaagtaatggcttcctctatgttctcctccaccgctgtgggtacctccccggctcaagccaccatggtcgctccattcaccggcttgaagtcatccgcttctttcccggtcacccgcaaggccaacaacgacattacttccatcacaagcaacggaggaagagttagctgcatgaaggtgtggccaccaatcggaaagaagaagtttgagactctatcttacctccctgaccttagtgacgttgaattggctaaggaagttgactaccttctccgcaacaagtggattccttgtgttgaattcgagttggagcacggatttgtgtaccgtgagcacggaaacactcccggatactatgatggacgatactggacaatgtggaagcttccattggtcggatgcaccgactccgctcaagtgttgaaggaaagtgaagaatgc

SEQ ID NO: 163546 - DNA, 462 bp, Arabidopsis thaliana columbia
attacatttacgctttcttgcaatcaaattttccgatcttaagttcagaagacgatgtcagaggtggaaatagagaacgctgctacgatcgaaggaaacaccgctgcggatgcgccggtgacggatgcggccgttgagaagaagcctgcagcgaaaggacgaaagacgaagaatgttaaggaagtgaaggagaagaagactgttgctgccgctccgaagaagagaactgtttcatctcatcctacttacgaagagatgattaaggatgcgattgttacgttgaaagagagaactggatctagccaatacgcgattcagaagttcatcgaggagaagcgtaaggagcttcctccaacattcagaaagctgttgcttctcaatctgaagagactcgttgcttctgggaagcttgtgaaggtcaaagcctcgtttaaactcccatcggcgtcggctaaagcatca

SEQ ID NO: 163547 - DNA, 305 bp, Arabidopsis thaliana columbia
catttctctctatctctttctaaaacacaaccatgactgtttcttcatctccatgggctctcaatggctctctttctaatggtttcttcaacaatggtaatggctattcctccacgcaaggccattgatgtaccatttggtcgtaactacgtcccaacttgggcttttgaccaccagaaacagttcaatggcggttccgaacttcagcttatcctcgacaaatacactggcacaggatttcaatcaaaggggtcatatttgtttggacattttagtatgcacataaagctttcagctggtgacac

SEQ ID NO: 163548 - DNA, 411 bp, Arabidopsis thaliana columbia
  unsure (1)..(411): unsure at all n locations
aacacaagcaaaaaagatggcccaaaagctataattaaagggtggtgagatgggagatgggtggggtgatggtcnctcctcgggggggtnctttttcttcttcctttttttttttttttttttttttttttctttttttttttttcttttttttttgttttttttctttttttttgtttttcttttttttttttcgtttgtttttttttttttttgtttttcttttttttttctgtcgctttttcttctgttttttttctttttctgtcttttttgtttttttnttttgggggtgggggtttttttttttctttttttttttttttttttntttcttttttttgttttttttttttttgttttttttttttttttttttctcttttttcttgttttttgtttttttttttt

SEQ ID NO: 163549 - DNA, 399 bp, Arabidopsis thaliana columbia
cccacacacctcattaacattataattgtttttttagttattcttcaatttcaagaaaatgctgcgaaggctttctcttcctcctctcagtcgtactcctcttctcctcatctgcagccgcctgcgaccgatgtcttcacagttctaaggcagcttatttctcctctgcatctgctctctcctctggagcttgtgcatatggctctatggctaccggtttcttcgccggacacattgctgcggctctgccttccatctacaaagacggctccggctgcggagcttgcttccaggtcagatgcaagaacccgacgctttgcagcaacaaaggaaccaccgtgattgtcacagactttgaacaagacctaccataaccgatcttggtcttagcactcttac

SEQ ID NO: 163550 - DNA, 206 bp, Arabidopsis thaliana columbia
  unsure (1)..(206): unsure at all n locations
gcttgcgggtttccatgcggatgctcttgttgttgatacatttgcaaaggattacactaggcgcgggatgttggcttatgtggaggggatacaaaaagaanatatgacccatggagttgtcacttagtctaaccataaaatgtacattactatatactattattgatatattaaatatcatttttcttaatattatcaatcttttc

SEQ ID NO: 163551 - DNA, 216 bp, Arabidopsis thaliana columbia
  unsure (1)..(216): unsure at all n locations
gcgtccggatttaataggcaagaggatccaatatgattgtcctggtgtcttaccaaacaaacgccagcaccgtttgtcaggattagctgtgatagagattgctcaaaaagtttccaaagcttggcgcatagagtggaggaattcaaccaaaggcactacanaaaatggaaagaaaaaccggaggagagagagaaccaacattcttagccagaatag

SEQ ID NO: 163552 - DNA, 286 bp, Arabidopsis thaliana columbia
tagagagaggtttagcgaaaaatggcgatggccatggctcttcgaaggctttcttcttcaattgacaaacccattcgtcctcttattcgatccacttcatgttacatgtcttctttgcccagtgaagctgttgatgagaaggaaagatctcgtgtcacttggccaaaacagcttaacgcacctttagaggaggttgatcctgagattgctgacattattgagcatgagaaagctagacaatggaagggacttgaacttattccatctgagaacttcacatctgtgt

SEQ ID NO: 163553 - DNA, 255 bp, Arabidopsis thaliana columbia
cgtccgaaactttgtttggttcttcacgatttttaatctccgatgaatcaaattcatcaaaagattcatcttttagatctggttacgtaattcgatttgctctgttttttgtttttcgttttgaattctttattaagtaaccaaatttggggaagaaggaggagtgtgggtgataatggatttggatgatttccgatcggttatggataacgcaggtgttgatgtttggacatttatccgtaccgggattcttgt

SEQ ID NO: 163554 - DNA, 412 bp, Arabidopsis thaliana columbia
aaaaaaaactcaagagagactttgtggccatggcagcctctctccaatccaccgctacattcctgcagtcggcgaagatcgccaccgctccttctcgcggaagttctcacctccgatcgactcaagccgtcggcaaatcttttgggctcgaaacttcctcggctcgcctcacttgctccttccagtctgactttaaggacttcaccggtaaatgctccgacgctgtcaaaatcgccggattcgctcttgccacctctgctctcgtcgtctcgggagcaagtgcggagggagctccaaagagattgacctatgatgagattcagagcaagacatacatggaagtgaaaggaactggaacggctaaccagtgccctactattgacggtggctctgagactttctcgttcaaacc

SEQ ID NO: 163555 - DNA, 288 bp, Arabidopsis thaliana columbia
  unsure (1)..(288): unsure at all n locations
accgggcaccgggaatgcnnaactgatgatttggcaaggatatttagctttgtttcaattggatggaggacttctgcgagaggcttaaannngaagtgaacgagagaaacccagacgatgattngaagatgatggagaactctggagaagatagagacagaatcntgaagaaacctgattctaaatgacgatggattcnagaggcgattgatgtgtgaagaaacggaggaaggagtttctagaaatggtatgccaaaagttgctagcagaattgagaggatagtgaag

SEQ ID NO: 163556 - DNA, 168 bp, Arabidopsis thaliana columbia
caacaaccaaacactcatttctccacatcttgtgtgaaaaaaacagagcaagtatattagagatctcatggcgatggcggtctccggagctgtcctcagtgggcttggttcttcgttcctcaccggaggcaggagaggcgccatcacattggcaagcggggtccgctc

SEQ ID NO: 163557 - DNA, 435 bp, Arabidopsis thaliana columbia
ctctacttcgataatgccgtttgctccttccttgttgtcatcgtcttcctcagtctctcaatttcttcccagattccccaacgcgactagattcaatgtaactccacggagcagagccgccaccgtcgtcgcggcatccgtcaccgacctagccggggtcgacagtacaacaatcgccgtactcggtggaggatccgtagcagcactcgcggcgatggtttccttaacggatccggagaggaggcggaaattgcaggcggaggaagttggcggaggcgataaggaggttgtgagggagtatttcaatagcacggggttcgagaggtggaggaagatctacggtgagactgatgaagtgaatcgagtacagaaggatattcgactcggccatgctaagacggtggggaacacgatgcttatgctgactgaagatag

SEQ ID NO: 163558 - DNA, 262 bp, Arabidopsis thaliana columbia
tttctcctttggtggcaaacacaacgacagatagagagaaacgatggcgtcgaactcgggtatgagctgtggcatagccgccgtggacccttcgcttctctcttcttccaagtctaaattcgtatccgccggagttccactcccaaacgccgggaatgttggtcgtatcagaatggctgctcactggatgcctggcgagccacgaccagcttaccttgacggttctgctcctggtgactttgggcatgacccacgtggactt

SEQ ID NO: 163559 - DNA, 80 bp, Arabidopsis thaliana columbia
ataaaatggaagtagggtttctgggtttgggattcatgggaaaagccatgtcaatgaatctatgggaagaatggattcaa

SEQ ID NO: 163560 - DNA, 167 bp, Arabidopsis thaliana columbia
ttctcacgaatcgtgagcgtacatctctatctttcaaaggcaaagatgattttgtccaagaaccgatacccgaggctgcaattcaagagatatggaggcgattagaagcccccgaggctcggcttggaaagatcatattaacttcattttgtggggaaatgggggga

SEQ ID NO: 163561 - DNA, 463 bp, Arabidopsis thaliana columbia
ggcggtttggttcaaggccggttaacagatcttaagcgttggagggctcgattacttgggaaaccctagtttggttcacgctcaaaagcattttggccattggggccacaacaaggttattttgatgggagccgttgaaggctacagagtcgcaggaaatgggccattgggagaggacgaggacttgctttaccccgggggcagcttcgacccattgggtttggctaccgacccagaggcattcgctgagttgaaagtgaaggagctcaagaacggaagattggctatgttctctatgtttggattcttcgttcaagccatcgtcactggtaagggaccgatagagaaccttgctgaccatttggccgatccagttaacaacaacgcatgggccttcgccaccaactttgttcccggaaggtgagccaagttttatctgtattttgcttcagtctttgcttcg

SEQ ID NO: 163562 - DNA, 318 bp, Arabidopsis thaliana columbia
gatctggttattgagctgagccagaagatgaatgtgaggcctgtcattgggttaagggctaagctgaggactaagcattcgggtcatttcggatcaacttctggtgaaaagggtaaatttggattgactactactcagattgttcgtgtggtgaggaagctgcgtcaatctggtatgcttgattgtctccagcttctgcattttcatattggttcacagattccgtcgacttcgttgctctctgatggtgtcgccgaggctgctcaactttactgtgaacttgtgcgtgttggtgcacatatgaaagttattgatttc

SEQ ID NO: 163563 - DNA, 360 bp, Arabidopsis thaliana columbia
ataataagagagttttaagcatttgaaacaaaaaaaatggcttccaaggctttggttctgttgggtctctttgctgttcttctcgtcgtctcagaagtagccgcggcatcttctgccacagtgaattcagagagtaaggaaactgtgaaacctgatcaacgtggctacggtgacaatggaggaaattacaataacggaggaggttaccagggaggagggggtaattaccaaggaggaggaggtaattaccaaggaggaggaggtaattaccaaggaggaggaggaagataccaaggaggaggaggacggtaccaaggaggaggaggacgataccaaggaggcggtgggcgacaaggagga

SEQ ID NO: 163564 - DNA, 241 bp, Arabidopsis thaliana columbia
actttaaaacacattacacactctaatacttttaaggttttagattctaatcaatggcttcttcttctcttttggtcaccatcttcctctgcatctctgtcttcttcttttcgtccgggaatgcaaatgaggttaccgtcggtggaaaatccggtgactggaagatccctccttcctcttctttctcctttaacgaatgggctcaaaaggctcgcttcaaagtcggcgactttatccgatt

SEQ ID NO: 163565 - DNA, 423 bp, Arabidopsis thaliana columbia
gcaaaaatggcgacgtcgggaacgtacgtgacggaagttccgctaaaaggatcggccgagaaatactacaagaggtggaagaacgagaaccatgtcttccctgatgctatcggccaccacatccaaaatgttaccgttcacgaaggcgaacatgactctcacgggtctatcaggagttggaactacacatgggatggaaaggaggaggtgttcaaggagagaagagagatagacgatgagaccaaaacgttgacgttaagaggacttgagggtcacgtgatggagcagctcaaagtgtacgacgtcgtctaccaattcattcccaaatctgaggatacctgcatcggcaaaatcactttaatatgggagaagcgcaacgattgattcccagaaccaagcgggttcatgaaaattcgtaagagc

SEQ ID NO: 163566 - DNA, 265 bp, Arabidopsis thaliana columbia
tcgaccacgcgtccggacaaatgaatatgtgtcatcaaagcctgaaattagcgagaataacctcgtgagtgaggcttcgtgtgcggggaaggagagggagagagcataaatatcaataaaactttgcttccacgtactatatcacaagcacttacctaatatgatgaaagaatgaaacattaaagacagtaattagacttcttttcatgtaacaatctataaactttaatgtttcattttttaatacaattaactattattttta

SEQ ID NO: 163567 - DNA, 158 bp, Arabidopsis thaliana columbia
ctcctcttcctcttcccgttccatttatccgcaaacggagcttgttttcggtgcacctgcttcaggcactttaaacttgaactgggaaggatgggaaacgaatcatatgaagacgccatcgaagcttttaagaaggttcttattgagaaaggtgatct

SEQ ID NO: 163568 - DNA, 469 bp, Arabidopsis thaliana columbia
gaaaactaggccagcttgtattggaaaagtacaacactgagttctatattctgcatcggtatcctaaggcagttaggcctttctacacaatgacttgtgccgataatcctctttacagcaactcttttgatgtcttcatcagaggtgaggagatcatatcaggagctcaacgtgtccatatcccagaagtcttggagcaacgtgcaggagaatgtggcattgatgtcaagacaatatccacatacattgattcattcaggtacggtgcgcctctacacggtggatttggagtggggctggagcgagtggtcatgcttttctgtgcactgaacaacattcggaaaacatccctctttcctcgtgaccctcaaaggctttcaccctaatatcttttcaactgaaagctatttagtgaataattgtccaactccacaaatttttctcatgaagcttttagaagattttactt

SEQ ID NO: 163569 - DNA, 313 bp, Arabidopsis thaliana columbia
agctaatggcgtcttttgcaaccgtcgccgttgttaaaccatccgccgccataaaaggactcgggggaagctcacttcgccggaggctaagctctccatcaagccttcccgcctgagctttaaacccaaatccatccgggctaatggtgtggtggctaagtatggagacaaaagtgtctactttgacttagaagatttggggaacacaacagggcaaatgggacgtatactgctctgatgctacttcttcttacaatcctcttcagagcaagttctttgagacattctttgccccattcacaaagagaggatt

SEQ ID NO: 163570 - DNA, 474 bp, Arabidopsis thaliana columbia
ctcttatctcctttcctttcattgtagttaacgaaaagattacgataatggcaacatcagctatccagcaatcctccttcgccggccaaacggctctcaagccctccaacgaactcctccgcaaggttggtgtatccggtggtggccgtgtgaccatgcgtcgtaccgtcaagtctactcctcaaagcatctggtacggaccagaccgtcccaagtacttaggaccattctcggagaatacaccgtcctacctaaccggagaataccccggagactacggctgggacaccgctggactctcggctgacccggagacattcgctaagaaccgtgagcttgaagtaatccacagcagatgggctatgttgggtgctctcggatgcacattccctgagattctctccaagaacggtgttaaattcggagaagccgtgtggttcaaggcaggttctcagattttctcagaaggaggtc

SEQ ID NO: 163571 - DNA, 403 bp, Arabidopsis thaliana columbia
tctccggcttctttctcacttcactttctccttctcaatcttctctccagaaactctctcttcgtacttcttccaccgtcgcttgcctgccacccgcctcttcttcttcctcatcttcctcctcctcgtcttcccgttccgttccaacgcttatccgtaacgagccagtttttgccgctcctgctcctatcattgccccttattggagtgaagagatgggaaccgaagcatacgacgaggctattgaagctctcaagaagcttctcatcgagaaggaagagctaaagacgggtgcagcggcaaaggtggagcagatcacagcggctcttcagacaggtacttcattcggcaagaaagctttcgaccccgtcgaaaccattaagcagggctttatctaattcaa

SEQ ID NO: 163572 - DNA, 342 bp, Arabidopsis thaliana columbia
cacacaaggagagaagagagaaagagagaaagtgtgacagagataatggcgtacagtgcgtgtttcctacaccagagcgcattggcttcatcagccgcacgatcatcatcttcctcctcatcccagcgtcacgtgtcgctctccaaacctgttcagatcatctgtaaagctcaacagtctcatgaagacgataactccgccgtctcccgccgtcttgctctcactctcctcgtcggcgccgctgctgttggttccaaagtatctcctgctgatgccgcctacggtgaagctgcaaacgtgtttgggaagccaaagacgaacacagacttcttgccatacaat

SEQ ID NO: 163573 - DNA, 213 bp, Arabidopsis thaliana columbia
  unsure (1)..(213): unsure at all n locations
cggacgcgtgggttttcattaggacaacattggagagatcaaacaagaacgcagtacacgcttggttcactggactatatattggtgcggngaacaatctattggcgttgatggaagaaaagtttccggaactaggtcttgagaaagaaggttgtgaagagatgagttggattgagtctgtactctgggttgctgatttccctaaaggaaaat

SEQ ID NO: 163574 - DNA, 413 bp, Arabidopsis thaliana columbia
aataaactcaacatggctagatccttgttgctctcgctaaccctcacattcctcttcgccggaattgtctcagctcgtgactggaacatcctgagccagctcaaaggaaccacaaccaccacgaagactagccaaaccggcgtcacatctttgaaagctcccaacctaaacggatactgtgagagctggagagtcaacgtggagcttaacaacataagggactttaaggtggttccacaggaatgtgtatggttcgtccaaaagtacatgacctcatctcaatacgaagatgacgtggagagagccgtcgatgaagccatcctctaccttggaaaaacttgttgcgagaagaagacatgcgatggcatggatgcttggatctttgacattgatgacacttttttttcaaccat

SEQ ID NO: 163575 - DNA, 392 bp, Arabidopsis thaliana columbia
atttcttttaaaaatgagaaagttgttggcatcgccgtttagttcattactcgccgtcgttttcatttccgtcatctccgtcgtcagatgctgctctcctaaagatcagacggctctcaatgctttcaagtcgtcactgagcgaaccaaacctcggtatcttcaacacttggtctgaaaacactgattgttgcaaggaatggtacggtatcagctgcgatcctgattcgggtcgggtcactgatatttctctccggggagaatctgaagacgccattttccaaaaggcaggccggtccggttatatgtccggttcgattgatccagcagtttgtgacttaaccgcactcactttcctcgttctcgccgactggaaaggaatcaccggagaga

SEQ ID NO: 163576 - DNA, 259 bp, Arabidopsis thaliana columbia
attatgtttccagaacctgaaactgcatggttgaagtcttattatgggtaatcgtttttaagacttgggttctatccctttttaaacaaataatgcaagtttttttgtaaaaaaaaaaaaaaaaaaaaaaaaaaaaaaaaaaaaaaaaaaaaaaaaaaaaaaagcaaccaatttaaaaatacaaaaaataaaaaaaaaataaataaaaaaaaaaaagttctttaatagaaaaacctaaattaaataaactggctcgatt

SEQ ID NO: 163577 - DNA, 372 bp, Arabidopsis thaliana columbia
  unsure (1)..(372): unsure at all n locations
gaataatctagcgatggaagaagaggatgaaggagagattttccttggtgaatccgatgtcctccgtgaaatcgatgtcgacgaagaagatcttcctgaagcagatgatgatgatatggacgatgatggtgaacaatttgatgaaaacgatgactctgttcacacattcactggtcacaaaggtgagctttatgcattggcttgtagtccaacagatgctacacttgttgcaactggaggtggagatgataaagcatttctctggaaaattggtaatggagattgggctgctgagcttnctggtcacaaggactctgtctcttgtttagcttttagctatgatggacagttacttgcttctggaggattaga

SEQ ID NO: 163578 - DNA, 387 bp, Arabidopsis thaliana columbia
gctgagttcatctccactttactctttgttttttctggtgttggctctgccattgcctacgcgaagctgacgtcggacgctgctcttgatacaccgggactagtggccatcgcggtttgtcatggttttgctctcttcgtggccgttgcaatcggagccaacatctccggtggccatgtgaacccagccgtcacttttggtcttgctgtcggtggtcaaatcacagtcatcaccggagttttctactggatcgctcagcttctcggctccaccgccgcttgtttcctccttaaatacgtcaccggtggattggcggttccaacccacagcgttgcggctggactaggatcgatagaaggagtagtgatggagatcatcaataccttc

SEQ ID NO: 163579 - DNA, 421 bp, Arabidopsis thaliana columbia
ctctcttcttttctcatcaaacttatttctctctcgatcgcaatatatacgattccataaattctcccaaaaacaaattaagagatagaggagagatcatgaggtcaccggtgcaactccaacacggctcagacgccactaacggtttccacacgctgcagcctcacgatcagaccgatggtccgatcaagagagtgtgtctcacgcgcggtatgcatgtccctgaacacgttgcgatgcaccacacacacgacgttggtccggaccagtgttgctcctcggtggtgcagatgatccacgcgccgcctgagtccgtgtgggctcttgtgcggcgtttcgataatccgaaggtttacaagaacttcatcagacagtgccgtatcgtccaaggcgatggactacacgtcggcgatcttcggga

SEQ ID NO: 163580 - DNA, 445 bp, Arabidopsis thaliana columbia
  unsure (1)..(445): unsure at all n locations
cagagaggtgcaataacgataacggcgatgtggccgttgatttcttccatcgttataaggaagatatccaactaatgaagaatctaaacacagacgcctttagaatgtctatcgcatggccaagaatatttcctcatgggagaaaggagaaaggagtgagtcaagctggtgtgcaattctaccacgacctcatcgacgagctcataaaaaatggtataactccattcgttactgtttttcactgggacactccacangatttagaagatgaatatggcggctttttaagcgaaaggattgtgaaggattttcgagagtatgcagattttggtttccaagaatacggtgggaaaggtgaacattggatcactttcaatgagccatgggtttttttgcacgctggctatgacgtaggcaaaaggcacctgggcggtgcttttttacg

SEQ ID NO: 163581 - DNA, 435 bp, Arabidopsis thaliana columbia
agagagtctaaaagctcgtcgtcgtcttcaatggtgaatctcaaaccaattggataaataaaacaaaacaaaaaaaacttcacaaaaaaaaaaaaaagatccaaattacaaccatgccttcggagttaacaccagaagaacgatcggaactaaaaaactcaatcgccgagttccacacataccaactcgatccaggaagctgttcatcactccacgcgcaacgaatccacgcgccttcggaactcgtctggtcaatcgtacgacgattcgacaaaccacaaacatacaaacacttcatcaaatcctgctccgtcgaacaaaacttcgagatgcgcgtcggatgcacgcgcgacgtgatccgtatcagtggattaccggcgaacacattaacggaaagactcgatttacttgacgacgaacggagagttaccgggt

SEQ ID NO: 163582 - DNA, 372 bp, Arabidopsis thaliana columbia
cgcttacgtgacgttactacactcatcggaggtatacgtatgcggagcaatagccttagcacaaagcataaggcaatctggatcaaccaaggacatgattctcctccacgatgactctataaccaacatctctctcattggcctaagccttgctggctggaaactacggcgagtggagagaattcgtagtcctttttccaagaagcgttcttacaatgagtggaactacagtaagttacgtgtgtggcaagtgacagattacgacaaactagtgtttatagacgcaaacttcatcatcgtcaagaatattgattaccttttctcctatcctcaactttctggcgctggcaataacaaagtcttgttcaactc

SEQ ID NO: 163583 - DNA, 353 bp, Arabidopsis thaliana columbia
  unsure (1)..(353): unsure at all n locations
cattttcaaaccctttggtgcaatatcacagacactggagatgtttaggcgtgtgagcgaacagttcacagctatgttcaggagaaaggctttccttcattggtacacaggagaaggcatggacgagatggagttcactgaagcagagagtaacatgaatgatcttgtcgcagagtaccagcagtaccaagatgctacagccggagaggaagagtacgaggaggaagaagaggagtacgagacttaagatgttgtcaatggctccctcggattcgtaagctgtgtaagcaagcagcattcactttcttctttccccttatcctgaatttttttcttcgnaatatctcttttat

SEQ ID NO: 163584 - DNA, 168 bp, Arabidopsis thaliana columbia
ggaagatggtggggtgggcgattgcgcttcatgtctgtgccggagacattccgatcgagctccgctactagcgacggatggctggtgagagcgccctccgttactgcctcgatcttggcatctcccccctcaaatccggcaagccttccttggacgttgcccaactcg

SEQ ID NO: 163585 - DNA, 410 bp, Arabidopsis thaliana columbia
acgacaacaacaaatcttaaacgttttactttgtgctgcactactcaacctcaatggccgcctcaacaatggctctctcctcccctgccttcgccggtaaggccgtcaagctttcccccgcggcatctgaagtccttggaagcggccgtgtgacaatgaggaagactgttgccaagccaaagggcccatcaggcagcccatggtacggatctgaccgtgtcaagtacttgggtccattctctggcgaatcaccgagctaccttaccggagagttccccggagactacggatgggacaccgccggactttcagctgaccccgagacattcgcaaggaaccgtgaactagaagttatccacagcaggtgggccctgctcggagccctaggctgggtttttcctgagcttttg

SEQ ID NO: 163586 - DNA, 196 bp, Arabidopsis thaliana columbia
  unsure (1)..(196): unsure at all n locations
gctatgttcaccgagggttgaatagaggtggtgtataggtctaagtggcatcactaactcaacgagttagtgtagaagtgggcggtggtatttactntaatctgttattttgagccgtcacacggtatttagagctccaagtgggccatttttggtaagcataactggcttttcggtatgaatcggctgccggtta

SEQ ID NO: 163587 - DNA, 318 bp, Arabidopsis thaliana columbia
gccatggcctcttctttctcttcacaagccttcttcttgctcacattgtctatggttttaatggctttctctttagctcaagctgccatgatggctccttctggctcaatgtccatgccgcctatgtctagcggcggtggaagctcggttcctcctccagtgatgtctccgatgccaatgatgacttcaccacctatgcctatgactccaccacccatgcccatgactccaccacctatgcctatggctccaccaccaatgcccatggcttcaccaccaatgatgccaatgactccatttacaagcccaagcccatta

SEQ ID NO: 163588 - DNA, 334 bp, Arabidopsis thaliana columbia
ggagataataatcacaaactacaaaagtagaaagtaagaataaagaacaaagtatcagttcttgaatatttgcatcaatggaggaatccaaaacacctcacgttgcgatcataccaagtccgggaatgggtcatctcataccactcgtcgagtttgctaaacgactcgtccatcttcacggcctcaccgttaccttcgtcatcgccggcgaaggtccaccatcaaaagctcagagaaccgtcctcgactctctcccttcttcaatctcctccgtctttctccctcctgttgatctcaccgatctctcttcgttcactcgcatcgaatctcggat

SEQ ID NO: 163589 - DNA, 374 bp, Arabidopsis thaliana columbia
cttattaactaaagagccttttacttgcgccacactcttaccgcaatggccgcctcgacaatggctctctcctctcctgctttgaccggaaaggccgttaagctatccccggcggcctccgaagtatttggaaccggccgaatcaccatgcgcaaagcctccaagcccaccggtccatccggcagcccatggtacggatccgaccgagtcaagtacttgggtccattctccggtgagcctccgagctacctcactggagagttccccggtgattacgggtgggacactgccggtctattcgccgatcccgagacctttgctaggaaccgggagctagaagttattcacaagaaatgggccatgctcggagccct

SEQ ID NO: 163590 - DNA, 326 bp, Arabidopsis thaliana columbia
ctctgctctctaaagaaaatttggctctctttatctctcgatttgattcataaaccctagctcttagattttttttccgatcaacgagaatggcggacgcagaaacctttgctttccaagctgagatcaaccagttgctctccctcatcatcaataccttttactctaacaaggagatcttccttcgtgaactcatcagtaactcttctgatgctttggacaagattaggtttgagtccttgacagacaagagcaagctcgatggtcagccagagctcttcattcacatcattcccgacaagactaacaacaccctgacgattatc

SEQ ID NO: 163591 - DNA, 335 bp, Arabidopsis thaliana columbia
aaaaaaaaaaaacacaaaaaagtttcaatggccgtcttatcaatggctctctcctcccctgctttcgccggaaaggctgtgaacctttcccctgcggcatcagaagtccttggaagcggccgtgtgacaatgaggaagactgttgccaagccaaagggtccatcaggcagcccatggtacggatccgaccgagtcaagtacttgggtccattctctggcgagtcacccagctaccttaccggagagtttcctggagactacggatgggacacagttgggttatttcgttgccccgagacattcgcaaggaaccgtgagctagaagttatctcaca

SEQ ID NO: 163592 - DNA, 220 bp, Arabidopsis thaliana columbia
  unsure (1)..(220): unsure at all n locations
aaaaattgttttggcaaaagcttcctttaattgtgttcgttattgttcttgaccatcagcggcttttccggcaaatgcagatggacctgttggcccgccgtcnaatacactaagccgggcaagtttccctgaaggtttattttttgcgactgcttctgaggcatacctaggtcgatggtgccattaatgaatttttggatgttacatctgtatgagccat

SEQ ID NO: 163593 - DNA, 338 bp, Arabidopsis thaliana columbia
atcaagattccttcaatccaatcagcaatcgaaggtgctaaaaccacaggaaaaggttttgatgatggtggtgactacgacggcataagaaaagtgtacgttacaactgatggctctgcaattaggcatgtaaggttcgactatgacaaagccggtcaagtggaaactcgtgagcgcggggcgaagaccggaacacaacatgagtttacggtcaatcatccatatgaatatatcacatctgtggagggaacctacgctcatacccaaccttacaattgtgttggtcttacatcgttaactttcaaaacattaaaaggaagagcctctccagcgattgg

SEQ ID NO: 163594 - DNA, 214 bp, Arabidopsis thaliana columbia
taagattaggatcctctttttcaaggaaaacaatttaaaaaatcttataatttacaatcaattcattcagtatttccctttttagaagacagattaggacattttaattatgtgttagatgtactaataccttaccccatccatctagaaatcttggttcaaaccctacgttaccgggtaaaagatgccttttctttgcatttttttcggttct

SEQ ID NO: 163595 - DNA, 241 bp, Arabidopsis thaliana columbia
cactgatccttctctcatcctcagaaagtatatgtgctcaaaccatgctgcttacttcaggcgtcaccgccggccattttttgaggaacaagagccctttggctcagcccaaagttcaccatctcttcctctctggaaactctccggttgcactaccatctaggagacaatcattcgttcctctcgctctcttcaaacccaaaaccaaagctgctcctaaaaaggttgagaagccgaatag

SEQ ID NO: 163596 - DNA, 425 bp, Arabidopsis thaliana columbia
gaagaaaaaaaaaagactaaatcgtatccaaaatgcttactctaatgactctcatcgttcttgtccctcttcttctttttctcttcccccacctccttttacggcggcagatgcttctgaaaccctaccctcctggccccaaaggcttacccgtcattggaaatattctcatgatgaaccagtttaaccaccggggtctggccaagctcagccgtatatacggtgggttgctccatctccgcctcggattttcccacattttcgtcgtttcttctccggacattgcgcgtcaagtcctccaagtccaagaccacgttttctcaaaccgtcccaccacaatcgcaatccgatacttgacctacggaggatccgatcttgcattctgcaattacggcccgttttggcgtcggatgagaaaactctac

SEQ ID NO: 163597 - DNA, 163 bp, Arabidopsis thaliana columbia
acgttacagtctgatttgagctaatttctctcatcataaactctccttggagaatcatggctatcgcaaaagttctaatagcgctggctcgtctcatataacttcttgttctccaactcgtccaggctgatgtccaaaactcacagaataaaaatgcttacgc

SEQ ID NO: 163598 - DNA, 375 bp, Arabidopsis thaliana columbia
ctcaagagagactttgtggccatggcagcctctctccaatccaccgctacattcctccagtcggcgaagatcgccaccgctccttctcgcggaagttctcacctccgatcgactcaagccgtcggcaaatcttttgggctcgaaacttcctcggctcgcctcacttgctccttccagtctgactttaaggacttcaccggtaaatgctccgacgctgtcaaaatcgccggattcgctcttgccacctctgctctcgtcgtctcgggagcaagtgcggagggagctccaaagagattgacctatgatgagattcagagcaagacatacatggaagtgaaaggaactggaacggctaaccagggccctactattgac

SEQ ID NO: 163599 - DNA, 394 bp, Arabidopsis thaliana columbia
cacaagttagtcaccaaaaaaaaaaaaaaacacataaagtttcaatggccgcctccacaatggctctctcctcccctgccttcgccggaaaggctgtgaacctttcccccgcggcatctgaagtcctcggaagcggccgtgtgacaatgaggaagactgttgccaagccaaagggtccatcaggcagcccatggtacggatccgaccgagtcaagtacttgggtccattctctggcgagtcaccgagctaccttaccggagagttccccggagactacggatgggacaccgctggactttcagctgatcccgagacattcgcaaggaaccgtgagctagaagttattcacagcaggggggctatgctcggagccctaggctgggtttttccctg

SEQ ID NO: 163600 - DNA, 279 bp, Arabidopsis thaliana columbia
cttattttgctatcgtttgagcatctcaaaaatttctccggggagatttgtttgtatatatactcttccacaaagaagaggctcaaggtccctgaacaccaagttgctggtcacattgctagtgatgggaagctcggtccactcgtagatgaccaaggccggttcttcaagccacttcagggagattctcgtggcgaacacgaggctaagttctatgagtctttcacatcgaacatgaaggttccagatcacattcattgatacttcccggtgttttac

SEQ ID NO: 163601 - DNA, 252 bp, Arabidopsis thaliana columbia
aggatttctaatgcgagatctaaaaacatatctttccgtagcaccggtactaagtactctatggttcggttcgttagcaggtttattaatagagattaatcgtttatttccagatgcattaacatttccctttttttcattctagttattaacatcagaaaggggtgaaaaatttagagatacaatcaacaatcggggactaacccccccaccttttctaattagtagaataaattagaaaaggtggggggg

SEQ ID NO: 163602 - DNA, 232 bp, Arabidopsis thaliana columbia
gtaaccttgggcttaatagcgcttatggtgatgctttgaagaggcttggttttgattgggaaagcgtggctagtcaggagcgcagatcctgcacttgggaatggtggactcgggagacttgccttgtgttttttggatttcatggcaactttgaattattcggcttggggttatggacttagatacaagtatggcttgtttaaactgacaattacaaaagatgggcaggagg

SEQ ID NO: 163603 - DNA, 151 bp, Arabidopsis thaliana columbia
  unsure (1)..(151): unsure at all n locations
ctacatactacaaagcttgaagagttatggcatttgttgaaagataaacactgaaatggagaagggtatcatgaccatcagtaagatgttggtatttctggttgtntaaaatcttcactacagtataccctttagcatgctcgaatcttcc

SEQ ID NO: 163604 - DNA, 186 bp, Arabidopsis thaliana columbia
atttgggtcaaatgtttgagcttttcgtttagcttagcaatcgccttcgcgtcaatctgatggcgtattattacatcggcggacggtcaatctactgtacaggctagcgagtgtaatacatatgctgatatagaggcatcatataaatgcctcaaggaaaagtacagttttttttaccatcaactg

SEQ ID NO: 163605 - DNA, 314 bp, Arabidopsis thaliana columbia
atttaagtttagcaaaaaaatcctaagcttctacaatggcgaatcttcccaccgttctcgtcgccggcgctagtggcagaacaggccagattgtgtataagaagctgaaggaggggtcagacaagtttgtagcaaagggtttagttagaagtgctcaaggaaaagagaaaattggaggagaagctgatgttttcattggggatataacagatgctgatagcattaaccctgcgtttcaagggaatcgagcgcttgtgattctcactagtggctggcctaaaatgaaacctggttttgatcccacggggggggga

SEQ ID NO: 163606 - DNA, 466 bp, Arabidopsis thaliana columbia
aagaaaaaaaaaacagagtagagattgataaaaaaaaaatgagtagctccgattctcctcagcttcacagtatcttcgtctatggtagctttcaagagcctgacatcatccatgtcatgcttaatcgtattcctgagattgtctctgcaacacttcctggctttaagagatttaggcttaaaggacgtttgtatccatgtattatcccctctgagaatggagaagttcatggaaaggtactaatgggattgactaatgatgaacttgagaatgtagattgggttgaaggaaacgaatatgaaagagtgtttgttgaagttgtaagaaaagacaattctgagaagatgagagtggaaacatatccatggatcaacaagaatgatcctgatattggtggagaatgggatttcgaggaatggaaacgattacacatgaagacattcatagaggcgttcacggagatcat

SEQ ID NO: 163607 - DNA, 347 bp, Arabidopsis thaliana columbia
  unsure (1)..(347): unsure at all n locations
cactctcacaaatggcaccgctttaaggtttttttcatactaagtttcaccattgcggcgtcgggaggtctacgccgccgggctgatctgcttccacggtagtctcaatggtgggcttgaatcggactgattcgaaaaagctccgttcagatttcctcggccagattggttacgaagatcggagacaagtaagacacagttactgtagaagctcattagctgtgaaaatgtcgtgggacggtcctcttgcttccgtcaagttgatcatccaaggaaaaaacctcgagttatcagagccaattaagcagcatgtngaagagaaagtaggcaaatctgttcagaaacac

SEQ ID NO: 163608 - DNA, 399 bp, Arabidopsis thaliana columbia
gggtcgataaggtctttttccgtttcctggccttttttggaattggaattccgatttgaattgggggttcttaatctaatcggtgggcgtctcaatctctccaattcgattctcctctggaaatttcaatcctttttatattttccttggtgatttctaagataattaagatcgagaaaaggagaattttgagagagaaagcatccatccatcgatggccgctatgagcgacaaggaagctatggtggatccttttttggtcgaggctcttcagaaccctcgtcatcgtctcaccattttgcgtatggagctcgatatacagaagttctttcaaagtccagagcagcaacaatatgagttccagcctttgcctacatcttatcttcgtcttattgctca

SEQ ID NO: 163609 - DNA, 183 bp, Arabidopsis thaliana columbia
aaactagaaacatgttgaaccatttgaccttttttttttaattatggaatttctggttgtttgggggggccccaactgagggcgaggggcatttttcaacaggatttttggcaacatacggatactgtgcccttaaatatgcgatgaccggtcaactcactgctaaatccgatgtttacagtt

SEQ ID NO: 163610 - DNA, 463 bp, Arabidopsis thaliana columbia
gcaagtgcgtgatggaagtactattcgggtttatcttcttccagagttccagtttgtgcaaggatttgttgcgggagtccaggctccatcaatgggaaggcgaaccacaaatggaagtgttgttgagacagttccagatgagccgaatggagatgtttctgctgagtcacgaggtcctctaacgacagctcagagacttgctgcctctgcagcatcgtctgtcgaggtttcctctgatccatttgcaactgaagccaagtactttaccgaacaccgtgttcttagtagagatgttcgcattgttcttgaaggcgttgacaaattcaacaatctgattggttcagttcattattctgatggggaaacagttaaagacttggggttggagctcgttgaaaatggtcttgctaaaattggtgaatggagtgccaacatgatggaggaggaagctaagaaaaagttg

SEQ ID NO: 163611 - DNA, 416 bp, Arabidopsis thaliana columbia
caaatcttaaacgttttactttgtgctgcactactcaacctcaatggccgcctcaacaggggggctctcctcccctgcgctgcgccggtaaggccgtcaagctttcccccgcggcatctgaagtccttggaagcggccgtgtgacaatgaggaagactgttgccaagccaaagggcccatcaggcagcccatggtacggatctgaccgtgtcaagtacttgggtccattctctggcgaatcaccgagctaccttaccggagagttccccggagactacggatgggacaccgtcggactttcagctgaccccgagacattcgcaaggaaccgtgaactaaaagttattcacagcaggtgggccatgctcggagccctaagctgcgtctttcctgagcttttggcttgaaacggagtc

SEQ ID NO: 163612 - DNA, 288 bp, Arabidopsis thaliana columbia
ccgtcatagaacgcagaactgggtggatcaccgtggtcgtcaaattcctagctcctcgactccgaaaaaaaatcataaacgtatgaccgtctcttgttttcctcgtattatatcggtcgaagtctccaatcatcggtctgagtaatctctgacaatggctgcaagagttttggcaagtgtgattgtgatgggctctggaatcatagccagggcttgtactcaggcatatcgtcaggcgcttgcaaatgcatcaaaaaccggggttgcgcatgaagccgacacagacta

SEQ ID NO: 163613 - DNA, 269 bp, Arabidopsis thaliana columbia
  unsure (1)..(269): unsure at all n locations
acgaatggaactaaaaacttaatagtcatggatggaggtttggctggagcttatccgtcccaggctttaggatgcttatcagcacattgagttggtctctccttcaccggctgaagcagaggttaccaaattcgacgtagtgggtcctgtctgtgaatctgctgatttcctgggcaaagacagagagcnttccactcctccacagggagctggtctggtggttcatgacgctggtgcatactgtatgagcatggctttcacttacaatc

SEQ ID NO: 163614 - DNA, 374 bp, Arabidopsis thaliana columbia
acaacatctatagagagagagagagagagtttagttagagagaaaaaaatggcgagattcacggtgctgattacggcggttgtgctagcttttctaatggcggcgccgatgccaggagtgacggccaagaagtatacagtcggcgagaacaagttttggaaccccaacattaactacaccatctgggctcagggcaagcatttctacctcggagactggctctatttcgtgttcgacagaaaccattactatattcttgaagtgaacaagactgactatgaatgatgtattgccatccacccaatactgatgtgtgtcacgtgagttgtataagtttttttttatttttatccttatcattgtcttactacctt

SEQ ID NO: 163615 - DNA, 188 bp, Arabidopsis thaliana columbia
ggcgatttctactattctctgagtctgtgtatcttaaagatttgatgagacagaaacccagagagctgaaaaacaaaaaccgagactggtgatatttcgttccgaccaaatctgtctgatttgtgatctgaacaaagtacggtaatggtgttgatggcttaacctaccttttttatctaagcatttca

SEQ ID NO: 163616 - DNA, 417 bp, Arabidopsis thaliana columbia
caaaaacatggatcgttgcacgtcgtcgtttttgcttctcacattggtctctaccttgtccggtctccaaatctactttgctcagacttgttccagcaatcatgacattcggtgactctgtagttgatgtcggcaacaacaactatcttccgacccttttcagagctgattatcctccttatggccgtgatttcgctaaccacaaagccaccggtcgtttctgcaacggcaaattagccactgatataactgctgagactttaggcttcactaagtacccaccagcttatctaagttctgaagcttctggtaagaatcttctcattggtgctaatttcgcttctgcagcttcaggttatgatgaccaagctgctctttttaatcacgcgatcccgttgtatcaacaagtagagtatt

SEQ ID NO: 163617 - DNA, 282 bp, Arabidopsis thaliana columbia
  unsure (1)..(282): unsure at all n locations
tcttcttctgcttgnagagatgaaagtttgtgtctgtgtgtaaaaagtatctggaatatgaggctgatgtaatgaaagatgttgcgggatggaaagttgtctagaatgtgtacaattctggtcgctttatgcctttctcttacctgcgatatcttctgtcctctttattcacccttcctccctctcttttattttactttcccccttcttttcttttcttatccttctctttcttttcccatcttcctctcctcttcttctttctctcctttctctctctct

SEQ ID NO: 163618 - DNA, 311 bp, Arabidopsis thaliana columbia
cgatcgccggcgattcaaagaagcagatagaaaaatggcggagatgaagagtgtcggagtagttggtgctggacaaatgggttcaggaatcgcgcaactcgccgccacgagtggcctcgacgtttggctcatggacgctgatcgagatgccctctctcgagccaccgcagctatcttctcctccgtcaaacgattcgtcttcaaaggtctaatctccaaggaagctggtgatgatgctatgcattgtctactattaacattgaatcttgaagatttgttttctgctgcattctatttttcatctctttggg

SEQ ID NO: 163619 - DNA, 329 bp, Arabidopsis thaliana columbia
ctgaaattggaggaaaactggcgaggctggctctattaaattgaaggtgggggaaacaaagggaggaaatattgcagaatctggccgagttccaattctcttgtgtgatgttcaatgcggttctggagaatgcatgtagtgagatgggagcaagaatgtctgccatggacagctcaagcagaaacgcaggagaaatgctcgaccgtctcaccctcacatacaacaggactcggcaagcttttattacaacagagcttattgagattatttctggagcttttgctcttgaagctgctaaataagcccattcgtgttaggtcttcttttct

SEQ ID NO: 163620 - DNA, 75 bp, Arabidopsis thaliana columbia
gtaaaaatagaaatatgtgtaccttatgagctttatgtgtatcaaaaacactgtgtaatgaaagacagatttgtg

SEQ ID NO: 163621 - DNA, 389 bp, Arabidopsis thaliana columbia
agcggaaatatctgaaccaacgcgatgccgtcgacgcagtccttgaccgtcgcagcgaagacgctacgaaatcggatcttctctaggtctggatctacatccgccggtccgagtcggtgggcgacgccaggtcacgaggagcgacctaagggttactttatgaaccgtactcctccggcaccaggacagtcgcgaaaatgggaagattgggagcttccttgttacatcaccagcttccttacaattgttatcctcggcgttggactcaatgccaaacctgatctttcaatcgagacttgggctcatcagaaagctttagagcgtcttgagatggagaagctcgcgaccgctggagattcatctgattaagcatcaccggtggatcttcg

SEQ ID NO: 163622 - DNA, 218 bp, Arabidopsis thaliana columbia
gtcgtttcaaaatcctctaatttctcagtcctatcgctaaagctcttcctgggttcgaggtgatttctcagtcatcgattgagatgttctcgggaaaaagggcctcatcgtctaccatcgacaacgagaaaccagaaaatgcaaagtcttagtcaacttggaccttcagagattttccttgccgccagaagagaaaaacccatttcgtgagcacagct

SEQ ID NO: 163623 - DNA, 106 bp, Arabidopsis thaliana columbia
aaaaccatcacaaagggagaatctggggttggatttggattttcagggaaaaagtagaggtaccaccaattcataaccatccgctgttacctttaactcgtttttc

SEQ ID NO: 163624 - DNA, 192 bp, Arabidopsis thaliana columbia
acggttctgctgttcccgaccaatgaagattctcgtttccgttaaacgtgtcgtcgactacgccggcaagattcgagacggacgcgggaagactgatgtagaaacccaaaatgtgaagatgtcaatgaatccattttgtgagatagcgcttgagggagaattctccttcgatgtcgtgagagctgagctaag

SEQ ID NO: 163625 - DNA, 341 bp, Arabidopsis thaliana columbia
ggatacaaagcagtaggcattagactggattcaggtgacttagcctatctttctactgaggtcaggaaattcttttgtgccatagagagagacctcaaagttcctgatttcgggaagatgatcgtcactgctagtaacgatctaaacgaagagacagtcgatgctctaaataaacagggtcatgaagtagatgcatttggaattggaaccaacttagtgacttgctatgcgcaagctgcgttaggttgtgttttcaaacttgtggaaataaacaatcagcctcggatcaaactttctgaagatgttactaaggtatcgattccatgtaaaaagcgtactta

SEQ ID NO: 163626 - DNA, 416 bp, Arabidopsis thaliana columbia
  unsure (1)..(416): unsure at all n locations
ccggaccgaagtcccggccggcgacgcgcacattgtgccaagcccatcaatttagattttactatccacattctccactgcaatctccgacagaaaccctaactccatctgattgcatggccttcgtcccctccgtctagggggctcctcctccgccctacccaaactatcaaccaccgggagaaaatcctcctccgctgtcgtgagagctgagctaagcccttccatcgtcataagtctcagcacaggtctctccctcttcctcggccgtttcgtcttcttcaacttccagagagagaacgtagcanaacagggcttaccggagcagaacggaaaaacccatttcgaagctggagatgatcgtgctaaggagtacgtcagtctcttgaaatcgaacgatccaaatggattcaaca

SEQ ID NO: 163627 - DNA, 301 bp, Arabidopsis thaliana columbia
gccggaaaaaaacttctctctgagatcagatcttttacgattctcagctcaatcttatcttttcctttgttgtgctgcttttcactctcttctgcgcgacgaatttggccttgttttttgtttgtttgtcgtatccgacgcggaggtattgagaaaccgtggcttaagacggaggaagaagatggaagctaacggtattgagaacttgacgaatccgaatcaggaaagagagtttataaggagacatcataagcatgagcttgtggataatcagttgagctctacccttgtcaaacatatc

SEQ ID NO: 163628 - DNA, 319 bp, Arabidopsis thaliana columbia
  unsure (1)..(319): unsure at all n locations
cgcattcttaatctggagccgtccttntttcgggggggtaagagagaaccaaagagaagtatatgacacctctctttctcccttctttctcctttccttagcttttgatccttattagaaatcttaaatccagactttaaccatgacggatacaatgtctgctcatatggatcgacataataagcttgattatgacggctcagaggatgaaaagaaaacaaagctttgttcccttaagaagaaagcaatcaatgcctccaacaaattcaaacactcctttaccaagagaacttgaaggaacagccgagtcatgtctgtc

SEQ ID NO: 163629 - DNA, 202 bp, Arabidopsis thaliana columbia
agaatcggattttctttctaagactcataatattaaaaacaataatggctttttgggctggtggaagctactaaagcctatgttatcattgaaacggacaaaggacaaaaaacaaacgccgcgaattcatatcaccctagccgcgaaatagcctagaagatgccgtggttgcgccgacaaaacgccacatactcgtgactaa

SEQ ID NO: 163630 - DNA, 273 bp, Arabidopsis thaliana columbia
  unsure (1)..(273): unsure at all n locations
cagcgatggtgactctaaacgcttcttcttcctttcacgatcaagtcgttcctnccctaccgtcacgctcctcgccgtccaatctctttctcccctgtcttcgccggtcattcgactgaccccaagaaatctacccaatcagcctccgcttcggttaaatggagtctagagagttggaagtcgaagaaagctttgcaattgccggattatcctgatcagaaggatgttgattcggttctacagacgctttcttctttttcttctatagttttc

SEQ ID NO: 163631 - DNA, 133 bp, Arabidopsis thaliana columbia
agctcttcttcttcgatcaaaaaacctttagcttctaacaatggagaccagcatcgcgtgctgctcacgtgggatccttcccgcggtgtttattctcaacgatcctctacattggtctttccttcttcctact

SEQ ID NO: 163632 - DNA, 62 bp, Arabidopsis thaliana columbia
agaaactttaaaacgagagagagagaaagaaatgtcgacatcgggaacgtacgtgacggagg

SEQ ID NO: 163633 - DNA, 321 bp, Arabidopsis thaliana columbia
ccaaaacacaaaacaaaaaaaaatggcttccactgctctctcaagcgccatcgtcggaacttcattcatccgtcgttccccagctccaatcagtctccgttcccttccatcagccaacacacaatccctcttcggtctcaaatcaggcaccgctcgtggtggacgtgtcacagccatggctacatacaaggtcaagttcatcacaccagaaggtgagctagaggttgagtgtgacgacgacgtctacgttcttgatgctgctgaggaagctggaatcgatttgccttacttcttgcgggctggttcttgttcgagctgggc

SEQ ID NO: 163634 - DNA, 215 bp, Arabidopsis thaliana columbia
gaaatcttcactttctctctagaaaaaagttggtagctgactcgataaagactctctttttcttcttcttcctgcaaatggcgatcgaggatcaagagaacacaatccgtgaaatcaaacctaagaacagaagaatcatgggagctggtggtccggaggaagaggagaaccggtggccgccatggttgaaaccttcgcttaaagagcaatttttt

SEQ ID NO: 163635 - DNA, 472 bp, Arabidopsis thaliana columbia
gttctctcttccgtcaatatggaaggcgtcaccgtcgtgtctttcttccttcttttcatcgccaccgccatggccgccaagtccaccgtctccttccgtgacggcatgttaccaaacggagacttcgagctaggaccaaaaccatcagacatgaaaggaacagaaatactaaacaaactagcaataccaaactgggaagtcacaggattcgtcgaatacattaaatcaggacataaacaaggagacatgcttctcgttgttcccgccggtaaattcgctgtaagacttgggaacgaagcatcgatcaaacaaagacttaaagtggttaaaggaatgtattactcactcacttttagtgctgctagaacttgtgcacaagacgagagacttaacatatctgtagcacctgactccggtgtgattccgattcagacggtttatagtagtaggggttgggattataatgctgggc

SEQ ID NO: 163636 - DNA, 276 bp, Arabidopsis thaliana columbia
ggagtcactagaatcaacatcgaaacacggatattacttgctgtcggaatggtattcatatgcgcaggcttggacggcaagggcgacgggtcctttcataacggcatgataccaaacggagacttctagctaggaccaaaaccattagacatgaaaggaacagaaatactaaacatactagcattaccaaactgttaagtcacacgattcctctaatacattaacatcaggacataaacaaggagacatgcttcttcgttgtttccaccggtatat

SEQ ID NO: 163637 - DNA, 206 bp, Arabidopsis thaliana columbia
caagcttgagttctcccgcttgaggtgtctgacgaagtgatcatgacatttcaagcttgagttctcccgcttcaatactgcggtggtgatgtgggcaatgcatccatgggagagagatgcaaggttggtgaagaaagctttgaagaaaggagaagaagcttacaacctcaatcgtgaggactaatgcacaccttctgtttaggatt

SEQ ID NO: 163638 - DNA, 143 bp, Arabidopsis thaliana columbia
tcgatgcaaaaggaggttcatcagctgctacttttgttattggtaacccaagctacgacatgtttagggatttttcgcaggggggagggcacatcaagaacattagcaataaactaaacgattgggatctgtggaatatggga

SEQ ID NO: 163639 - DNA, 445 bp, Arabidopsis thaliana columbia
ctaaaccaggagttccgcttatttctccacctccacatcatgatatttattccatagaggatctggcacagttgatctttgatctccatcaggtcaaccccaaggcaaaagtgtcagtcaagcttgtatcagaaactggaataggaacagttgcctccggagtagcgaaggctaatgccgatatcatacagatatcaggatatgatggtggaactggagccagccctataagttccattaagcatgctggtggcccgtgggagctgggactagctgaaacccagaagactctcattggaaatggactaagggaaagagttattatcagggttgatggcggattcaaaagtggtgtggatgtgttgatagctgcagctatgggcgctgatgagtatggttttggtactctggcaatgattgccacaggatgtatcatggctcgcat

SEQ ID NO: 163640 - DNA, 240 bp, Arabidopsis thaliana columbia
ctctgagaatctggtgctttagctttggtaaaatgaagatatactctagaacggttgctgtttcactcattgtgtcattcctcctgcgtttctctgcctttgctgagcgcaatgacgggaccttcagagttggactgaaaaaactcaagttggattcgaaaaatcggcttgcagcacgcgtcgaatccaagcaagaaaagcccctgagagcttacagacttggagattctggagatgctg

SEQ ID NO: 163641 - DNA, 247 bp, Arabidopsis thaliana columbia
gaaggaatgggcgccttcgggaccgtccgggccggaggttccgttgaagggttcggcggggaaccattccaggggttggaggggcgggacccatgttttcgttgccgccattggccaccaaatccaaaaggccgtggttaacgaaggcgaccatgattttaacgggtttttaaggggtggggcctcccctattgttggaaggagggggtggttcaaggggaaaggggggttggttgttgggattaaa

SEQ ID NO: 163642 - DNA, 322 bp, Arabidopsis thaliana columbia
ggaactttgtgacggcgaggaagaaggagttggagaatctccggtcaaagattccggcggcgttggttgattgtgtagatccggcgatgttagtgcttgaagcgatatctgaggtttttccggtggatacaagaggagataaagttagcaatgattatggatgggcttgtgttgtgattcttgagagtttaacacctgtaattgttgatccagtgattgggaaatcgaggttgcttgttactccgagtgttaaggagaaagctaaggagattgctgagacgtggaaaaagagtttggaagagagaggaaagatagagaatgt

SEQ ID NO: 163643 - DNA, 406 bp, Arabidopsis thaliana columbia
  unsure (1)..(406): unsure at all n locations
aaagatcccgtgctattgtctcgcatgggaagaactctcagtgctcagaagaagattttaaaccctgtcctgaaatcacatcgcgagctaaaacaggaaaagttatcttgccttttaagccactcactgtcacatttcaaaacgtccagtattatattgagactcctcaggggaagacacggcaacttctctttgatattacaggcgcgttgaagcccggtgttctcacatctctgatgggtgtcagtggagcagggaaaacgactcttcttgatgtcctttctggaaggaaaacccgcggtatcatcaaaggagagatcagagtaggcgggtatcctaaggttcaagaaacatttgcacgagtatcaggttactgtgaacagnttgatattcattcccctaatat

SEQ ID NO: 163644 - DNA, 279 bp, Arabidopsis thaliana columbia
gaacattttgcagaaatggccgtggatgctgttttcaggctaaagggaagcacaaacttggaagctattcagatcatcaaaaaacctggagggtctctgaaggattcgtttttggatgaagggtttattcttgacaagaaaataggaattgggcagcctaagcgcatagagaatgcaaatatcttagtagctaatactgctatggataccgataaagtgaagatttacggtgcacgtgtccgtgtggattccatgaccaaggttgctgagattgaaggg

SEQ ID NO: 163645 - DNA, 429 bp, Arabidopsis thaliana columbia
caaatcttaaacgttttactttgtgctgcactactcaacctcaatggccgcctcaacaatggctctctcctcccctgccttcgccggtaaggccgtcaagctttcccccgcggcatctgaagtccttggaagcggccgtgtgacaatgaggaagactgttgccaagccaaagggcccatcaggcagcccatggtacggatctgaccgtgtcaagtacttgggtccattctctggcgaatcaccgagctaccttaccggagagttccccggagactacggatgggacaccgccggactttcagctgaccccgagacattcgcaaggaaccgtgaactagaagttatccacagcaggtgggccatgctcggagccctaggctgcgtcttccctgagcttttggctagaaacggagtcaagttcggagaagc

SEQ ID NO: 163646 - DNA, 425 bp, Arabidopsis thaliana columbia
gatctaacggtcgttcgtacgcgatgatatcttcgtctccaccgcgtaaaaggctggtcaaggatttcaatattgagattgctcctgaagatgatttttctcaacgggcctggatgctcaagtatccttcagcgattacctcgtttgcgcatattgcacgctcagcaaagaacaagaagatagctgtgtttctagattatgatggaacactttctccaatagtcgatgaccctgatcgcgccatcatgtctgatgcgatgcgtgctgctgtgaaagatgtcgccaagtacttcccaacagcaataattagtggtagaagccgtgacacggtttaccaattggtagggctaaccgaactctattacggcggtagtcacgggatggaccatatgaactcctgtaaattcaaatgggatcccctggag

SEQ ID NO: 163647 - DNA, 186 bp, Arabidopsis thaliana columbia
gagagaaagagagaaagagagacagagataatgtcgtacagtgcgtgtttcctacaccagagcgcgattgtcttcatcagccgcacgatcatcatcttcctcctcatcccagcgtcacgtgtcgctctccaaacctgttcagatcatttgtaacgctcaacagtctcatgaattctattgctccgc

SEQ ID NO: 163648 - DNA, 269 bp, Arabidopsis thaliana columbia
gtgaccacttctgcaaaccagtgcaatctaaaggttgcgcaatatgccgcccagctggagcaggatgagaaggcaatcaagatttatgaagacatagcacgccattcactcaacaataacttgctcaagtatggagttaagggccatcttctcactgctggcatgtgccacttatgcaaagccgatgttgtttccatcactaacgctctggagaagtatcaggatctggatccaacttttactggaacacgggaatgcaagttcttagc

SEQ ID NO: 163649 - DNA, 225 bp, Arabidopsis thaliana columbia
cttttgatcccaaattcaacagatatctctgaatctatcgcttccaagggttttctctagcttaatctcagattcgaatcgttccatagtgatactatgccgaagaacaagggaaagcggaggaaaaatgccggctggacatggagttcgagcgagaacgagggatctgttcgcgaggcctttcaggaagaagggttacatttctctatcgacttacctgaggac

SEQ ID NO: 163650 - DNA, 214 bp, Arabidopsis thaliana columbia
aaaaatggcgacgtcgggaacgtacgtgacggatgttccgctaaaaggatcggccgagaaatactacaagaggtggaagaacgagaaccatgtcttccctgatgctatcggccaccacatccaaaatgttaccgttcacgaaggcgaacatgactctcacgggtctatcaggagttggaactacacatgggatggaaaggaggaggtgtttttt

SEQ ID NO: 163651 - DNA, 374 bp, Arabidopsis thaliana columbia
ggcttcctccaaacccctaatctccctgtcatccaaccaacaaccaaaccgagtccaaattcccaaattcgccaaacttccccaaattcccaaatccctcacttcctccaccgatctccgtagcaaagcactatcactctcctccgccaccgccaaatccttagctttaatcgccgctttcgctcctccgtcgatggcggaggcgatggagaaagcacagctcttcgatttcaatctcacgcttccgatcatcgttggtgagtttctcttcttgatgttcgctctcgacaaggtctattactcctcgcttggtaacctcatggatctataagacgctttcctcaatgagaagcttgagagtgtttaggacactc

SEQ ID NO: 163652 - DNA, 331 bp, Arabidopsis thaliana columbia
aagcttttcttcgtttatcatcaccatcaccatcatcatcatcatcatcatcgtcatcatcatcatcatcatcatgacgtatgagaacaatagtgtaccaagaattgtaatcaagaaagttctagcaaagcttgagaaggaaggtgaaggagctgtcgttagaaatggcatcacaaagattgaccagaagttattggacccgttcgtgttgctagttgaattttccttttcactctcagctggattcccagatcattcctacagaggttttgaaagtgtacatacatgctacagggaggtattatttacaaagattctaaaggtcataaag

SEQ ID NO: 163653 - DNA, 219 bp, Arabidopsis thaliana columbia
gcgtttcgtagaaaaattcgatttctctaaagccctaaaactaaaacgactatccccaattccaagttctagggtttccatcttccccaatctagtataaatggcggatacgccttcgagcccagctggagatggcggagaaagcggcggttccgttagggtgcaggatcgataccttcctatagctaatattagcaggatcatgaagtaagcgtcgcc

SEQ ID NO: 163654 - DNA, 162 bp, Arabidopsis thaliana columbia
agcttatgactttcttatcgccattgctgaacctttttgcaggcctgagtcaatgcacgagtataatttaaccccacactcgttgtatgctgctgtttccgttggttttgagacagaaattatcatttttgttttgaattaactgttttatacttatttttt

SEQ ID NO: 163655 - DNA, 339 bp, Arabidopsis thaliana columbia
aaaagacctttgcttctcttcgttcggaaaaccagctcaaagattcaatatgtcaggtgatgaggctgttgctgctcctgtggttcctcctgttgctgaggcagcagtgatcccagaggacatggatgtgagtactgcattggagttgactgtaaggaaatctcgtgcttatggtggtgttgttcgtggtctccatgaaagcgctaagcttattgtgaagcgtaatgctcagctctgtgtcctggctgaagattgcaaccaacctgattatgtcaagcttgttaaagctttttgcgctgaccacaatatcaaatcgtttacttgttcaagtgccaaaac

SEQ ID NO: 163656 - DNA, 430 bp, Arabidopsis thaliana columbia
  unsure (1)..(430): unsure at all n locations
gcagatgggagtatctgcttggacattctacaaaaccagtggagtccaatctatgatgttgctgctatacttacctccatccagtccttgctctgtgaccctaatccgaattctcctgcaaactcggaagctgctcggatgtacagcgaaagcaagcgcgagtacaacaggagagtgcgtgatgttgttgagcaaagctggactgctgactagtagtagtttgttgtaagcgttgtagctctctctactttctctcaatcacgattcagcaacagctttcttctcttttcattcatgtcttgtgtttccaaaactatttaagtgattccatgctttgatgtaacccaacatccttaaaaaaacaactttgtaccaaaccatctgaattattcacttttgtgtatatatgtattacgatttaaaanaaaaa

SEQ ID NO: 163657 - DNA, 442 bp, Arabidopsis thaliana columbia
ccactcacgagttggcagagatcatgtatgatatgattcgtgaatggcctcggtatgtgaagcttccgtttccaattgccaaggcaatggcggctcctcgagacttcatggtgaacaaagtcccgttccccttaccctctcctcagatcttcaacctggatcaaatcaatgcacttacaaccgatacacttgtatctgacaacgccttgaagtttcaggatctggaccttgtcccccataaattgaagggatatccggtcgagtttcttatccaatatcgcaagggtggtcctaacttcggttctactgtcagtgaaaagataccaacagacttctacccttgatgctgcttctctgctcaaaggtcatttcctggactaattttttcatgcaagtgtcacaatgagattgcggaaaccagatttgctatgttgatgacttt

SEQ ID NO: 163658 - DNA, 345 bp, Arabidopsis thaliana columbia
gaagatggcccaaaaggtggaagcacaaggagggaaaggagccaacctatgggacgatggatcgacacatgacgccgtgaccaagattcagctcgcagcaggcatagacggaattcaatatgttcagtttgattatgtcaagaacggacaacccgaacaagctcctcttcgtggtaccaaaggccgtgttctcccagctgatccgtttgtgattaaccatccagacgaacatctagtttctgtagaaggttggtatagccctgaaggtattattcaaggaattaagttcattttttaacaagaagacttttgatgttattgtatctgatgagtgttcttactttt

SEQ ID NO: 163659 - DNA, 204 bp, Arabidopsis thaliana columbia
gatccgtcgctgtcgtcgccgatactcaacggtggtgaattttctatacggtcagttcgaacctgctggtatcgacaattctacacatatgcataatcatggccgccactggttgctccgaagcttatgaaggtccagggatgggatctaataacaagcgtgttcgtgcaattgggatgaaatacatcgcgaatcacttaaatg

SEQ ID NO: 163660 - DNA, 152 bp, Arabidopsis thaliana columbia
caaatactgaaaataaaaagaagaagagagaaatctacggtggtgggtgattcgccggagttcaatttcgtagctagatttctcctgcttttccccccgacgagctgtgcgagagagggaggggaatcatgcataaacggagaacgttgaag

SEQ ID NO: 163661 - DNA, 282 bp, Arabidopsis thaliana columbia
gagatttgggctttcgttagactctccattgcatctgctgttatgctttgtcttgagatctggtatatgatgagtatcattgttcttactggccgtcttgacaatgcagttatcgctgttgattccctttctatatgcatgaatatcaacggcttggaggctatgttattcatcggaataaatgcagctataagtgtccgtgtattcaatgagcttggcctaagccgttcatgagcagttaaatacttttgttatgttacggtctttctttctcttcttatt

SEQ ID NO: 163662 - DNA, 253 bp, Arabidopsis thaliana columbia
ctctctccggcgaaaaccatggtggcgcaaaacagtcggcgggagcttctagcagcttccctgatcctaactttagctctaattcgtctaacggaagcaaactccgaaggggacgctcttcacgcgcttcgccggagcttatcagatccagacaatggtgttcagagttgggatccaactcttggtaatccttggacttgggttcatgtcacttggaatcaacaccattaaggcactcggctggatttggggg

SEQ ID NO: 163663 - DNA, 305 bp, Arabidopsis thaliana columbia
aacgaatcctttagcaatcgtgccggatcagtattctggttcgggtttggatcctggaagtgataatgggccgggtcagagtcgggttgggtcgtacttgcaaagagttaatagggaagaggtggattctattatatttgtttataatacgtttaatatgtctaatatttatatacttttatatgagttattatattctttattaaatttttttttctctatttttatatattttttttttaatttttcttactgaatttcatatttatttttttctttattttttatttatatttttctttttt

SEQ ID NO: 163664 - DNA, 406 bp, Arabidopsis thaliana columbia
cggctttggctcggattcgtccgtcttctttcttcttagccgagtacttcggtagattagttggaacgattgatgattttgagttaattgaacgttcggcgtatgagtggtgatcggatagccagtgttcgtaggctccatgctcgcgcatcgaactacctaccacctatccttctcagttaattcacgggcgatgttacgctcgatgatgagttccggggcctgtgtttcgtacctaatttgaaggaattgttgagtttggtttacacctttgcccgcggcttctccttcgtggggaagtcgtgggcacaaacattggggcttgttcacctctcgtcatcgcatttgttgccttgctcgcattggtgaatgagttgcgggttgaaatcttgtatgctgaaaattt

SEQ ID NO: 163665 - DNA, 248 bp, Arabidopsis thaliana columbia
ccagaccgtagtcaagtttgtgggaggattgggtttgttttggcagctatcttttggaatcctggacgtcttgtatttctacactgactacttctttgctagtggagctgcccacattggtgctatgttcactgcctttttatcggtttcaaccgctctaggcactccaccttactttgcagccttggttcttgcgttcctttccaacctgatgggaggattgacccattatggtattgggtctgcgc

SEQ ID NO: 163666 - DNA, 428 bp, Arabidopsis thaliana columbia
gtttagtcaaacttgaagaagaaaaaaatctttttaaagagctttgaagatccatggcgatgtctcatgtccagcctatgctactcctcctcgtatcactcttcttcttaccggctttgcgtggcgccatagatttcgaatactgcgccaaaaatggaaacgattacggaaccgtcactagcattgtggtctctccatctgttgggcctcacgaaaacccaaccatcactataaatttattcggttctgcaagcaaaaacatccccgcgggaacccttgtgtacgtagcctttagagatggggaatttaccggccttttaaaaacttacaacctttgtgatgtgagtgcatgtaacaatgaagctgagattgaagctggcaccaactttgagttaactttttccgacgttctttatgttggttttgtt

SEQ ID NO: 163667 - DNA, 80 bp, Arabidopsis thaliana columbia
tggagcacggatttgtgtaccgtgagcatggtttctcacccggatactattatggacggggcggggacaatgtggaagct

SEQ ID NO: 163668 - DNA, 220 bp, Arabidopsis thaliana columbia
ctttgtgcttcttctgccatcgctgccatttcttctccaagtttcttgggtggtaagaaactgaggctgaagaagaagttgactgttccagctgtgtccaggccagatgcgtcggtgcgcgccgtcgcagctgatccagatagaccaatctggtttccgggatgcactcctccagagtggctcgaccgaagcctccctggtgactttggatttgatcctg

SEQ ID NO: 163669 - DNA, 446 bp, Arabidopsis thaliana columbia
gcgagtcacgcgccgagttttcctcacttgttctcaataaatctctctctctttcttctctatcgctttcatttttctcctccagatctcgattccaatctctctccctctctacttccttcaacagaaatggaaacgttcctatttacctctgaatccgtcaatgaaggacacccagacaagctttgtgaccagatttctgatgcgatccttgatgcttgcttagagcaagatcctgaaagcaaagtggcgtgtgagacatgcaccaagaccaacatggtgatggtgtttggtgagaacactaccgctgcgaaagttgactttgagaagattgttagatccacttgcagggagattggtcttatctttggtgatgttgggcttgaccctgacaaaagcaattgttttggttttcaattgagccaacagagcccctgacattgctc

SEQ ID NO: 163670 - DNA, 439 bp, Arabidopsis thaliana columbia
aaccaatggggtctccaatggcctctttagtggcaactttgcttgtcttaacaatctctctcacctttgtatctcaatcaaccgctaactatttctattcttctcctccaccaccggttaaacattacactcctccggttaaacactactctcctccaccggtataccactccccaccaccacctaagaagcactacgaatacaaatctccacctccaccggttaagcactactcacctccttcggtttaccattccccacccccaccaaagaaacactacgtgtacaaatttgcttcttcttcggtcaagcactactctaccccaccggtttatcactccccaccaccaccaaagaagcactacgtttacaaaatctccctcttcttcggttaaacactacttttcctccttcggtttaccactctccaccaccaccc

SEQ ID NO: 163671 - DNA, 173 bp, Arabidopsis thaliana columbia
tcaaattacaacccgttggttggctggagccactgtgctcaaatggtggctttcaatatgcaggggtatggaagagcatgggggggaattcacaaaatgtttatagccatattcgtatgttgttaattaataaaaattctcttttctgaaaatggtattttcattttattttt

SEQ ID NO: 163672 - DNA, 424 bp, Arabidopsis thaliana columbia
  unsure (1)..(424): unsure at all n locations
aaatctttgggagtgatggctcagtcataactatgctcaggttcaagactaataagcaaacgtctcctccctttggacttgaagctggcacagtcttcgaactcaaagaggaaggccacaagatcgttggtttccatggaagagccgatgttctgctccacaaaattggagtccatgttcgtcctttatccaactgatgatggagctctttatccttgattccatgcatctaataagttatcaaatctatcttctaaatttctcatatgaggtctcttcatgcctctggtgaatggtgatctttgataagtgttttacgcgttgtctcttgcgatgttgttttttctttgttcttcttgtgctctattttaataaaggaagtttgttccaaantaaaaattaaatattataatattaatttttt

SEQ ID NO: 163673 - DNA, 463 bp, Arabidopsis thaliana columbia
aatctactctctttaaaagaaattcgtaagtactatcaagaagcagaagatggcccaaaaggtggaagcacaaggagggaaaggagccaacctatgggacgatggatcgacacatgacgccgtgaccaagattcagctcgcagcaggcatagacggaattcaatatgttcagtttgattatgtcaagaacggacaacccgaacaagcttcttttcgtggtaccaaaggccgtgttctcccagttgttccgtttgttattaactcttacagacgtcttttttatttcttttatgtattgttttctattattctttaaagtagttttttgattattttatttattttatatttttttattatttacttatttttatttatttttgtaactatttggttttttatttgttattctcattgattatatatgcgtcttttatttattttttattttatatttttttct

SEQ ID NO: 163674 - DNA, 218 bp, Arabidopsis thaliana columbia
cacacatctcctattgcaaacgaacataaaacactacctatgagatcaatatggctggagtgatgaaggtggcatgcttgctcttggcctgcatgattgtggccggtccaatcacatcgaacgctgcgctaagctgtggctcagttaacagcaacttggcagcgtgcattggcttacgtgctccaaggtggtgtcattccccccgtctgtttgtttct

SEQ ID NO: 163675 - DNA, 455 bp, Arabidopsis thaliana columbia
catccgtggccgaggcggaggcctgactctagcaggccgcggtgggcagccatgtccttacgatatcgtgcaggaatcttcagaagttgatgagggcattcccgtaaaattctcaaactggaggcttaaggttgcgttcgttcccgaatcacagaacctcaacatcgaaacagacgtcggagccacgatctgcatccagtcaacctactggcgggtcggtgagtttgaccacgagaggaagcagtacttcgtggttgctggtccaaagccagaagggttcggacaagattcgttgaagagtttcttcaagatcgagaaatctggagaggatgcttacaagtttgtgttctgtcctcggacttgcgactctggcaatccaaaatgcagcgatgtcgggatattcatagatgaacttggcgttcgtcgtttggctttaagccgataagccgttcttg

SEQ ID NO: 163676 - DNA, 450 bp, Arabidopsis thaliana columbia
cttttgaggtcttctgcagctgaatgaaatgaatgttaaaatggttgtaggaaaaccggtgcatgttgctcttgcacataggaaagaacaaaggctcactaagctataccaagtacttgccaccatatcatgaacaacccctacttacacttaagatagttatggttcaagtccttactttattcatctagatgacagatctcttaattctgaattccatgcatccaataagttattaattttatcttttaaattactcatatgaagtacatttatgccttataagaatttttatctattttatagtactaaaagtctttttgcttttcgcattatattctttcatatattatttatgttcatcatgccttatatttttaataaaatcatactgatatctctctcttagataatattattcttaacacatatttctatattatataatta

SEQ ID NO: 163677 - DNA, 455 bp, Arabidopsis thaliana columbia
  unsure (1)..(455): unsure at all n locations
ccggtnnccggaatnntcccgggtcgacgccaaacgcgtccggtganttaaagtagagacgccatggtgaaggaagtacctgctgtaggtgttactcgnntcagatcaagggtgaagccatactccaaagtcatcgctgactggtcgtggtgtgcccagatccaaanaatcagcgatctaccgatgtttggtatgaagaaggaagggtgtgtgatgacttttccatatctgggtccatattggcgtcatgggagaaggagaatgtgtcaagttaaatacttgatgctgtccgtattgtttgcaacaagatcatggttataattgtttgatatgatgctttttaatgtgatgatgtgggtggatacctttcatgttctttatactaacaagatgtttttatgtgtttgatcttgttggcttaaatcctgtttatagtgtacatgttgttatcagct

SEQ ID NO: 163678 - DNA, 460 bp, Arabidopsis thaliana columbia
ataaaacaaaaaatctcttaacaactttttcaccttctccccaccaccaccactcaccgtaggagaaagaaaaaaaacaaccaccatgaaagactgtgaaaaccacggccactctcgccggaaactaataaggcgaatattttggtcaataatcttcgtcctcttcatcatcttcctaacaattctgctcatttgggcaattttccaaccatcaaagccacgcttcatcctccaagacgccaccgtttacgcctttaacgtctccggcaatccaccgaacctcctcaccttcaacttccaaatcactctctcttcccggaaccctaacaacaaaatcggcatttactacgaccggcttgacgtctacgctacttaccggagccaacaaatcactttcccaacatcaattccctccacgtatcaaggacacaaagatgtcgacatcttgtcgccgtttgtt

SEQ ID NO: 163679 - DNA, 219 bp, Arabidopsis thaliana columbia
ctcatctttctctctaagagattttgtaggtgacaatcaaaagtttgacaaaatggtgaagtttacagctgatgagcttcgaaggattatggactacaaacacaacatccgtaatatgtctgttattgctcatgtcgaccacgggaaatccactcttactgattctttggttgctgctgctggtatcatcgcccaagaggttgctgtttatgtttgttt

SEQ ID NO: 163680 - DNA, 228 bp, Arabidopsis thaliana columbia
ctgcttttgaatttcaaaccttcacataaaaaaaatacttttgaatccgtgtttcattcatcgaatctttttccgataactatggctgaggaaatcaagaatgttcctgaacaggaggtgccaaaggtagcaacagaggaatcatcggcagaggttacagatcgtggattgttcgatttcttggtaaagtagaatgactaaacataaccagattagattattttcgct

SEQ ID NO: 163681 - DNA, 283 bp, Arabidopsis thaliana columbia
gtttgatcatcttgtgagaaaaataatggctgcttcagtgatgctatcttcggtgacattgaaaccagctggtttcacggtggagaagacggcggctagaggattaccgtcgctcacaagagctcgtccctccttcaaaattgtcgccagtggcgtcaagaagatcaagaccgacaagcccttcggaattaacggcagcatggacttgagggacggcgtcgacgccttcggcagaaagggcaagggatacggtgtttacaagtacgttgtcaagtatggagct

SEQ ID NO: 163682 - DNA, 450 bp, Arabidopsis thaliana columbia
  unsure (1)..(450): unsure at all n locations
gaccaagcttgttgacccgaagactggtgatgagaaacccattacagtttctgttgatgatggtatccgaccaaccacaactcttgcttctcttgggaagctgaagccagtgtttaagaaggatggcaccactactgctggaaattccagccaagtaagtgatggtgcaggagcggttctcctaatgaagagaagtgttgcaatgcaaaaaggacttcccgttcttggtgtattcaggacatttgctgcagttggtgttgaccctgcaatcatgggtatcggtccagcagttgccattcctgctgcagttaaggcggctggtttagaacttgatgacatcgacttgtttgagatcaatgaggcatttgcatctcagtttgtttattgccgtaacanattgggacttgacccagagaaaatcaatgtcaacggaggtgcaatggccatagg

SEQ ID NO: 163683 - DNA, 443 bp, Arabidopsis thaliana columbia
cattcttcttcaagtgccgggttcatcgggccgtatcatttaaggctagcacgggatactgggtactgtcactactaaagcgaccggtcgtcaccaaaaccacacttgtaagttaccacaaaaacatcagaatgtaacttctttgggtccacactcactcactcatcgtatatttccccagtctcttcctcttctctcaaaggcttaatctttgccaaggttaacaagggtcaggctgcaccagactttacactaaaggatcaaaacggaaagccggtgagccttaaaaagtataaagggaagcctgttgttctctacttctaccctgcagatgaaacccctggctgcaccaagcaggcttgggcttttagagactcttatgagaaatttaagaaagctggtgcagaggtcattggcattagtggtgaagactttgtgtttta

SEQ ID NO: 163684 - DNA, 462 bp, Arabidopsis thaliana columbia
ctctaccaccatcattgttgcttcatcagaatctcgatgtcggcgctttacatctatcatcagctttggtgattccatcgcagacaccggaaatattctccatctctccgacgtcaatcatcttcctcaaaccgccttttttccttatggtgaaagcttcttccatcctccctctggtcgtgcctctgatggccttctcatcatcgacttcatcgctgaattcttgggactaccgtatgttccaccttactttggatcccaaaacgttagctttgaacaagggatcaatttcgcggtgtatggagcaaccgcattggaccgagcgtattttgtggcaaaaggaattgaatctgatttcaccaacgttagtttaggtgttcagcttgacatcttcaagcagattttgcctaacctttgtgcctcatcttctcgtgattgcagagagatgcttggagactcgct

SEQ ID NO: 163685 - DNA, 413 bp, Arabidopsis thaliana columbia
gagagaagaacagagaaaaagagttgaatcaaatatggctgggagagctacgatccctgctcgcaactctgccctcatcgcaatgatcgccgatgaggacactgttgttggattttagatgtgctggatgagaccgcttttttaccttatggtgaaagcttttttcatcctccctctggtcgagcctctgatggcctttttattatcgactttatcgatgtatttttgggactaccgtatgttccaccttactttgtatcccaaaacgttagctttgtacatgggatcaatttctctgttgttggttcaaccgtatttgtccgatcgtattttgagtgatatggatttgaattagtatattccatcgttagtttaggtgtttagtttgtttttttttattgtattttgtctat

SEQ ID NO: 163686 - DNA, 291 bp, Arabidopsis thaliana columbia
gttataacaggattgacattcttgataaccgtttagtgtaatgcacaagaaggcatggaagggaatccgatggctggcactgtaaaaactgtttgtcgggtttttgctctcctcacagtcccgatgacaatgagttttccacaggccatattttgttactggatcacatccaacctgttctctctcatgtatggacttgtgataaagcgtccttaagtgaagaagatgttacgcttaccttgtctgtcttcactcttttccatgttatacaacctttatttttatcttgtt

SEQ ID NO: 163687 - DNA, 442 bp, Arabidopsis thaliana columbia
gaaaaaaaatggctgcttcatcttcctctttcactctctgtaatcacaccacacttcgtactctccctctgagaaagacccttgtcaccaaaacccaattttcagttcccacaaaatcatcagaatctaacttctttggctccacactcactcactcatcgtatatctccccagtctcttcctcttctctcaaaggcttaatctttgccaaggttaacaagggtcaggctgcaccagactttacactaaaggatcaaaacggaaagccggtgagcctcaaaaagtataaagggaagcctgttgttctctacttctaccctgcagatgaaacccctggctgtaccaagcaggcttgtgctttcagagactcttatgagaaattcaagaaagctggtgcagaggtcattggcattagtggagatgactctgcttctcacaaggc

SEQ ID NO: 163688 - DNA, 395 bp, Arabidopsis thaliana columbia
tgaagaagcactttgagcagtttggagagattttggaagccgtagtcatcaccgacaaggcctccggtagatccaagggctacggattcgtgacattcagggaagcggaggcggcgaggagtgcttgtgtggatgctactccggtgatcgacgggagaagagcaaattgcaacctcgcctctctcggtcttcaaagatccaaaccctccactcctaaccatggaggaggaggcaggattaacaatatgagagtgatgatgagcacaatgcagactggttttggaccaccttcactaccacaaccacccaccttcactctctatcctcattttcctttcaatctctttgtgtactcttcattttcggcagactactctttatttcctacgatctta

SEQ ID NO: 163689 - DNA, 333 bp, Arabidopsis thaliana columbia
aaaaaaaaggagagagagagagagagagagagagagagaatacgaagaaaaaaaaagaagcaaaaaacattgtgggtctccggtgattaggatcaaattagggcaccagccttatcggaggaagaagccatgggtagaaaaaaagtcgagatcaagcgaatcgagaacaaaagtagtcgacaagtcactttctccaaacgacgcaatggtctcatcgagaaagctcgacaactttcaattctctgtgaatcttccatcgctgttctcgtcgtctccggctccggaaaactctacaagtctgcctttggtgacaacatgtcatagaacattgat

SEQ ID NO: 163690 - DNA, 396 bp, Arabidopsis thaliana columbia
gttccaatttaccaaaccatagagacttgaattaatgagaatctctcaactctcaaccaaaccgtaagaaatccacagccgagagatatctttataaactctgtcctcactaatggttctttaaccaacttacaagagctctatcttgccgcagtccgtccttttcaaagcatatcaatgtctacattgtgtctatataattataaaacgctcatgaacagttgctacttgttaaaactctcacaggagcgcgttgtgttgctacattgttgcacgagatgaaacgccgtggtaaagactgccgttttggagtagtgtcaatgtgcattgggacggggatgggtgcagcagctgtgtttgagagaggagatggagtttttgagctttttatcgctg

SEQ ID NO: 163691 - DNA, 460 bp, Arabidopsis thaliana columbia
atcgactgccattcgtgttactaggagaagacgtttagatcgcaaaaagcagcaatgtgaacgaaaagttttccagtgctttgtttttggacctaataatgctggaaaatctgcattgctgaattgctttcttggaaggtcatatactgataaccaggaatcaactactgatgagcgttatgcagtaaatatggtcgatgaatcgggtgctaagaaaactcttatcatgagggaaattccagaagatggagttcaagggctattttcatccaaggaatccttagctgcatgtgacatagctgtcttcgtgtatgacagttctgatgagtcgtcatggaagagagcgacccagttgcttgtagaagttgcaaattatggtgaggccactgtgtatgaggtcccttgcctcatggtttcagcaaaagacgatcttgattcatctcctattttcatacaagaa

SEQ ID NO: 163692 - DNA, 249 bp, Arabidopsis thaliana columbia
ctcgctttataaatctctcagtttcttgctcacaccaacatctctctaagcttcttcttctaccaatctaattcctctcttcagcttcttgtgttgtgacgcatactcgtcgcagtcttgagatatggccgccgcagtttccaccgtcggtgccatcaacagagctccgttgagcttgaacgggtcaggatcaggagctgtatcagccctagcttcaaccttcttgggaaagaaagttggtactgtgtc

SEQ ID NO: 163693 - DNA, 313 bp, Arabidopsis thaliana columbia
gcttgatctcccaaaccatctcttcgcttacaacttctctaagatttgacggtgccatcaatgtggacatcaccgagttccagaccaaccttgtaccttaccctcggatccacttcatgctctcctcttatgcacctgtgatttcatctgcaaaggcctaccatgagcagttttcggtccctgagatcacgacttccgtctttgaaccctccaatatgatggctaaatgtgaccctaggcatggcaagtacatggcttgctgtttgatgtatcgtggcgacgttgtgcccacaggatgttattacagctcgtt

SEQ ID NO: 163694 - DNA, 306 bp, Arabidopsis thaliana columbia
agacacactaacattggccagtgacgtcatcccaaactacacctttgggtgcatcaacaaagctagtggaacatcgttgccagcgcaaggactcatgggcttaggtcgtggtccattgtctttaatctcacagtcacaaaatctttatcagtctacattctcgtattgcttgcctaatagtaagtccagcaatttctccggatcactaagattgggacctaagaaccaaccgatccggatcaagaccactccattgttaaagaaccctagaagatcatcgctttactatgttaacttggttgggat

SEQ ID NO: 163695 - DNA, 466 bp, Arabidopsis thaliana columbia
cgtctctcttctctgcttcgccctctcatttcctgtgagataaaggcggagtctctctccagttattttgctcatccatcgattcttagagttcaaaatggttgatcaagttcagcaccccactattgcgcagaaagctgccgggcagttcatgcgttcaagtgtttccaaggacgttcaagtgggttaccagaggccttctatgtatcaaagacatgcaacctacggaaactactccaatgctgcatttcaatttcctccgacatcccggatgttggcaacaactgcttctcccgtgtttgtccaaaccccaggagagaaggggttcactaactttgcccttgactttctgatgggtggtgtttctgctgccgtctccaagactgctgctgctcctattgaacgtgttaagcttttgatccagaaccaggatgagaagattaaagctggcaggctttcttgaccc

SEQ ID NO: 163696 - DNA, 457 bp, Arabidopsis thaliana columbia
cctctctcagtacacttcttttcatacctcaagagactaaaactagtttgaggagatttagaggagtgtttggttctttggataacaatatcccaaactgaaaatggctaagtcatatggagctatcttcctcttgaccctcattgtcctcttcatgcttcaaaccatggttatggcctcaagtggatctaatgtgaagtggagccagaaacgttatggaccaggaagcctgaaacgtacccaatgcccatcggaatgtgataggaggtgtaaaaagacacagtaccacaaggcttgcattacgttctgcaacaaatgctgcaggaagtgtctctgtgtgcctccgggttactatgggaacaaacaagtttgctcctgctacaacaactggaaaactcaagagggtggaccaaaatgcctcttgaaaatactcccttcgctccctttctatatataa

SEQ ID NO: 163697 - DNA, 345 bp, Arabidopsis thaliana columbia
gtgaaagcaactaaggcagagaagaagatcgcctacgataccaagctatgtcagcttatcgatgagtacacccagatcttggtcgttgcggccgataacgtcggatcaactcagcttcagaacatcagaaagggtcttcgtggagactccgtcgtgcttatggggaagaacactatgatgaagcgttccgttaggattcactctgagaacaccggaaacactgcaatcctgaatctgcttcctctccttcagggaaacgttggtttgatctttaccaaaggtgaccttaaggaagttagcgaggaggttgctaagaacaaggtttttttcccttcttcggtggtt

SEQ ID NO: 163698 - DNA, 218 bp, Arabidopsis thaliana columbia
gttcttgttgctgtagaacacaaacagaacaaactataaaaatcaattgaagagtctctcagtcggtaggggaagcaaatagagaaatggctagctttactgcctccgcttccaccgtctccgccgctcgtccggctctccttctcaagcctaccgtcgccatctctgctcctgttcttggtttgcctccaatgggtaagaagaagggaggagtgaga

SEQ ID NO: 163699 - DNA, 304 bp, Arabidopsis thaliana columbia
gatcaaacccttccttctgatagtgtggagaaagtggttggctttgctttcaatcaccatcttatgaactgctcagaacctacagtcaaggacaacaagcttatcatctcggcagaaagcatcacatatggcctgcagctgttgcatgagattcaaaacgaaaacaagagcacaaagaaatctctgaaagatgttgttacagagaatgaattcgagaaaaaactactatcagacgtcattcctccaagtgatatcggtgtttctttcagtgatattggggctttggaaaatgtgaaagatacct

SEQ ID NO: 163700 - DNA, 296 bp, Arabidopsis thaliana columbia
cgaggaggctggtgcttgcgccgtcatggctttggagcgtgttcctgctgatatccgcgctcaaggaggcgtcgctcgtatgagcgatccacaaatgattaaagaaatcaaacaagccgttacgattccggtgatggctaaggctaggattggtcatttcgttgaagctcagatccttgaagcaattggaatcgattacatcgatgagagcgaggttttgactcttgctgatgaagatcatcacatcaacaagcataattttcggatcccgatctgctgcggttgacggtaaaatc

SEQ ID NO: 163701 - DNA, 460 bp, Arabidopsis thaliana columbia
gagaggtggtaaagttgggtttggtcctgacggtggagatctgtcttctttctttgttaaatctattgaagaagttccgtataacatctccattattcagatcagtagagttttaccgtcggagactgcggcggctccgactcctgctccggcggagatgaatcttaccggaataatgtcggctcatggatgcaaagtgtttgctgagactcttctcactaaccctggagcttcaaaaacctatcaggagagtttagaaggaggcatgacagtgttctgtccaggagatgatgcaatgaaaggtttcttgcccaaatacaagaacttgacagctccaaagaaagaagcatttctcgatttcctcgctgtcccgacatattactcaatggcgatgctcaaatccaacaatggtccgatgaacacacttgcgacagatggagctaacaagtttgagcttact

SEQ ID NO: 163702 - DNA, 441 bp, Arabidopsis thaliana columbia
agcccttcggaattaacggcagcatggacttgagggacggcgtcgacgcctccggcagaaagggcaagggatacggtgtttacaagtacgtcgacaagtatggagctaacgtcgatggatacagtcctatttacaacgagaacgagtggtcagcgagtggtgacgtgtacaagggaggagtcaccggattggcaatttgggcggtaactctcgccggaattcttgccggaggtgctcttcttgtgtacaacacaagtgctttggctcagtaaatcttaaagttgttagcgcatgtgtaatcatgtttctataaatgtttctgtgttgttctctttctctttaatgttgtaaaactcaaacatactttgaatttataagacttttagcgtttgttttaaatatatatacttatattattctatttattcatttttttttaat

SEQ ID NO: 163703 - DNA, 472 bp, Arabidopsis thaliana columbia
cccctccagtctaccattccccaccaccaccaaataaacattacgtatacaagtcccctcctcctccggttaagcactactctcctgctccggtttaccactctccaccaccaccaaaggaaaagtacgtgtacaaatcacctcctcctcctccagtacaccactactctccaccacaccatccttacctctacaaatctcctcctcctccataccactattagatatctctatcacggagaacacgatgtacacaagaagacaaagacaagacgaaaccagtactggtgattgtaataagagaaacaaaagatgaaagagagaatccaagcagagaaagctttctcatcattttcaaagtattgtttgcgttttattgtaataaatttgaaacttgtgtgtgttgatcaatcaatggttcatgcatgcaatcaatagtcatatatctatgtttgtaaaattttaattacgt

SEQ ID NO: 163704 - DNA, 388 bp, Arabidopsis thaliana columbia
gttgatttaaagacccaaatctgacgcttctctctctctttctggtatctgcgtttgattcggagaagaaaaaaaaaaaaaaggcaaagagagagcttcaatggagttagcttctttccttggtagagctctgtttgtttccgtatttcttctctccgcatggcaagagttcaatgattttggtgaagatggtggccgatcagctaaatctttgaaaccaaaattcaatgcctttgtaaaccatgtgacaactcacactggccagcaattgccaccagtcgatatgaagattcttgttgctgctgctatagccttgaagggtattgggggactattgtttgcttttgcactccattgttagcttaatctattgctgctgctaaaggct

SEQ ID NO: 163705 - DNA, 429 bp, Arabidopsis thaliana columbia
  unsure (1)..(429): unsure at all n locations
caaggagagaagagagaaagagagaaagagagacagagataatggcgtacagtgcgtgtttcctacaccagagcgcattggcttcatcagccgcacgatcatcatcttcctcctcatcccagcgtcacgtgtcgctctccaaacctgttcagatcatctgtaaagctcaacagtctcatgaagacgataactccgccgtctcccgccgtcttgctctcactctcctcgtcggcgccgctgctgttggttccaaagtatctcctgctgatgccgcctacggtgaagctgcaaacgtgtttgggaagccaaagacgaacacagacttcttgccatacaatggagatgggttcaaagtgcaggttccagcanaatggaacccaagcaaagagattgagtatccaggacaagtcctttggttcgaagacaact

SEQ ID NO: 163706 - DNA, 420 bp, Arabidopsis thaliana columbia
ctccggagctgtcctcagtgggcttggttcttcgttcctcaccggaggcaagagaggtgccaccgcattggcaagcggcgtaggcactggagctcagagagttggcaggaaaactcttattgtcgctgctgcggctgctcagcctaagaaatcttgatccctgccgttaaaggtggtggcaacttccttgccctggatggctcgaaggcttgctaccaagagaatttgggttccgcccaatggggtttggggaaagacccggcttttctgaaatggtacagagaggctgagctgatccatggccgatgggcgatggcagcggttcttgggatcttcgtcggccaggcctggagcggtgtggcatggtttgaagctggagcccatccagacgcgatcgctccctttttgttcgggtcgctt

SEQ ID NO: 163707 - DNA, 305 bp, Arabidopsis thaliana columbia
gaggtgactgatttcataaaccagcatgtctactctacaacacaactcaagatggatttatcaggatcactctctatcatcttaggcttactgattccgattcttcaagagccgtttaggcaggtgttgaagaggataccgggaacaatggactggagagtcgagaagactaatgcaagactgagtggacaacttaatgagattgtgtcaaagcgagccaaggaggctgagactgactcaaaagacttcttgtcattgattttgaaagctcgagagttcgatccttttgccaaaaacatcttcac

SEQ ID NO: 163708 - DNA, 302 bp, Arabidopsis thaliana columbia
ctttctcctttggtggcaaacacaacgacagatttagttgtaacgatggcgtcgaactcgcttatgagctgtggcatagccgccgtgtacccttcgcttctctcttcttccaagtctaaattcgtatccgccggagttccactcccaaacgccgggaatgttggtcgtatcagaatggctgctcactggatgcctggcgagccacgaccagcttaccttgacggttctgctcctggtgactatggacttgacccactttgactctggttaagttccaaactaaccttttacagttactaaaa

SEQ ID NO: 163709 - DNA, 489 bp, Arabidopsis thaliana columbia
  unsure (1)..(489): unsure at all n locations
ccggaanggaagggccggaccacacgcgtccggttttttcctgagtctttgttcttagaccccttgtggtttccaaatcttccgataaaaatgtcgggtaaaggagaaggaccagctatcggtatcgatcttggtaccacttactcttgcgtcggagtatggcaacacgaccgtgttgagatcattgctaatgatcaaggaaacagaaccacgccatcttacgttgctttcaccgactccgagaggttgatcggtgacgcagctaagaatcaggtcgccatgaaccccgttaacaccgttttcgacgctaagaggttgatcggtcgtcgtttctctgacagctctgttcagagtgacatgaaattgtggccattcaagattcaagccggacctgccgataagccaatgatctacgtcgaatacaagggtgaagagaaagagttcgcagctgaggagatttcttccatggttttattaagatgcgtgaga

SEQ ID NO: 163710 - DNA, 300 bp, Arabidopsis thaliana columbia
ctctgtttgtttactgcttcagtgttttaagtcttctctttgtgtttgttgctgttgtgtctgtgatggatttttgagatccgatttaataaaagaagtgtgttcaaagtaaaaaaaaaaaaaaaaaaaaaaaaaaaaaaaaaaaaaaaaaaaaaaaaaaaaaaaaaaaaaaaaaaaaaaggggcggtctttttaaaaaaaccaaaattacttacgctttcatgcaacgtaataactctttaatatggttaaaaaaatttaattaactgctctttttttaaaacattattacgggtaaaa

SEQ ID NO: 163711 - DNA, 160 bp, Arabidopsis thaliana columbia
  unsure (1)..(160): unsure at all n locations
cgtccgtttaattcgctcgtaattcgttttgattttcgtgtttttgcaacgaatttaacaacttctgtgtgtntgggtgtgagtaactgagagagaggccaaaaacaattattgntttttttaaagttaaactaaagcaattataacaatctttataatt

SEQ ID NO: 163712 - DNA, 396 bp, Arabidopsis thaliana columbia
ccgggccgaccgcacgcgataaacacactctggctaaagagaaagaaacaattatgaatgccaccatatccatcactaccatctttctcgtggtcgctttggccgcaccctccctagctcgtcctgacaaccatgtcgaggactctgtaggccgtctacttcgtcctggtcaaacgtaccacatcgtacctgcgaatcccgagacaggaggaggtattttctcgaacagtgaagaaatctgtcctcttgacatcttccagtcaaacaatccgcttgacttgggcctacccatcaaatttaagtccgagttatggtttgttaaggaaatgaatagtatcaccatcgagtttgaggctccgaactggtttttgtgtccttaagaatccaaggggtgga

SEQ ID NO: 163713 - DNA, 330 bp, Arabidopsis thaliana columbia
gaagtatcgaggggttacgttacacaaatgtggtagatgggaagctaggatggggcagtttcggggtaaaaaggcttatgacaaggctgcaatcaacactaatggtagagaagcagtcacgaacttcgagatgagttcataccaaaatgagattaactctgagagcaataactctgagattgacctcaacttgggaatctctttatcgaccggtaatgcgccaaagcaaaatgggaggctctttcacttcccttctaatacttatgaaactcatcgtggagttagcttgaggattaataacaaatacatgggaaagtcggagaatacacc

SEQ ID NO: 163714 - DNA, 415 bp, Arabidopsis thaliana columbia
gaacaaaaaaaaaaaatctctctcaatctctcttatatctgaatccatccatcaccgatctctaggggcggcaccaccagcatcatcctcggcgagggaagagttcgtgtacctcgcaaagctcgcagagcaagcggaacgttacgaagaaatggttgaattcatggaaaaagtcgctgaagccgttgacaaagacgaactcaccgtcgaagaacgtaatctcctctccgtcgcttacaaaaacgtaatcggcgctcgtcgtgcttcctggagaatcatctcttccattgaacaaaaagaagagagtcgtggtaacgatgaccatgtgaccacgatccgtgattacagaagcaagatcgaatctgagttatcgaaaatctgtgacggtattcttaagcttcttgatactagactt

SEQ ID NO: 163715 - DNA, 340 bp, Arabidopsis thaliana columbia
aaaatcggaaagtgcgaaaatgccggtcatggataaattgaggatgttcgtggcgcaggaaccagttgtggctgcttcttgcttaatcggcggtgttggactatttttgcctgcggttgtgaggcctattctagactctctcgaggcttccaaacaagttaaagctcctccacttaccgatgtgattgctggtgtcacagggaagaaacagagttaaaacaagcaatgacttcccctgttttcttacattcagatgatccctattccttttttgtcttttactctctttattcacaatgaataagccagactcatttgtttgttatgaaacctaatataa

SEQ ID NO: 163716 - DNA, 424 bp, Arabidopsis thaliana columbia
gcaaagtaacaaattccataaacacaattagctaaaagaaagaaacaatcatgaaggccaccatatccatcactaccatctttctcgtggtcgctttggccgcaccctccctagctcgtcctgacaaccatgtcgaggactctgtaggccgtctacttcgtcctggtcaaacgtaccacatcgtacctgcgaatcccgagacaggaggaggtattttctcgaacagtgaagaaatctgtcctcttgacatcttccagtcaaacaatccgcttgacttgggcctacccatcaaatttaagtccgagttatggtttgttaaggaaatgaatagtatcaccatcgagtttgaggctccgaactgagttttgtgtcctaaagaatccaaggggtgggagagttgtgtactcttgaagaatcaaaaaga

SEQ ID NO: 163717 - DNA, 464 bp, Arabidopsis thaliana columbia
gagaaaggtcatcacccattctcactcgcagtatatttgttctcatctgattcctccgatctgccatgtctcggcttttctaacgctaagaagtttcacagacgcggcgaaggagagggaggaaggagatagatctctttttccgtcgcgataataataaaaaataaacgtgtctagaggctgttactgaagagttgattcatacggagagaggatagaaatggcagatgggatatcgagcttttggggtcctgtgacttctactatagagtgttgtgagatgaactacgcctactcatcctacattgctgagttctacaacactatatccaatgtccctggaatcctattggctctcattggtcttgtcaatgcattaaggcaacggtttgagaagaggtttagcattcttcacatttcgaatatgatacttgctatcggcagcatgctctaccatgccactt

SEQ ID NO: 163718 - DNA, 391 bp, Arabidopsis thaliana columbia
agagggtaatcgggtaatacagttatttgggcagttatcaactgagagtaacaaccgaacgacgaaagattgtgaggagggtatgcaggagctctcctgtatattggaagttttccgcaaaatgcatcagctggaaattaaaccaaatgttgtaaccttttcagcgattctgaatgcttgcagtcggtgtaactcatttgaagatgcatcaatgctactagaggagctcaggctgtttgataataaggtatatggtgttgttcatggacttctcatgggccagagagagaatgtatggctccaagctcagagcttatttgacaaagtaaatgaaatggatggttcgactgcttctgccttctacaatgccctaactgacatgctttggcac

SEQ ID NO: 163719 - DNA, 231 bp, Arabidopsis thaliana columbia
catttctaccaacataacacaaaacacaaacatagcattcaaaactttgaaaaatggcaccagctcctagtccaatcaattctcaacacgtggcggtgatcggagccggagcagccggtttagtagcagccagagagcttcgtcgtgaaggtcacaccgtcgttgtccttgaccgagagaaacaagtaggtgagctttgggttgactcacctgaaatacgagcggacctgc

SEQ ID NO: 163720 - DNA, 440 bp, Arabidopsis thaliana columbia
ctctctttctctcttatttaaagagagaaatatacaaaacctccaagtacgtttcatcgatcctacctaattcatcaaaaaattgtgtgaggcttatttgatcaataattatgaattctggtcgtcgatcgttaatgtccgccacggcgagtctgagtttgctgttgtgtatcttcaccaccttcgtcgtggtgtcgaacggtgagcttcagagatttatagagccggctaaaagcgacggttccgttagttttatagtcatcggagattggggtcgtcgtggctccttcaatcagtctctcgttgcttatcagatgggaaaaattggagagaagattgacttagatttcgtggtgtctacgggagataacttctacgacaatggattggttagtgaacatgatccaaacttcgaacaatctttctttaacatctacact

SEQ ID NO: 163721 - DNA, 379 bp, Arabidopsis thaliana columbia
gagagcttctaactttatctgtagataaatcctctggttctggattccaatccaaaaacgagtacttgtttggtaaagtctccatgcaaatgaagcttgtccctggaaactccgcaggaacagtcacaacactttacttgaaatcacctggaacaacatgggacgagatagatttcgagtttttagggaattcaagtggagaaccttacacacttcacacatatgtctacacacaaggcataggagacaaagaacaacaattcaaactctggtttgatccaacagctaatttccacacttacactattctctggaacccacaaagaatcattttcaccgtcgatggaactccgatcagagaattcaagaacatggagtc

SEQ ID NO: 163722 - DNA, 278 bp, Arabidopsis thaliana columbia
gaaaaaagaaaacacaaaaacaaagatcataatggtttcctcaaccatggcttagccctcccctgagcttctcggaaaggcggggaagcctgccgcatcatatgacctaggcagcggccgcgtgaccatgacgatgactcaaatgttgtcagccacgcagcaactctcgctatttccagtcgttgcaattcttctgacgccgctttagctctactaaccgataaaacaatggtttatcctagacactaaatattggctcatgatcgagttcatacgcc

SEQ ID NO: 163723 - DNA, 317 bp, Arabidopsis thaliana columbia
  unsure (1)..(317): unsure at all n locations
gcttgagagtggaaacacaggaggacgaatagagagcattctcgtctctcttccgctttcagcaagatgggaatatgaccataaaccggaagaggggaccgaagagtggaagctattggatgcttgcatcaacccgaaggagtggatctagcctgtgtttcccattgttgtgagaagagtgagtttatttccattgtttcatgtaagttttgagcagctttagaggattagataactggagagatggagaaagagagtgtgtnagggtcagtcaaaatctagtcttgtgatgtgcttgattacattaagttctttct

SEQ ID NO: 163724 - DNA, 317 bp, Arabidopsis thaliana columbia
gagacagagaagatgggcatggcaatgaaaaatatctgagatagaagcgaaagataaggaatgtctaaaaggatacattgatgcgcctttaagctattgtatggctaggatttatccgtcgttgtgttatcgaaattgtcgcttttacaagggcgcgaaaggtggaaaatgcgacggtcttaagtagctttgcgacttctgcagcgacaagcctttttagtcaggttctgatgagaaacagttgaatcctggcataggtcatgggatacgttatgcttaacagaaagccttgacccaatcaaatattgcctttcaat

SEQ ID NO: 163725 - DNA, 151 bp, Arabidopsis thaliana columbia
atttactagttctagtttcactttctctctctctgtatactctctaaatgatggcaaaaaactgtaatttagtcagtgttctatgtgtatttttggtattgaccctctttaacaaacccatcaccgtcgccgggcataatattccggcggt

SEQ ID NO: 163726 - DNA, 412 bp, Arabidopsis thaliana columbia
gagcctttgaatgagcttttggagtctgatgataagtttggtttcattgttatggatggaaatggaactttgtttggtactttgagtgggaatacaagagaggttcttcataagttcactgtcgatcttccgaaaaagcacggaagaggaggacaatctgcgttgcgatttgctcgtcttaggatggagaagagacataactatgtgaggaaaaccgcggagcttgccactcagttttacattaatccagctacgagtcagcctaatgtctctggtcttatacttgctggttcagcggattttaagaccgagctaagtcaatcagaactgtttgatcctcgtcttcaagctaagatattgaatgtggttgatgtttcttacggaggagagaatggtttcaaccaagcaattg

SEQ ID NO: 163727 - DNA, 428 bp, Arabidopsis thaliana columbia
ctctcacccactctcctcggaaaccacagcgacggacggacggacggacgataaaacttttgcctctaatttgctcctacaaatctggaatcagccggagcgaatctcgaagcttatgatctcgacttgctgaagaggctgggaatggctggtaaagaggagactgatgtatctgcacaagggtctttaaccagggaggccactgagatatggaggagtgagttggaatctcgccggtttcaggtagatagtttagaagctgaacttgtggatgtcaaggcttaccttgagtttggctcagaagaagatgccagaaaggagttaggagttctttcgggtagggtcagatcgactgcaactatgttgcgttatttgagatcaaaagctagagtcttggccattccctgaggtctagcaaatgtgtcatg

SEQ ID NO: 163728 - DNA, 124 bp, Arabidopsis thaliana columbia
ctcaagttgaaactccggaagttgtgtagatcaagaaagatgaagaagctccggttgaaactccggtggttgtggaggatgagagcaaaacagatgaagttgtttaagcctataaagaggaata

SEQ ID NO: 163729 - DNA, 294 bp, Arabidopsis thaliana columbia
aaagaagaagagaaacaccaagaagtagtaatggcttcctctatgctctcctccgccgctgtggttacatccccggctcaggccaccatggtcgctccattcaccggcttgaagtcatccgctgcattcccggtcacccgcaagaccaacaaggacatcacttccatcgcaagcaacgggggaagagttagctgcatgaaggtgtggccaccaattggaaagaagaagtttgagactctatcttacctccctgaccttagtgacgtttaattggctaaggtagttgtcttcctt

SEQ ID NO: 163730 - DNA, 403 bp, Arabidopsis thaliana columbia
attttgccataatcctttctaggtgtcagggtttgaaaatttgcaccgagaattatgttaatccaaggattattggtttaaaaaaaaaaaaaaaaaaaaaaaaaaaaaaaaaaaaaaaaaaaaaaaaaaaaaaaaaaaaaaaaaaaaaaaaaaaaaaaaaaaaaaaaaaaaaaaaaaaaaaaaaaaaaaaaaaaaaaaaaaaaaaaaaaaaaaaaaaaaaaaaaaaaaaaaaaaggggggggccctttaaaaaaaacaaaatttaaaacccggggaaatgaaagtaaaaattttttttatgggcccccaaaaataaataaaagggccggtttttaaaaaaaggggaaaaggaaaaaaccgggggttccccaaataaatggctttgaaaaaaaacccccttttc

SEQ ID NO: 163731 - DNA, 420 bp, Arabidopsis thaliana columbia
aaagcaaccaccaaaaaaaacagagttgggtttgtttacagatgaagtgagagctagggcagagaaatacacaggagatgagatatgccgtgagaagacaaaggagtttctcaaggaagtttctatgcctaatggtttattgccattgaaggacattgaagaagttggttacgacagagagacaggtattgtctggctgaagcagaagaagagcatcacccacaagtttgaagccattggtaaacttgtctcttacgccaccgaggtcattgcacaggtggaggtcggaaagatcaagaagcttaccggtgttaaggccaaggagcttcttatttgggtcactctcaatgagcttgtcttggagcagccgacaagttcagggaagatcaatttcaggacaccaactggtctgtccaggac

SEQ ID NO: 163732 - DNA, 419 bp, Arabidopsis thaliana columbia
caacgatgcaaagctccgccgtattctccctctctccgtcgcttcctctcctaaaaccacgtcggctctctctccgccaccatcccataaccaccgccgcttcttcaagcgatctaaacgtttctccaaatgttgtctctattccttctttatctcgtcgatcttggcgtctcgcttcgtctgattcgcctctccgtgcttggtccggtgttccttctccgatctctcactccttagacacgaatcgtttcagaaccgccgctactgcagttcctgaaagtgctgaggaaggtgataacagtggtaaattgacgaaggttttggaacttggcttgttgttcgctatgtggtaccttttcaatatctacttcaacatctacaataaacaggttttgaaagctctacatgctccaatgact

SEQ ID NO: 163733 - DNA, 216 bp, Arabidopsis thaliana columbia
tagtagaaaaaaaaagagagaagaaaaatggtgttgacaatctatgctcctttattcgcttcttcaaagagagctgttgtgacattggtggagaagggagtatcattcgaaactgtcaatgtcgatctcatgaaaggagaacagagacagcctgtgtatctcgcgattcagcctttcggtaaaatcccagtcctcgttgacggagactacaaaatc

SEQ ID NO: 163734 - DNA, 452 bp, Arabidopsis thaliana columbia
aaaaaacagagcaagtttattagagatctcatggcgatggcggtctccggagctgtcctcagtgggcttggttcttcgttcctcaccggaggcaagagaggtgccaccgcattggcaagcggcgtaggcactggagctcagagagttggcaggaaaactcttattgtcgctgctgcggctgctcagcctaagaaatcttggatccctgccgttaaaggtggtggcaacttccttgaccctgaatggctcgatggctcgctaccaggagatttcgggttcgacccattgggtttggggaaagacccggcttttctgaaatggtacagagaggctgagctgatccatggccgatgggcgatggcagcggttcttgggatcttcgtcggccaggcctggagcggtgtggcatggtttgaagctggaacccagtcagacgcgatcgcttccttctc

SEQ ID NO: 163735 - DNA, 261 bp, Arabidopsis thaliana columbia
tgaagaagttggcaaagtatcaaatgttgtcctatccgctacgataagataacggctctaagacccagccactacccaccacagggttcaggcttgatgtgggacagtctgttagaattcccacggctctaggctggtcaggtcgtatttgggctaggactggctgcaactttgatgctaacggcgcgggaatatgtatgactggagactgcggcggtaagctgtagtgtgctgtctcgtcgttggttatatcctttccat

SEQ ID NO: 163736 - DNA, 262 bp, Arabidopsis thaliana columbia
gtcgactttcgtcatatccgaatcggtgtctgatagatgagctttgggctgcagcttgtcgccgcgtacgaaccttcaacgaactcaatccttctgcttacaatatccaagatcatagaagatacttggcagagcgtgaattcgaggcgcttaaggagagaacttcagggaagagggaagggtttacgcgggtcgattgcataaatgctacccttgcattggcgcaattatcaagctcttttgaggatttatgctctgcatg

SEQ ID NO: 163737 - DNA, 397 bp, Arabidopsis thaliana columbia
ctcatcaatataaagagaagagagtggtagagttttttattacacacataaacttagatatagtagggttatattcttgattaagtaataaagatgaaaggtggaagcatggagaaaattaagccgatattggcgataatttcactgcaatttgggtatgcaggcatgtacatcatcaccatggtctcgttcaaacatggcatggaccattgggttcttgctacataccgtcatgtcgtagccacggttgtcatggctcccttagctctcatgttcgagaggaaaattaggcccaagatgacactagcaatattctggaggcttcttgctcttggaatattagaacccctcatggaccattaatttgtactacattggattgaaaaacacatcagca

SEQ ID NO: 163738 - DNA, 218 bp, Arabidopsis thaliana columbia
gtccgcgaacccttgggctcacatccccctatctcttttttttttaaaacgtttaagttccccaaaaaagtgtcaaatgacctaaaggaaaagccctagaagccgaagaatctcctactcggttgtcgatcggatcacctaactaattactcgttgataatcattatatcgagaaatatgattaattttgaggccacggagctgtgattagggctacc

SEQ ID NO: 163739 - DNA, 265 bp, Arabidopsis thaliana columbia
ttccgggcttccgtgtttcgcagggctctccttcaatctccagcttgacaatgcctcgctatgatgagggctatgggaacactcgtctggacgttggccgattatcatcgagaactaggacccgagaccttgaacgtctttttagcagatacggaagagtgcgagatgtggatatgaagcgagattatgctttcgtagaatttggtgatccccgtgatgctgatgatgcatagacattacctggtcggtcgagactttgatggaa

SEQ ID NO: 163740 - DNA, 330 bp, Arabidopsis thaliana columbia
gtcgtcacaatgaaaggaggcagcctctcgtttctcttcgttctcctaatcgccaccatcaggtccgtcatttgcttcagtgacgggatgttaccaaacggcgactttgaactaggaccaaaaccatcggacatgaaaggaacgcaagtaataaacaagaaggcgattcctagctgggagctttcaggcttcgtcgaatacataaagtccggtcaaaaacaaggagacatgcttttcgtaatcccggccggaaagttcgctatccggctaggcaacgaggcatcgatcaaacaaagacttaacgttacaaaaggaatggtttactcactg

SEQ ID NO: 163741 - DNA, 454 bp, Arabidopsis thaliana columbia
ctaatttcatagctcctaacaaagcaatatcatttccaatttataaaagttaaagccatggctgcatctttctctgtcccctctatgataatggaagaagaagggagattcgaagcggaggttgcggaagtgcagacttggtggagctcagagaggttcaagctaacaaggcgcccttacactgcccgtgacgtggtggctctacgtggccatctcaagcaaggctatgcttcgaacgagatggctaagaagctgtggagaacgctcaaaagccatcaagccaacggtacggcctctcgcaccttcggagcgttggaccctgttcaggtgaccatgatggctaaacatttggacaccatctatgtctctggttggcagtgctccgtcactcacacatccactaatgagcctggtcctgatcttgctgattatccgtacgacaccggtcctaaca

SEQ ID NO: 163742 - DNA, 257 bp, Arabidopsis thaliana columbia
aaccttacaacgaacatcagagacatacctaactctctctttagctcttcttcctctcttgcttatgtatgcttctttagcgtctgcatggcaagaagcagacctgtccacgcgtccagcttatacaaacccatctgctgtctctccacatgcttacgatttctttcacccaaaatcatcactctctgatcacaatattccaccaaaatcctatgcttctccggtttcactttcatctttaccttcattaacattta

SEQ ID NO: 163743 - DNA, 195 bp, Arabidopsis thaliana columbia
aaaggaagatcatcattgactctgagaggggttgttctgctctcagcgaagccaaagaatccggacaagcaccgctgaatccgtgacggcttctctcactgatgctgagaaaaccgttaaccaaaccgtcaggagcactctaactgacgccgagacaaccgctgcagcatctgttgaaacgggcaagaccgaggc

SEQ ID NO: 163744 - DNA, 238 bp, Arabidopsis thaliana columbia
atcgttcataagctctcactaccaagcaagttcttgcaccaatggcgtcaagcactgcgacgatgctcaaagcctcaccggagaaatctgattgggttaagggacagagtcttctcctccggcaaccttcctctgtctcagctattcgcagccacgtggcaccttccgctctcaccgtacgagccgtttctgcttacgccgattagctctgtaaaaccgctaaatcaatcgctttttt

SEQ ID NO: 163745 - DNA, 334 bp, Arabidopsis thaliana columbia
attctgcaatagcttcatcttctttataaatctcggttccaacatccaccgatgtccaaatcctgcgtcgctggaatcgtaccgggatcctacaacataaacaaatcaaaaaccaaaaccggaatattcaaaagaaacaacagaaaaaccaaccggtttactgatcaatcaatcacctggtagaagaaaagcctactggacaagccaccaacatcaagatcccaagttctcgggtcacccacccaaccatcacccaaccgggtaggttatccatattcaccccaaaccgggtgaggcaaaagctgaagaatcttctgagcttgtgggttactat

SEQ ID NO: 163746 - DNA, 413 bp, Arabidopsis thaliana columbia
atttcctcatgggagaaaggagaaaggagtgagtcatgctggtgtgcaattctaccacgacctgatggactagctcataaaaaatgagtgtaactcctttcgttacttgtttttcactgagtcactccacaagatttagaagttgatttctgcgcttttaaagcgataagtattgttttgtaatttccttatatttcttttttattcctatatttattatttttgttcttttctttttttatttttcttctttttttattttattaacttatttcttttctttttttcatcttttttcctttattgttgttgtttttgttttatctctttttttgttttttttatcttcttttattcttctttttttttttatcttcatcctatttatttttatgctatatatttatttataa

SEQ ID NO: 163747 - DNA, 162 bp, Arabidopsis thaliana columbia
gcgtccgttttaagacagctaaaactaaatacaaagaaacatgattcgggttaggttacagaggaggtgagagctaaggcagatatgtacaccggagatgtgatatgtatagagaagacaaagtgtttccttaagtaaatatatattcccaatagtttatta

SEQ ID NO: 163748 - DNA, 429 bp, Arabidopsis thaliana columbia
  unsure (1)..(429): unsure at all n locations
ggccacagccttccgtattctttttccctcactctaacaccaaaagatttattagctttttccaaagagaaagagagagaaatgggttccaagattgtcgcgagttttcttgatgttgnctctattcgccacttcagcactcgctcaagcccctgctcctactcccaccgccactcctccttccgcaactccccctccagtcgcaactcctcctccagtgtctaccccaccacctgctgcaacccctgccccagccacgccaccacctgctgcaaccccagctcctgccactactccaccgtcagttgctccttctcctgctgatgttcccaccgtctctccaccagcaccgttaggtcccaccgtgagcccaatcatttctctcggacctttaaattgcatcccctgcccctaacatccgtatttttc

SEQ ID NO: 163749 - DNA, 231 bp, Arabidopsis thaliana columbia
atattaataaaaagcattttcttctttcgattgcttcagattcgtcagctcactctttcctgtgcagaagaaaccctagacatctcatcgccaaaatgttcagatctatgctcgtctgatcttctgcctccgcgaagcaggcggttatccgccgtagcttctccttcggctccgtccccgtgcgttaagtcgtcatccttggtgccgccattgggattgttcgttcttttg

SEQ ID NO: 163750 - DNA, 61 bp, Arabidopsis thaliana columbia
  unsure (1)..(61): unsure at all n locations
gcttggttctagcagaagtgctttgatggcgatgttttgtgggttgttngngaagccaacg

SEQ ID NO: 163751 - DNA, 120 bp, Arabidopsis thaliana columbia
taccaatctaattcctctcttcagcttcttgtgttgtgacgcatactcgtcgcagtcttgagatatggccgtcgcagtttcgaccgtctttgccatcaacagagctccgttgagcttgaa

SEQ ID NO: 163752 - DNA, 209 bp, Arabidopsis thaliana columbia
ttccaggtcgaccacgcgtccgcagtacacttcttttcatacctcaagagactaaaactagtttgaggagatttagaggagtgtttggttcttaggataacaaggtcccaaactgaaaatggctaagtcatatggagctatcttcctcttgaccctcattgtcctcttcatgcttcaaaccatggttatggccttaagtgaatctaatg

SEQ ID NO: 163753 - DNA, 424 bp, Arabidopsis thaliana columbia
caagttagtcataaaaaaaaaaaaaccacaaaaaagtttcaatggccgcctcaacaatggctctctcctcccctgctttcgccggaaaggctgtgaacctttcccctgcggcatcagaagtccttggaagcggccgtgtgacaatgaggaagactgttgccaagccaaagggtccatcaggcagcccatggtacggatccgaccgagtcaagtacttgggtccattctctggcgagtcacccagctaccttaccggagagttccctggagactacggatgggacacagctggtctatccgctgaccccgagacattcgcaaggaaccgtgagctagaagttatccacagcaggtgggccatgctcggagccctaggctgcgtttctcctgagcttttggccaggaacgggatctagtttggaga

SEQ ID NO: 163754 - DNA, 279 bp, Arabidopsis thaliana columbia
tccgaaaaagtataaaaattttttattaatatatttttttcggaggcacgcgtaccttgtcaataaaaagaagtagaatgtatttccaaatttatggcaaatgaggttttcggtaacgcatcattaagctagacccatacttcgagttgtttcatgccataaattaactcgaacgctcataattatccgttggacagtcgtatttacatctcttacttccaacatcttttttcggttttttgattatatatctttctttttctgcttttcttttcatat

SEQ ID NO: 163755 - DNA, 205 bp, Arabidopsis thaliana columbia
  unsure (1)..(205): unsure at all n locations
cggaatttccggtcagacacagccttccattaataacctcgtcgccgttatcttcatctcttctccatcctctggcgaccttgtcnactaaagaccattttcaaagacagaaagtgtgttccaatcggaagcaacatcctttcgtagtcagagcctcaaaactttcttaaagagttataatttccaaaagctctacccaaatttt

SEQ ID NO: 163756 - DNA, 315 bp, Arabidopsis thaliana columbia
acgagcaaaagaagaagagaaacaacaagaagttgtaatggcttcctctatgctctcctccgccgctgtggttacatccccggctgaggccaccatggtcgctccattcaccggcttgaagtcatccgctgcattcccggtcacccgcaagaccaacaaggacatcacttccatcgcaagcaacgggggaagagttagctgcatgaaggtgtggccaccaattggaaagaagaagtttgagactctatcttacctccctgaccttagtgacgtcgaattggctaaggaagttgactaccttttccgcaacatgtg

SEQ ID NO: 163757 - DNA, 416 bp, Arabidopsis thaliana columbia
cttaaacgttttactttgtgctgcactactcaacctcaatggccgcctcaacaatggctctctcctcccctgccttcgccggtaaggccgtcaagctttcccccgcggcatctgaagtccttggaagcggccgtgtgacaatgaggaagactgttgccaagccaaagggcccatcaggcagcccatggtacggatctgaccgtgtcaagtacttgggtccattctctggcgaatcaccgagctaccttaccggagagttccccggagactacggatgggacaccgccggactttcagctgaccccgagacattcgcaaggaaccgtgaactagaagttatccacagcaggtgggccatgctcggagccctaagctgcgtcttccctgagcttttggctagaaacggagtcaagttc

SEQ ID NO: 163758 - DNA, 167 bp, Arabidopsis thaliana columbia
aatttcaatcaaaaaaggagctttatgtacgtaccgagggcctcgttttaaaaaaatacgcggctggggctttaccgggactaactataaaaggcctaaggcaggaagcgatcttagaaaccaatcagctccgaaaaaaactcaatatcgattcgtttgaagaaaaa

SEQ ID NO: 163759 - DNA, 222 bp, Arabidopsis thaliana columbia
cttccgaaaaaagagagagaggaaaatgggtgttgccattcttggctcctttattcgcttcttcaaagagagctgttgtgacattggtggagaagggagtttcattcgaaactgtcaatgtcgttctcatgaaaggagaacagagtcagcctgtgtatctcgcgattcatcctttcggtaatattccagtcctcgtcgactgagactacaaaatctttgagt

SEQ ID NO: 163760 - DNA, 341 bp, Arabidopsis thaliana columbia
ggaattgacgccacagtctactatagtccagagatcctgaaagaggctgggatacaagacgagaccaaactgctcgctgcaactgtcgctgttggtgtcacgaaaacagtgttcatactatttgccaccttcctgattgatagtgttggccggaaaccgctgctttatgtgagcacaataggaatgactctgtgtctcttttgtctaagctttacgctcacattcctcggccaaggaacgcttgggataaccttggcgcttctttttgtttgaggaaacgttgcctttttctccataggaatgggtcctgggtgctgtttctttacattatgaaatctttt

SEQ ID NO: 163761 - DNA, 382 bp, Arabidopsis thaliana columbia
aaaaaaaaactcagagagacaaatctaaatggcgatgattacgcgcaacaccgccacgcgcctccctctcctcctccaatctcaacgcgccgtcgccgctgcctcggtctctcacctccacacatcccttcccgctctctctccctccacatcaccgacttcctacaccagacctggtcctccttcgacctcccctcctcctcctggtctctctaaagcggccgaatttgtgatctccaaggtcgatgatctcatgaactgggctcgtaccggatcgatctggcctatgacctttggtctcgcttgctgcgccgtcgaaatgatgcataccggtgctgctcgctacgatctcgatcgattcggtatcatcttcaggcctagt

SEQ ID NO: 163762 - DNA, 372 bp, Arabidopsis thaliana columbia
gaactggagaatcagtgactaatctcagatttgattgcgtctctaagtcatcgaagctttctctcaagacatcatgtggaagatcaagaacgcatcaccggaggcaaaatctcagcatccggtccgtgtttactggaatcgtggaggaaatgggtgaagtcaaggacttgggaatggccgatcacggaggattcgacctcaaaatcggagcgagagtggtgttagaggacgtgaagctcggtgacagtatcgccgtgaacggtacttgtttaacggtgacggagtttaacgcagaggagttcacagtagggttagcaccggagacgctgtgaaaaacatcgttggaggagttaaagataggatctccggtga

SEQ ID NO: 163763 - DNA, 168 bp, Arabidopsis thaliana columbia
agaaaaaaaagctattgtttgaaagaagaagaagttatctatggcaaaggatgtggaagccgttcccggagaaggatttcagacaagagactatcaagatccgccaccagctccgtttattgatggagcggtgctaaagaagtggtctttctacagagcagttatcgc

SEQ ID NO: 163764 - DNA, 304 bp, Arabidopsis thaliana columbia
gtagagatcgccattggtactccacctcagaagttcactgtggtttttgacactgagagctgtagcctctggttgccatcatcaagatgctatttctcacttgcatgtctcttgcatcccaattacaaatcatttctttcaagcacatatgagaagaacggaaaagcttttcttattaaatatatacctttaattatctttcataattttctttagttaaactccctataaaccctgttaattctttcattacacacttatattccttttaatctcaattattattcttttatatctcttttaa

SEQ ID NO: 163765 - DNA, 330 bp, Arabidopsis thaliana columbia
ttagattcggaacggccgaagaaggaagacaaggatgaagatcggagatggcatcgaatgcggcggttccgttctggagagcggcggggatgacatatatatcgtattcaaacatctgtgcgaatatcgtgaggaactgtctcaaggagccacacaaagctgaagctcttactcgcgagaaggttcacttctctctctccaaatgggctgatggaaagccccagaaacctgttttgcggtcagacacacctgaagtttgaagtcaactttgagcttatgttcttaagggattcaaaaagtactgagttaccaagattttgttttcttttt

SEQ ID NO: 163766 - DNA, 255 bp, Arabidopsis thaliana columbia; identical to SEQ ID NO: 131558

SEQ ID NO: 163767 - DNA, 302 bp, Arabidopsis thaliana columbia
cccacgcgtccggaccaacgggcttcacttgtttctctcccaaagtttcttcatcatccgcgcgaccaagaaaacaacaatgggctgtttcgtttcgatccaaagatgagtgaagaaactaaagataaccagaggctgcagcgaccagctcctcgtcttaacgagaggattctctcatccttgtcaagaagatccgtagctgctcatccatggcatgatcttgagattggacctggagctccacagatttttaatgtggttgttgagatcactaaaggaagcaaggtattatactagcttga

SEQ ID NO: 163768 - DNA, 255 bp, Arabidopsis thaliana columbia
taactcttgaaggtagtatcatactgtgcaggcaggtggatcaacctggtatgatcgggactgtcggaagcatccttggagagtctaatgtcaatgttaacttcatgagcgttgggagaattgcaccgaggaagcaagcgattatggcgattggagtagatgacataccaagcaaagagacactgaagaagattggggaaattccagcggttgaggagttcgttttcctcaagctctagtttggtgtgttagttg

SEQ ID NO: 163769 - DNA, 380 bp, Arabidopsis thaliana columbia
atgctgggcagtttccatgtaatcgttacactcattacatgacttcgtccactagcgtagaccttaatctggctaggagggaaatggttatacttggtactcagtatgctggggaaatgaagaagggtcttttcagtgtgatgcattaccttatgcctaagcgtcgtattctctcccttcattctggatgcaatatgggaaaagatggagatgttgctctcttctttggactttcaggtaccgggaagacaacgctgtctactgatcacaacaggtatcttattggagatgatgagcattgttggactgagactggtgtttcgaacattgaaggtgggtgctatgctaagtgtgttgatcttttcgagggagaaggagcc

SEQ ID NO: 163770 - DNA, 422 bp, Arabidopsis thaliana columbia
catctccttactagagatctctgtcttcgataatttgtttcaatcactgagaaaatggcggccgtaggagtagattcgaggcgtcctgagacagcgatggaggaaacctgtaacgtgaaaggagcggcggcgaaacaaggggaagggcttaagcagtactatctccagcacatccatgagctccagcgccagcttcgacagaagactaataacctcaatcgccttgaagctcaaaggaatgaactcaattctcgagtgagaatgctcagagaagagttacagctccttcaagaacctgggtcctatgtgggagaagtggtaaaagttatgggaaagaacaaggtcttggttaaggttcatccaaaggggaagtatgttgttgatattgacaaaagtttagacatttcgaaaattacttcatc

SEQ ID NO: 163771 - DNA, 242 bp, Arabidopsis thaliana columbia
aaaaatgccagcgggtcatggagttcgggcgagtatcttgggatctgttcgcgaggccattcaggaagaagggttacattccactgtcgacttacctgagaaccttcaaggtcggcgattacgtcgatgtgaaggtgaatggtgcgatccacaagggtatgcctcacaagttctaccacggtcgtactggtcgaatctggaacgttactaaacgcgccgttggttttttagttatcttttta

SEQ ID NO: 163772 - DNA, 366 bp, Arabidopsis thaliana columbia
  unsure (1)..(366): unsure at all n locations
ccgtccaaatattaagaaagtgtttttttgacttgcagctatcactcggaaacaacaacaccaacaaagaccagatctgcgagtagatcggcgcgtttccntttcggcnccgtctctcgcgtttacgctccggccaccggtgatttctttgcttgcataaccatcgtcatagactcttttttcgacttcctttaccagtcctgtctctgcaacgattcttatcttatgtctttttttttccttttatcccttactatcttcaaattcattgattttatttctctcaattctcttacttctctttcacttcattccttttattgtcagcgggttagttttttatcttcttttttcattcttttctat

SEQ ID NO: 163773 - DNA, 297 bp, Arabidopsis thaliana columbia
aaaagaagaagagaaacaacaagaagaagtaatgtcttcctctatgttctcctccaccgctgtgggtacctccccggctcaagccaccatggtcgctccattcaccggcttgaagtcatccgcttctttcccggtcacccgcaaggccaacaacgacattacttccatcacaagcaacggaggaagagttagctgcatgaaggtgtggccaccaatcggaaagaagaagtttgagactctatcttacctccctgaccttagtgacgttgaattggcttaggaagttgacttccttct

SEQ ID NO: 163774 - DNA, 255 bp, Arabidopsis thaliana columbia
gaagctcgaaaccgaagggaattttcccgagacattcgcgcttgttctttggggaactgacagcatcaaaacatatggggagtctcttgggcaggttctttggatgataggagtgagaccaattgctgatacttttggaagagtgaaccgtgtcgagcctgtgagcttagaagaactaggaaggccgaggatcgatgtagttgtttactgctcaggggtcttacgtgatttcttttttaatcagattaaccttct

SEQ ID NO: 163775 - DNA, 426 bp, Arabidopsis thaliana columbia
aaaaaaaaaaaaaacacaaaaaagtttcaatggccgcctcaacaatggctctctcctcccctgctttcgccggaaaggctgtgaacctttcccctgcggcatcagaagtccttggaagcggccgtgtgacaatgaggaagactgttgccaagccaaagggtccatcaggcagcccatggtacggatccgaccgagtcaagtacttgggtccattctctggcgagtcacccagctaccttaccggagagttccctggagactacggatgggacacagctggtctatccgctgaccccgagacattcgcaaggaaccgtgagctagaagttatccacagcaggtgggccatgctcggagccctaggctgggtcttccctgagcttttggcccggaaacggagtcaaggttggagaagcagtttggttc

SEQ ID NO: 163776 - DNA, 220 bp, Arabidopsis thaliana columbia
tgctaaatgccaagacggacgatcaggattcgaggcttaccttgtcactcacaatctcggtatctctcacgcagaagcagtggaagcttaccggaaatgcgaaaagtgtaaaggtgggaagatcggaattgcacatagtcctgcttggatcgaagcacatgaccttgctgattcacaagacggagcgttcatagaccgggcactggactttatttcggga

SEQ ID NO: 163777 - DNA, 463 bp, Arabidopsis thaliana columbia
cttgattccaatccattcttcttcaagtgccgggttctcgggtcggatcttctaagtctagctagggataatggctactgtcactactcatgcctcggcctcgattttccgaccttgtacttcaaagccaagattcctcaccggttcttccggtaggttgaaccgcgacttgtcgtttacatcgatcggttcatcggccaaaacgtcgtcgttcaaggttgaagctaagaaaggagaatggttgcccggtttggcatcgcctgattatctcaccggcagtcttgccggtgacaatgggtttgacccgttgggtctagcagaggatccagagaacttgaaatggttcgtccaggcagagctggtcaacggacgatgggctatgctcggtgtcgctgggatgcttttgccggaagttttcaccaagatcggaatcataaatgttcctgagtggtacgatgctggg

SEQ ID NO: 163778 - DNA, 241 bp, Arabidopsis thaliana columbia
cttctctttgtctctgtgactcacattcatccaatccaggcatgtcgacatctgaggataaaccggaaatcatcagtagagtagttcatcaggagggtgacgtggaaatcgtcgatagaagtcagaaggataaggacgaggaaaaagaagaagggaaaggtggattcctcgataaggtgaaagatttcattcatgacattggtgagaaactcgtgggaaccattggctttgggaagccaac

SEQ ID NO: 163779 - DNA, 246 bp, Arabidopsis thaliana columbia
tggaccacagccgtccgatttctaaaaaacactaaaataaaactcaattttattcaaatatctctaatggcgccgaaagcaggggagaagaaaccggcagggaagaaaccagccgggaaagctccggcggagaaactcccaaaggcgggagaagaaattcagcatagacgccggaggaagcgagaagaagaagaagaaatcgaagaagagcgtcgagacttacaagatctacatcttcaaggttct

SEQ ID NO: 163780 - DNA, 366 bp, Arabidopsis thaliana columbia
ccggtaattcctggccggaccgacgcgtccgaccgcaatggccgcctcgacaatggctctctcctctcctgctttgaccggaaaggccgttaagctatccccggcggcctccgaagtatttggaaccggccgaatcaccatgcgcaaagcctccaagcccaccggtccatccggcagcccatggtacggatccgaccgagtcaagtacttgggtccattctccggtgagcctccgagctacctcactggagagttccccggtgattacgggtgggacactgccggtctatccgccgatcccgagaccttcgctaggaaccgtgagctagaagttatccacagcagatgggccatgctcggagccct

SEQ ID NO: 163781 - DNA, 211 bp, Arabidopsis thaliana columbia
ccacgcgtccgccgattctctaatcgaaaccgtttctctctttctgatcagatctcagatctttccctctttaattcttcttccttagatcgattgtctctagaaacaacaatggcgtctgggcgtgaagagttcgtatacatggctaagctcgcggagcaagcggagaggtacgaagagatggtagagtttatggtgaaaggctgcgccg

SEQ ID NO: 163782 - DNA, 336 bp, Arabidopsis thaliana columbia
atcttcgtgcgatgggtgaaaccaatgctcttctcgagagaaacaagattttgaatcgagaaactgctgttgccacggcagccatatatgactccatgtttgccacagaggacggcactatacccgctacttttcaggtgatttacatgacaggatggagagaacattcgtctcacccgcaggccaaacgaagaggttcagccaccgtatccttcacggatctccaaaagcaatttggcggacaatcttgatggaatgattgaagaagagaaacattcaataagcagagacttttccaaatgacacttgagagagaaatcagtgacttaagctata

SEQ ID NO: 163783 - DNA, 357 bp, Arabidopsis thaliana columbia
caagaacgctcctccagagttccagaacacatagctcatgacccgtcttacctacacccttgacgagatcgaaggacccttcgaggttgcttcagacggaagcgtcaatttcaaggaagaagatggaatcgactatgctgcagtcacagtccaacttccaggaggtgaacgtgtgccattccttttcacagtcaaacagcttgacgcctcaggcaaaccagacagcttcaccggaaaattcttggttccatcgtaccgaggctcttccttcttggacccaaagggccgtggtggatccacaggatatgacaacgccgtggcattgccagctggaggcagaagtgacgaggaggtgct

SEQ ID NO: 163784 - DNA, 439 bp, Arabidopsis thaliana columbia
tgatagcaacaaaatcatcaattaatttgcaatataacacacacttactactacatagtagtttgaggaatctgggaagaagctccagtggcaaagactcaacatttaagatgagaggtgggagtctatggcagctagggcaatcaataacccgtcgtcttgctcaatctgacaagaaggttgtgtcacgtcgctactttgcctctgaagctgacctgaaaaagactgctctttacgacttccatgttgcccatggaggaaagatggttccttttgctggttggagtatgccaattcagtacaaagattcgattatggactcaacggttaactgcagggaaaatgggagtttgtttgatgttgcacatatgtgtggtttgagccttaagggtaaagattgtgttccttttcttgagacactttgtggtgctgatgtggc

SEQ ID NO: 163785 - DNA, 442 bp, Arabidopsis thaliana columbia
gcagaagaaaacaacatatactgttcctaatggattgaacagctctatatttacaaagagaccagatattatatttaaggggagggggcctaatgggagtgactgtgacattgttaatgtaaatattcccacaaatgatgctgaaattggtggacactttcgtaggagaaaaagctactggtggaacacgagaagcaaatagtgattcgtgcaagcagtacatgaagagggccaatcgtactatcaactattgaagcgagctgactgtagcacaaggaataaatattctctagatctgtggtcaagatcagctgatgaacatgttaagcttcattgacagactacaggaatttctactggcgtcaactgaaaaccgaaactttaacgcatcaccattgctatgtgtgcatataataagagatgagttcaatattaatgcatg

SEQ ID NO: 163786 - DNA, 363 bp, Arabidopsis thaliana columbia
  unsure (1)..(363): unsure at all n locations
ctgagatcgaagcagagaaggctgcagctgaagcagccaagaaaggccctgcgaaggaaacatgaaccagatcttaaagtagcgggctcagattatgagttgtaatgctggttcaaagtcagggatattcaagggttgaatagaaaatctagaccgcatgaaatggtttgttggattactagcctatttgacactgttgctttaaatcttaaatgacattttagcggagtttcgatacttgtcagttggaactatggcatgttcagtattctagatgactttgcatttgcgctcaagagttgtagattttgattttggaaacgttgtttcttactaaacatgtctctcttcttattacanant

SEQ ID NO: 163787 - DNA, 418 bp, Arabidopsis thaliana columbia
ccgggaaggaacggccggaccgacgcgtgcgaaacgagcaaaagaagaagagaaacaacaagaagtagtaatggcttcctctatgctctcctccgccggtgtggttacatccgcgggggaggccaccatggtcgctccattcaccggcttgaagtcatccgctgcattcccggtcacccgcaagaccaacaaggacatcacttccatcgcaagcaacgggggaagagttagctgcatgaaggtgtggccaccaattggaaagaagaagtttgagactctatcttacctccctgaccttagtgacgtcgaattggctaaagaagttgactaccttctccgcaacaagtggattccttgtgttgaattcgagttagagcacggatttgtgtaccgtgagcacggaaacactcccggatac

SEQ ID NO: 163788 - DNA, 400 bp, Arabidopsis thaliana columbia
gtaagaacgcattcggccggaaagatgggtctttcattgacatggaagccgaacaagaagagggaagtgaaacatctgagagacgagagcagccaaaagccaacaaaacactgaggttttaatgagaaaggacatgagttctgctctacctacgacaccaacgccgatttacagaccagaactggttcaactacctttctcatcatctaagaacaggatgcctcctccacagtctcttcttggaggtggatcttcctcagggatatttaacagtcaatatctaagaaaaccagacattagtttgtctcaatccagaatcgagaagtcattcgagacagtcgcagttgatggagctgaacaaatgcctgagattctcatccattcccctatacctaacata

SEQ ID NO: 163789 - DNA, 440 bp, Arabidopsis thaliana columbia
ttcaaagaattattcattcaggcatcttctcaaatttttgtttgtgaaaaaaacccacatcaaaagatctctcatttattcgtttcggttctgctgttttgagtgtcgggttcgttttagctgtaatctttttttccggcgttcgatttgaaaaaatccggggaacaggtgatcggaatcacggctatacacgggatatcacggggtgttagctcacatgtccatattgtccgacagaagggttgtttaatcgaaactaatcctttgccgcacggaggacgtggagctctgccgtctgaaggcggcagcccttccgatctcctctttctcgccggtggcggttccagctttaacttcttttcctttaggttttaggagttagggtttgttagtgttttttccttcttctttttttggtgctcttgaatcgcttttttctt

SEQ ID NO: 163790 - DNA, 382 bp, Arabidopsis thaliana columbia
aaaaaaaaatcaaatctctctctttctctctctaatggcggcgacattaggcagagaccagtatgtgtacatggcgaagctcgccgagcaggcggagcgttacgaagagatggttcaattcatggaacagctcgttacaggcgctactccagcggaagagctcaccgttgaagagaggaatctcctctctgttgcttacaaaaacgtgatcggatctctacgcgccgcctggaggatcgtgtcttcgattgagcagaaggaagagagtaggaagaacgacgagcacgtgtcgcttgtcaaggattacagatctaaaagtgagtctgagctttcttctgtttgctctggaatccttaaagctcttgactcgcatctgatccca

SEQ ID NO: 163791 - DNA, 344 bp, Arabidopsis thaliana columbia
gtatggtcattgttggataacttcgagtggcaagatggttacaaaaacagatttggactctactacgttgatttcaaaaataacgggcacgttacgagaaagaatccggcaagtattacaaggatttcctcagtcaaggtgttcgtccatccgcgctcaagaaggatgagctttaagctatttctgtttcaatgtgtttttcctatgttttactttgtgagtgaccaagattcatgaggtcttggttctaataaaaagagtttatttttcttctcatttttcattgtctacatgatttgccagatctacaaggctctggttataataaaatgatcctttgtgcc

SEQ ID NO: 163792 - DNA, 341 bp, Arabidopsis thaliana columbia
aattgagactggcttgcttagccgcggagaactcagaactcattcgctgcaaacatggcaagaggtttgaagaagcattgcgggaggctcaatgctcctaagcattggatgcttgataaacttggtggtgcctttgcccccaagccgtcttctgggccacacaagtctagggagtgtttacccttggtccttatcatcaggaacaggttgaagtatgctctgacatacagagaagtgatttcgatcttgatgcaaaggcatattcacgttgatgggaaagtgaagactgacaagacttacccctgctggttcatgcgatgttgtgctatcccccaaaacaa

SEQ ID NO: 163793 - DNA, 292 bp, Arabidopsis thaliana columbia
gataattctggaagaggaagcaatggtgttgtctcggcgatttgctcaagggtcgagtgacgaagaagacggggtggcgattactaggtctaagggaagaaactcggcgagtcctgaggaatctttggggaaacggaggaagcgtaagacggtgaagctatacgaagattttgaagagaaggaagcggattggaagaagaacagaatggggaatacggaggatgttgttgtgggggaagcttacgtagggatatttaacagtcaatatctaagaaaaccagacatttagttt

SEQ ID NO: 163794 - DNA, 452 bp, Arabidopsis thaliana columbia
cttgtgagaaaaataatggctgcttcagtgatgctatcttcggtgacattgaaaccagctggtttcacggtggagaagacggcggctagaggattaccgtcgctcacaagagctcgtccctccttcaaaattgtcgccagtggcgtcaagaagatcaagaccgacaagcccttcggaattaacggcagcatggacttgagggacggcgtcgacgcctccggcagaaagggcaagggatacggtgtttacaagtacgtcgacaagtatggagctaacgtcgatggatacagtcctatttacaacgagaacgagtggtcagcgagtggtgacgtgtacaagggaggagtcaccggattggcaatttgggcggtaactctcgccggaattcttgccggaggtgctcttcttgtgtacaacacaagtgctttggctcagtaaatcttaaaagtgta

SEQ ID NO: 163795 - DNA, 385 bp, Arabidopsis thaliana columbia
caagaacggacaacccgaacaagctcctcttcgtggtaccaaaggccgtgttctcccagctgatccgtttgtgattaaccatccagacgaacatctagtttctgtagaaggttggtatagccctgaaggtatcattcaaggaattaagttcatctccaacaagaagacttctgatgtcattggatccgatgagggtactcacttcactctacaagttaaagacaagaagatcattggctttcatgggtctgccgggggcaatcttaattctcttggggcttactttgctccgttgactactacaactccgttgactcctgccaagcagctaacggcatttggtagtgatgacggaactgtatgggatgatggtgcttacgttggg

SEQ ID NO: 163796 - DNA, 126 bp, Arabidopsis thaliana columbia
  unsure (1)..(126): unsure at all n locations
aactaaacatgatttatttatttattttataactgtataatccaaccaaactaaactnatccccgcctattttatacccccccgcccccccataataaatatttaatacatctatatatcaaaaac

SEQ ID NO: 163797 - DNA, 393 bp, Arabidopsis thaliana columbia
gagtcttgaaggtcaacaacgtcgagaataatggcatcatctctttgtgcttcttctgccatcgctggcatttcttctccaaggggcgggggtggtaagaaactgaggctgaagaagaagttgactgttccagctgtgtccaggccagatgcgtcggtgcgcgccgtcgcagctgatccagatagaccaatctggttcccgggaagcactcctccagagtggctagacggtagcctccctggtgacttcggatttgatcctcttggtctttcatcggacccggacagtctaaaatggaacgtacaagccgagatagtccactgccgatgggctatgctaggagccgccgggatattcatcccagagttcctaacgaagatcggaaatcctcaa

SEQ ID NO: 163798 - DNA, 409 bp, Arabidopsis thaliana columbia
ggatcattcaagaaacacacatattcaaacttcttcatagaaaagaaaatagcaaaaactagaatgaagaagacaatggaggatgcgggcgggatcatgagaaggtcaattcacactttcctccaaaactaccaccgtgtcaccaccgcagccgccgtggccctccctttctccgccggtctcctcctctctcagcctttcttctcttcttcctcttccacccttcacatgaggcttaacatgctcttccgcggagcgggtttctcttcttctcatgacttcttcaacatcttaagccttaaactctcacaaaccctatcttcctctttattcactcttcctttctccctcacattcctccttttattcaaagcttacgtcatcaaacttctatcaaacaatcactctg

SEQ ID NO: 163799 - DNA, 404 bp, Arabidopsis thaliana columbia
  unsure (1)..(404): unsure at all n locations
accagttgcgtctgcctcacagaagaagagttcctttgttgttaaagctgctgcaactccacctgtgcaagcaaggagccaacaggggagttgtggtttgcttcatcgcagagtctctcttacttggatggcagcttacctggtgactatggattcgaccctcttggtctttcagacccagaaggtactggaggattcattgagccaagatggctagcatacggagagatcatcaacggacggttcgccatgttgggtgcagctggagctattgctcctgagattttaggaaaggctggtctgattccagcagagactgctctttcttggttccaaaccggtgtgattccaccagcagggacatacacttactgngcagacaattacacactctntgttctcga

SEQ ID NO: 163800 - DNA, 454 bp, Arabidopsis thaliana columbia
ataaaaaacaagtggaagctttaaaacgagagggagagagcaaaaatggcgacgtcgggaacgtacgtgacggaagttccgctaggaggatcggccgagaaatactacaagaggtggaagaacgagaaccatgtcttccctgatgctatcggccaccacatccaaaatgttaccgttcacgaaggcgaacatgactctcacgggtctatcaggagttggaactacacatgggatggaaaggaggaggtgttcaaggagagaagagagatagacgatgagaccaaaacgttgacgttaagaggacttgagggtcacgtgatggagcatctcaaagtgtacgacgtcgtctaccaattcattcccaaatctgaggatacctgcatcggcaaaatcactttaatatgggagacgcccaacgatgattccccatatccaagccggtcattgaaattcg

SEQ ID NO: 163801 - DNA, 454 bp, Arabidopsis thaliana columbia
ctttggttgtgcgatctcctttctctttcaatctccaaggattttactgtgagatatttggcgggaaaatgtcggggaaaggtgctgggggtttgattatggggaaacccagcggtagcgacaaggataaggacaagaagaagcctatcactcgttcttctcgagctggtctccagttcccagttggtagggtgcatcgtctgttaaagacaaggtccactgctcatggaagggttggagcaactgcagctgtttacacagcagcaatattggagtatctgactgcagaagttttggagttggctggtaacgccagcaaggacttgaaggtgaaacgtatctcgccgaggcatttgcagcttgcgattcgtggagatgaggagctcgatactctcatcaaaggaactatagctggtggtggaggcatcccttatattcacaagagtctcatcaa

SEQ ID NO: 163802 - DNA, 194 bp, Arabidopsis thaliana columbia
accggggcggcccacgcgtccgcgtaaatctcttctccgttcactcaatcaaccaattatgcgtgagattcttcacatccagggtggctcaatgtggtaacgcacatcgcagccaaattatagtaagtgttttgcgccaagcacgtcatccatccaaccgcaaggtacaccggagactgagatctgcaacttgt

SEQ ID NO: 163803 - DNA, 389 bp, Arabidopsis thaliana columbia
  unsure (1)..(389): unsure at all n locations
tcaaattacaacccgttggttggctggagccactgtgctcaaatggtggctttcaatatgcaggggtatggaagatcattggggcgtaatgcanggaatgtttagagccaatggcggatgtggctacatcaagaaacctgaccttctgctgaaaagtggttcggatagtgacatatttgacccaaaagctactctacctgtgaaaacaacacttagggtaactgtatacatgggagaaggctggtactttgatttccgccacacacactttgaccaatattcaccgcctgacttctatacaagggttgggatagcttggagtccaggggatacagtaatgaagaagacgaaaacactggaggataattggataccagcttgagatgagg

SEQ ID NO: 163804 - DNA, 352 bp, Arabidopsis thaliana columbia
gagagagagagagactccattgttgaagtgtgttcactgaactcctcctcaaacaacaatggcgacgacggttacactcaggggcgtcaccggacttcgtcaatcatcaacggagcaaacaaacttcgtctctcatgtaccgtcatcactttctctccctcaacgacggacctctctccgagtaaccgcagccagagccactcccaaactctccaaccgtaaactccgtgtcgccgtcatcggtggtggaccagcaggcggggcagctgcagagactctagcacaaggaggaatcgagacgattctcatcgagcgtaagatggacaattgcaagccttgcggtggcgcgatt

SEQ ID NO: 163805 - DNA, 357 bp, Arabidopsis thaliana columbia
tgaagaaggaaaaggtctcgcctttactgagtaaaaaacaaaccgctccaaagtcattgcatatctgtatgaatctggatccacgctgcttccgatcctactgctcttccaagcactagaaaatcattgatcatggagcgaatgggagataaagacattgtcaaacgtgcattcaaatcatttcaaaagagtttcgacttcaagtcttctgtcgacgggctaaacacagcagtaaagcagaatcctgcaaagccaacaattattccgtcagtagctactcgtcagaaggaaaatggcaggcctacaaaagcaagtagcatggagaagagaagtggtactaccgcctatcgttctcca

SEQ ID NO: 163806 - DNA, 431 bp, Arabidopsis thaliana columbia
atggcgtcgtgtattgctactgctcctctttctctatctggcgtgtctcaatctcattatgtgaaagctaatggattgtctacaacaacaaaactcagttctatttgtaaaacctctgatttgactattcacaagaaatcaaaccggactcgcaagttttctgtttctgcagggtatcgagatggaagtagaagcggaagcagtggtgatttcattgctggttttcttctaggaggtgctgtctttggcgctgttgcttatatctttgctccacagatccgaagatcggttctaaatgaagaagacgagtacggttttgagaagccgaaacagccaacgtactacgatgaaggtttagagaaaacaagagagacactgaatgagaaaattggacaacttaattcagcgatagacaatgtcttttctcgtta

SEQ ID NO: 163807 - DNA, 337 bp, Arabidopsis thaliana columbia
aaaatcagaagctgctcgtcaatggggttcacatttgcacacgttttgcatcggtttgcagggatcgccagatcttaaagctgggagagaagttgctgactatcttggaacacgccaccacgagtttcagtttacagttcaggacgggatagacgcgatagaggaagtcatttaccatattgagacttatgacgttactacaataagagctagcaccccaatgtttcttatgtccagaaaaattaaatctttaggtgtaaagatggttctttctggggaaggttctgatgaaatactggggggatacttgtacttccataaggctcccaacaagaaa

SEQ ID NO: 163808 - DNA, 259 bp, Arabidopsis thaliana columbia
agaggatgatgcttacactatcaactaatgattagaggtactcgacacaactttagataagcggataggcaaagagaccatgtgacggtttcattactacattgctgtgaagcgcacacacattatgtattctctgcttattgaccgaactaccttttcggtggtctgaggctacatgaagtcggcagaggtagaactggaaagttgggttttgtagtttccacccaaaaaaatggacggacttttaggggttggaatt

SEQ ID NO: 163809 - DNA, 317 bp, Arabidopsis thaliana columbia
caaagcctataaaatcggaaagatgtatgcatcgatgatgattctgcctcacttagaagaatcaaaaagctaaaaggagctgcgaaggctgggcaacgatgacttagtatgtatagaagaaaaaaaaagcttttacttggtatcaaacagagcatgtgttgttgtatttgctacctttttctgcaaagttattggcaattgtattgttgttccacttgtatatatacagagaccatttatgttaatatacaacttggtatggggtaacacaacataaaatttgtggcgtggtggaagatgttagaatatcaagatct

SEQ ID NO: 163810 - DNA, 448 bp, Arabidopsis thaliana columbia
gttcttgaagaatggtgatgctggtatggtgaagatgactccaaccaagcccatggttgtggagaccttctctgagtacccaccacttggacgtttcgctgtgagggacatgaggcagactgttgcagtcggtgttatcaagagtgttgacaagaaggacccaaccggagccaaggttaccaaggctgccgtcaagaagggtgcgaagtgaaccatcctcaaaactctatctgccgcaggtgaatcaaaggacagtgttagttttattacaatagtttggtatttggtcgcgtgtctgtgttcttgtttcgttttctccccgtcagagcgttgttctcgtaattgggttcttgatcggaggtggcggatctacacacacattcttcctgtttttggtttttatttgttttctcattttgaactggtttaaaatttctgttatatgaat

SEQ ID NO: 163811 - DNA, 277 bp, Arabidopsis thaliana columbia
gaacacagttggtatatccgttgaccccgagacattcgcaaggaaccgtgagctaaaagttatcgacagaaggtgggccatgctgggagccctaggctgcgtcttccctgagcttttggccaggaacggagtcaagtttggagaggcagtttggttcaaggctggttcacagatcttcagcgatggagggctcgattacttgggaaaccctagcttggttcacgctcagagcattttggccttttgggccacacaagttattttgatgggagccgtt

SEQ ID NO: 163812 - DNA, 359 bp, Arabidopsis thaliana columbia
ttttgatcaaaccagagagccgtcagggagagcaaaacaaagatcggagaagatgaacacgattcttttttccgaaacgagggacagtgccccacagtgataccatcaaggttcacgctaaagtgatcgaagtcgaaggacctcgcggaaagcttgttcgcgattacaagcatctcaacctcgatttccagctgatcaaggatccagagactggaaagaagacgcttaagatcgattcgtggtttggaacacgcaaaaccagcgcctacatcagaaccgctcttagccacgtagataactagatctccggtgataccagaggtttccgttacaagatgaggttcgtgtacgcacatttt

SEQ ID NO: 163813 - DNA, 387 bp, Arabidopsis thaliana columbia
gagtcaatgttgcaagacctcttccccacaagtgacctaatgccaggagctagccggcttcttagacatctccatgggaaaggaaggccaatatgtatagccacaggtacacatacacgacattttgatcttaaaacacaaagacaccgtgagcttttttcgcttatgcatcacgtagtacggggggatgacccagaggtgaaggaagggaagcccgcgccagacggctttcttgctgcatccaggagatttgaggacggtcctgtagatccacgcaaggttctcgtgtatgaagatgcgccttctggagtccaggcagctaaaaacgccggaatgaatgtaataatggtaccggattcaaaggtagataagtcctactgaaatgtt

SEQ ID NO: 163814 - DNA, 444 bp, Arabidopsis thaliana columbia
ctcattagagaacagagaaaaaaaaaacaatggcaactcaagccgccgggatcttcaactccgccataacaaccgccgcaacctccggcgtcaagaaactccactttttctcaacaacccaccgtcccaaatccctctccttcaccaaaaccgcaatccgcgccgagaaaacagattcctccgccgccgctgctgcagcccccgccacgaaagaagctcccgtgggattcacgccaccgcagctagacccaaacacaccgtctccgatcttcgctggaagcaccggtggtcttctacgtaaagcgcacgtggaagagttctacgttatcacgtggaactcaccgaaagaacagatctttgagatgccgacaggaggagcagcgatcatgagagacggtccgaatcttctgaagctagcgaggaaaagagcagtgttagctttgg

SEQ ID NO: 163815 - DNA, 444 bp, Arabidopsis thaliana columbia
gggatccgttacctgctgatcttatcaatcttttatcatcatgcgactgccagttgctgaaattgttttcaactaaaatgcgtggcaaatcgcaaaagccacttatgttatcggactccacgaaccaaactgttggaacaaagttcaagggtcaacttttcaaattgatgaacaagttagagaacacaagtcctcacttcattcgatgcataaagccgaattcaaagcagcttcccagagtttatgaagaggatcttgtcttacaacagcttagatgttgtggcgtgttggaagttgttagaatatcaagatctggatatcctactcgtttgacacatcaagagtttgcaggaagatatggtttcttattgtcagacaaaaaggtcgctcaggatcctctgagcgtatcaattgctgttctgaaacaatatgacgttcatcctg

SEQ ID NO: 163816 - DNA, 452 bp, Arabidopsis thaliana columbia
ctctctctcctccgtcgtctctgcagaatcactctctcgccggagtttttcacctgcagagctctcgattttttctctcgagcatcatcattttcgtcggatcaatcaccaagagatggcgtcgagaaactccgtcaccggattcgcgttgttcagttttgtattcgccgtcatcttatctctcgccggcgctcaatccctggctccagctcctgctcccaccagcgatggaacatcgatagatcaagggatagcgtatttgctaatggtggtggcgttagtgctgacttacctaattcatcctcttgatgcttcttcttcctactccttcttctaatctctctctctctttcttctggttttttttatttctttgcaacttcttattagtttcttcaatttgccttttttcttcttcttgtggataaaattttcaagagttaatttcatca

SEQ ID NO: 163817 - DNA, 459 bp, Arabidopsis thaliana columbia
gaacaaagcagagctctaccaaattcagccatacctacctctgagcacaatcagactacggaagctaatcaagccgtcaaagaaacaggagttttacacactagatctcgtggagttggtttggaggagacatttatctccacacaaggagtcaagccatctgaagatacgaataccgctcctcaaagtggaactgctgtagatgacttcaatgatcaagatggcgattttatccaacctacttctactatcggaaacaccacaaatgctgtcttggctcttggggcaactttggatcctactgggaactcttgcatccctaaagatgtgtttgaaacatcaaaagaagctgatgaaataggcgcatcacgtcatacttctaacggtttcccatcttcatcacctagttcaccagcggttatggaaggtcaaccaaaacccacaccaccagaagaaacc

SEQ ID NO: 163818 - DNA, 328 bp, Arabidopsis thaliana columbia
gtaaagaagaacaatggcttcctctatgctctctttcgctactatggttgcctctccggctcaggccactatggtcgctccttgcgacggacttaagtcctccgctgccttcccagccacccgcaaggctaacaacgacattacttccatcacaagcaacggcggaagagttaactgcatgcaggtgtggcctccgattggaaagaagaagtttgagactctctcttaccttcctgaccttaccgattccgaattggctaaggaagttgactaccttatccgcaacaagtggattccttgtgttgaaattcagttggagcacggattt

SEQ ID NO: 163819 - DNA, 398 bp, Arabidopsis thaliana columbia
agtaacggctgcagctggtcccactcgttccatgaacagttggggagatgtggaacacctatttgaaggatatgatgacattcagagagtagctattcaaagagagagagttcgtaggttagaggaacagaataaaatgtttgcatctcaaaagctctctcttgtcttggatatagaccacacccttctcaattcagctaagtttaatgaggttgaatcccgccacgaggagatattaagaaagaaggaagaacaagatcgtgagaaaccatatagacatctctttcgtttcctgcacatgggaatgtggactaaactaagaccagcgatttggaaatttttggagaaggcttgctagctgtacgagttcatctttacactatgggaaacaaattgtt

SEQ ID NO: 163820 - DNA, 375 bp, Arabidopsis thaliana columbia
caaagttaaaccttttttaatttttatcctcgttttttcaattcgcgtgaagagacagagagagagaaagataaagctagaagagaatcgacattacgaatcttttgttccagatcgtgagagaggaggagttggaagaatgaagatgactattgggtctttgttccaaccctaattttgcagattaatttcgtttttgttgatttctgttttgggtttgcgttgctgattccggtggattaaagggttctttttggagagcacaaatttgttgggtttttttttggggaaagagaattaaaattttctcctttagagtcggcgtttgggttgagagagattattatagtttttagggtttgggatttctgaatt

SEQ ID NO: 163821 - DNA, 451 bp, Arabidopsis thaliana columbia
gaaattagaagacagatcaggaacagctagaagactcttcagggcacagagaaaacacccaccacatcaccgtcttcttcaacagaaggtaccaccagagatcgcagatatttcttcattctatctctctcttttagatccgattcgatgccgtcccgtagacgtaccctcctcaaggtcatcatcctcggtgatagcggggtgggaaaaacctctttgatgaatcagtatgttaataaaaagttcagcaaccagtacaaggcaaccattggagccgacttcttgaccaaggaagtacagtttgaagatcgacttttcactttacagatctgggatacagctggacaggaaaggtttcagagccttggtgtagccttttaccgtggtgctgattgctgtgttcttgtatatgatgtcaattccatgaaatcatttgaaaatctgaacaact

SEQ ID NO: 163822 - DNA, 340 bp, Arabidopsis thaliana columbia
  unsure (1)..(340): unsure at all n locations
cttgctcctccatttaccagatctgaacctctttcttttcctcgaaaatccttctaacatcatgcaggcatggcttcctctgagtgcnagtggaatccttttgggaatgggaaacccactcctcgacgtctctgccgtcgtcgaccaacagtttctcgacaaatacgacatcaaattgaacaatgcgattctcgcagaggacaaacatttgcccatgtacgatgaaatgagccagaagtacaatgttgaatacattgctggaggtgctacccagaactcaatcaaagtggcccagtggatgcttcaagttcctggggcaaccagttacatggaatccatt

SEQ ID NO: 163823 - DNA, 349 bp, Arabidopsis thaliana columbia
  unsure (1)..(349): unsure at all n locations
aaaaacaaaatggcttcgatgggtggattacactgtgcatctccggcggttcttgaaggaagcgtaaagatcaatggctccggccggctgaatggctctggaagagtggcggtggctcaaaggtctagacttgtcgtcagagctcagcagagtgaggagacttctcgccggtccgtgattgggcttgttgctgctggtttagctggtggctcgtttgttcaggctgtcctcgccgatgctatttcgatcaaagttggcccttcttcagctcctttcggtgggccttcctgggacagataacttanaccaagccagagactttgcattggcattgaaagacagggtttac

SEQ ID NO: 163824 - DNA, 404 bp, Arabidopsis thaliana columbia
  unsure (1)..(404): unsure at all n locations
gtctacaactctccaccaccaccatactactttttttctcctaaggtttactacaagtccccacctccaccatacgtctacgggtgcccacctccaccatactactctccttctcctaaggtttactacaagtctccacctccaccatacgtctacagctccccaccaccaccgtactactcgccttctccaaaggtttactacaagtctccaccaccatcatacgtctacagctccccaccaccaccgtactactcgccttctccaaaggtttactacaagtctccaccaccatcatacgtctacagctctncaccaccaccatactactctccttttcctaaggttactacaagtccccaccttcaccatacgtctacagntccccacctcctccatactac

SEQ ID NO: 163825 - DNA, 236 bp, Arabidopsis thaliana columbia
gctactttggatggaccaagtccacctgttggtgcattgagcagtgctcttagtcggttacggtttaacccggttttaagagggttgaaagaagtcgaaaagggtatgacaaagcaaataggcggaccaatgcatcagttggcggttaaggtagatgagtatcttcgaggaatgataagcggaactggatcgtcactgtttgaagaactcggtttttactatattggcccagttga

SEQ ID NO: 163826 - DNA, 437 bp, Arabidopsis thaliana columbia
aaattcacaacaaatctgtttaaaaacaaccaatcaaaacccaacattgcttctcaacaaaaaagcaaagcaaaagattttgcgagagaaaaaaaagaaaatggatttgttcaagatccttcttcttgtgttcttcgtgaacataagtttctgcttcgctgcagatccatattctttctataacttcgaagtctcttacattactgcttctcctcttggtgtccctcaacaggtcattgctataaatggaaagtttcctggtcctacaatcaatgttacaaccaatgaaaatctggttgttaatgtcagaaacaagttagacgagggacttcttcttcattggaatggaatccaacagagacgtgtgtcatggcaagatggagttttaggaaccaattgtccaatcccaccaaagtggaattggacttatgagtttc

SEQ ID NO: 163827 - DNA, 431 bp, Arabidopsis thaliana columbia
cccacgcgtccggaaaaaaaagctattgtttgaaagaagaagaagttaactatggcaaaggatgtggaagccgttcccggagagggatttcagacaagagactatcaagatccgccaccagctccgtttattgatggagcggagctaaagaagtggtctttctacagagcagttatcgcagagttcgtagccactctcctcttcttatacatcaccgttttgacagtcatcggttacaagattcagtccgatactgatgccggtggcgtagattgcggcggagttggaatcctcggtatcgcttgggcctttggtggtatgatcttcatcctcgtctactgcaccgccggtatctctggtggtcacattaacccagcggtgacatttgggctattcttggcacgtaaagtgtcgttacctaaggccctatt

SEQ ID NO: 163828 - DNA, 408 bp, Arabidopsis thaliana columbia
gctctctcctcccctgccttcgccggtaaggtcgtcaagctttcccccgcggcatctgaagggcttggaagcggccgtgtgacggtgaggaagactgttgccaagccaaagggcccatcaggcagcccatggtacggatctgaccgtgtcaagtacttgggtccattctctggcgaatcaccgagctaccttaccggagagttccccggagactacggatgggacaccgccggactttcagctgaccccgagacattcgcaaggaaccgtgaactagaagttatccacagcaggtgggccatgctcggagccctaggctgcgtcttccctgagcttttggctagaaacggagtcaagttcggagaggcggtttggttcaaggccggttcacaagattttagcgatgga

SEQ ID NO: 163829 - DNA, 423 bp, Arabidopsis thaliana columbia
aaaaaaaaaactcaagagagactttgtggccatggcagcctctctccaatccaccgctacattcctccagtcggcgaagatcgccaccgctccttctcgcggaagttctcacctccgatcgactcaagccgtcggcaaatcttttgggctcgaaacttcctcggctcgcctcacttgctccttccagtctgactttaaggacttcaccggtaaatgctccgacgctgtcaaaatcgccggattcgctcttgccacctctgctctcgtcgtctcgggagcaagtgcggagggagctccaaagagattgacctatgatgagattcagagcaagacatacatggaagtgaaaggaactggaacggctaaccagtgccctactattgaccgtggctctgagacttttctcgtcaaacccgaaagtat

SEQ ID NO: 163830 - DNA, 463 bp, Arabidopsis thaliana columbia
cggggccgaccacaggcgtccggggtagctcctgtgaaaaggagaattggatgtatcaaagcggtggctgctccagttgcaccgcgttcagctgacagtgcagaagacagggaacagttagcagaaagctatggattcagacaaattggagaagatcttcctgagaatgtcaccttaaaagatatcatggatacacttcccaaagaggtgtttgagattgatgatctgaaagctttgaagtctgtgttgatatctgtgacttcatacactttggggctcttcatgattgcaaaatcgccgtggtatctgctaccgttggcttgggcatggacaggaactgcaattaccgggttctttgtgataggtcatgattgtgcacataagtcattctcaaagaacaaattggtggaagacattgtgggtcctctcgccttcctaccacttgtctacccatatgagccat

SEQ ID NO: 163831 - DNA, 331 bp, Arabidopsis thaliana columbia
gaagaaatttgcagaagagagaaaaacaaaaatggcggttctttgctcgtcttcgacggtgatactctcttcttcttccgtgaaatcctgcggaagtgagagaaagtctccgtttttagggttctctttaacggctatctcgaagccgtcggtacgagtcggcatttatgcgaattcgaaaagaggattgcaagtgaagtgtgaagctgagccgacgacgacgacttctcttgttccggcgaatcaacgatggatgttcgacgaagaagaagctaatggccctgacatctggaacacgacatggtatccaaaagctttagaccatgtgaac

SEQ ID NO: 163832 - DNA, 151 bp, Arabidopsis thaliana columbia
gaagcgttggaactttgtaggaagcggatctgaagggaaagagtgtgtgtcgtgagggttgatctgagcgggcctttgaatcataactctaacatcaccgatgacaccaggattcatgccgctgttcccaccataaaatacttgattctac

SEQ ID NO: 163833 - DNA, 356 bp, Arabidopsis thaliana columbia
gtccgttctctttccttgaaagaagagccatcgatcgttccgagtttgactttgactgggcggaagaggcagcctgaccagcttcaaacggctgatggatgggctaagttcactggaggattcttctttggagggatctctggggtgacttgggcttacttccttctctacgttcttgaccttccttacttcgtcaagtaaatgtagatcaaaatatatcgagtgtactttcaactctcttgcatcattgttttttactctttgtcttgatcaagaatcttgaaactcaggattgttaatgtatattactctttctttatcttattgacattaatttatatttgccttgcttaaaa

SEQ ID NO: 163834 - DNA, 454 bp, Arabidopsis thaliana columbia
  unsure (1)..(454): unsure at all n locations
cgataattcctttgatgtcatttacagccgtgacactattctgcacatccaagacaagccagctctattcaggacattcttcaagtggcttaaaccagggggtaaagttctcatcactgactattgcagaagtgctgaaactccgtctcctgaattcgcagagtacataaaacaaagaggatatgatctacatgatgttcaagcttacggacagatgctgaaagacgcaggctttgacgacgttatcgctgaggaccgtactgatcagtttgtacaagtcctcaggcgtgaattagaaaaagtggagaaagaaaaggaagaattcatcagcgacttctcagaagaggattacaatgacattgttggaggatggtcggcaaagcttgaaaggactgcatctggtgaacagaaatggngattattcatagccgacaagaagtaaaatccatgtttt

SEQ ID NO: 163835 - DNA, 364 bp, Arabidopsis thaliana columbia
aaatcttaaacgttttactttgtgctgcactactcaacctcaatggccgcctcaacaatggcggtctcctcccctgccttcgccggtaaggccgtcaagctttcccccgcggcatctgaagtccttggaagcggccgtgtgacaatgaggaagactgttgccaagccaaagggcccatcaggcagcccatggtacggatctgaccgtgtcaagtacttgggtccattctctggcgaatcaccgagctaccttaccggagagttccccggagactacggatgggacaccgccggactttcagctgaccccgagacattcgcaaggaaccgtgaactagaagttatccacagcaggtgggccatgc

SEQ ID NO: 163836 - DNA, 439 bp, Arabidopsis thaliana columbia
cccaattagccggagatggccgcaacatccgccgctgctgcagctgcttcttccatcatgggtactcgggtggctcccggtatccatcccggttcaggtcggttcacagccgtgttcggtttcggaaagaagaaggcagctcccaaaaagagtgccaaaaagacggtgactacggaccggcctctttggtacccaggcgccatttctcctgactggcttgatggttccttggttggagattacggttttgatcccttcggtttaggcaaaccggccgagtatcttcaattcgatatcgattcactagaccagaatctggctaagaacttggccggagacgtgatcggaacccgtacggaagctgccgacgccaaatcgacgccgtttcagccgtacagtgaggtgttcggaatccagagattcaaggaatgcgaactca

SEQ ID NO: 163837 - DNA, 404 bp, Arabidopsis thaliana columbia
agaacaacaaccaaacactcatttctccacatcttgagagaaaaaaacagagcacgtatattagagatctcatggcgatggcgggctccggagctgtcctcagtgggcttggttcttcgttcctcaccggaggcaagagaggtgccaccgcattggcaagcggcgtaggcactggagctcagagagttggcaggaaaactcttattgtcgctgctgcggctgctcagcctaagaaatcttggatccctgccgttaaaggtggtggcaacttccttgaccctgaatggctcgatggctcgctaccaggagatttcgggttcgacccattgggtttggggaaagacccggcttttcttgaatggtacaaagaggctgagctgatccatggccgatgggcgatggca

SEQ ID NO: 163838 - DNA, 463 bp, Arabidopsis thaliana columbia
atcaattttcaataaactaaatttgtgggggaaaatccccaattcacttgcagcttttgtaatttctctaatttgggtcggagactcgtaagcggcggtggaattcaagtcgccaccggttccgatcaaagtcttccgttatacgcaaaccctaattcctcactacacgactctttttgatctgaatcgagagatggtacaggaggagaaagctatggaagcaataaatgacgctttgagagctttgcggaagcgtcatcttctggaagaaggagctcatgctcctgcgatttctgctctatataagcctttaatctctcagggttcagaatggaaggagaaaacagaaaagctggaaacagagttacagcaatgttacaaagctcaatctcgactatctgaacaactggtgatagaagtagctgaatccagaactttaaaggctaatttacaagagaaggag

SEQ ID NO: 163839 - DNA, 445 bp, Arabidopsis thaliana columbia
caacaacaaagagagaaattaacatggcgtcttttgcaaccatcgccgccgtacaaccttctgccgccgtgaaaggacttggaggtagctctcttgccggagctaagctcttcatcaaaccttctcgccaaagcttcaaaaccaaatccaccagagctggtgctgtggtggctaagtatggagacaaaagtgtatactttgatttagaagatttgggtaacacaacaggacaatgggatgtgtatggatctgatgctccttctccttataacccacttcagagcaagttctttgagacatttgctgctcctttcacaaagagaggtttgcttctcaaatttttgattcttggaggaggctctttgcttacatatgttagtgcgaactctaccggcgatgttcttccgattaagagaggtcctcaagagccacctaagctcggtcc

SEQ ID NO: 163840 - DNA, 368 bp, Arabidopsis thaliana columbia
aaaaaaacccttcaaaacatttccttattctttcttcttcatctacaacaatggctggagttgcctttggttcctttgatgattcattcagcttggcttctctaagagcttacctcgctgagttcatctccactttactctttgttttcgctggtgttggctctgccattgcctacgcaaagctgacgtcggacgctgctcttgatacaccgggactagtggccatcgcggtttgtcatggttttgctctcttcgtggccgttgcaatcggagccaacatctccggtggccatgtgaacccagccgtcacttttggtcttgctgtcggtggtcaaatcacagtcatcacccggagtttctactggatc

SEQ ID NO: 163841 - DNA, 393 bp, Arabidopsis thaliana columbia
cgcgtccgccaaacctcccccgtccacacctaaacctcccattaccaagcctcctccgtctactccgaaacgcgaccccaccacaagccgtgcggcggcaccatgcccaccaccaacaccaacgccgactccaccagttgtaacaccgccaacaccaaccccacccgtcataactccaccaacaccaaccccacccgtcgtaacaccgccaacgccaactccacccgtcattacaccaccaacaccaactccacccgtcattacaccaccaacaccaacaccacccgtcgtgacacctccaacaccaacaccacccgtagtaacaccaccaacaccaactcctcctacgcctattccagagacttgcccaattgacacgctgaagctaggcgc

SEQ ID NO: 163842 - DNA, 471 bp, Arabidopsis thaliana columbia
ggccttagatcagagctcaaaaacagtagccggaagagtagccatggtgcatccagttctcacaaacctggatcctccacagctcgtaaagcaccagcattgcagaaacggtccaaggagagacgcagccgtcttccacctgtgggacacaaactatctccagctgcttacgagaattatcacgttgctactggtgatagattgtctagtctgagaactgagctctccatgcgaagaagtcgaagtgaaggaactctcggacctatctgatctctctctctccctctttcattgcctgcgatttccttagcgaggtaacgatgaagatgtgatagatacacactttcttccctttattcatcttcttcatctttgtgttttggtggtgtgcattacatacatcagaagctttgattcttatagcttctcaataatgtctgaaattggaaaccatggtatacattcttttca

SEQ ID NO: 163843 - DNA, 458 bp, Arabidopsis thaliana columbia
ttctcgtccacatctttctcctttggtggcaaacacaacgacagatagagagaaacgatggcgtcgaactcgcttatgagctgtggcatagccgccgtgtacccttcgcttctctcttcttccaagtctaaattcgtatccgccggagttccactcccaaacgccgggaatgttggtcgtatcagaatggctgctcactggatgcctggcgagccacgaccagcttaccttgacggttctgctcctggtgactttgggtttgacccacttggacttggagaagttccagcgaaccttgagagatacaaagagtcagagctcatccactgtagatgggctatgctcgctgttcctgggattttggtaccagaagcattaggatatggaaactgggttaaggctcaagaatgggcagcactaccagggggtcaagccacttacttgggaaacccagtccc

SEQ ID NO: 163844 - DNA, 228 bp, Arabidopsis thaliana columbia
gcgaaattctctgatctctcttcattttatttttcctctacatctctcccaacgatttccaaagctcacttcactttggctgctggcacctgaatccatggatattgcttcgtcatctctctcacaagctcacaaagtcgttctcacgcgtcaaccttcttcccgggtcaacacctgctcccttggctcggtctccgctatcggattctctctttcgcagattagctc

SEQ ID NO: 163845 - DNA, 217 bp, Arabidopsis thaliana columbia
gcatatatgaagtaatagacggtacctttctttctgttctgagggcatttgatgtacgtcacaaaccaatcaagcatctccttgtgagcttcttctgctgctttaaccgcctatggttcatcgatgttgtatataactgtccatccgtgtgacactttcggcagtatttttacgtaactattcacctcgggtttggaagatagaatcttctaaaatt

SEQ ID NO: 163846 - DNA, 327 bp, Arabidopsis thaliana columbia
acaaaacccaattagccggagatggccgcaacatccgccgctgctgcagctgcttcttccatcatgggtactcgggtggctcccggtatccatcccggttcaggtcggttcacagccgtgttcggtttcggaaagaagaaggcagctcccaaaaagagtgccaaaaagacggtgactacggaccggcctctttggtacccaggcgccatttctcctgactggcttgatggttccttggttggagattacggtttggatcctttcggttaaggcaaaccggccgggttttttaattccgttttcaatcaattgaaccagattttgctt

SEQ ID NO: 163847 - DNA, 421 bp, Arabidopsis thaliana columbia
  unsure (1)..(421): unsure at all n locations
gcgaagacgctccgaaaccggatccacttcacgatactggatccacatctactggtccaagccggggggcgacaccgggtcacgaagaacgacccaaaggatatttcatgaaccggactccgccgcctccaggacagtcgcgcaagtgggaagattgggagcttccatgttacatcacaagcttcctcacgactgtaatcctcggagtgggtctcaatgccaaacctgatctttcaatcgagacctgggctcaccagaaagctcttgagcgcctcgagatggagaagcttgcatctgccggagattcatctggttaatcccaaaacttgggagatatgattcaatgggtgaactggcatgtgtgacatatgttagtgcgaactctaccgggggagatnttccatttatgatgatgatcacg

SEQ ID NO: 163848 - DNA, 476 bp, Arabidopsis thaliana columbia
gtcgaagcggctcgagctcgtcgatcttggctgatcagatggctggacaatggtatgcgagagcttgtggactgaagccgatggcgaaagaagaatggataaagaaagcgttggagacggtctacgacttcaatgtgatgagagtgagagatggaacacgtggtgctgtgaacgggatgttacctgatggacgagtagacacaagcacgatggtgtcgagggaggtttgggctgggacaacatactcggtcgcggcttgtatgattcaagacgggctggccgataaaggttttaggacagcaagtggaatctatgaggccgcttggtccgaccgtggtctaggctgcgcatttcagacaccagaggcatggaccacgaacgatgaatataggttactttgctacatgaggcctttagctatatggggtatacaatgggcacacacaatgccaaaacctaacagagaacaagaagtt

SEQ ID NO: 163849 - DNA, 356 bp, Arabidopsis thaliana columbia
  unsure (1)..(356): unsure at all n locations
aaggaagaagacgttagagttggagctaacaagttcccggagagacaaccaatcggaacatcagctcagagtgacaaggactacaaggaaccaccaccagctccgtttttcgaacctggtgagctttcttcatggtctttttggagagctgggatcgctgagttcatcgctacttttctctttctctacatcactgtcttgactgttatgggagtgaaaagggtaaccgaacatgtgtgcttccgtcggaatccaaggaatcgcttgggctttcggtggtatgatatttgccttagtctactgtaccgcttgtatctncggtggacacatcaaccaagcggtacttttgtctgttc

SEQ ID NO: 163850 - DNA, 392 bp, Arabidopsis thaliana columbia
gtcaccaaaaaaaaaaaaaaacacaaaaagtttcaatggccgcctccacaatggctctctcctcccctgccttcgccggaaaggctgggaacctttcccccgcggcatctgaagtcctcggaagcggccgtgtgacaatgaggaagactgttgccaagccaaagggtccatcaggcagcccatggtacggatccgaccgagtcaagtacttgggtccattctctggcgagtcaccgagctaccttaccggagagttccccggagactacggatgggacaccgctggactttcagctgatcccgagacattcgcaaggaaccgtgagctagaagttatccacagcaggtgggctatgctcggagccctaggctgcgtctttcctgagcttttg

SEQ ID NO: 163851 - DNA, 471 bp, Arabidopsis thaliana columbia
cttcttttttatctctcgaaattcctctctctttctctctgcatcaaaacagcaactttacttctgcgtttttgtttatctctctgtattatccgattaatttaaaggagttcttcaaggcagctgcttctatgccatattgccgaggacttttggtgtctttcgaggtcattagaacaattgtgtctgcttggttggtggtctatctacaactgttagcttttacaaaaaatgggcgagtctaaggggtgcgggaatgttggacgaatgatttcgaagaataagtctgcgaattcttataacctctctcttcagttgtctcctgttgtttctttctgggattgtattgtccgcaccatgaggtattcctatataccagagtgggtgtagttcttgagttcctctacaacatcatcgagtttagtgcagttttttagttagaaatttatagtcaagcaataatggatcaca

SEQ ID NO: 163852 - DNA, 382 bp, Arabidopsis thaliana columbia
aacaaagagagaaattaacatggcgtcttttgcaaccatcgccgccgtacaaccttctgccgccgtgaaaggacttggaggtagctcgcttgccggagctaagctcttcatcaaaccttctcgccaaagcttcaaaaccaaatccaccagagctggtgctgtggtggctaagtatggagacaaaagtgtatactttgatttagaagatttgggtaacacaacaggacaatgggatgtgtatggatctgatgctccttctccttataacccacttcagagcaagttctttgagacatttgctgctcctttcacaaagagaggtttgcttctcaaatttttgattctgggaggaggctctttgcttacatatgttagtgcgaac

SEQ ID NO: 163853 - DNA, 411 bp, Arabidopsis thaliana columbia
cgtgtttcctcacttatcacactctttcctcttcttttcaagatatggaaccggaagaaaatggtggggacaaggagagagtgcggagggaaggggaagatataactctgctcccatttgggatggctacttacaagatgcaaggcgatgtttggctttcgcaggaccacgatgatcaagagagattggcttcgctttacagtgttgcggattcttggcttaaacagctcagggtccaacatcatgacttcaactacttctgcaatatgtcaatgactcatcgtggctaaacctcggttggatgacaccatgatgtttgcttgtttcctcatatatagtctaattcttgctttgttctggaaccgctttgcgtttgtaaaacgcaatggagcgattcgctttgcagtgttt

SEQ ID NO: 163854 - DNA, 285 bp, Arabidopsis thaliana columbia
gtttgaaaatgttccaatggtaactacatagtcagggcttcagtataaggatattaaagttggtagaggcccgagtccaccggttggttttcaggttgctgctaattatgtggctatggttccatcacggcaaatattcgacagttctctggagaaaggtctaccgtatctatttcgcgttggctctggccaggtgatcaaaggacttgatgaaagaatcttgagtatgaaagctggtggcaaacgtagactctacattccagggcctttggcgtttccaaaggg

SEQ ID NO: 163855 - DNA, 374 bp, Arabidopsis thaliana columbia
ggacagcctaagtggctattatgcattattccagaatacccaatgctcaacttcatgctcgtcacggccatctatgtcttggtgtcccaccgacttttcgagcttacaaacacgttaaagtctgttttcataccaacaaaagacgacaagaggctgctccacaatgttctcgctggagctgccatctcgttctgtttatatttaacatctctcattcttctccagatcccacactaaccatgagggactagaaacatgttgaaaaacatgaatctaaagctgcacaaaggttctttttggaacctggttaaattggttccacccccattttatattgaccattaaaatttggttttaaaggatcagtttttttt

SEQ ID NO: 163856 - DNA, 365 bp, Arabidopsis thaliana columbia
aaaaactcttgaatttttcaagaacaaaagaaaaagacatctttaatggcggccatgaactcgagtgttctcacttgcagctacgcaattgctggctctggctcggtagagcttaaccagaaagttggtttggtgaattcatcagttgggtttggtcagaagaaacagatgattatgcctgtgatcaaagctcaacgcgttgttggtgatgatgttgatggatctaatggaagacgatcagccatggttttcttagcagctacactcttctccactgctgctgtttctgcttctgctaatgctggcgtcattgacgaatacctcgagaggagcaaaaccaacaaagaacttaatgataagaagag

SEQ ID NO: 163857 - DNA, 423 bp, Arabidopsis thaliana columbia
atctctccttctttctctacatgaaaaacaaaagattcctcaattttgttcttatttttcatttagtcacagtacctctctcactataaaccacactgtcttgagataaaatacaaaaagagaagagattaaaaacctcatccgatgatagactacgagagaagcaataccaccaagaacatcaacacccatcatcacaaccctcctccatcttcatcttcctctgatcttcttcccgacggtaatggaaccgccgtgactcagaagcggaaacggagacccgccgggacaccggatccggaggcggaggtggtatctttatcaccaagaacgttactagaatcggatcggtacgtatgtgagatctgtaaccaaaggtttcaaagggaccagaatctacagatgcatagaagacgacataaa

SEQ ID NO: 163858 - DNA, 444 bp, Arabidopsis thaliana columbia
aaaagctgttgtcaagagaagaaggaagagaggagataaaaagccaaacaaatggcgttcaatatcataacacctggtcgtgtttattcagccacgtctctcactttcgtttccaccattaaagctgctttcgttaaacctcctttggcctctccgtctcgtcgtaacctccttcgtttctcatcatctcctttgtcatttccgtcgctccgtcgaggtttccacggtggtcgtattgtggcaatgggttcttctgctcctgaatcggtcaataagccggaagaagagtggcgtgcgattctttctcctgaacaatttaggattctcagacagaaaggcactgaatatccaggaactggagaatacaacaaagtattcgacgatggcatctattggtgtgcaggatgtggaactcctctctacaaatccaccaccaaattcgac

SEQ ID NO: 163859 - DNA, 160 bp, Arabidopsis thaliana columbia
aaacaaagcaagcaaaaaaaaaaaatggctttctcacgcctctcatttgcagcttctctcatcgtcttctcatctctaatcatatcttcagttgcttattacggcaatgaagctgacccggagaccggaaaattgattcccatcgcccgtgaagggatca

SEQ ID NO: 163860 - DNA, 324 bp, Arabidopsis thaliana columbia
caaaagaactgtctgagattgagtacatggagagcttgtatatgaagagcactgtgtcggcattaaaagtattaaaggaaatccgcagtggtagctcaacagttagcgtcttctcgttgccaccgttaccggcaagtggattagaagatgattcatggaagaagaaagttggtgtccttgaacaagtagcgaaatgaattatgagtattattatttttaaatctctctttttttttgtactttctttaaatagtacaagtaattgtatacgcttacagctgtaaaagatgaatcaaataaaacatagaagtgtgatcatctttc

SEQ ID NO: 163861 - DNA, 360 bp, Arabidopsis thaliana columbia
cgatttcaccgagaaagttaccgaattttcgtgctttctctggtaccgctatgacagatactaaagatgctggtatggatgctgttcagagacgtctcatgtttgaggatgaatgcattcttgttgatgaaactgatcgtgttgtggggcatgacagcaagtataattgtcatctgatggaaaatattgaagccaagaatttgctgcacagggcttttagtgtatttttattcaactcgaagtatgagttgcttctccagcaaaggtcaaacacaaaggttacgttccctctagtgtggactaacacttgttgcagccatcctctttaccgtgaatcagagcttatccaggacaatgcac

SEQ ID NO: 163862 - DNA, 437 bp, Arabidopsis thaliana columbia
  unsure (1)..(437): unsure at all n locations
taaagagcgaagctgatgcattagccatagcaaaggaggtagggtacccagttgtggtaagaccttcttatgttctaggtggacgagcaatggagatcgtttatgatgacagtagactaataacctatttggaaaatgcggtacaagttgacccagagagacctgttttggtagataaatatctttctgatgccattgagatcgacgttgatacccttactgattcctatggaaatgtggtgattggtggaataatggagcatatcgaacaagctggtgtgcattctggtgactcagcttgtatgcttccaacacanaccatcccagcttcttgtttgcaaactattcgaacatggaccactaagctggcgaagaagctaaatgtatgtgggctgatgaactgtcagtacgcaatcacaacatctggggatgttttt

SEQ ID NO: 163863 - DNA, 306 bp, Arabidopsis thaliana columbia
acgaaaagctggagacagaaggagtagtgtttgaggtatataaggcgccaatggaccaaaccaatggggacacttaaaccctcacttcaccacatgcgcggtcggtaaattgcaatctccaattgatattcaaaggaggcaaatattttacaaccacaaattgaattcaatacaccgtgaatactacttcacaaacgcaacactagtgaaccacgtctgtaatgttgccatgttcttcggggagggagcaggagatgtgataatagaaaacaagaactataccttactgcaaatgcattggcacac

SEQ ID NO: 163864 - DNA, 124 bp, Arabidopsis thaliana columbia
gcgtctctctcccgcaaccttcgattttcgtttattcgcatccatcggagagagaaaacaatcaataagcgaccatgttggtgtaccaagatcttctcaccggtgatgagcttctgtctgactc

SEQ ID NO: 163865 - DNA, 301 bp, Arabidopsis thaliana columbia
aaggaagagaacgcacgtgtccccatcatttgcactggtaacgatttctccaccctatacgctcctctcatccgtgatggacgtatggagaagttctactgggccccgacccgtgaagaccgtatcggtgtctgcaagggtatcttcagaactgacaagatcaaggacgaagacattgtcacacttgttgatcagttccctggtcaatctatcgatttcttcggtgctttgagggcgagagtgtacgatgatgaagtgaggaagttcgttgagagccttggagttgagaagatcggaaaga

SEQ ID NO: 163866 - DNA, 310 bp, Arabidopsis thaliana columbia
gaagaaagtgagtcgctgtgtgagaagatcgcaagagatgctatgaacatctctccagcgtttttttcgtgttgtagaaatatcgattctaatcttcttatgagaaagcctaagcagaaccaaccatcttcaagcagcagccagatgaatctgactttgcaaaagcttctctttctttttcctttttgggttttgttctctaaggtttggtttggaatattggtgtggaatcaaatccgctccatattttaggattatattattgcactcgttaatggattcgtttgatctggctttttaactttaaaaa

SEQ ID NO: 163867 - DNA, 440 bp, Arabidopsis thaliana columbia
cttctttgattgatccacatggcttccgctgccgcaagttccgccttttcactccttaagtccaccggcgctgttgcttcctccgccggaactcgcgcacgtgcctcccttctgccaattccctctacctctgtttccgcgcgtcctctaggcttctccgccactctagattcccgtcgtttctctctccacgttgcttccaaagttgaatcggtgcgtgggaagggaagcagaggagtggttcctatggcgaagaagagcgctagtgatctgaccttacatgattcagactgggaagagggtttcaatgctaacaaccatattgatatatatacgaaatacacttatgtgcgtatgtaaattctcttctcgctttaaagattcaggctgactctctatcctcttatactgtgcctttatatatcttgatctgtgatttc

SEQ ID NO: 163868 - DNA, 184 bp, Arabidopsis thaliana columbia
gcgaaagaatcataaaaagcctaacgaagtaagtcaagaagaagaggaacaaacaaccatgggtgaagtggttaaggatggaagagagaatgatccagctggtttggatgatagcgataggattggttccctacccatggatcctaagagtcttattttgacaacttttatgctgggagtactt

SEQ ID NO: 163869 - DNA, 319 bp, Arabidopsis thaliana columbia
  unsure (1)..(319): unsure at all n locations
cctttcacaaagagaggtttgcttctcaaatttttgattcttggaggaggctctttgcttacatatgttagtgcgaactctaccggcgatgttcttccgattaagagaggtcctcaagagccacctaagctcggtcctcgcggcaagctttaaattagctttctaaaatctttcaaaaagtcagaaactttctccccaattctatgaaccctatttatgtatattgtactgtgttgtgttaattgctttgtaagctagtgattctgaaaatcagttatgatgaatcaatgaaattgcatttcaagtctgctacancana

SEQ ID NO: 163870 - DNA, 453 bp, Arabidopsis thaliana columbia
acccacgctcacggactgagctaagagctttactacagtcctactctctacacatcttctctctctctcaagagctagtcatggccaaactcataacttcttttctcttactcacaattttattcactttcgtttgtctcactatgtcaaaagaagctgagtaccatccagaaagttatggaccaggaagtctgaaatcataccaatgtggaggacaatgcacaaggagatgtagcaacacaaagtatcataagccatgcatgttcttctgccaaaagtgttgtgctaaatgcctttgtgtccctccaggcacgtacggcaacaaacaagtgtgtccttgttacaacaactggaagactcaacaaggtggaccaaaatgtccataaacaaaaacattgagagagaaaccccaatctgtttcctattttatttaattatttccagtatgctttt

SEQ ID NO: 163871 - DNA, 112 bp, Arabidopsis thaliana columbia
gtgggattcacgccaccgcagctagacccaaacacaccgtcttcgatcttcgctggaagcaccggtggtcttctacgtaaagcgcaagtggaagagttctacgttatcacgt

SEQ ID NO: 163872 - DNA, 455 bp, Arabidopsis thaliana columbia
gatttaaagaaacggtagaaaccttgtttttaaccgtctcggtccctatataaacctatgagctagcgacgacaagtattcagtataatgaatcagaaaacaagtagaaactttaaaacgagagagagagaaagaaatggcgacatcgggaacgtacgtgacggaggttccgttgaaaggatcggcggagaaacactacaagagctggaagagcgagaaccatgtcttcgctgacgccattggccaccacatccaaaatgtcgttgctcacgaaggcgaacatgactctcacgggtctatcaggagttgggactacacatatgatggaaagaaggagatgttcaaagagaagagagagatagatgatgagattataacattgactaaaagaggactggatggtcacgtgatggagcatctcaaagtatttgatttcatttactaatttaatccca

SEQ ID NO: 163873 - DNA, 243 bp, Arabidopsis thaliana columbia
cattcgtcgaatccattgcttagggagagaagagtatattgctgagagcttcgctgctctgttctgcggcctcaatcactttgacaccaagtcaactattcaatcccaatagttcccatcgcttcccaagattcgaactatctcgtcctgtctcggatttgactcgtaccaaatgtcactggagtctcctgagagactcaggaaaatccagatttctcactagcagcaccgctactgatgaag

SEQ ID NO: 163874 - DNA, 293 bp, Arabidopsis thaliana columbia
aactgtgagtaaaaaagagaagaaagaaaaatggtgctaaaggtgtacggacctcactttgcttcaccaaagagagctttggtcacactgatcgagaagggcgttgccttcgagaccatccccgtcgatctcatgaaaggagaacacaagcagcctgcttatctcgctctacagccttttggtactgttcctgctgttggtgaccgtgactaccaaatcttcgagtcccgtgccgtgatgaaggacctagctgagaagtacaggtcacaaggacctgatcttttggggaaaac

SEQ ID NO: 163875 - DNA, 423 bp, Arabidopsis thaliana columbia
cctctcccaagccaaagccaactcctaaaccaaccccaagccctagctctggctcgagcaagtgccctaaagacaccctcaagctcggtgtctgcgctaatgtgctcaacggcctcctggacttgacccttggcaagccaccggtcgagccatgctgcagcctcatccaaggactcgctgatgttgaggcagccgtttgtctctgcaccgctcttaaggctaacattcttggaatcaacttgaacctcccaatatctttaagtctactccttaatgtttgcagcaaacaacttcctcctggcttccaatgctaaaaaccatattgatatataatttaaatacacttatgtgtgtattaatttatcttcttggtttaaagagacagggtgattctctatactcttatattggggccttatatat

SEQ ID NO: 163876 - DNA, 418 bp, Arabidopsis thaliana columbia
  unsure (1)..(418): unsure at all n locations
ctctagacaaccacaagaacacaaaacacacaaaaacaaagaggttctttctttgaagaagaaatggaaaaagttgatgtttatgatgagcttgttaacctaaaggcaacagagctgagattgggattaccagggacagaagaaactgtttcttgtggaaaaagcaacaaaagagttttacctgaagctactgagaaagagattgaatccactggaaaaactgaaaccgcttctcctccaaaggctcagattgttggatggccaccagttagatcttacagaaagaacaatgttcagacaaagaagagtgaatctgaaggtcaaggaaactatgtgaaagtaagtatggatggtgctccatatctaaggaagatagatctaacgatgtataaacaatatccagagntgttgaaatcac

SEQ ID NO: 163877 - DNA, 442 bp, Arabidopsis thaliana columbia
cacaaccaccgttctccgtcacggtggcgctttattctctcatcggagcgcctcaccggtggcagacggtgtcgttgttcctctcctaaaacctccatcaatcaccatctctttacacagagctctaaccaaaatcttcgagagatggggcagagtatgagctgtggaagtcgaccggagcacggaatattcgcctctgtacagtgcggcgatatcatcactatccgtcgtgtgatggcgacggagcctagtctgttgaatcaaactactccttatgatcgtcactctgttcttcatgtcgctgctgctaatggtcagatcgagattttgtcattgcttttggaacgatttacgaatccagatttgttgaatcgtcacaagcagactccgttaatgttggctgcgatgtatggaagaatctcttgtgtgaagaaactagctg

SEQ ID NO: 163878 - DNA, 170 bp, Arabidopsis thaliana columbia
cttttgttccctgccattaacgttaacgactctgtcaccaagagcaagttcgacaacttgtatggttgccgtcactcactccctgatggtctcatgagggccactgatgtcatgatcgctggaaaggttgctgttatctgtggatatggtgatgttggaaagggttgtgc

SEQ ID NO: 163879 - DNA, 451 bp, Arabidopsis thaliana columbia
aagaacaatggcttcctctatgctctcttccgctactatggttgcctctccggctcaggccactatggtcgctcctttcaacggacttaagtcctccgctgccttcccagccacccgcaaggctaacaacgacattacttccatcacaagcaacggcggaagagttaactgcatgcaggtgtggcctccgattggaaagaagaagtttgagactctctcttaccttcctgaccttaccgattccgaattggctaaggaagttgactaccttatccgcaacaagtggattccttgtgttgaattcgagttggagcacggatttgtgtaccgtgagcacggtaactcacccggatactatgatggacggtactggacaatgtggaagcttcccttggtcggttgcaccgactccgctcaaagtgtgaaggaagtggaagagtgcaagaaggag

SEQ ID NO: 163880 - DNA, 455 bp, Arabidopsis thaliana columbia
caaacttgaagaagaaaaaaaatctttttaaagagctttgaagatccatggcgatgtctcatgtccagcctatgctactcctcctcgtatcactcttcttcttaccggctttgcgtggcgccatagatttcgaatactgcgccaaaaatggaaacgattacggaaccgtcactagcattgtggtctctccatctgttgggcctcacgaaaacccaaccatcactataaatttattcggttctgcaagcaaaaacatccccgcgggaacccttgtgtacgtagcctttagagatggggaatttaccggccttttaaaaacttacaacctttgtgatgtgagtgcatgtaacaatgaagctgagattgaagctggcaccaactttgagttaactctttccgacgttctttatgttggttatgatgaggaaatcaagtactcggtatctttgcgccga

SEQ ID NO: 163881 - DNA, 348 bp, Arabidopsis thaliana columbia
aattcttccctagtttgaaaaatcttctgtattctgaaaagagattttatgcgtatcgctgaggtaggaagaaaacagattccttgccatttcccaaattttgtcattgagtcttggcatttcaaccaatcgcaatttattgaaattccggcgagtcattagatttttttggattccgtttcaaggtacggtgctttttcgcagattgagaagagcttaataagaaagatgacattgacgatcccaaacgcacctgggagctccgggtacttggatatgttcccagagagaaggatgtcgtattttgggaattcttacattctgggtttgactgtcactgccggaatc

SEQ ID NO: 163882 - DNA, 310 bp, Arabidopsis thaliana columbia
atggcttcctatatgctctctaccgctactatggttgcctctccggctcaggccactatggtcgctcctttcaacggacttaagtcctccgctgccttcccagccacccgcaaggctaacaacgacattacttccatcacaagcaacggcggaagagttaactgcatgcaggtgtggcctccgattggaaagaagaagtttgagactctctcttaccttactgaccttaccgattccgaacagggtaaagaagtggactacctcatccgcaacatgtggcagacttgagttggattcgacatggaacacg

SEQ ID NO: 163883 - DNA, 453 bp, Arabidopsis thaliana columbia
gctcattagagaacagaaaaaaaaaaaacaatggcaactcaagccgccgggatcttcaactccgccataacaaccgccgcaacctccggcgtcaagaaactccactttttctcaacaacccaccgtcccaaatccctctccttcaccaaaaccgcaatccgcgccgagaaaacagattcctccgccgccgctgctgcagcccccgccacgaaagaagctcccgtgggattcacgccaccgcagctagacccaaacacaccgtctccgatcttcgctggaagcaccggtggtcttctacgtaaagcgcaagtggaagagttctacgttatcacgtggaactcaccgaaagaacagatctttgagatgccgacaggaggagcagcgatcatgagagaaggtccgaatcttctgaagctagcgaggaaagagcagtggttagctttggggacaagg

SEQ ID NO: 163884 - DNA, 365 bp, Arabidopsis thaliana columbia
ggctacagcactaagaaagtacatgctatccttacttacaatggaaccaaccatttgatcaagaaggaggtcccatgtgagactgatcagcttactcacgtgtacaccttcgtcctccgtccagatgctacttacagtattttgattgataatgttgagaagcaaactggtagcctttactctgactgggatcttctcccagcaaagaagattaaggatccaagtgctaagaagcctgaggactgggatgacaaagagtacattccagatccagaagacactatgccagcgggatatgatgacatcccaaaggagatttcagacactgactcatagtagcctgaggactgggatgatgaagaaga

SEQ ID NO: 163885 - DNA, 427 bp, Arabidopsis thaliana columbia
gaaaggcttgagagccttcttctccactattttcaatggctttaacattgtcaaccacaaagaccttcactaacataaactgctcaaacaatacttccaacataaccacctttaagcctctcaagcttcctcttttctggccatggcaaaaggtcaaaatgggtcctttaagtgtttctcctatgggttttgggacatgggcttggggtaatcagcttctttggggttatcagacttccatggatgatcagcttcaacaagcttttgaattggctttggaaaatggaatcaatttgtttgatactgctgattcttatggcactggtaggcttaatggccaaagtgagagacttctggggaaattcattaaagaatctcaaggacttaaagggaaacaaaatgaagtagtggtagctacaaagtttgc

SEQ ID NO: 163886 - DNA, 407 bp, Arabidopsis thaliana columbia
gttggatctcaaaaccctaatatctgaacttcgccgtcgagagcatccatgggtcgtgtcatcagagctcaacgtaagggtgcgggttccgtcttcaaatcccacactcaccaccgcaaaggtccggctaagttccgtagcctcgatttcggcgagagaaatggttacctcaagggcgtcgtgacggagatcatccacgatcctggtcgtggtgctcctcttgctcgtgtcactttccgtcatcctttccgtttcaagaaacaaaaggagctcttcgtcgccgccgaaggtatgtacaccggtcagttcttgtactgcggtaagaaagctactctcgtcgttggaaatgttctcccttcttagatctattcctgaagggagctgtgtctgcaacgtcaagcataacg

SEQ ID NO: 163887 - DNA, 449 bp, Arabidopsis thaliana columbia
  unsure (1)..(449): unsure at all n locations
aacgagcaaaagaagaagagaaacaacaagaagtagtaatggcttcctctatgctctcctccgccgctgtggttacatccccggctcaggccaccatggtcgctccattcaccggcttgaagtcatccgctgcattcccggtcacccgcaagaccaacaaggacatcacttccatcgcaagcaacgggggaagagttagctgcatgaaggtgtggccaccaattggaaagaagaagtttgagactctatcttacctccctgaccttagtgacgtcgaattggctaaggaagttgactaccttctccgcaacaagtggattccttgtgttgaattcgagttagagcacggatttgtgtaccgtgagcacggaaacactcccggatactacgatggacggtactggacaatgtggaagcttncattgttcggatgcaccgactccgctcaa

SEQ ID NO: 163888 - DNA, 453 bp, Arabidopsis thaliana columbia
ggttgcatcacaacaaaagagctgggaacagttatgcgttcactaggacaaaacccaacagaggctgagctccaagacatgatcaacgaggttgatgcagatggaaacggcactatcgacttccccgagttcctgaacctgatggctaagaagatgaaagacactgactccgaggaagagctaaaagaagccttcagggttttcgacaaagaccagaacggtttcatctccgctgctgagctacgccatgtgatgaccaatcttggtgagaagctaactgatgaagaagtggaagagatgatccgtgaggctgatgttgatggagatggtcagattaactatgaagagtttgtcaagattatgatggctaagtgatttgataaaggtgatgatgatgatgatgatgacctttttatgcttctaggagtctaaccaaaaacaattgcatgattg

SEQ ID NO: 163889 - DNA, 425 bp, Arabidopsis thaliana columbia
  unsure (1)..(425): unsure at all n locations
tgaagatggcagaactttggccgactacaacattcagaaggagtccacactccacttggtcttgcgtctgcgtggaggtatgcagatcttcgtgaanactctcaccggaaagaccatcactttggaggtggagagttctgacaccattgataacgtgaaagccaagatccatgacaaagagggtatcccaccggaccagcagagattgatcttngccggaaagcaacttgaagatggaagaactttggntgactacaacattcagaaggagtccacacttnacttggtcttgcgtctgcgtggaggtatgcagatcttcgtgaagactctcaccggaaagactatcactttggaggtagagagctctgacaccatngacaacgtgaaggccangatccaggatatggaaggaatccctccggacc

SEQ ID NO: 163890 - DNA, 378 bp, Arabidopsis thaliana columbia
atacacactgctactaatccctgcagcttcttctgctcggcttagctttagtatagctctggcgacttgtaaaggtgaccaggttgcttgctattagaactagccatgtcacatgtctccaatcttatcttttcaacagctgcagtttcgaaagaggctctatcttcggtgttgcatcttctgcttaccaggtggaaggcggtagacgccgcggacttaacgtttgggatagcttcactcaccgattcccagagaaaggtggagctgatttgggaaatggagacactacttgtgactcatatactctttggcagaaagatatagacgtgatggacgagctcaactctactggctacagattctccattgcgtggtcaa

SEQ ID NO: 163891 - DNA, 382 bp, Arabidopsis thaliana columbia
agagtaaacacttaagcaaaacaattttgtccttctcttaggctatctccaatgaagaacttagaagatggttttcttcaagatgcggtttatctctttaatggcaggattagccatgaaaggatctaagatcaacgcagaagatctccaaaagttctccctccaccatacacagaacaacctccaaaccataagccttctattgtttcttgtcgtttttgtgtggatcctctacatgttaacccgacctaaacccgtttaccttgttgatttctcctgctaccttccaccgtcgcatttcaaggtcagtatccaaaccctaatgggacacgcaagacgtgcaagagaagcaggcatgtcgtcggaagaacaaagagagtga

SEQ ID NO: 163892 - DNA, 390 bp, Arabidopsis thaliana columbia
gcaaaatggccacaagcgcatcagctttgctctcaccaaccacattctccactgcaatctcccacaaaaaccctaactccatctcattccatggccttcgtcccctccgtctaggtggctcctcctccgccctacccaaactatcaaccaccgggagaaaatcctcctccgctgtcgtgagagctgagctaagcccttccatcgtcataagtctcagcacaggtctctccctcttcctcggccgtttcgtcttcttcaacttccagagagagaacgtagcaaaacagggcttaccggagcagaacggaaaaacccatttcgaagctggagatgatcgtgctaaggagtacgtcagtctcttgaaatcgaacgatccaattggattcaaca

SEQ ID NO: 163893 - DNA, 396 bp, Arabidopsis thaliana columbia
ttcaaaccatggttatggcctcaagtggatctaatgtgaagtggagccagaaacgttatggaccaggaagcctgaaacgtacccaatgcccatcggaatgtgataggaggtgtaaaaagacacagtaccacaaggcttgcattacgttctgcaacaaatgctgcaggaagtgtctctgtgtgcctccgggttactatgggaacaaacaagtttgctcctgctacaacaactggaaaactcaagagggtggaccaaaatgcccttgaaaaaatctcccttcgttccctttttataataaaaattttcaactataactaaattttctttgatcaatgttttatctactttattcctaaatgtggaatggtatggcactcctttttggattttggtttt

SEQ ID NO: 163894 - DNA, 445 bp, Arabidopsis thaliana columbia
gaagaatcaatactcaaatctcaatcatctctctttcttatcttcttctccgatatgaagctcgccgctagcctcaaccgcctcagccccaaacgtctcttccgtaccaaatcaaaagcttccgtctccagatctgagccttcttccttcagctccaatgcttcttcctcttcctctgatggatcttacggtaacctcaaacaaggtccaaccgcgactccgatcagtgttctccctcaaaactccggcgatttttacactgagcttgttcaagcttttaaactgatcgatcgtgatgacgacggtgttgtttccagaggagatctcgcggcgttgattagcaggttaagtcatgaaccaccgagtcaagaagaggtgagtttgatgctaagagaagtagacggcggagacggtggttgtatcagccttgaagatcttgctagcc

SEQ ID NO: 163895 - DNA, 270 bp, Arabidopsis thaliana columbia
aaatcatcaaaaatcaaaatctctaaaatcaaatattcgcattttctctctcgccggagagatgcaacggtttcttctacctttactctggcttgcactatcgccgccggcgatttgtcattactcttcctcaacctcttcaccttcttcgtcctccgtttcttccgacgcctcagaatggcgtccagctcgagccacctactacgccgctacgaatcctcgagacgcggtgggcggtgcgtgtggatacggagatctcgtcaaatctgg

SEQ ID NO: 163896 - DNA, 229 bp, Arabidopsis thaliana columbia
ttaagatctcagatacaaaactccgacatgtctacgttcagcggcgatgaaacagctcccttcttcgggttcctcggcgctgcagccgcgctcgttttctcctgtatgggagctgcttatggaaccgcaaagagtggtgttggtgtggcttctatgggagttatgagacctgagttggtgaagaaatctatagaccctgttgttatggctggagcgttggttatctatg

SEQ ID NO: 163897 - DNA, 402 bp, Arabidopsis thaliana columbia
attccgttgaggaaatatggaatctggctactctgccagcttttctaatctacgtagccataaccatgtcgattgtccttgctttaattctgcattttgaacccctgtgcggccaaacaaacattctggtttatattggaatctgttcgttaatgggtgctctcactgttatgagcataaaagctattggaattgcgataaaattaacaatggagggagtaagccagatcgggtatccacagacatggctttttgtcatgagtgcagtaacttgtgtcgatacacaattgatttacctaaataaggctgtggacacattcaacgcatccattgtttctccagtatactatgtaatgttcacatccctcacattatgtgctagcgtaataatgttcatggact

SEQ ID NO: 163898 - DNA, 249 bp, Arabidopsis thaliana columbia
ggaaaaaatctctctttcgaataaaaaaaaaactccagaatccaaaaatgggtcgtgtccgaaaatcagatttcggttccattgggcttgttctgtgttgtgtcctaaatagcttactctgtaatggaggcatcaccagtagatatgtcagaaaattagaagcaaccgttgatatgcctcttgatagcgatgtttttcgtgttccttgtggctacaatgctcctcaacaggtgcatataacacaaggag

SEQ ID NO: 163899 - DNA, 457 bp, Arabidopsis thaliana columbia
  unsure (1)..(457): unsure at all n locations
ggctgaggaaatcaagaatgttcctgaacaggaggtgccaaaggtagcaacagaggaatcatcggcagaggttacagatcgtggattgttcgatttcttgggaaagaagaaagacgaaacaaaaccagaggagactccgatcgcttcagagtttgagcagaaggttcatatttcagagccggagccagaggttaaacacgaaagtcttcttgaaaagcttcaccgaagcgacagttcttctagctcctcaagtgaggaagaaggttcagatggtgagaagaggaagaagaagaaggagaagaagaagccaactactgaagttgaggtaaaggaggaagagaagaaagggtttatgngagagttgaaagagaagctttctggacacaagatacctgaagacggttcagccgtcgctgcggcaccggtggttggtcctcctcctgtggaagaagcgcat

SEQ ID NO: 163900 - DNA, 369 bp, Arabidopsis thaliana columbia
gtcttactcgtgccagccactcgcatttctccagattttattatccttcctcgaaacaagagcttagctaagatgacgaagaactacccaaccgtgagcgaagattacaagaaggctgttgagaagtgcaggaggaagctcagaggtttgatcgctgagaagaactgtgcacccatcatggtccgactcgcatggcactctgctggaactttcgattgtcaatcaaggactggaggtccattcggaacaatgaggtttgacgctgagcaagctcatggagccaacagtggtatccacattgctcttaggttgttggaccccatcagggagcaattccctaccatcttttttgctgatttccatcagctt

SEQ ID NO: 163901 - DNA, 456 bp, Arabidopsis thaliana columbia
ccataaccaaaccatcatcatcatcatctcttggtgacagaagaaaagagttgaggaacagagaaaatggcagcacaagcacttgtgtcttcttcacttacctcctctgttcagacagctagacagatatttggctcaaaaccagttgcgtctgcctcacagaagaagagttcctttgttgttaaagctgctgcaactccacctgtcaagcaaggagccaacagaccattgtggtttgcttcatcgcagagtctctcttacttggatggcagcttacctggtgactatggattcgaccctcttggtctttcagacccagaaggtactggaggattcattgagccaagatggctagcatacggagagatcatcaacggacggttcgccatgttgggtgcagctggagctattgctcctgagattttaggaaaggctggtctgattccagcagagact

SEQ ID NO: 163902 - DNA, 437 bp, Arabidopsis thaliana columbia
ggaaaagagttagttcaaaacatgttggttcttctgtttgccaatcgcttgtttttgccactatggaaccgcgacaatattgcaaacgtacagatcgttttcagagaagattttggaactgaaggtcgcggtggatattttgatgaatacggaatcattcgtgatattattcaaaaccacttgctccaggttctttgccttgtcgccatggagaaaccaatctctcttaaacccgagcacatccgggatgagaaagtgaaggttcttcaatctgtgattcccataaaagatgaagaggtggttcttggacaatatgaaggatatagagatgatccaactgttccaaatgactcaaacactccaacgtttgccacaacaattcttcgcattaacaatgaaagatggggaggtgttccttttatactgaaagccggtaa

SEQ ID NO: 163903 - DNA, 387 bp, Arabidopsis thaliana columbia
gccgccggaatcttcagccccgccataactacctctacttccgccgtcaagaaactccacgctgtgtctcatcaagccacgcgggccaggtctctctccttcaccaaaaccgccatccgcgccgagaaaacagagtcctcctctgctgccccagccgtgaaagaagctccagttggattcactcccccgcagctagacccaaacacaccatcaccaatcttcgccggaagcacaggaggtctcctccgtaaagcacaagtagaggaattttacgtgatcacatggaactcaccgaaagaacaaatctttgagatgccaacaggaggagctgcgataatgagagatggaccgtttctattgaaactggctaggaatgatcagtgtttg

SEQ ID NO: 163904 - DNA, 244 bp, Arabidopsis thaliana columbia
cacagaaaaacctagaaagctctagagagaaagatagagagagatggaaggtaaagaagaagatgttagagtcggagctagcaggggtccggagaggcaaccgatcggaacttcggctcagagtgacaaggactacaaagagccaccacctgcgccgttgttcgagcccggcgagctagcttcatggtccttctggagagctgggattgctgagtttatagcttcgtctctgttcctgttcatt

SEQ ID NO: 163905 - DNA, 456 bp, Arabidopsis thaliana columbia
  unsure (1)..(456): unsure at all n locations
atacgctcaagtgtgggagcaatctcagatccctccatgaaaacaacgctttataagatgactcattttctgaaacgaactcaactccaagtgtgacacattctcaacgagagatcgtgatcgtacttatatacacacacgcacacttgcaaagcttgggaggaagaagtgatggacaagtatgaggttgtgaaggatttgggagctggaaatnttggtgtggctcgtcttcttagacacaaagagaccaaagagctcgttgctatgaaatacattgagagaggtcgcaagattgatgagaatgtggcaagagagattatcaatcatagatcacttaggcatcctaatatcatcagattcaaggaggtgattctgactccaactcatcttgcaattgtaatggagtatgcttctggaggagagctctntgaaagaatctgtaatgctgggagattc

SEQ ID NO: 163906 - DNA, 378 bp, Arabidopsis thaliana columbia
ggtacttgcactaatgtttctgtctttgaaactttcaattttgatcttccccatcatgggatgacggttgaaaacgttatgggggttgtatgttccgcatctgagcttgggaatacttggtgagactagccaactgtttggccgtgccctacacatgatcgatgtgaggagactatggataaaactgagacttaccaaaacatggaacttccaagaaagagcaaagaacgcacttgcatcagtctcactaggaaaatcttcatcacaatcagcctaaaagggtgatttagaaatccttcactgtcaatgagcttagtttagattactttactttactgtctgtgagagatcctttgactgtcatgtttctataccttt

SEQ ID NO: 163907 - DNA, 283 bp, Arabidopsis thaliana columbia
  unsure (1)..(283): unsure at all n locations
atcctttcctttcattgtagttaaacaaatatttcgattatggccacatcanctatccggcagtcctccttcggcgggcaagcaagtctcaagccctccagcgacctcatccaaaaggtgggcgtcttgggcggtggccgtgtgaccatgcgtcgtaccgtcaagtctactccccaaagcatctggtatggaccagaccgtcccaagtacttggtaccattcttggagaacacatcctgtttactcaactggaataattccctatagactactgcttttacac

SEQ ID NO: 163908 - DNA, 380 bp, Arabidopsis thaliana columbia
gagtgagcttcacggtcagacaaaagctgactctacgctctctcaaaagtcgaatatgccaaattcgatccgttttccggggataatctccgatctagatccgatggcgaaagaaccagttcgtgtgctcgttactggagctgcaggacaaatcggatatgctcttgtacctatgattgcaaggggtatcatgcttggtgctgaccaacctgttatcctccacatgttggatattcctccagctgctgaagctttgaacggtgttaagatggagttgatcgatgctgctttccctcttcttaaaggtgttgttgctacaactgatgccgttgagggatgtactggagtcaatgttgctgttatggttggtggtttccctc

SEQ ID NO: 163909 - DNA, 70 bp, Arabidopsis thaliana columbia
gcgtaggaattgatgcaggtgatcatgtttggtgtgctagataccttcttgagagaatcacagaacaagc

SEQ ID NO: 163910 - DNA, 303 bp, Arabidopsis thaliana columbia
ggtacttgcactaatgtttctgtctttgtaactttcaattgtgatcttccccatcatgggatcacagttgaaaacgtgaggggcagtgtatgatcctcatctgagcttgggaatacttgctgagactagccaactgtttgtccgtgccctacacatgatcaatgtgaggtgactatagataaaactgtaacttaccaaaacaaggtactttcatgaaagagcataaaacgtacttgcatcagtctcactaggaaaaatcttattacattcatcctataagggtgattttaaaaattcttcact

SEQ ID NO: 163911 - DNA, 137 bp, Arabidopsis thaliana columbia
caccaatcagtcagccagttccaaacaggtcatttagggaacttggacttgatggtgatgatgtggacatcccgtggtgggagcgtaatataaaataaaagattggagcaggttcctttggcactgcccaccgtgct

SEQ ID NO: 163912 - DNA, 458 bp, Arabidopsis thaliana columbia
tttggacaccgtgtgtacaaaaactatgaccctcgagctaaagtcatcaagaacctggctgatgaagtattttccattgttggaaaggatcctctaattgaggttgctgttgcacttgagaaggcagctctctctgacgattactttgttaagagaaagctgtatccaaatgttgacttctactctggattaatatacagggcaatgggatttccaccggagttcttcacggtcttattcgcgattcctcgcatggctggatacttgtcacattggaaagagtcactggatgatcctgacaccaagatcatgagaccacaacaggtgtacacaggcgtgtggctgaggcattacacaccagtgagagagagaatagtgacggatgactcgaaagagtcagacaaattgggtcaagtcgcgacttcaaatgcatcaagaagacgtttggctggatcttc

SEQ ID NO: 163913 - DNA, 187 bp, Arabidopsis thaliana columbia
aggcagcccatggtacggatccgaccgagtcatgtacttgggtccattctctggcgagtcacggagctaccttaccggagagttgcccggaaactacggatgggacaccgctggactttcagctgatcccgagacattctcaaggaaccgtgagctagaagttatccacatcatgtgggctatgctc

SEQ ID NO: 163914 - DNA, 181 bp, Arabidopsis thaliana columbia
cggacgcgtgggttttttttttgagtattgatttaattttatgtctctcatacatatgtggatggtatacacataaacggggaggtgctcgatgtcgatttgagacgtagttcgtgtgttgtgcttgtataatttccactgaaaagaacgttttctaaataaaaaattcattttttaaata

SEQ ID NO: 163915 - DNA, 448 bp, Arabidopsis thaliana columbia
gacaatggcagcagctatggcaacagcaaccaagtgcatgtctctaaacccatctcctcctaaactgcaaaaccaaaccaaatccaaaccattcatctccctaccaaccccaccaaaaccaaacgtctctctcgccgtcacaagcaccgccctagccggagccgtcttctcttccctcagctactctgagccagctttagccatccaacagatcgctcagctcgctgcagcaaacgccagtagcgacaaccgtggcttagctcttctccttcccatcgtcccagccattgcatgggtcctttacaacatcctccagccagctattaaccaggtcaacaagatgcgtgagagtaaaggtatcgttgttggtctaggtattgggtgtggtcttgcagcgtcagggcttttgactccacctccggaggcttatgctgcggcagaagcggcg

SEQ ID NO: 163916 - DNA, 459 bp, Arabidopsis thaliana columbia
ctagctagtaaacagtattttctatataccaaaaatggcttcaagttccatagctcttttcttggctctcaatcttctctttttcacagcaatctccgcctgtggtagctgtactccgtgcggcggaggttgcccctctcccaagccaaagccaactcctaaaccaaccccaagccctagctctggctcgagcaagtgccctaaagacaccctcaagctcggtgtctgcgctaatgtgctcaacggcctcctggacttgacccttggcaagccaccggtcgagccatgctgcagcctcatccaaggactcgctgatgttgaggcagccgtttgtctctgcaccgctcttaaggctaacattcttggaatcaacttgaacctcccaatatctttaagtctactccttaatgtttgcagcaaacaacttcctcctggcttccaatgctaaaaaccatattg

SEQ ID NO: 163917 - DNA, 223 bp, Arabidopsis thaliana columbia
atgagaaactcaacgatttggctaaacaacacatcgatttaattggaccgatgttgaacgaattggggagaacatctcctgcatgagcgcctttccaattcaccgtctttgatttctacaacgcgattcttactaggacgcagaggaaccaaaacttccgatttttcgttacgaacgcatcgtgctgcggagctgggacacatgatgcttatggttgcggcat

SEQ ID NO: 163918 - DNA, 294 bp, Arabidopsis thaliana columbia
cttcttcgttgcagcttcgtggaaattattttctctttctcttccattattatcttaaagtgagaaatcaataagatgttggagaaagagtttttcacggagtatggtgaagcaagtcaatatcagatccaagaagttgttggcaaaggaagctacggagttgttgcttctgcggaatgtccacacacgggaggcaaagtagccatcaagaagatgacaaatgtgtttgaacatgtctcacatgctttccgtatcctcagagagatcaagcttctcatgcttcttctacatcct

SEQ ID NO: 163919 - DNA, 384 bp, Arabidopsis thaliana columbia
tcgagtttctagggacaacgccagggaagccttattcccttcaaacgaatgtcttcgttaggggaagtggcgaccgaaatgtcattggaagagaaatgaaatttaccttgtggtttgaccctactcaagattttcaccattacgcaatttggtggaaccctaaccaaattgtattctttgtatactatgtaccgatacgtacatataatagaaagattgaagctatatttcccacatgaccgttgtgggtttacggatcgatatgatatgcatcatacttgtccacataaaattgtatgatcttagtcaattttttgtttccaaccatttttggctttatttcaaaatacttttatctatcgggaggctctccgtatttttttt

SEQ ID NO: 163920 - DNA, 213 bp, Arabidopsis thaliana columbia
tatctttcttctaaacaggctcttttcgatttatctgctttccgccaatattaccaggactctttgaatgttaagttgaatgaaggtggcgatgttgagaatccgtggttttttttcggagcttcttattctggagctttaagtgcttggttccggcttaagttccctcatttgtcctgcgtaattccttgctatttcttgcagtttttcttt

SEQ ID NO: 163921 - DNA, 354 bp, Arabidopsis thaliana columbia
aacttgaagaagaaaaaaaatctttttaaagagtctttgaagatccatggcgatgtctcatgtgcagcctatgctactgctggggggatcactcttcttcttaccggctttgcgtggcgccatagatttcgaatactgcgccaaaaatggaaacgattacggaaccgtcactagcattgtggtctctccatctgttgggcctcacgaaaacccaaccatcactataaatttattcggttctgcaagcaaaaacatccccgcgggaacccttgtgtacgtagcctttagagatggggaatttaccgtgcttttaaaaacttacaacctttgtgatgtgagtgcatgtaacaatga

SEQ ID NO: 163922 - DNA, 348 bp, Arabidopsis thaliana columbia
ggcttacaacaacaaatcttaaacgttttactttgtgctgcactactcaacctcaatggccagctcaacaatggatgtgtgctcgcctgccttcgccggtaaggccgtcaagctttcccccgcggcatctgaagtccttggaagcggccgtgtgacaatgaggaagactgttgccaagccaaagggcccatcaagcagcccatggtacggatctgaccgtgtcaagtacttgggtccattctctggcgaatcaccgagctaccttaccggagagttccccggagactactgatgggacaccgccagactttcacatgacccctatacatttccaaggaacctttaact

SEQ ID NO: 163923 - DNA, 436 bp, Arabidopsis thaliana columbia
gaaaatggtgggagcgactgtagttagtaaatgtactcccctatgtgtggcttcgccgccggggagaaactcggcaggggtgaggccacactgttctccagccagggttaattttagaacagcgttggccgcatttcgtcctcagttccgtcttttctctcgcaattccgcgtctcgccgccgtcttcgcgcttccagctccgccgaatcgggaatcttccttcctcaccttgtagcttctatggaggacgttgaggagacttacattatggtgaaacctgatggcatacaacgaggccttgtaggagaaatcatttctcgctttgagaaaaaggggtttaaacttattgggctcaagatgtttcaatgcccaaaagaattggctgaggagcattataaggatcttagtgctaaatcattctttcctaacctgatt

SEQ ID NO: 163924 - DNA, 292 bp, Arabidopsis thaliana columbia
taaagaaaatggtcgtcgaggagtcatcatgcttttacaagaacggagactcgccagtggaggctcgtatgaaggacctgctcgctcgcatgactttgccggagaagatcggtcagatgactcaaatcgaacgcagagtcgcttctccctccgcctttacagatttcttcatcggaagtgtactaaacgctggaggtagtgtaccgttcgaggacgctaagtcatcggattgggctgatatgattgatgggtttcagcgatcagcgttagcgtcgcgtttgggaatttcaat

SEQ ID NO: 163925 - DNA, 454 bp, Arabidopsis thaliana columbia
ttccttaaattcttaatgacctaactactaagagtatctgattcactttcttcacactctccgaggctcatcttcgcttcttccctagctcttatctggacacaatgatggacctaacgaaactgaagcctccacagatcactttttattgctcggcgttttccgtcttgctcacacttcatttcacgatacagcttgtatcgcagcatctcttccactggaagaaccctaaggaacaaaaggctatactcatcattgtgcttatggctcctatctacgccgttgtttcctttattggtttgttagaagtcaaaggaagtgaaaccttcttcctctttcttgaatccatcaaagaatgctacgaagctcttgtcattgccaaattcttggcattgatgtatagttatctaaacatatctatgagcaaaaacattttgcctgatggaatcaaagg

SEQ ID NO: 163926 - DNA, 445 bp, Arabidopsis thaliana columbia
tttttaataatctaactactaattttttttattcactttcttcacactctccgagtgtgatcttttctaaatgccgagggcttatctaaacacattgatttacctaacgaaactgaatcctccacagatcactttttattgctcgtcgttttccgtcttgctcacactttatttcacgatacagcttgtatcacatcatctcttccactgtaagaaccctaaagaacaaaatgctatactcatcattgttcttatggctcctatctactccgttgtttcctttattgcctagttataagtcaaaggaagttttaccttcttcctttttcttaaatccatcaaataaatcttcaaatcttttgtcatttccaaatatatttgacatttaaatatatctaatcttatacatatttataatctaaatcattttttttaattatatatt

SEQ ID NO: 163927 - DNA, 193 bp, Arabidopsis thaliana columbia
tttatggaatctaattggtgtgaggaaacttaatgtgtaacgatgtggctacaaaaatagaatatgaataaatactaaaaaagtttagttaccctgagacagctacataaaggttcttatgtttatgacaagagtgactgtctaatacaagctaaagtacgtcctaaagtttcaggacccatacttacaaata

SEQ ID NO: 163928 - DNA, 188 bp, Arabidopsis thaliana columbia
  unsure (1)..(188): unsure at all n locations
atttccgacccaagcgtcccgtcaattatgggatacagccttatcgctacattcatttctagacggaattgatgatcatgatgttnaggattatattaaaacagcgctggctcaatcatatcattacttgaagaaatcacaaattacagagaaccctctcggtgatcactttaaaatgtttcgtcaca

SEQ ID NO: 163929 - DNA, 460 bp, Arabidopsis thaliana columbia
attcccggcccggccacccgagctttactacaaacctactctctacacatcttctctctctctcaagagctagtcatggccgaactgataacttcttttctctggctgacaattttattcactttcgtttgtctcactatgtcaaaagaagctgagtaccatccagaaagttatggaccaggaagtctgaaatcataccaatgtggaggacaatgcacaaggagatgtagcaacacaaagtatcataagccatgcatgttcttctgccaaaagtgttgtgctaaatgcctttgtgtccctccaggcacgtacggcaacaaacaagtgtgtccttgttacaacaactggaagactcaacaaggtggaccaaaatgtccataaacaaaaacattgagagagaaaccccaatctgtttcctattttatttaattatttccagtatgcttttgttgtcgtgatg

SEQ ID NO: 163930 - DNA, 453 bp, Arabidopsis thaliana columbia
acgcaacaatatttgttggcggcattgaccctgatgttattgatgaagacctcagacaacctttttcccagtttggagaggttgtttcagtgaagatcccagtagggaaaggatgtggatttgtccaatttgctgacaggaagagtgctgaagatgctatcgagagtttgaacgggacagtcatcggcaagaacactgtcagactctcctggggacgaagcccaaacaagcagtggagaggagactcagggcagcagtggaatggaggatactcacgaggacatggttacaacaatggaggaggatatgctaaccaccacgactccaacaactatcatggggagaattgaagagactcatcaagtgatcatcttcatcatggtttcacatatcaaagctaaaacctgtagtcgaaagaagaattttgttagatggatttgattttgatagact

SEQ ID NO: 163931 - DNA, 348 bp, Arabidopsis thaliana columbia
aacctccactctgtttgtagcctctgaccaagttggcaaggttccattgtattggggaataagagctgatggctatgtggcattgactgatgatgttgacttactaaaaggtgcttgtggcaagtctcttgcgtctttccctcaaggctgttattactcgacggcattaggtgggcttaggagcttcgagaaccctaagaacaagatcactgcagttcctgctaatgagggagaaatttggggagctaccttcaaggtggaaggagcaacagttcttgcacattgaaaatgaaagagaaacacaaaagacgtttcatgtctctcaaagctcttgaactgtaacagcac

SEQ ID NO: 163932 - DNA, 356 bp, Arabidopsis thaliana columbia
aggtaagagtgttgccatcatgaacccggccacgaggaagacacagtacaaggttcaagcatgcacgcaagaagaagtgaacgcggtgatggaactggcgaaatcagctcagaaatcgtgggcgaaaactcctctttggaaaagagctgagcttcttcacaaggctgcagcaatccttaaggacaacaaagctcccatggctgagtctcttgttaaagaaatcgctaaacccgccaaagattctgttactgaggttgtgaggtctggagatttgatctcttattgcgctgaagaaggtgttaggatcttaggtgaaaggaagtttcttctctccgatagcttccccggtaatgacc

SEQ ID NO: 163933 - DNA, 469 bp, Arabidopsis thaliana columbia
tcggcaaaagaagaagagaaacaacaagaagtagtaatggcttcctctatgctctcctccgccgctgtggttacatccccggctcaggccaccatggtcgctccattcaccggcttgaagtcatccgctgcattcccggtcacccgcaagaccaacaaggacatcacttccatcgcaagcaacgggggaagagttagctgcatgaaggtgtggccaccaattggaaagaagaagtttgagactctatcttacctccctgaccttagtgacgtcgaattggctaaggaagttgactaccttctccgcaacaagtggattccttgtgttgaattcgagttagagcacggatttgtgtaccgtgagcacggaaacactcccggatactacgatggacggtactggacaatgtggaagcttccattgttcggatgcaccgactccgctcaagtgttgaaggaagtgaagaatg

SEQ ID NO: 163934 - DNA, 457 bp, Arabidopsis thaliana columbia
caattcttaacttcgatctctaacctgcaaaaacattcattacactcttcagatcctccttccctttagccgccaaagcaaaaccgtcatcgatctctcttcttttatacagtcaaaaattagattcagattcttcaagaactctgtttttctagtagcatggtgtgtttggtctcccgtacgggtcgtcaatcccaaagatacaacaagggacggcgtcaagtcgtcgggtgtattccatacagactcaagatttcgagtgatggcacaattagcgacgaatttgaggttcttgttatttcatcacaaaagggtcacgctctgatgttcccaaagggtggttgggagcttgatgaatctgtagaagaagctgcgtcaagagaatctctagaagaagctggagttgttggaaacgttgagagacaacttggaaaatgggatttcttaagcaaaagca

SEQ ID NO: 163935 - DNA, 259 bp, Arabidopsis thaliana columbia
cggaaacatggtgaaagcagcataatctggtagttgtggtggtgacctagtagagaatgcgaaaatgtggtgaacagtaaggtgcgaatggaggcggttgcggtgaggacgccatcatgtggcttaatatcaaaactgtaaattacaaataaagttgtactttgttgtttgtttatgcaatgaatggttcgtttctgttaaaaaaacaaattataatatatataattttaaaaaaattttatatatattcattatttat

SEQ ID NO: 163936 - DNA, 284 bp, Arabidopsis thaliana columbia
agctcctgggttatgaaacacggaagactttttgttgttcacaactaggagttaggtcaagggagaggaaacacagaaccacagtggtatctgtggatggagccaaccaagaacttacacacttattctattgtgtggagaccacagcacatcatagctatgggtgataatgatccaatcagggcgttcgacaatgcaaagcacctgggggtttcattgcccacgagccaaccaatgaagatatactccagtttatggcatgcagatacaccgggctacaagag

SEQ ID NO: 163937 - DNA, 387 bp, Arabidopsis thaliana columbia
gcgtcgtaagaagagaaacaccaggaagtggtaatggcttcctctatgctctcctccgccgctgtggttacatgcccggctcaggccaccatgggcgctccattcaccggcttgaagtcatccgctgcattcccggtcacccgcaagaccaacaaggacatcacttccatcgcaagcaacgggggaagagttagctgcatgaaggtgtggccaccaattggaaagaagaagtttgagactctatcttacctccctgaccttagtgacgtcgaatcggctaaggaagttgactaccttctccgcaacaagtggattccttgtgttgaattcgagttagagcacggatttgtgtaccgtgagcacggaaacactcccggatactacgat

SEQ ID NO: 163938 - DNA, 464 bp, Arabidopsis thaliana columbia
gagatttgtagattttatcgatcgaagatgaatactgacatcactgccttggagaaggcacaatacccagtggttgatcggaatcctgcttttactaaagtcgtcggcaatttcagcactctcgattacctccgtttctctactatcaccggcatctccgtcaccgtcggctatctctctgggattaagcctgggattaagggaccgtcgatggttactggaggattgatcgggctcatgggaggtttcatgtatgcgtaccagaactctgccggtagactcatggggtttttccctaatgatggtgaagttgctagttaccagaagcgtggtggtttctccaaatgaatgactttagtgttttattttctggatctggcttcattttggaatttgaaaccctctctttttctctgtaatttgattgcatttctctgctgtttgaggataatatgtgcctctgt

SEQ ID NO: 163939 - DNA, 470 bp, Arabidopsis thaliana columbia
gtctaccgcgttggtgatcttgatcgcaccattgagttttacactgaggtctttggtatgaagctgttgaggaaaagagatatccctgaggagaagtattctaatgcttttcttggttttggacctgaaacatctaactttgttgtggagctcacatataactatggtgttagctcatatgatattggaactggctttgggcattttgccatttcaactcaagatgtttccaaactggttgagaacgtccgtgccaagggtggaaatgtgactagggaacctggtccagtcaaaggtggaggcagtgtcattgcgtttgtgaaggaccctgatggctacacttttgagctcatccagagaggtccaactcctgaacctttctgccaagtcatgcttcgtgttggtgatctcgaccgtgccatcaaattctatgaaaaggccctcgggatgagactcttgagaaagattga

SEQ ID NO: 163940 - DNA, 468 bp, Arabidopsis thaliana columbia
aaaaaaaaaaacacaaaaagtttcaatggcctcctccacaatggctctctcctcccctgccttcgccggaaaggctgtgaacctttcccccgcggcatctgaagtcctcggaagcggccgtgtgacaatgaggaagactgttgccaagccaaagggtccatcaggcagcccatggtacggatccgaccgagtcaagtacttgggtccattctctggcgagtcaccgagctaccttaccggagagttccccggagactacggatgggacaccgctggactttcagctgatcccgagacattcgcaaggaaccgtgagctagaagttatccacagcaggtgggctatgctcggagccctaagctgcgtcttccctgagcttttggctaggaacggagtcaagttcggagaggccggttggttcaaggcccggtcacagatctttagcgatggaagactcgattacttggg

SEQ ID NO: 163941 - DNA, 415 bp, Arabidopsis thaliana columbia
catttctttagctcaaccttcattactaatctccttttaaggtttctttcgtgaatcagatcggaaaaatggaatcttttgggggcacatctgaatccgtcaacgagggacatcccgacaagctttgtgatcagatctccgacgctatcctcgatgcttgccttgaacaagaccctgagagcaaagttgcttgtgagacttgtaccaagactaacatggtcatggtttttggagaaatcaccaccaaggctaacgttgattacgagcagattgttcgtaaaacatgccgcgagattggattcgtctctgctgacgttggtctagatgctgacaattgcaaggttctgagtaacattgaacaacagagtcctgacattgcacaaggtgttcatggtcatctcaccaagaagccaga

SEQ ID NO: 163942 - DNA, 476 bp, Arabidopsis thaliana columbia
ctctctagagagagctccattccaatcaaagctgtaaacacacttcagaagatggagatcactaacgttaccgagtatgatgcaatcgcaaaggcgaagttgcctaagatggtatatgactactatgcatctggtgcagaagatcaatggactcttcaagagaacagaaacgcttttgcaagaatcctcttccggcctcggattttgattgatgtgaacaaaattgatatggcgactaccgtcttggggttcaagatctcgatgccgatcatggttgctcctactgcctttcaaaagatggctcaccctgatggggaatatgctacggctagagctgcgtctgctgctggaaccatcatgacactatcttcatgggctacttcaagtgttggagaagttgcttccacagggccaggaatccgattcttccagctctatgtatacaagaacaggaaagtggttgagcagctcgtgag

SEQ ID NO: 163943 - DNA, 462 bp, Arabidopsis thaliana columbia
caaagagctcaaccaccatttccctcatcatcatcctcctcatcagcctcgcagaagcaaacctcttaagctcgcctacaccgaccaacaactttggctcatgtcccagaaacccattgcaactaggcgtatgtgccaacgtccttggcctagccaatgttacagctggcgaccccagagcacgacagtgttgcactgccctcaatggcctcactaatgttcaagtaaccgattgtctctgctttatcttcaggccgattccgttggttttcggtattgatgtggccgttagagaaatcttttttgcttgcaatagggtttttcctatcggtttccagtgtccaccaccacagtaactactacttaattcccctaaataagagccctatccggtgtttccttgcactataagtttgctggtaccaaaagtatgggtttatctattaatgttttacagtgttg

SEQ ID NO: 163944 - DNA, 477 bp, Arabidopsis thaliana columbia
aaaaaaaaaaacacaaaaaagtttcaatggccgtctcaacaatggctctctcctcccctgctttcgccggaaaggctgtgaacctttcccctgcggcatcagaagtccttggaagcggccgtgtgacaatgaggaagactgttgccaagccaaagggtccatcaggcagcccatggtacggatccgaccgagtcaagtacttgggtccattctctggcgagtcacccagctaccttaccggagagttccctggagactacggatgggacacagctggtctatccgctgaccccgagacattcgcaaggaaccgtgagctagaagttatccacagcaggtgggccatgctcggagccctaggctgcgtcttccctgagcttttggccaggaacggagtcaagtttggagaggcagtttggttcaaggctggttcacagatctttagcgatggagggctcgattacttgggaaacccta

SEQ ID NO: 163945 - DNA, 444 bp, Arabidopsis thaliana columbia
aaaaaaaaaaaaacacaaaaaagtttcaatggccgcctcaacaatggctctctcctcccctgctttcgccggaaaggctgtgaacctttcccctgcggcatcagaagtccttggaagcggccgtgtgacaatgaggaagactgttgccaagccaaagggtccatcaggcagcccatggtacggatccgaccgagtcaagtacttgggtccattctctggcgagtcacccagctaccttaccggagagttccctggagactacggatgggacacagctggtctatccgctgaccccgagacattcgcaaggaaccgtgagctagaagttatccacagcaggtgggccatgctcggagccctaggctgcgtcttccctgagcttttggccaggaacggagtcaagtttggagaggcagtttggttcaaggcttgttcacagatctt

SEQ ID NO: 163946 - DNA, 377 bp, Arabidopsis thaliana columbia
gtcgaccgctcctctctccggcttctttctcacttcactttctccttctcaatcttctctccagaaactctctcttcgtacttcttccaccgtcgcttgcctcccacccgcctcttcttcttcctcatcttcctcctcctcgtcttcccgttccgttccaacgcttatccgtaacgagccagtttttgccgctcctgctcctatcattgccccttattggagtgaagagatgggaaccgaagcatacgacgaggctattgaagctctcaagaagcttctcatcgagaaggaagagctaaagacggttgcagcggcaaaggtggagcagatcacagcggctcttcagacaggtacttcatccgacaagaaagctttcg

SEQ ID NO: 163947 - DNA, 432 bp, Arabidopsis thaliana columbia
  unsure (1)..(432): unsure at all n locations
agttagtcaccaaaaaaaaaaaaaaacacaaaatgtttcaatggccgcctccacaatggctctctcctcccctgccttcgccggaaaggctgtgaacctttcccccgcggcatctgaagtcctcggaagcggccgtgtgacaatgaggaagactgttgccaagccaaagggtccatcaggcagcccatggtacggatccgaccgagtcaagtacttgggtccattctctggcgagtcaccgagctaccttaccggagagttccccggagactacggatgggacaccgctggactntcagctgatcccgagacattcgcaaggaaccgtgagctagaagttatccacagcaggggggctatgctgggagccctaggctgcgtcttccctgagcttttggctaggaacggagtcaagtttcggagagggcggtt

SEQ ID NO: 163948 - DNA, 467 bp, Arabidopsis thaliana columbia
caagctggaccttgaggagaacaagattgttgagttcatcaagtttgacgtgggtaacgttgtgatggtgactggaggcagaaacagagggcgtgtgggtgtgattaagaaccgtgaaaagcataagggaagctttgagacaatccacattcaagactcaacagggcatgagtttgccacaaggttggggaatgtgtacacaatcggcaaaggaacaaagccatgggtgtctcttccaaagggcaaaggtattaagctgaccatcattgaggaagccaggaagagacttgcttcccagcaagctgcttgaaagtccaactgctttgaatcatcaagacccgtttcttttacagactcgctgcttgtctcagtttgtgagtctatttcttttcttatgttgttggatttcaaaacccatcaaaaaatagctgagtagtgctttttgtaatggttggattggggatttt

SEQ ID NO: 163949 - DNA, 476 bp, Arabidopsis thaliana columbia
aagaagagaaacaacaagaagtagtaatggcttcctctatgctctcctccgccgctgtggttacatccccggctcaggccaccatggtcgctccattcaccggcttgaagtcatccgctgcattcccggtcacccgcaagaccaacaaggacatcacttccatcgcaagcaacgggggaagagttagctgcatgaaggtgtggccaccaattggaaagaagaagtttgagactctatcttacctccctgaccttagtgacgtcgaattggctaaggaagttgactaccttctccgcaacaagtggattccttgtgttgaattcgagttagagcacggatttgtgtaccgtgagcacggaaacactcccggatactacgatggacggtactggacaatgtggaagcttccattgttcggatgcaccgactccgctcaagtgttgaaggaaggtggaaaatgcaagaaggagtacccg

SEQ ID NO: 163950 - DNA, 479 bp, Arabidopsis thaliana columbia
caatcttctaacgacacttttcctaccgtcatgcacattgcagctgcaaccgagattaattcgaggctcatccctagtttaaaaactttgcatagcactttggaatctaagtccttcgagttcaaagatattgtgaaaattggaagaactcacactcaagatgctacacctttgacactaggacaagaatttggtggctatgctactcaagttaagtatggactaaatagagtcacctgcactcttcctcgcctctatcagcttgcacaaggtggaactgcggttgggacaggattaaacactaagaaagggtttgatgtaaagatagctgctgcagtagctgaagaaacaaacttgccatttgtcactgcagaaaacaagtttgaagctctggctgcacacgatgcttgtgttgaaaccagtgggtcacttaacacaatcgccacatcgctgatgaagatcgccaatgatatacgttt

SEQ ID NO: 163951 - DNA, 404 bp, Arabidopsis thaliana columbia
ctctgttgtgttgaaacagaagaagcagagtttcaacaaagtcagaggctttagagttcttgctctccaatctgataacagtactgtcaatagagttgagactcttctcaatttagacaccaaaccttactctgacaggatcattgctgaatacatttggatcggaggatctggaattgaccttagaagcaagtcaaggactatcgaaaagccggtggaggatccttctgagctacctaagtggaactatgatggttcgagtaccggtcaagcacctggtgaagatagtgaagtgattctatacccgcaagctatcttcagagatcctttccggggaggcaataacatcttggctatctgtgatacttggacaccagctggtgagccaattccaacaaacaaac

SEQ ID NO: 163952 - DNA, 431 bp, Arabidopsis thaliana columbia
tttacctttgagatggtaggggattcttgaactcatgattacagagggcgtaaggtttgaagcggagaggcatcagggataaagtagagattcaaacagtttcagggtttcaaacaggataacagggatacacatgattaaaagtttgaaaagggttacaaaacagaattagagagtaaaagcagagacactaccgggatgcatagagaagatacctccacttctcggtgaggtgaaaacagttgaaaacgccggaaaaaggtcactggaactccatctttgcccgttgtgtaaagccatttttggaaggaactgttggataattctgttttagtaaaaagaggtagctgagatcttggttttcaaaagtttccaactgctaatagactgcattggagaaagtgcctgggagaaaactcaacgctcttttt

SEQ ID NO: 163953 - DNA, 410 bp, Arabidopsis thaliana columbia
gtttggtttacaggtacaagcgtattataactttcagcctttaacggcgtacctcgccgttaactatatggatcggtttctttacgctcgtcgattaccggaaacgagtggttggccaatgcaacttttagcagtggcatgcttgtctttagctgcaaagatggaggaaattctcgttccttctctttttgattttcaggttgcaggagtgaagtatttatttgaagcaaaaactataaaaagaatggaacttcttgttctaagtgtgttagattggagactaagatcggttacaccgtttgatttcattagcttctttgcttacaagatcgatccttcgggtacctttctcgggttctttatcttccatggctacagagattatactcttcaacataaaagaagcgagc

SEQ ID NO: 163954 - DNA, 451 bp, Arabidopsis thaliana columbia
  unsure (1)..(451): unsure at all n locations
atggcggttccgaacttcagcttatcctcgacaattacactggcacaggatttcaatcaaaggggtcatatttgtttggacattttagtatgcacataaagcttccagctggtgacacagccggagttgtcacagctttctatctatcatctaccaacaatgagcatgacgagatagactttgagttccttggaaacagaacaggacaaccagctatattacagacaaatgtattcacaggaggaaagggaaacagagaacaacgaatctatctctggtttgatccttctaaggcttatcacacttactcaatcctttggaacatgtaccagatcgtattctttgttgacaacataccaatccgaacgttcaagaatgctaaggatctaggagtacgtttnccattcaaccaaccaatgaagctttactcaagcctttggaacgcgatgat

SEQ ID NO: 163955 - DNA, 424 bp, Arabidopsis thaliana columbia
ttcaccacataaaaactcataaactcgatcgttctcaaagctaaacgaaaaacttaaaacccaaatcttatcactactctaaaagaatcttcatcatggcctcagtaacctcagccaccgttgcaatcccatctttcaccggccttaaagcctcaaccatcaaatcatccgccaccgtcagaatccaaactgctgctgttgcatcaccgaagcttacagtgaagtcatctctaaagaacttcggagtcgcggccgtagcggctgcagcttcaattgctttggccggaaacgccatggcaatagaagttctcttgggaggaggggatgggtcgttagcttttatttccaacgacttctctatagctaaaggagagaagattgtgttcaagaacaacgctggttacccacacaatgttgtcttcga

SEQ ID NO: 163956 - DNA, 433 bp, Arabidopsis thaliana columbia
ctgctgctgagcaaatcttcagcgctggtggcttgaggatgagaccgggtttggtattccttgtatcacgagccactgcggaattagcaggcttaaaggaacttacagtagaacatcggcgtttaggtgagatcattgagatgattcacaccgcaagtttgatacacgatgatgtgttagacgaaagtgatatgcgaagaggaagggaaacggttcacgagctattcggaacaagagtagctgtattagctggggatttcatgtttgctcaagcatcatggtacttagcaaatctcgaaaaccttgaagtcattaagctcataagtcaggtgatcaaagattttgcaagcggtgagataaagcaagcatcgagtttattcgattgtgatgtcaagcttgatgactacatgcctaagagttactacaagacagc

SEQ ID NO: 163957 - DNA, 491 bp, Arabidopsis thaliana columbia
gcgtccgcccttcgtttacagcaaaaaatcgaaaatggttgtttcagccgccgcacgacctcttgtcaccgtccaaggacttgacggtgacatgagcaccgatcaatccaccaccgtcactttaccagacgtcatgactgctccagttcgacctgacattgtcaacttcgtccacgcccaaatctccaacaacagccgtcagccttacgcagtctccaaaaaggccggtcaccaaacctccgccgagtcctggggaaccggaagagccgtgtcacgtatccctcgtgttcctggtggtggaactcaccgtgccggtcaagcagcgttcggaaacatgtgtcgtggtggtcgtatgtttgctccgactaagatctggagacgctggcaccgtcgtgtcaatgtcaacatgaagaggcacgcgattgtttctgcaatcgctgctactgctgttccagctcttgtgatggctcgtggtcacaagatcgagaatg

SEQ ID NO: 163958 - DNA, 451 bp, Arabidopsis thaliana columbia
tcttatcacaaaccaaaaaaaaactttctttcaaaatcgttctctgaggcattttaacgaacagatggcggacttaaacggtgcgtattacggaccatcgattccaccgccgaagaaagtctctcacagccacggcagacgcggcggtggatgcggttgtttaggtgactgtcttggctgctgcggctgctgtatcttaagcgtcatcttcaacatcctcataaccatagccgtcttattaggcatagctgctctaatcatctggctcattttcagacccaacgctatcaaattccacgtcaccgacgctaaactcaccgaattcacactcgacccaaccaacaacctccgatacaatctcgatctcaatttcacaatccgtaaccctaaccgccggatcggtgtttactatgatgaaatcgaagtcagaggatactacggtgatcagcga

SEQ ID NO: 163959 - DNA, 478 bp, Arabidopsis thaliana columbia
  unsure (1)..(478): unsure at all n locations
agaagaatagtttgatcatcttgtgagaaaaataatggctgcttcagtgatgctatcttcggtgacattgaaaccagctggtttcacggtggagaagacggcggctagaggattaccgtcgctcacaagagctcgtccctccttcaaaattgtcgccagtggcgtcaagaagatcaagaccgacaagcccttcggaattaacggcagcatggacttgagggacggcgtcgacgcctccggcagaaagggcaagggatacggtgtttacaagtacgtcgacaagtatggagctaacgtcgatggatacagtcctatttacaacgagaacgagtggtcagcgagtggtgacgtgtacaagggaggagtcaccggattggcaatttgggcggtaactctcgccggaattcttgccggaggtgctcttcttgtgtacaacacangttgcttggctcagtaaatcttaaaggtggtagcgcat

SEQ ID NO: 163960 - DNA, 483 bp, Arabidopsis thaliana columbia
tgcctttatcgcccaaatcagggatcaagacgtcagcatatgtccaaatatccgcattgctgactgtggacacaaaattggtctaaatggtgttgacaatggccggatctggtttgataatcttcgaattccaagagagaatttgttgaatgcagttgctgatgtttcgtctgatgggaagtatgttagctcaattaaagatcctgatcagagatttggagcattcatggcccctttgacttctggccgagtcacaattgcatcaagtgcaatttattctgcaaaggtcggattatctattgctataaggtactcattatcgagaagagccttctctgttacagctaatggtcctgaagtcctcctccttgattacccaagccatcaaaggcgactgctaccactcctagcaaagacatatgctatgagttttgctgcaaatgaattgaagatgatttacgtgaagagaacaccggagaccaa

SEQ ID NO: 163961 - DNA, 390 bp, Arabidopsis thaliana columbia
caaccaaaaaaaagaaaacacaaaaacaaagtttataatggcttcctcaaccatggctttgtgctcccctgccttcgccggaaaggctgtgaagcctgccgcatcagatgtcctcggaagcggccgtgtgaccatgaggaagactgtcgccaagccaaagggtccatcaggcagcccatggtacggatctgaccgagtcaagtacttgggtccattctccggcgagcccccgagctaccttaccggtgagttccccggtgactacggatgggacaccgctggtctatccgccgacccagagaccttcgccaggaaccgtgagctagaagttattcacaggagatgggccatgctcggagccctaagctgcgttttccctgagctattggc

SEQ ID NO: 163962 - DNA, 377 bp, Arabidopsis thaliana columbia
  unsure (1)..(377): unsure at all n locations
caaaaataacctcacacgttacgagaaagaattctgcaagtattacaaggatttcctcagtcaaggtgttcgtccatccgcgctcaagaaggatgagctttaagctatttctgtttcaatgtgtttttcctatgttttactttgtgagtgaccaagattcatgaggtcttggttctaataaaaagagtttatttttcttctcatttttcattgtctacatgatttgccagatctacaaggctctggttataataaaatgatcctttgtgcctcttctagtacaaaaaaaaaaaaaaaaaaaaaaaaaaaaaaaaaaataaacataaaaaaataaaaaaataaaaaaattaaattcnnnaatattataaaaaaataaa

SEQ ID NO: 163963 - DNA, 371 bp, Arabidopsis thaliana columbia
attcttcttcaagtgccgggttctcgggtcgtttcttctaagtctagctagggataatggctactgtcactactcatgcctcggcctcgattttccgaccttgtacttcaaagccaagattcctcaccggttcttccggtaggttgaaccgcgacttgtcgtttacatcgatcggttcatcggccaaaacgtcgtcgttcaaggttgaagctaagaaaggagaatggttgcccggtttggcatcgcctgattatctcaccggcagtcttgccggtgacaatgggtttgacccgttgggtctagcagaggatccagcatgctagtgaagggtactgcagccggttatcatcaacctactattggctatgctc

SEQ ID NO: 163964 - DNA, 484 bp, Arabidopsis thaliana columbia
gagactttgtggccatggcagcctctctccaatctaccgctacattcctccagtcggcgaagatcgccaccgctccttctcgcggaagttctcacctccgatcgactcaagccgtcggcaaatcttttgggctcgaaacttcctcggctcgcctcacttgctccttccagtctgactttaaggacttcaccggtaaatgctccgacgctgtcaaaatcgccggattcgctcttgccacctctgctctcgtcgtctcgggagcaagtgcggagggagctccaaagagattgacctatgatgagattcagagcaagacatacatggaagtgaaaggaactggaacggctaaccagtgccctactattgacggtggctctgagactttctcgttcaaacccggaaagtatgcaggaaagaagttctgcttcgagcctacttccttcaccgtcaaggcagacagtgtaagcaagaacgctcctccaga

SEQ ID NO: 163965 - DNA, 478 bp, Arabidopsis thaliana columbia
caaaccaaaccctaaaccatctttctaacatgcgcttcttcacaagcaaaacatttcctttgtgatactcctcctcctcgggctccttgccgtctcttatgcttgtgattgtagtgaccctcctaaaccatcaccacaccctgttaaaccgccaaaacatcccgctaaaccacctaagccccctaccgttaaaccacctactcacaccccaaagcctcccactgtgaagcctccacctccatacattccatgccctcctccgccctatactccaaaacctccaaccgtgaagccaccaccacctccctacgtgaagccaccaccacctcccactgtgaagccaccaccacctccttacgtgaagccaccaccaccccctaccgtgaagccaccaccaccacccacgccgtatactccaccaccacccacgccgtatactccttcaccacccacggtgaagccaccaccaccaccggtc

SEQ ID NO: 163966 - DNA, 467 bp, Arabidopsis thaliana columbia
gtcgctctccctctcctctccctttgagaaatccctaactctttgctcttctcttcccggcgatctatctctccgatttgggtattgaaatggcaactcctatggttgaagatacgtcaagcttcgaagaggatcagcttgcttccatgtccaccgaagatatcactagagctactcgtcttctcgacaacgagattcgaattctcaaggaagacgcgcaaagaacaaatctagaatgtgattcttacaaggagaagattaaggagaatcaggagaagattaaactcaacaagcagctgccttacttggttggcaacattgtcgagattttggagatgaatccagaagatgatgctgaggaagatggtgcaaatattgatcttgactcgcaacggaaaggaaaatgtgttgtgttgaaaacgtctacacggcagaccatctttctaccagttgttggactcgtggat

SEQ ID NO: 163967 - DNA, 370 bp, Arabidopsis thaliana columbia
agcaactccatctccggagctctagattcagattttaacaatggcgattccgatgcctactcgccagctattcatcgacggcgaatggagagaacccatcttgaagaagcgaatcccgatcgttaatccagctactgaagaggtcattggtgatattcctgcagctacaacggaggacgtggatgttgctgtcaacgctgctcgaagagcattatcaaggaataaagggaaagattgggccaaagcacctggagctgttcgtgctaagtatttacgtgctattgctgctaaggtaaatgaaagaaagacggatctggcaaagctcgaggcgcttgattgtggtaaaccattggatgaagcagtatgggat

SEQ ID NO: 163968 - DNA, 391 bp, Arabidopsis thaliana columbia
acaatagtcatttctcttcgatttcttcaaactctcatcaaatcgtttatctgttctaaatttcgaagaagacgatgagtacaggcgcaggaagcggaacaaccaaaggtggcagaggaaagccaaaggccaccaaatccgtctctcgatcatctaaagccggtcttcaattccccgtcggaagaatcgctagattccttaaatccggtaaatacgccgagcgtgtcggtgccggagctccggtctatctctccgctgttctcgagtacctcgccgccgaggtgttggagctggcgggaaacgcagcaagggataacaagaagacacgtatagtaccaagacacattcaacttgcagtgaggaacgatgaaaagttaaacaaacttctggg

SEQ ID NO: 163969 - DNA, 467 bp, Arabidopsis thaliana columbia
gaaaaaccaaaagaagaagagaaacaacatgtatgatagtaatggcttcctctatgttctcctccaccgctgtggttacctccccggctcaagccaccatggtcgctccattcaccggcttgaagtcatccgcttctttcccggtcacccgcaaggccaacaacgacattacttccatcacaagcaacggaggaagagttagctgcatgaaggtgtggccaccaatcggaaagaagaagtttgagactctatcttacctccctgaccttagtgacgttgaattggctaaggaagttgactaccttctccgcaacaagtggattccttgtgttgaattcgagttggagcacggatttgtgtaccgtgagcacggaaacactcccggatactatgatggacgattctggacaatgtggaagctttcattgttcggtgcaccgactccgttaagtgttgaaggaagttga

SEQ ID NO: 163970 - DNA, 328 bp, Arabidopsis thaliana columbia
gcaggtcctcgtcgtctctcctccgctcattgttgccgcatctctctctaaacctctcaaggctctctctaaagccgcactctgtttctccagagccaaacccatttgtcctttccctcaaacctctcgacgaccaatctccgtatacaaatccccaatgaacaaccttttcaacagactcggattcgggtctcgtcctcaagcccaagctgacccatcttccgccgcaatcgcccaaggacccgacgatgatgttccgtcttcaggtcagcaattcgcgcaatttggcgccggttgtttctggggagtggagctagcttaccagaga

SEQ ID NO: 163971 - DNA, 467 bp, Arabidopsis thaliana columbia
gaactaactaacgacgccggagatggccgccacttcaaccgccgctgctgcttcttcaatcatgggtacccgggtggtttccgacattagctccaattcaagccggttcacagcccggttcggattcggaaccaagaaagcatctcccaaaaaggctaagacggttatctcagaccggcctctatggttcccaggcgcaaaatcacccgaatatctcgacggttcacttgtcggggactacgggttcgatccttttggtttaggcaaaccggcggagtatctccaattcgatttggattccttggaccagaacttagccaagaacttatacggagaagtgatcgggactcgtaccgaggcggtggaccccaaatcgacgccgtttcagccatatagtgaagtcttcgggctacaaagattcaaagaatgtgagctgattcacggtcggggggcaatgctcgccactc

SEQ ID NO: 163972 - DNA, 454 bp, Arabidopsis thaliana columbia
agacagacagtgaggtcttaaagaagatcaatgtctcaccatctacggataaggtgtcatctggcatgatggagatgatgttggaactaccatgtgaagtgaaatctgtagccatatcaattgaatatgataagggttttctgcatatagatgaatatcctcctgatgctaatcaaggattcgacattccatcggctttgataagcttccccgatcatcatgctagtttagatttccaagaagagctcagcaactcgcccttattatcaagtttaaaggaaaaatccttagtacgctcttacacagaagtattgctcgtacctttgacaacccctgattttagcatgccttacaacgtaatcacgatcacatgcaccatcttcgcattgtattttggatcattgctaaatgttctacgtagacgaattggtgaagaagaaaggtttcttaaaag

SEQ ID NO: 163973 - DNA, 461 bp, Arabidopsis thaliana columbia
  unsure (1)..(461): unsure at all n locations
aagagatcggaagagatggcttctacctccgcgatgtcattggtcacaccacttaaccagacccgttcgtctcctttccttaagccattacctctgaaaccatccaaggctttggttgcaactggaggcagagcacagaggcttcaagttaaggccctcaagatggacaaggctttgaccggtatctccgcggctgctcttactgcttcgatggtgattccggagatagctgaagctgctggttctggaatctctccttccctcaagaatttcttgctcagcattgcttctggtggcctcgtcctcactgtcatcattggtgtcgtcgtcggcgtctccaactttgaccctgtcaagagaacctaagacctatatatctttcttacatcattattgtaatctgttctccttctgtgtattcgtttcaatgttgcagcaatgaacttttggataaaananaa

SEQ ID NO: 163974 - DNA, 485 bp, Arabidopsis thaliana columbia
tccacctgcgctagctcccggactttctttcattggtttacctgcaatgggtctacaattctatatgtttgaagtccaaagcaaatgggttgctgcagtcttgtctggacgagttacacttccttcggtagatgaaatgatggacgatcttaagttgtcgtatgaaacacaagaagcgttaggtattcccaaaagatatacacataagttgggtaaatctcagtgtgagtacctcgattggatcgcagacctgtgtggattcccacatgttgaacattggagagatcaagaagtaactcgcggttaccagagacttggtaatcaaccagaaactttccgtgatgaatgggatgatgatgatctcatggaagaagcatacgaagatcttgctagactaaatctgatcaattttcatccttctcgttttctcgaatccggaagatgaagtttgactacgattgtaattgtgtctacttggttggttt

SEQ ID NO: 163975 - DNA, 479 bp, Arabidopsis thaliana columbia
ctcctttcctttcattgtagttaacgaaaagattacgataatggcaacatcagctatccagcaatcctccttcgccggccaaacggctctcaagccctccaacgaactcctccgcaaggttggtgtatccggtggtggccgtgtgaccatgcgtcgtaccgtcaagtctactcctcaaagcatctggtacggaccagaccgtcccaagtacttaggaccattctcggagaatacaccgtcctacctaaccggagaataccccggagactacggctgggacaccgctggactctcggctgacccggagacattcgctaagaaccgtgagcttgaagtaatccacagcagatgggctatgttgggtgctctcggatgcacattccctgagattctctccaagaacggtgttaaattcggagaagccgtgtggttcaaggcaggttctcagattttctcagaaggaggtcttgattaccttc

SEQ ID NO: 163976 - DNA, 480 bp, Arabidopsis thaliana columbia
cgcaaaaccacctaccttcttcgatttctccagaaatcctccttcaagttcatactcatggaagaagctaaagtggaagcaaaagatggtaccatctccgtagcttctgcattttccggtcaccaacaagctgttcacgatagcgaccataaattcctaacgcaagctgttgaagaagcttacaagggagtggactgtggtgatggtggcccatttggtgcggtgattgtgcataataacgaggttgtcgctagctgccacaatatggttttgaaatatactgacccaactgcacatgctgaagtcactgccattagagaggcatgtaagaaacttaacaaaatcgagttatcagaatgcgagatttacgcatcttgtgagccatgtccgatgtgcttcggagccatccatctctcgagactcaagaggttggtttatggagccaaagccgaagcagctatagccatcgggtttgatgac

SEQ ID NO: 163977 - DNA, 488 bp, Arabidopsis thaliana columbia
caaggagagaagagagaaagagagaaagagagactgagataatggcgtacagtgcgtgtttcctacaccagagcgcattggcttcatcagccgcacgatcatcatcttcctcctcatcccagcgtcacgtgtcgctctccaaacctgttcagatcatctgtaaagctcaacagtctcatgaagacgataactccgccgtctcccgccgtcttgctctcactctcctcgtcggcgccgctgctgttggttccaaagtatctcctgctgatgccgcctacggtgaagctgcaaacgtgtttgggaagccaaagacgaacacagacttcttgccatacaatggagatgggttcaaagtgcaggttccagcaaaatggaacccaagcaaagagattgagtatccaggacaagtccttaggttcgaagacaacttcgatgctactagcaatctcaatgtcatggtcactcctaccgacaagaagtccatcact

SEQ ID NO: 163978 - DNA, 245 bp, Arabidopsis thaliana columbia
ctcactatcatcatcttcctcctcatcccatcgtcacgtgtcgctctccaaaccttttcatatcatctgcaaagctcaacagtctcatgaagacaataactccaccgtctcccgccgtcttgctctcactctcctcttctactccgcttctatcgtttccaaattatctcctcctgattcccactacattcaatctcctaacttcttcattattccaaagacgaacacatacttctttccataca

SEQ ID NO: 163979 - DNA, 265 bp, Arabidopsis thaliana columbia
gagattgcgccggagtcaaggagagggagagatcgatccaacggttgagatgtttctacgggcggtcgtacggccattattgggtgaagtgaagcataccaccgagatcgtcgtgcttgacgatgaacctaacgatagagcgctgctgatctatctttagccttctatagtttttgcagactaagttgttctactcattattccttattgttgctcttgcatgcctgaggactggtccaattttaatatcctgaatccttccaaa

SEQ ID NO: 163980 - DNA, 407 bp, Arabidopsis thaliana columbia
ggacatactgtaccttgttataatggtacagaaatctctcacttcagagcgtaacttttcttcaaccggcgaagattgccgcttctccttctcgtaatgtccatctccgatcaaaccaaaccgtgggcaagtcctttgggttagactcttaacaagctatgctcacgtgctctgtacactctgacctcaaagacttctgtggaaaatgctccgacgccgccaagatcgccggttttgctctagccacctctgctctcgttgtctcgggggccggtgcggagggagcaccaaagaggctaacgtacgacgagatacagagcgaggcatgcaagaaacttaacagaaccgagtcatcagaacgcgagacttactcatcttgtgagccatgtacgatgtgcttcagagcc

SEQ ID NO: 163981 - DNA, 154 bp, Arabidopsis thaliana columbia
gcttttcaacacggagatcaacaagaacctatcgaagcagagttcgaggctctgcttcaagaggtcatgaccgattacaaccagacacatttcgtgaggaacatggagtttaaagaagctgcagacaaattgcaaggacctctccgacagatct

SEQ ID NO: 163982 - DNA, 361 bp, Arabidopsis thaliana columbia
ctcactctttgcttctgcaactcacagtcaatggctgctgaaatggcgttagtgaaacccatctccaagttctcttccccaaagctctcaaacccgagcaaattcctctccggccgacgtttctccaccgtgatcagaatgtcagcctcttcctcaccgcctcctccaaccaccgccacctcgaagtccaagaagggaacgaagaaagagattcaagagtcgcttcttactccgaggttctacacgacggacttcgaggaaatggaacagcttttcaacacggagatcaacaagaaccttaacgaagcagagttcgaggctctgcttcaagagttcaagaccgattacaaccagacacatt

SEQ ID NO: 163983 - DNA, 481 bp, Arabidopsis thaliana columbia
gcaacaacaaaaggagattaaaagaggttctactggtaagatgatatccttaagaatgaaagggcttggtcattgcctagtttatgtcgtggtctttagtgtcattgcggctatagtgacagcatacgactcaccctcttcaacaccacaatacacttccccttatccacctaaaaactattctccttatctctcagaatcacccccacccccaccaccacaatatagaagacaagagcctaagtacacaccacacccagagccaaatgtctacgattccccgacacctctaccatattactttccttttcctaaactagacatcaagtctccaccaccaccatccgtctacaccttctcaccacctcaactatattactccccttctcctaaggtagagtacaaatctccgccgccaccatacgtttatagctctctgccacctctaacatattattctccttctccgaaggtaatctac

SEQ ID NO: 163984 - DNA, 336 bp, Arabidopsis thaliana columbia
  unsure (1)..(336): unsure at all n locations
gtcttgaaggtcaacaacgtcgagaatattggcatcatctctttgtgcttcttctgccatcgctgccatttcttctccaagtttcttgggtggtaagaaactgaggctgaagaagaagttgactgttccagctgtgtccaggccagatgcgtcggtgcgcgccgtcgcagctgatccagatagaccaatctggttcccgggaagcactcctccagagtggctagacggtagcctccctggtgacttcggatttgatcctcttggtctttcatcggacccggacagtctaaaatggaacgtacaagccgagatagtccactgncgatgggctatgct

SEQ ID NO: 163985 - DNA, 474 bp, Arabidopsis thaliana columbia
  unsure (1)..(474): unsure at all n locations
ctcttcctgattgactctatttaaaaacccgatcggaaaattcgaaatccgttcaattgtaatcggaatcgtcgaaaaatggatcaaacagtatcggaaaatctcattcaggtgaagaaagaatcaggcgggatcgccgtcatcacaatcaaccgtccgaaatctctcaattcactcacgagagcgatgatggttgatctcgccaaggcattcaaggatatggactccgacgaatcggtccaggtcgtgattttcaccggatcaggtcgatctttctgctctggcgttgatttgactgcggcggagtctgttttcaaaggagacgtgaaggatccggaaaccgacccggttgtgcagatggagcggttacgtaaaccgatcatcggagctattaacggttttgccatcaccgncgggtttgaactcgccttggcctgtgatattttggtcgcttctagaggagctaagttcatg

SEQ ID NO: 163986 - DNA, 475 bp, Arabidopsis thaliana columbia
cacgaatcttctctctttctcttctctcaaacgaacatcaccatgaatcaagaatacgataacatagctccaataccaaaagcttcattattgttaatggagaatgatctatgcaagagagaatcagagatctcaagaagctcatcggtgggagtttcttctagattgttctattactatcatcatcgtagtctcaatgaaggagttccttttaagtgggagatgcagccgggaacaccgatcaaccctccgccggaagaaaacgttcgtccgattactcctcctccggcgtgtctcagtcttggtttgcctgaaccctcagtctcagtcgtcggaaattctaataaacattctctatttccggcgaatattaagctttggagatggaagaatcttcgaaagagatatttctctagatggtcgagccaaagcatgcttaataaagcatctcttatatacacattcgcacgtatga

SEQ ID NO: 163987 - DNA, 217 bp, Arabidopsis thaliana columbia
ttctattaataagagaagacgagttttgctttcgttactgtctttcaactattccgacacaaccgaagcttctggaaacgtgggggtgtgttatcaataatggctgttgtagaagaaccgatactttcaagattggatcgtattgatttcatggtgaggaagttagaggatatttctttactcgtgtatatgtgaaatcgatattttttattccttt

SEQ ID NO: 163988 - DNA, 495 bp, Arabidopsis thaliana columbia
  unsure (1)..(495): unsure at all n locations
cgagaagaaaaaggcgaaaactctcgtccaatccgattacgtcgaaaaatcaaaggttttntggatantggcgtcgaagncggatctttgaagggagattgaaggatctccagaaggggatccacctacatcantgtagcgcaggtccctgttgctgaagacatgtttcactggcaggcaacgataatgggtccttcagagagtccttatgctggaggtgttttccttgtaaccatccatttccctccggattacccattcaagcctcctaaggtggcctttaggaccaaggtgttccatcccaacattaacagcaacggtagcatttgcctcgacatcttgaaggagcagtggagtcctgcgctcaccatttccaaggtgctgctatcgatctgttctttgttaaccgatccaaacccggatgatcctttggtgcccgagatagctcacatgtacaagactgacaagaacaagtacgagtccactgcacgaagc

SEQ ID NO: 163989 - DNA, 207 bp, Arabidopsis thaliana columbia
agaaactacaatagttcatcaatcaaagagatttatgagaaatggcagattctaactgtggaggtggctcctcctgcagagggggtgactcttgcacctgcgagaagaactacaacaaggagtgcgacaactgtatctgtggatcaaactgcagctgcgggacaaactgtaactgctgacgaaaacattataggctgaactcatcta

SEQ ID NO: 163990 - DNA, 470 bp, Arabidopsis thaliana columbia
  unsure (1)..(470): unsure at all n locations
ctctcagtacacttcttttcatacctcaagagactaaaactagtttgaggagatttagaggagtgtttggttctttggataacaatatcccaaactgaaaatggctaagtcatatggagctatcttcctcttgaccctcattgtcctcttcatgcttcaaaccatggttatggcctcaagtggatctaatgtgaagtggagccagaaacgttatggaccaggaagcctgaaacgtacccaatgcccatcggaatgtgataggaggtgtaaaaagacacagtaccacaaggcttgcattacgttctgcaacaaatgctgcaggaagtgtctctgtgtgcctccgggttactatgggaacaaacaagtttgctcctgctacaacaactggaaaactcaagagggtggaccaaaatgcccttgaaaaaatctcccttcgttccctttttataataaaaattntcaactataac

SEQ ID NO: 163991 - DNA, 450 bp, Arabidopsis thaliana columbia
aaacaaactgctggtggttgatttctcggctcttaggtgcggaccatgtaggatgattgagcgggcgattcatgccatggctgataagttcaatgatgttgatttcgtcaaattagatgttgatgaacttcctgatgtggctaaagagtttaatgtgacggcaatgcctacctttgtgctggtgaaaaggggtaaagaaattgaaagaatcattggtgccaaaaaggacgaacttgagaagaaagttagcaaactcagagcataatgagcattgttaacgccttaaccaatagtcttgtgtaaactcaataataaatggtatgtttatggggaatgtgatgctctatactctctgatcatgcaagaccttctgtgttatgccaatgattaaatgtaaagaggttgttccaatgcttacacttctaaattcagtgcttttttcccttttta

SEQ ID NO: 163992 - DNA, 375 bp, Arabidopsis thaliana columbia
cgcttccgagcggttacaacacggtcgagtgggttcgatacttaacgaaagcgggatcttacgagatcagatgctgaacattaaacacagttcaggttcagtgacatcagacttaaaagtttcatggcttctagttttttgttccttatgcaaaacaaaaacaaaagagttaaatatgttttataccttgttttatgtttgttttgtcgattagagatatctgtgttaatatgatttcttatgtcttaatttggtattgaattctgtttttctttctttctctgtttgtgaaattgtacgagatatagtttagattaattctggtgtaatcgaacgtgatagagtatttgtgaaagcagtcggattctttttagt

SEQ ID NO: 163993 - DNA, 455 bp, Arabidopsis thaliana columbia
atcagcttcaaacgcatgtgaaaggtttgtgtgatcgtcctccatcgtctcactctctcaggatggagtctttcaacacgctggttaagtcaacttacacggcgaaatatgtatctgagcccttttcagttggtggatacaactggacacttgacgtgtcaccaaccggtaacactacggatagtaggacagggtgcctgtctctacacgtagccactagacaccttaactctcgcacagcatgagattgacgcagaactaatgatttacacatctagcacgaatgcgagcccgtgcttcactatgccagatacccccgtgtcttacattagggtcgacccgacggactcatggatgatatccctacttttcgttgctgacctctcttcctttcggtgttgacatgggattttgttggtctaaataggccctgatgcctttgtatcatggcttca

SEQ ID NO: 163994 - DNA, 455 bp, Arabidopsis thaliana columbia
ttcaatcgaaacctctgtgagatcgcttttgatttttgtaattctcgtcgcaggatatctctctcattgggatcagacatggctgttgttgcaacatccctgatattcgctgacgtcggcatcattgcttcgatatgcactagaatctgcttcaacaaaggcccctccaccaatctgttacatcttacattggtcatcaccgcaactgtctgctgttggatgatgtgggcaattgtatacattgcgcagatgaaccctctcattgtccctatcttaagcgaggtggagtagaaaccattctactcaaactaggaaaccaatgcacaaatttgagtaagagccccgctgctctttctgtatcttcttcaaacatatttgttttcccctttgtaattcttatcgtggtgtggaacaacgaaactatccccctctttactcaaacatattctgtctct

SEQ ID NO: 163995 - DNA, 418 bp, Arabidopsis thaliana columbia
ggcaacagtgcagagcttgccaaagaagaagacattgatggatttcttgttggtggttcctccttgaagggtcctgagtttgcaaccattgtgaactcagtcacgtcgaagaaagttgctgcttgattgagaactatcagtaacggaaatcgctagtctccatggaacagatgagatgagaaataaaagggaggttagcgaccttgttgttgttgttgtgttcttacatcttcttcttgaactaataatggaaaacagaaagaaaaaaaatgattcgtgagctctggtttgacagagagagataaaagggtctttgattaaagatctttgtaactaagctgtgattctttttttcaatttgagtaagcttggctcacgagtttcttctatggaataatctaaatcaaatcttaagccc

SEQ ID NO: 163996 - DNA, 428 bp, Arabidopsis thaliana columbia
cagagagagagaacaacaaccaaacactcatttctccacatcttgagagaaaaaaacagagcaagtatattagagatctcatggcgatggcggtctccggagctgtcctcagtgggcttggttcttcgttcctcaccggaggcaagagaggtgccaccgcattggcaagcggcgtaggcactggagctcagagagttggcaggaaaactcttattgtcgctgctgcggctgctcagcctaagaaatcttggatccctgccgttaaaggtggtggcaacttccttgaccctgaatggctcgatggctcgctaccaggagatttcgggttcgacccattgggtttggggaaagacccggcttttctgaaatggtacagagaggctgagctgatccatggccgatgggcgatggcagcgggtcttgggatc

SEQ ID NO: 163997 - DNA, 487 bp, Arabidopsis thaliana columbia
gaaaaagagagaaaatgggattccgtgggaagttcttcttcccaattctcatgactctatcgttatttctaataatcagatacaactacatagtctccgatgatcctcctctccggcaagaactccccggtcgccgatcagcttcttccggagatgacatcacatataccgtcaagactccgtcaaagaagacaaagagactgtttcacacggcggtgacagccacggattccgtgtacagcacgtggcagtgtcgggtcatgtattattggtacaacaggttcagggacgaacccgggtcggatatgggcgggtatacccggatcttgcattcgggtcgacccgatggactcatggatgagatccctactttcgttgctgaccctcttccctccggtgttgacaagggatatgttgttctaaataggccttgggcctttgttcaatggcttcaacaagcacatatagaggaagattacattctcat

SEQ ID NO: 163998 - DNA, 300 bp, Arabidopsis thaliana columbia
aactcacactcgtctcaaattcgaaaaatgtcttctctctcctgccctacctaccgctcccggacttcgtcttcgtctgctttgcgtggcgaatcatcatcattcttcgctgatcaatgttgttgacccacgccgctcactctccttccactacgcttctcctcaggggcttaatctagctgagctctgtgttgttagatcgcagaggaggtccgttcagagttctgttgtcgtgcaagatggatcagtagccaccgagtcaagctcgtccgaggaggcgaaagatgtaggggcgctaac

SEQ ID NO: 163999 - DNA, 401 bp, Arabidopsis thaliana columbia
tgatttggttaaattatctatatttcttttttgataaaggatttggttaaatttttaattgcaggtaatactcgtaagatttatcaacacaagcaaaaaagatggcccaaaagctagaagcaaagggtggtgagatgggagatgtatgggatgatggtgtttacgaaaatgttagaaaggtatatgtagggcaagcacaatacggtatagccttcgtcaagtttgagtatgtcaatggttctcaagtggttgttggagatgaacatggaaagaagacagagctaggagttgaagagtttgagattgatgcggatgactacatcgtatacgtggaaggttaccgtgagaaagttaacgatatgacgtcagaaatgatcacgtttctttctattaagactttt

SEQ ID NO: 164000 - DNA, 473 bp, Arabidopsis thaliana columbia
ggccttcaaagattaatatctggagcattttcccaggcaccacaaccagaagatgattcatttaatgagatgttaattgccaggtttgtgcgtcttcttcagcaatttgtaaatactgctgaaaagggtggagaggtggagaagtcgcaattccgagaaacttgttcccaagcaactgcattacttctgtcaaacctgggtggtgagtcgaaaacaaatgtcgaaggcttttctcaattactgcgtctcctttgttggtgtccagcatatatatctactccagacgctatggaaactggaatttttatatggacctggttggtttctgctgctcctcaactggtatctcttgtccttgccgagcttgttgatgcatggatatggacaattgatacaaaacgtggtctctttgcatctgatgtacgatactctggcccagctgcaaaattaagaccccatctttccccagggga

SEQ ID NO: 164001 - DNA, 456 bp, Arabidopsis thaliana columbia
  unsure (1)..(456): unsure at all n locations
cacgagtggactcaataccggagaagattttttcagaagacgtcgtggcgcttcctttctgaggcggcacgacgggtctccccaaaggagtgatgctaacacacaaaggtctagtcacgagcgtggcgcagcaagtcgacggcgagaatccgaatctttacttcaacagagacgacgtgatcctctgtgtcttgcctatgttccatatatacgctctcaactccatcatgctctgtagtctcagagttggtgccacgatcttgataatgcctaagttcgaaatcactctcttgttagagcagatacaaaggtgtaaagtcacggtggctatggtcgtgccaccgatcgttttagctatcgcgaagtcgccggagacggagaagtatgatctgagctcggttaggatnggtaagtctggagcagctcctcttggtaaggagcttgaagatgctatta

SEQ ID NO: 164002 - DNA, 334 bp, Arabidopsis thaliana columbia
cgcgcccgaaaaaaagaatatatcacacatggttgaaagggtttgctacaaaagggatctctcctcccttgcgtggaacggaaaggcggagaccatttgccccgtgtctgctgaagtccttgtaagcggctcgatgacaatgaggaagactgctgccaacccaaatgtgccatcttgcaaacgacggtacggttccatgcgatggaaggacgcgggtccattttacgcagagtcaccgagctaccgtaccggagaggttcgcgtggactactgttaggacaccggtgaactgtcagctgatgccgatacattaacatggagaccggagctagaa

SEQ ID NO: 164003 - DNA, 434 bp, Arabidopsis thaliana columbia
  unsure (1)..(434): unsure at all n locations
cacgcgttcgtaagtggaaactttaaaacgagagagagtgtatgaaatggcgacatcgggaacgtacgtgacggaggttccgttgaaaggatcggcggagaaacactacaagagctggaagagcgagaaccatgtcttcgctgacgccattggccaccacatccaaaatgtcgctgttcacgaaggcgcacatgactctcacgggtctatcaggagttgggactacacatatgatggtaagaaggagatagccacagaggagagagagatagatgatgagaataaatcattgacgaaaagaggactggatggtcacgtgatggagcatctcatacgatttgatatcatctacgaattcattcccaaatctgaggatagctgcgtctgcaaaatcactatgatatgggagcatgcgcacgatgactntaccgaac

SEQ ID NO: 164004 - DNA, 257 bp, Arabidopsis thaliana columbia
cgcgtgcggttgcaaagtatctgcagatgatgccgactactgttaacccgcgggggtgatcctgcagtcggcggcggaattccaaaaggggcacctcctacggtgacttcgattcctccacgaccaacggaaccggagagtcatcggattccgtttttgtcaaacgtaccaaaatgtgtcattcgactgacatatgaagactcgagatcgaatcataggtttctcatcacgaaccaagattcgcaggaatgatcaac

SEQ ID NO: 164005 - DNA, 366 bp, Arabidopsis thaliana columbia
cagtgagacaacttgctgaaatgatgacttatgtctacgccaaagtgagtggagagacagctgtcgagagtccaacgatcgacgtgagctccaaagagttttatggagaaggttatgatgacagcgacaagagaatcccagacatgaccatcatcaaccgtcaacttggatggaacccgaagacgtcgctttgggacttgcttgaatcgaccttaacataccagcacacgacttatgcggaagccattaagaaggccacttcaaaaccagtcgcatcttagaggtcgtctctctttacaaacacctcagatcatgtggtggctacgattccattctttctttttaaaaaaaaaattctcccaacag

SEQ ID NO: 164006 - DNA, 427 bp, Arabidopsis thaliana columbia
tactctgacttttttataaagggttttgtgctgggtataagggtggcctaaagagagacctccgttttgacaatagagtgggcgatggcaagtttgttgaaccacccaaaagttttggacaaagtaaaattagagatcgacgagataatcggacaagaccgtttgatcgaagaatcagacatagcaaaccttccttacctccaaaacgtagtatccgagacactccggctacattcagcagcgccggttcttgtgccaagatcaacagcagaagacatcaagatcggaggatacgatgtgccacgtgacacaatggtaatggtgaacgcgtgggcgatacatagagatccagatcttttgaccgaacccggagaggttaaaccctgagaggttcaacggtgggaaaagaagaaaagatgatgttcgt

SEQ ID NO: 164007 - DNA, 423 bp, Arabidopsis thaliana columbia
ctatatttgatcttcttgaactctttctctcttctcacaaatggcgtctacgcaatatggttgtgaacatcaaggcggcatggagattatcaacgatgagcttatcttgtcgtttttggaagaagaatcgcccgtcgaaaatcatagtagcatcaacaaagaggaagaagagaaactaaaccgtgtgattaggtcgctagaagtggagatcaacatgagttctccaaccatagaagctaggaaaatgaatatgcaacagacgatatccggtcttgaagatgattttgggtggcttaacgactttgatattggtatgatttcgttgcaaaatgatgatgagatgatgaattggtgtacggaactttcttacatggatggtgtggtagatagtggtgttcttgagattgaaggtggtgattatta

SEQ ID NO: 164008 - DNA, 439 bp, Arabidopsis thaliana columbia
cttcttcaagctcatcaatcaatggcgtcgtctctatctccaccggaagaagcttcgtatcaccaccgtcataccaaaaggtacacctcctccgcttcctccgcttcctccaccaccaacggaaccgtcgaatcatcggtttccgatttcgtcaaacgtcccaaaatctctcatccgaattacatatcaagttccgagatcgaatcagagttttctcatcacgatccagatttcgcaagaatcaacaacggtagttttggttgttgtccgtcatcaatcctagctttacaacgagattggcagctccggttccttcgtcaaccggatcgattctatttcgacgaactcaaaccaaaaatctccgattctagatctgtaatcaaacggttaataaacgccgagcatgacgatgaagtctcgatcgtcgataacgcaacaa

SEQ ID NO: 164009 - DNA, 318 bp, Arabidopsis thaliana columbia
gttccaaagtatctcctgctgatgccgcctactgtgaagctgcaaatgtgtttgggaagccaaagacgaacacagacttcttgccatacaatggagatgggttcaaagtgcacgttccagcaaaatggaacccaagcaaagagattgagtatccaggacaagtccttaggttcgaagacaactacaatgctactagcaaatctcaatgtcatggtcactcctcccgacaggaagtccatcactgattacggttctgccgaagagttcctctctaaggctaattacctgctagggaaacaagcttacttcggtgagact

SEQ ID NO: 164010 - DNA, 379 bp, Arabidopsis thaliana columbia
cgacgactgttaattaactccggcgattgatcactccgtcttctttgtaacacagccggagaaaaatcgaaagtttcgtttttttcttctccttcgtagctaattcgccgtcgattttataattcggcagccatgagctcggttttgcagggttttacgaagtcacttgctatgacctttgtatcggagattggtgacaagacgtttttcgctgcagcaattttggctatgcgttatcctaggagacttgtgttggctggttgtttatcggctctgattgttatgactatcctctctgctactctgggatggcctggtcctaatctgatctttcgcaaatggcctcataacataccaccatggtggtccttgggtttgg

SEQ ID NO: 164011 - DNA, 456 bp, Arabidopsis thaliana columbia
aaaccatgaagcttcttatgctcgcctttgtttttctattagctttggcgacttgtaaaggtgacgagtttgtttgtgaagagaacgagccattcacatgtaaccaaactaaacttttcaacagtggcaatttcgaaaaaggcttcatcttcggtgttgcatcttctgcttaccaggtggaaggcggtagaggccgtggacttaacgtttgggatagcttcactcaccgattcccagagaaaggtggagctgatttgggaaatggagacactacttgtgactcatatactctttggcagaaagatatagacgtgatggacgagctcaactctactggctacagattctccattgcgtggtcaagactccttccaaaaggaaagatgagcaggggagtgaacccatgagctattaagtactacaacggtctcatagatggcctcgtcgcaaagaata

SEQ ID NO: 164012 - DNA, 462 bp, Arabidopsis thaliana columbia
ggagacccttctctcccctcgtgcgctctctccttctctcaatcccaaacctttgtcccttcacgcagaccaaacccacttcacattcattgtctctctcaaaacccaccaccttctccggtcctaaacacctctccacccggttcactaaaccggaatcaagaaactggttaatagatgcaaagcaaggactagctgctttagctttatctctaactctcactttctcacctgttggcactgctttagcctctgagttcaatatcctcaacgatggtccacctaaagaaacttacgtagtcgatgacgctggtgttcttagtcgagtgacgaagtcagatcttaagaagcttttgtctgatcttgaatacagaaagaaactgagactcaatttcatcactgtccgaaagctcaccagtaaagcagatgcgtttgagtatgcagaccaggttttggaaaaat

SEQ ID NO: 164013 - DNA, 456 bp, Arabidopsis thaliana columbia
cacacacgcttttatttattttggagctaatcggaaaacaaaaaagcaacggccaaagcaatgaggaaagatgatctctgcatcactgttcctaccttcttccgatgtcctatatctctcgacgttatgaaatctccggtgagtctttgcaccggcgttacctacgatcgagctagtatccaacggtggcttgacggcgggaataacacttgtccggcgacgatgcagattcttcagaataaagatttcataccgaatcggactcttcaacgtcttatcgagatttggtctgattctgttcgtcgtcgaacttgtgttgaatcggcggaattagctgctccgacgagagacgagatcgccgatgcgatcgatagagtgaagatcgagaaagaagaaagagatgatcgcgaggttttggtcgagattgttcgattcgggagagaatctgatgataac

SEQ ID NO: 164014 - DNA, 325 bp, Arabidopsis thaliana columbia
caatgttgctagaatcatcaacgaacctactgctgctgctattgcctacggtcttgataagaagggtggtgagaagaacatccttgtatttgaccttggtggtggtacttttgatgtcagtgtcttgaccattgataacggagtgtttgaggttctctccacaaatggtgacactcacttgggaggtgaggactttgaccacaggatcatggagtacttcatcaagttaattaagaagaagcaccagaaggacatcagcaaggacaacaaggctcttggtaagctccgaaaggaatgtgagagggcaaagagagctctaagcagt

SEQ ID NO: 164015 - DNA, 398 bp, Arabidopsis thaliana columbia
gtttttctccggtcttctctgtctctctgtccattttcgtggcgaagaagattttttaaggtcttttcaagaaattatggaatctgcagggatccagcaactgcttgctgctgaacgtgaagctcagcaaattgtcaatgccgctaggaccgcaaaaatgactagactgaagcaagccaaggaagaagctgaaacagaggttgctgagcacaaaaccagtacagagcaggggttccagaggaaactcgaagcgacaagtggagattcaggtgcaaacgtgaagaggcttgagcaagagactgatgccaaaatcgagcaattgaagaacgaagctacgagaatttccaaagatgttgtggatatgcttctgaaaaatgtgaccacagtgaacaactgag

SEQ ID NO: 164016 - DNA, 362 bp, Arabidopsis thaliana columbia
gttgataggtgttggagctggcgggaaacgcagtatgggataacaagaagacacgtatagttccaagacacattcagcttgcagtgaggaacgatgaagagttaagcaaacttctgggaagtgtgacgattgctaatggaggagttttgccaaatattcatcagactcttttgccatccaaggttggcaagaacaaaggagatattggatctgcttctcaggagttctgaggttcttagacttcttagttcagttctcttgtttggattcggaacttgtaaaatagaccctgatggcgttttttggggatcaaattaggttttaaagctaagtatatttggcttttgcctaagcatgtttaa

SEQ ID NO: 164017 - DNA, 458 bp, Arabidopsis thaliana columbia
ggctgaagtgagagctttcttcgacgtgcacgagcaagaaggtagccaccccggaggaattcacctagaaatgactggtcagaacgtgaccgagtgcatcggtggttcacgcacagtcacattcgacgacttgggttcacgttaccacacgcactgtgatcctcgccttaatgcttcacagtctcttgagctctccttcatcatcggcgaacgtcttagaaagagacgcatcaagtctcaaaaggcttttgccctctaatcaaataaacattgcttataataatatctatctatataaatgtgtgcgtgtgtgaacttaatacaatctcatttatctttgattcaaatcttgagtcaaaagaacgcttaaggtttctgttttaatgttgttagtgagtattatttccatttggatttaatataatcatggatggttggggttctgaaaaaaaaaataa

SEQ ID NO: 164018 - DNA, 437 bp, Arabidopsis thaliana columbia
gatttgcttctttttatatacacacatacttctcctccatacactttcctcttcaatcctcagttttttttctaagccctaataccatctcaaagaagagatcaagatttgaaatcaagaagacaccattactcagatcaacatgcttgccgttcaccgtccttcttccgccgtatcagacggagattccgttcagattccgatgatgatcgcgtcgtttcaaaaacgttttccttctctctcacgcgactccacggccgctcgttttcacacacacgaggttggtcctaatcagtgttgctccgccgttattcaagagatctccgctccaatctccaccgtttggtccgtcgtacgccgctttgataacccacaagcttacaaacactttctcaaaagctgtagcgtcatcggcggagacggcgataacgttggta

SEQ ID NO: 164019 - DNA, 470 bp, Arabidopsis thaliana columbia
gcgtccggagagagataaagagatcacacgtgggaatccatcttaccaattgcaatggcgtcaatgaccatgacatcttcatttctccctaccggctcaaaccttccggcaaacatctccagcaacagcagacgaagcctcacggtggtcaaagcctccgggagtgaaaacacaaccagcttggagaacaagaagcaagaacagagcatgaagatgaggagggatcttgtcttcacagctgcagctgcagctgtgtgctccttagctaaggtggcaatggcagacgatgagccaaagagaggaacagaagctgccaagaagaagtatgctccagtctgtgtcacaatgcctaccgccaagatatgccgtaactgagtttgctatttaaccagcaactgtatctatgtcgtataactattctcagtgtggtttggagggatcatattttgattaaatctattaaaccccgt

SEQ ID NO: 164020 - DNA, 224 bp, Arabidopsis thaliana columbia
tcgaccacgcgtccggcgacgaagactgtttggatcatactgtcgtgtttatttgttgattcccaggcagatcacggtgtggatgttctatataagcggcgtggaccgtcaccatatactctacttcgaaagatgttacccataatttgattgaaaggcctaatgttcctagttagtgtacacatatccatcttaaccttgtagctagacatgtatctcgttct

SEQ ID NO: 164021 - DNA, 186 bp, Arabidopsis thaliana columbia
ctccaattgatgtggttgtccaacctggcatctctggtctcgacccatcccaaacatctttgttccaggtgcttaacagggggagccaagattaacatgggtaccgtcgaaatcatcaccccagttgagcttatcaagcaaggtgacaaggtcgggtcttctgaggctgcgcttctagccaagctt

SEQ ID NO: 164022 - DNA, 367 bp, Arabidopsis thaliana columbia
cggttctcccgaagagttcctctctcaggttaattacctcctagggaaacaagcttacttcggtgagactgcctctgagggaggctttgacaacaatgcagtggcaacagcaaacattctggagtcatcatctcaggaagttggtgggaaaccctactattacttgtctgtgttgacaagaacggctgatggagacgaaggtgggaagcatcagctgatcacagcaaccgtgaatggagggaagctttacatctgcaaagcacatgctggagacaagaggtggttcaagggagccaggaaatttgtcgagagcgcagccacttctttcagtgttgcttgagtgaaagcaacacaacgtaacaatgct

SEQ ID NO: 164023 - DNA, 424 bp, Arabidopsis thaliana columbia
  unsure (1)..(424): unsure at all n locations
cttaaacgttttactttgtgctgcactactcaacctcaatggccgcctcaacaatggctctctcctcccctgccttcgccgggaaggccgttaagctttcccccgcggcatctgaagtccttggaagcggccgtgtgacaatgaggaagactgttgccaagccaaagggcccatcaggcagcccatggtacggatctgaccgtgtcaagtacttgggtccattctctggcgaatcaccgagctaccttaccggagagttccccggagacnnntgatgggacaccgccggactttcagctgaccccgagacattcgcaaggaaccgtgaactagaagttatccacagcaggtgggccatgctcggagccctaggctgcgtcttccctgagcttttggctagaaacggagtcaagttcggagaggc

SEQ ID NO: 164024 - DNA, 53 bp, Arabidopsis thaliana columbia
ctgttcagttttgtataatccatgaagaaatcaaaatctcccgcttcattgtc

SEQ ID NO: 164025 - DNA, 420 bp, Arabidopsis thaliana columbia
aacaaatcttaaacgttttactttgtgctgcactactcaacctcaatggccgcctcaacaatggctctctcctcccctgccttcgccggtaaggccgtcaagctttcccccgcggcatctgaagtccttggaagcggccgtgtgacaatgaggaagactgttgccaagccaaagggcccatcaggcagcccatggtacggatctgaccgtgtcaagtacttgggtccattctctggcgaatcaccgagctaccttaccggagagttccccggagactacggatgggacaccgccggactttcagctgaccccgagacattcgcaaggaaccgtgaactagaagttatccacagcaggtgggccatgctcggagccctaggctgcgtctttcctgagcttttggctagaaacggagtcaag

SEQ ID NO: 164026 - DNA, 373 bp, Arabidopsis thaliana columbia
agcttaaatctcagccgtccgatcatgccgatcagaaacatcgccattggccgtccagatgaagccacccgtcccgatgccttaaaggcggcgttggctgagttcatttcaactttgatctttgtcgtcgccggttcaggctctggcatggctttcaacaagctcactgaaaacggagccaccactccttctggtctcgtagctgctgcagtggctcatgcctttggactcttcgtcgctgtctcagttggtgccaacatctctggtggacacgttaaccctgccgtcactttcggtgctttcattggtggtaacatcactcttcttcgtggtatcctctactggattgctcagcttctcggatccgtcgtcg

SEQ ID NO: 164027 - DNA, 390 bp, Arabidopsis thaliana columbia
aaaacaacccctgcgccgcttactctctctcagattcctcccgaagcaacctcgtttactctctacgccaatttcagcgcttagacatccctttttgcaatcatggctgatgaaatcaatgagataagggaagagcaagaactcgcaccctttgatccttccaagaagaaaaagaagaagaaggttgtgattcaggaacctgtcgaggacttagcagagtcttcacagactgagaaatctgattcattgcctgttaatgatggtcttgagagttcatttactggaatgaagaaaaagaagaagaagccaactgaatcaagcttattgaacaacgaaagtgttgatgctggggaagatttggatgaaattgctaatgacgagcaagagggg

SEQ ID NO: 164028 - DNA, 349 bp, Arabidopsis thaliana columbia
agaccctaggacctatgaggtcttaacgaagaggttcataggagatgacaatggaaacgtgaaggggcttgaacttgtgcgtgtgagttgggagaaggatgaaaccgggaggttccagttcaaggagatcgaaggctctgaggaaatcattgaagcagacctcgttttcttggccatgggtttccttggacctgagccaacacttgctgagaagctaggtctcgaatgtgataacaggtcaaactttaaggccgagtatggccggtttttcacaaccgtggaaggtgttttcgcagcacgtgattgtcggagaggccagtctctggtttgctgggctattttaaaagga

SEQ ID NO: 164029 - DNA, 431 bp, Arabidopsis thaliana columbia
taaaaggatttttgattgagtaagttcaacaaagtctttttagactatctttctttattttttccttatataaaaaatatattaaaaactcaatcaaaattaaattatccacaagaacaccaatttttgttatgcttaatatatttaatttgatctgtattttttttaattctacccttttttcaagcacttttttagtcgccaaattgccagaggcctacgcctttttgaatccaatcgtagatgttatgcccgtaatacctcttttctttcttctcttagcctttgtttggcaagccgctgtaagttttcgataaaattcttaatactgtcttaaacaaattcacgattttgatttttccaacaattcaaaagatccaaaaaatcttgacgtatgaacgaactctcaattcaaaccattaaattttttg

SEQ ID NO: 164030 - DNA, 333 bp, Arabidopsis thaliana columbia
ccttgctaaccaatggttaacgatggctctgatgggcggttttgctagaataggcaataatgaaatcactattttagtaaatgatgcagagaagaatagtgacattgatccacaagaagctcagcaaactcttgaaatagcagaagctaacttgagaaaagctgaaggtaagagacagacaattgaggctaatctagctctcagacgagctcggacacgagtcgaggctctcaatacgatttgattttgtaactagctgacgtgtaaaaaaaagaatgtataaaaaaaataggatcgaaagacgataaaaacaataaaataaaataaaggaaa

SEQ ID NO: 164031 - DNA, 329 bp, Arabidopsis thaliana columbia
cgctctctcaaaagtcgaatatcccaaattcgatccgttttccggcgataatctccgatctagatccgatggcgaaagaaccaggtcgtgtgctcgttactggagctgcaggacaaatcggatatgctcttgtacctatgattgcaaggggtatcatgcttggtgctgaccaacctgttatcctccacatgttggatattcctccagctgctgaagctttgaacggtgttaagatggagttgatcgatgctgctttccctcttcttaaaggtgttgttgctacaactgatgccgttgagggatgtactggagtcaatgttgctgttatg

SEQ ID NO: 164032 - DNA, 390 bp, Arabidopsis thaliana columbia
gcttcctcactcgcagcaccgctactgatgaagctgttgaaactagtagtaacagtggattggatttggttgaggttggattcttgtctggtgttcatggccttcaaggcgagatttgcataaaaccaaacactgattttcctgatttacgtttctctaagcctggtagaagatggttaaaacaacaattgttgggacaagataagattgatgaggttgaattagtcgaaggaagacctcatcctgcgcagaagagttggattcttaagtttcgagggttggacgatgttgatcaggtgagacaactcgttggtgcaactctgcttgctgaggacgatgatcgtcctgagcttgatgaaggagaattttaccttcgagatcttgtaggca

SEQ ID NO: 164033 - DNA, 357 bp, Arabidopsis thaliana columbia
  unsure (1)..(357): unsure at all n locations
aaagatctgagaggtggtcgaatgatccaagttatgaagaacaatctctcttagatcgtttggtctgatccaatcgaagaanagaatgggaatcttattcacgcggatgttctcttccgtctttggtaacaaagaagctcgaatcctcgtcctcggtctcgacaatgctggaaaaaccacaatcctctatcggcttcagatgggggaagttttctctactattcctacttatgtattttaacgttgctaccttgtcttttcaatatctattattctcttatgtctcttttttttatattcttacataatcttttcatctttgccttttccttatccttttcctttttttccctaatt

SEQ ID NO: 164034 - DNA, 411 bp, Arabidopsis thaliana columbia
ccttgtatagctgccattggattcagtggtacacaagtttggagaaccgaaggatttatcactgctgaagaccttgcatgcagggtagagaaagcgtggttaggacttcatatccaggaaacaactgcaagtatcttttcagcagcacttgcatcacagaactcagagacacctgtttctagtgcttcgagtgttgtcttgccttccggaagtgttcctttagatgcagcgggtgcatcttcattgacgggttttagtgttcaacccttagagacaaagtcaaacggtaacatcgtatctacaacagaaaacaatgatgtgacaattgcactttaaggcaaaaaattttttgtacccactattttttgttatactactaaaaaccattccgttccctctgtttttggatct

SEQ ID NO: 164035 - DNA, 365 bp, Arabidopsis thaliana columbia
cttaaaacccaaatcttatcactactctaaaagaatcttcatcatggcctcagtaacctcagccaccgttgcaatcccatctttcacgcggccttaaagcctcaaccatcaaatcatccgccaccgtcagaatccaaactgctgctgttgcatcaccgaagcttacagtgaagtcatctctaaagaacttcggagtcgcggccgtagcggctgcagcttcaattgctttggccggaaacgccatggcaatagaagttctcttgggaggaggggatgggtcgttagcttttattcccaacgacttctgtatagcttaaggagagaagattgcgttcatgaacagcgctggttacccacacaatgtt

SEQ ID NO: 164036 - DNA, 404 bp, Arabidopsis thaliana columbia
caagtgtagaggcagtggcacaacatctttaagaaagagagagagaaagagtcatttattcatttcctcgcttaaaaatcttgagcacccagacagaattcttctttcttctttctggggttgagaaaaatgagtgaaagagatgatggattggggctaagtttgagcttgagtttaggttttaatcaaaaggacccgtcttcgaggttaaatccaatgcctctggcttcttatgcatcttcatcacacatgcagcatatgcagcagagcaattataaccatcctcaaaagattcagaacacttggattaacatgtttcagtcatcagagagaaactcggacatgagatcgtttctccggggaatagacgtgaacagagctccatcgacggtggtggttgacgt

SEQ ID NO: 164037 - DNA, 415 bp, Arabidopsis thaliana columbia
aaaagaagaagagaaacaacaagaagtagtaatggcttcctctatgctctcctccgccgctgtggttacatccccggctcaggccaccatggtcgctccattcaccggcttgaagtcatccgctgcattcccggtcacccgcaagaccaacaaggacatcacttccatcgcaagcaacgggggaagagttagctgcatgaaggtgtggccaccaattggaaagaagaagtttgagactctatcttacctccctgaccttagtgacgtcgaattggctaaggaagttgactaccttctccgcaacaagtggattccttgtgttgaattcgagttagagcacggttttgtgtaccgtgagcacggaaacactcccggatactacgatggacggtactggacaatgtggaagctttca

SEQ ID NO: 164038 - DNA, 153 bp, Arabidopsis thaliana columbia
ccaagacccaaccatcggagggagggggcgagatgatgggattgagttccttggtctttgccgagtttcacagcctggggtgggtgtgaccttatagtttttgttgcgccactctggattgctgcggctgccggtgttttggttgattggttt

SEQ ID NO: 164039 - DNA, 357 bp, Arabidopsis thaliana columbia
ggacatcacgggattgagaagttttgtaagagcctctttgcggactccaaccaccgttagtgtgtggtgattttggagctaaaggagagggaaaaaccgatgacacgcaggcgttcgtgaatgcgtggaagaaagcatgttcttcaaatggagctgttaatctcctagttcctaaagggaatacttatctccttaagtctattcaattaactggtccatgcaattctattctcaccgttcagatattcggaacgttatccgcatctcaaaaacgatcggattacaaagatatcagcaaatggataatgtttgatggcgttaacaatctatcagtcgatggaggcgacactggggttg

SEQ ID NO: 164040 - DNA, 269 bp, Arabidopsis thaliana columbia
gagagagtgagagagaagcaacaatggaggttttctactacttggtgtttggagtcatggctggcgtagtggcagcgttggagcgtagcaagactaacaaggatcggatcaacacttcgtcttccttcaattcattcaagaacaattacctcctcgttttctctattatgatggctggggattggcttcagggtccttatgcgtattacctttacagcacttatggttttggaatatgagtatattgttcagctattcatttatggttt

SEQ ID NO: 164041 - DNA, 347 bp, Arabidopsis thaliana columbia
cgtctctcaaaccaacgcaaaagaacaatgtctaacgttgtagtaatcgccgttgggctcatcgtagcatcggtggcaggacatgtgtcagcacaaatggatatgtctccgtcgtcaggaccatcgggtgcaccagactgcatggcgaacctaatgaacatgacaggctgtctctcgtacgttacggtcggagaaggtggtggtgcggccaagccggacaagacgtgttgtccggcgctagcggggctagtggagagctcgccgcaatgcttatgccacctcctatccggtgccatggtggcacaaattggaatcattattgataaaacaaatggctcctaaacttt

SEQ ID NO: 164042 - DNA, 377 bp, Arabidopsis thaliana columbia
ggagaaggtccagggctaagatgctcacatggcatagcacaagtaggcaacaagatttactcctttggtggcgagttcacaccagagtcagcccatcgacaaacacctttacgtctttgacctcgagacccggacttggtccatttctccagccaccggagacgttccacacctctcttgtttaggtgtccggatggtgtcagtaggatcgaccctctatgtctttggaggccgagacgcttcacgccaatacaacggtttttactcgtttgacacgaccactaacgagtggaaactgctaactccggtcgaagaaggacccactccttgtagttctcactcaatggcatgtcgatgaggaaaacgttttcgttttc

SEQ ID NO: 164043 - DNA, 249 bp, Arabidopsis thaliana columbia
ctggtcagaacgtgaccgagtgcatcggtgtttcacgcacagtcacattcgacgacttgggggcacgttaccacacgcgctgggatcctctccttaatgcttcacagtctcttgagctctccttcatcatcgccgaacgtcttagaaagagacgcatcaagtctcaaaaggcttttgccctctaatcaaataaacattgcttataataatatctatctatataaatgtgtgtgtgtgtgaacttactac

SEQ ID NO: 164044 - DNA, 425 bp, Arabidopsis thaliana columbia
accaagcagaaagctagagagctagcaatggcgcccaccgtgatggcctcgtcggccacctccggtgctcccttccaggggctcaaatccaccgccgggctccccgtcagccccgctccaacagcgccggcctcggcagcgtcagcaacggtggaaggatcagctgtatgcaggtgtggccgattgaaggcatcaagaagtttgagaccctgtcgtacctgccaccgctcacggtcgaagacctcttgaagcagatcgagtacctgctccggtccaaatgggtgccttgcctcgagtttagtaaggtcgggttcgtctaccgtgagaaccacaggtctcctgggtactatgatggcaggtactggaccatgtggaagctgcctatgttcggatgcactgatgccacccaggtgctcaaggagctc

SEQ ID NO: 164045 - DNA, 448 bp, Arabidopsis thaliana columbia
gtctcaccgttgaatctgaaaatgatcgccggagtattgcgccgatcttcactcccgtcgaggcagactctctccgccgcgttagcctccttcaattcgtgtatttcgcacaatctcactccagccaccaccggagcttccgtcagctctcgattcactctcgcgtcgtctcctaactcgtttggcatcagagcgaggaacatccacattagatctgagccgtcgatgattgttcccgcaggaatcgcgtcacaaggttacgccactgtcacaaaggatcgcaaaaacgagattaagaaagctaagattaaaatttctccagacaatgtcagaccattgagtaggaaggagatcgctctccagaaagaggcagcagaagaaagcacatcaaagataaaaggaacaaagatttgtatagcgattcggtcttttgttaacccggaaaagc

SEQ ID NO: 164046 - DNA, 384 bp, Arabidopsis thaliana columbia
aacttatccgattgggccacgagggttacagaaatgtgatggagaattgcagagagaatatgatcgtcctaagggaagggctggggaagacagaaaggttcaacatcgtctcaaaggacgagggagtgccacttgtcgctttctccttgaaagatagcagctgtcacactgagttcgaaatctccgacatgcttcgcaggtatggatggatagtgccggcctacacaatgccttcaaatgcacaacacatcactgttcttcgtgtggttatcagagaagatttctcgagaacactcgctgagagacttgtgatcgatatagagaaagtgatgcgtgagctcgatgagctttctttcagagtgattcacaaaatatcacttgtac

SEQ ID NO: 164047 - DNA, 462 bp, Arabidopsis thaliana columbia
caacaaccaaacactcatttctccacatcttgagagaaaaaaacagagcaagtatattagagatctcatggcgatggcggtctccggagctgtcctcagtgggcttggttcttcgttcctcaccggaggcaagagaggtgccaccgcattggcaagcggcgtaggcactggagctcagagagttggcaggaaaactcttattgtcgctgctgcggctgctcagcctaagaaatcttggatccctgccgttaaaggtggtggcaacttccttgaccctgaatggctcgatggctcgctaccaggagatttcgggttcgacccattgggtttggggaaagacccggcttttctgaaatggtacagagaggctgagctgatccatggccgatgggcgatggcagcggttcttgggatcttcgtcggccaggcctggagcggtgtggcatggtttgaagctggagc

SEQ ID NO: 164048 - DNA, 471 bp, Arabidopsis thaliana columbia
caagacggtgcgtccatcgaccgtgcacttgactttattttgggatggcatctagacacaactacatttggagattatccacagatcatgaaagacattgttggacatagattgcctaaatttacaactgagcagaaagcaaaactgaaagcttctaccgatttcgttgggctcaactactatacttcagtgttttcaaaccatttggagaaacctgatccttcaaaaccaagatggatgcaagattctcttattacatgggagtctaagaatgcgcaaaattacgccattggtagcaagcctttgaccgctgcattgaacgtttactcgagaggttttagaagtctgttgaagtacattaaggacaaatacgcaaatccggaaattatgatcatggaaaacggatatggagaagaactaggggcctcagattctggtgctgttggtaccgctgatcataacaggaaatat

SEQ ID NO: 164049 - DNA, 320 bp, Arabidopsis thaliana columbia
  unsure (1)..(320): unsure at all n locations
gccatcgtcgtccgggtcgataggagtngtgctgtattggtccgtccgtattcaatccggtgtgtccatcgtgttatatattcctgaattcgtgtaggatagctcatcgcttcgctgacgcgtgtcaacatgttatctatcagtaagatacgcacgttggaggttggcaccgtgtaatttttggtgtgtgcatgcgtacgttggttctcgcaancctcctaagtatgggaatatgcgagtttccaacagggcattgaaatggatatagagaagaagaggatcgtgcggatttatttacgttatttattgtgttacattgt

SEQ ID NO: 164050 - DNA, 74 bp, Arabidopsis thaliana columbia
tgctaggtctccatcagcatcatctttgtccattagttgattcttgagatatgatttgagtatggggtattttt

SEQ ID NO: 164051 - DNA, 290 bp, Arabidopsis thaliana columbia
aaaaaacacaacacaaaaataaaaaaaacttattaacattgtttcgagagatttggtttggagtgaaaatggcactagcggtcagcgtttcttcatcttcttcttctgcgatctcaagctctagcttcccttcttcagatctcaaagtaacaaaaatcggatcattgaggttattgaatcgtaccaatgtctctgcggcttctctgagtttgtccgggaagagatcctccgtgaaagctcttaatgtgcaatcaattacaaaggaatccattgttgcttctgaggttaca

SEQ ID NO: 164052 - DNA, 415 bp, Arabidopsis thaliana columbia
gaagaacaatggcttcctctatgctctcttccgctactatggttgcctctccggctcaggccactatggtcgctcctttcagacggacttaagtcctccgctgccttcccagccacccgcaaggctaacaacgacattacttccatcacaagcaacggcggaagagttaactgcatgcaggtgtggcctccgattggaaagaagaagtttgagactctctcttaccttcctgaccttaccgattccgaattggctaaggaagttgactaccttatccgcaacaagtggattccttgtgttgaattcgagttggagcacggatttgtgtaccgtgagcacggtaactcacccggatactatgatggacggtactggacaatgtggaagcttcccttgttcggttgcaccgactccg

SEQ ID NO: 164053 - DNA, 393 bp, Arabidopsis thaliana columbia
taaactcaaaggacaatgctgagacatcaatacctccactgttgttatcattaagtggcgagcatggttacagaaataattgcggatctggcgctggtggactctttgtgtttgatagcttattccctggaaatttctacttgcgtccccttcttaaggaatattctttcaaaccttcaacactggctatagaactgaattctggggaatccagtgaagctgtctttgaggctactcgtgttgcctacagtgcaatgggtagagtcgctcttctatcgggccagccacatgaaggtgttgcaattgaagctcgctctgactccaaaggatactatgaggagactacaagcgatattaatggaaattatcgactgagagggttacatccagatt

SEQ ID NO: 164054 - DNA, 464 bp, Arabidopsis thaliana columbia
ctcaagcaaacagcttgaataaagaatttgggtcgaaactgaaagagcatatgcagtattgcatggatcatcctgatgagattagcaagcttgctaaggttaaagctcaagtgtctgaagttaaaggtgttatgatggaaaacattgagaaggttcttgaccgtggtgagaagattgagcttttggttgacaaaacagaaaaccttcgctcacaggcgcaagattttagaacacaaggaactcaaatgagaagaaagatgtggtttcagaacatgaagataaagctcattgtccttgcaattatcattgccttgattctcatcatcatcctctcaatttgtgggggattcaactgcggtaaataagtctggaacatttctttcccgcgttatcgactgcgctctgtgcttcccaagatctctgagaatatcttcattcagttccgtgtgctacctttttgtttt

SEQ ID NO: 164055 - DNA, 414 bp, Arabidopsis thaliana columbia
caacaacaaatcttaaacgttttactttgtgctgcactactcaacctcaatggccgcctcaacaatggctctctcctgccctggcttcgccggtaaggccgtcaagctttcccccgcggcatctgaagtccttggaagcggccgtgtgacaatgaggaagactgttgccaagccaaagggcccatcaggcagcccatggtacggatctgaccgtgtcaagtacttgggtccattctctggcgaatcaccgagctaccttaccggagagttccccggagactacggatgggacaccgccggactttcagctgaccccgagacattcgcaaggaaccgtgaactagaagttatccacagcaggtgggccatgctcggagccctaggctgcgtcttccctgaagctttggctagaaa

SEQ ID NO: 164056 - DNA, 469 bp, Arabidopsis thaliana columbia
tacaaaaccaaatcgagacctccacagcagacgagattacgcagaagaacatgttgcaggaattatgtatcaaggctcgtgggggctgtttattttaaatataatatccaagagatatttgcagccatggggatataagggaaacatggaactcaacaaggaagatatcgtgccattgacaccagcagctcaaatcacagcacctccaatcctacaagatggctcatctcaacaagctgaggatgcgtttggattagcagtttggttaggaagaggtttatcaagtgtttaagctcagagaagagatagtgatgttaattctaagtttcatgtaagatctgctcaagtactcatttttacactattcgagtttgaagtttgattggagagaagaagaagactgtacaagattatgagaagaattggagaagcgagtcaaggttagaaagaagatgtgatatcattttac

SEQ ID NO: 164057 - DNA, 293 bp, Arabidopsis thaliana columbia
ggcgaagatgaagtacaacccaagagtgacctcttctcgcagaaagaacaggaaggctcatttcacagcttcctccagcgagaggcgtgtgataatgagctctcctctctccaccgatcttcgtcagaagtacaatgtcagatccatgccgatccgtaaagacgacgaggttcagatcgttcgtggtacttacaagggacgtgaaggcaaagttgttcaggtttaccgtcgcaaatgggtgattcacatcgagagaatcacgagggagaaggtgaatggaacaaccgtgaacg

SEQ ID NO: 164058 - DNA, 459 bp, Arabidopsis thaliana columbia
gaagaacaatggcttcctctatgctctcttccgctactatggttgcctctccggctcaggccactatggtcgctcctttcgacggacgttaagtcctccgctgccttcccagccacccgcaaggctaacaacgacattacttccatcacaagcaacggcggaagagttaactgcatgcaggtgtggcctccgattggaaagaagaagtttgagactctctcttaccttcctgaccttaccgattccgaattggctaaggaagttgactaccttatccgcaacaagtggattccttgtgttgaattcgagttggagcacggatttgtgtaccgtgagcacggtaactcacccggatactatgatggacggtactggacaatgtggaagctttccttggtcggttgcaccgactccgctcaagtgttgaaggaagtggaagagtgcaagaaggaagacccc

SEQ ID NO: 164059 - DNA, 471 bp, Arabidopsis thaliana columbia
  unsure (1)..(471): unsure at all n locations
ttaattacaaattatgactcgcaatattctcttgacggttacattgatctgcattgttttcatcaccgtcggtggccaatctccgggcaccgcaccgatccatcctccttctcctacacctgcttctacacctcagatctctccgcccgctccttcaccggaggctgatactccttcagctccggagattgcaccttcagctgatgttccggctccagctctgacaaaacataagaagaagacaaagaagcataagaccgctccggctcctggaccagcttcggagcttttaagcccgcctgctccgcccggagaagctcctggtcctggaccaagcgatgctttctctcctgccgctgacgatcagagcggagcacaaagaataagtgttgtgatacanatggtgggagctgcggcaatcgcatggtctctacttgttctagccttctaataaattttgttcttcttttt

SEQ ID NO: 164060 - DNA, 456 bp, Arabidopsis thaliana columbia
cggccatgaactcgagtgttctcacttgcagctactcaattgctggctctggctcggtagagcttaaccagaaagttggttgggtggattcatcagttgggtttggtcagaagaaacagatgattatgcctgtgatcaaagctcaacgcgttgttggtgatgatgttgatggatctaatggaagacgatcagccatggttttcttagcagctacactcttctccactgctgctgtttctgcttctgctaatgctggcgtcattgacgaatacctcgagaggagcaaaaccaacaaagaacttaatgataagaagagattggcatcaagtggagcaaactttgcgagagcattcactgttcaattcggaagctgcaagttccctgggaatttcactggctgccaagatcttgccaagcaaaaaaaagttccatttatcttagaagatattgctttgg

SEQ ID NO: 164061 - DNA, 448 bp, Arabidopsis thaliana columbia
  unsure (1)..(448): unsure at all n locations
gagatgaggagatcaattactacccctcaaagtttgatcctgtccgctgcgctgagaaagttcccacccctacaaactcctacgactggaattcgaacaaagtgcgtcatcaagaaagagaacaacttcaaacaggctggagacaggtacagatcatgggcaccagacaggcaagacaggtttgttaagagatgggtggagattctatcggagccacgtctcacccacgagatccgcggcatctggatctcttactggtctcaggctgatcgatccttgggacagaaacttgcaagccgtctgaacgtgaggccaagcatctagaggccaatctccatataagctcagtctatgtgaggtacaatcaatctcatcgatctatcatcgcttggtcgttaaatccgtcaaaaagataatcacatgtngtggtggttcttgtctatataat

SEQ ID NO: 164062 - DNA, 468 bp, Arabidopsis thaliana columbia
ccaaaaaaatagcttatctctctcttatcaccgtttcaatcactaaaccatggcgacctccgtcgataaccgccattgtgccagcatgaacggcgtcgctcacgccttcaaacctcctctcgttccttctcctcgctcattcgaccgccaccgtcaccaaaaccaaactctcgacgtcatcctcaccgaaactaaaatcgtcaaagaaaccgaagtcatcaccaccgtcgtagacagttacgacgactcctcaagcgacgacgaagacgagagccataaccgtaacgtcccttactacaaagagctggttaaaaaatcaaacagcgatttagaaccgtcgattttagatccgagagatgaatcaacggctgatagttggattcaacgtaacttatccatgcttccgtctcaccggaaaacatccattcaacgccgaagcaccttttcctcgtcttatgccccatggat

SEQ ID NO: 164063 - DNA, 313 bp, Arabidopsis thaliana columbia
  unsure (1)..(313): unsure at all n locations
ggcttcagtgactctaggttcatggattgttgttcaccaccacaatcatcatcatccatgcggggatccttaccaaaggcanagccagatcttgtcctataactcttactaaacccatctcctttcgatcaaaacgcaccgtttcatcatcttcttcaatcgtttcttcttccgttgttacaaaagaagacaatctactccaatctgaaccatcctctttcgatttcatgtcgtacatcatcaccaaagccgaattagtcaacaaagctttagattcagctgttcctctccgtgagccactcaagatccacga

SEQ ID NO: 164064 - DNA, 370 bp, Arabidopsis thaliana columbia
  unsure (1)..(370): unsure at all n locations
aagcagaagatacactacagagacagagagagttcttgacaagatgggtaaagcaagaggagggaacaatggcgtgaatgaaagttctctcntttatctttttggttccggccagccttcttccgctgctgctgccacaatggggactactactactacaaccaccacaactaccaccgatgggaccggaggcagaccgataaccaccacgactaccacagtcactgataacaagaagacatctgcaggtgttagaggaagtcctaatatttacttcagatcagatggccaaatctgtggaaactttctcacggacaggccatttactaatgctcatgcattttctgttgtaggatctttcattattttt

SEQ ID NO: 164065 - DNA, 467 bp, Arabidopsis thaliana columbia
gctaaactgctaagagcatgcctctggataagaggcaacgggatttgcctctgggcttaagtcctgaagcttgcttcaaggatatagtaggtcggtctgtccttcctagaattcctctccctgagcttgggaaactatatgcagctaagcttcaggctcgctgtttgcagccaccaccattccagtctttgctgtgcagtcatgataaggagtcttatggaaaaagattctcacggtctgacatgcggtcttggtgcgctgctgctactactactactactccacttggagcattagagtcttctcagaaaagacttttgatattcgatcagtcaggagaccagactcgtctattacaatgtccatttcctctacggtttccatctcatgcggctgcagaaccagtgaaactctctgagttacaagggatagagaaagctttcaaagaagatggtgaagagtttcac

SEQ ID NO: 164066 - DNA, 449 bp, Arabidopsis thaliana columbia
cactaagccaactctctcacctacggtttacaagccaacactctctcctccggttaacaataagccaagtctctcgcctgcggggacaagccaacactctctcctccggtttacactaagccaactctccctcctccggtctacaaaaagtctccaagctattctcctccacctccatttgcaccaaaaccaacctacactccacccaccaaaccatacgtcccagagatcattaaagccgttggaggcatcatcttatgcaaaaacggctacgaaacctaccctattcaaggagcgaaagcaaagattgtgtgctcggagagggggtcatacgagaagagtaagaacgaggttgtcatctacagtgatccaactgactttaagggatacttccacgtggtgttaacccacatcaagaacctatctaactgccgtgtcaagctctacac

SEQ ID NO: 164067 - DNA, 463 bp, Arabidopsis thaliana columbia
  unsure (1)..(463): unsure at all n locations
aaggaaggtgatgagctttctcaatctctctttactgattcttaatgaaagtcatctcctttctctttggtatcccttttgttcgtctctgcttaattcctgaccaaaaattgtgacaagatctttcaatccaaaagctatatacattaagagctcaggtcactatctgacgggatccgtgacaatagtggttactggagtcaaaagcagctccttgaatcttgagtgttaagtagataggtaaggtaaccgttcatggcctcgaagtatggttctggagttctcccagaaaataagaaggaaaagggcgataaggaaaccccggaaacatcttattccagtcaaagtgtctcagtaaacactttggcagatcaagtatcttcaactttgtcttttgctccaagcagcgacagtaaaactggaggtgaagttaaaantaatgaaaagtctgatcagagcggga

SEQ ID NO: 164068 - DNA, 454 bp, Arabidopsis thaliana columbia
acatcccaaaggcctaggagcaagatggtccttgttggtccatccaaatctgccgatactatttgcaaatacatagctccggagcaggttcccgttaaatacggtggacttagcaaagatactcctttgaccgaagaaaccataacggaagccatcgttaaaccggcagcaaactacactattgaattgcctgcttctgaggcttgcacgctttcatgggagcttagggttttgggtgctgatgtgagctacggagctcagtttgagccaaccaccgaaggaagctatgctgtgatcgtctctaagacacggaagattggatcaaccgatgaaccggtgataaccgattcttttaaggtgggtgaaccgggaaagattgtgatcacaatcgacatccagacttccaagaagaagaaagtgctctacaggttcaaaactcactaaaaggtctgat

SEQ ID NO: 164069 - DNA, 448 bp, Arabidopsis thaliana columbia
aaccaacgtaaaacactaactaagagatcaatatggctggagtgatgaagttggcatgcatggtcttggcttgcatgattgtgggcggtccaatcacagcgaacgcgcttatgagttgtggcaccgtcaacggcaacctggcagggtgcattgcctacttgacccgaggtgctccacttacccaagggtgctgcaacggcgttactaaccttaaaaacatggccagtacaaccccagaccgtcagcaagcttgccgttgccttcaatctgccgctaaagccgttggtcccggtctcaacactgcccgtgcagctggacttcctagcgcatgcaaagtcaatattccttacaaaatcagcgccagcaccaactgcaacaccgtgaggtgatgagcgacggtcaaatgaagctactagcggatgtttcggatattatataatcgatgaga

SEQ ID NO: 164070 - DNA, 382 bp, Arabidopsis thaliana columbia
cgatttggtatttaccggttcagccgacggaacgttgaaagtatggaaacgtgaggtacaaggcagagagatgaagcatgttgggtgcaagtgttaatgaaacaagagaacgcagtaacggcgttagctgttaatttaacggacgctgttgtttactgtggttcgtctgacggaaccgttaacttctgggaacggcaaaagtatttgactcacaaagggacgattcacggccaccgtatggcggttttgtgtctcgccaccgccgggagtttgcttttgagcggtggagctgataagaatatttgcgtttggaaaagaaacggggacggatcgcatacgtgtctctctgttttgatggatcatgaaagacctgttaagtttt

SEQ ID NO: 164071 - DNA, 289 bp, Arabidopsis thaliana columbia
tgctaaggttcctggagttactgatcgtgggttgtttctcaaggaagattaagaaggtacccataatgggattctgtttgatgggagctggaatatctactgctttgatcctaattaactatccattgatttctcaaggtattaaatgataaatttctggatgctttaattttcatatttaaagctaattttcatatccttatatgttaatgtaatcattattcatgataatcatttaaaaatacaatatcttatcttatatatttctttttttattatttatacattt

SEQ ID NO: 164072 - DNA, 372 bp, Arabidopsis thaliana columbia
ccttcccaagaagaagaacaccaaagaagaagttaggttaataatgatgggcagtgtcgaggtgaatctgagggagactgagcggggtcttggtcttcccggtggagatacagtggctccggtaaccggaaacaagagagggttctcagagacgggtgatctgaagctaaatctgaataatgagcctgcaaacaaggaaggatctacgactcatgacggaatgactttttatcccaaggacatgagtgctttggtccaactatccatcctactactactacctcactcagagcatgagattcttctcagaaaagacttttgattttcaaccagtcaggataccatactcttctatcacaatgtccatttcct

SEQ ID NO: 164073 - DNA, 184 bp, Arabidopsis thaliana columbia
atcactgacaatggagcaaccactccttcctttctcgtcgccgctgccttagctcatgcttggggtctctttgtcgctaacgctagtggctctaacatttccggtgtccacgttaaccctgccgttaccttcggtgccttactcgttggttacatcactctcctacgtactattctatactgta

SEQ ID NO: 164074 - DNA, 442 bp, Arabidopsis thaliana columbia
ggagtatttagattgatattagattatcaaaatttttttatggtttacgtgatcggactaataaaatgaagtatccaggctccgtttagcaaaaacccaattgataattaatatataatatttttataattactacttctattatatgcaaaattatgataaaaactctataaaaaaaattgaaacagggcgatctaaaactgttgctcaaatcaaatacaaataatatataatataattcaaaatttgttgactatttgacagaagacaagtgaaagaactgaattgaaaaaaaagaaggagtagtaaaaaaagacgcggtatttggttcatttgtcctatatgtgcaaatcaaaatcgggcaaatttttccttttactcggggtagagcataaacctataaaatggaataaaaaaaggaagaagcccgttcatgaacaag

SEQ ID NO: 164075 - DNA, 446 bp, Arabidopsis thaliana columbia
gaaatggcgacatcgggaacgtacgtgacggaggttccgttgaaaggatcggcggagaaacactacaagagctggaagagcgagaaccatgtcttcgctgacgccattggccaccacatccaaaatgtcgttgttcacgaaggcgaacatgactctcacgggtctatcaggagttgggactacacatatgatggaaagaaggagatgttcaaagagaagagagagatagatgatgagaataaaacattgacgaaaagaggactggatggtcacgtgatggagcatctcaaagtatttgatatcatctacgaatttattcccaaatctgaggatagctgcgtctgcaaaatcactatgatatgggagaagcgcaacgatgactttcccgaaccaagcggctacatgaaattcggcaagcaaatggttgttgacattgaaggccacgt

SEQ ID NO: 164076 - DNA, 404 bp, Arabidopsis thaliana columbia
cactgaagagagaaagcttgaagacggcgagagctccatcttttctcaggcatctcttatcttcaaatcacaatgtctctggttgcaaatgaggagtttcagcacattttgcgtgtgctcaacactaacgttgatggtaagcaaaagattatgtttgcccttacctctatcaaaggtattggaaggagattggccaacattgtctgcaagaaagccgatgtcgacatgaacaagagggctggtgagttatctgcagctgagattgacaacctcatgactattgttgcaaacccaagacagttcaagattccagactggtttttgaacagacagaaagattacaaggatgggaagtactctcaagttgtctccaatgcccttgacatgaagctcaaggatgatct

SEQ ID NO: 164077 - DNA, 390 bp, Arabidopsis thaliana columbia
aaaaaaaacatcgcacaagaaaataaaagatttgtagaatcaactaagaaaatggctagcactatgatgactacattgcctggagggaatggtcttcgagccaccaaaatctctgcagctcctgtacaaggcctggcaagtgttcagcccatgagacgcaagggaaatggagctttgggtgcaaagtgtgacttcatcggttcatcaacaaatctgataatggtaacgtcgacgaccctgatgttgttcgcggggagattcggacttgcgccatcagccaataggaaggcgacagctggacttaaggtggaggcacgtgactcagggctacaaacgggtgaccccgccggggtcacgcttgccgacactttggcttgggggaccgttggt

SEQ ID NO: 164078 - DNA, 427 bp, Arabidopsis thaliana columbia
cgacaatctttttgtcgctgctgaagctgttcattcccttggaatctccgtccttatctataaactcaccaaggagaggacttgtgctggattatctctcaagtcacaagagctaacagctctgtttttggcggtgagactgtattgtagttttgtgatggagtttgatattcacacgttacttgactcggctacattggtgactacactttttgttatctatatgatccgttttaagctcaaagctagttatatggacgacaaagacaattttgctatctactacgtcgttattccatgtgttgttctatcagtactcattcacccatcaacacatcatcatataatcaataagatttcttgggccttctgtgtttaccttgaagctgtttcagtccttcctcaccttagagtcatgcaaaacact

SEQ ID NO: 164079 - DNA, 465 bp, Arabidopsis thaliana columbia
  unsure (1)..(465): unsure at all n locations
agcgactcctaggcagacttacgggttcttcaggattgagattttgggtgctcttgtatctatccagctcatttggttgctcacgggtattctggtttatgaagcgattatcagaattgttacagagaccagtgaggttaatggattcctcatgtttctggttgctgcctttggtctagtggtgaacatcataatggctgttctgctagggcatgatcatggtcacagtcatggacatgggcatggccacggccatgaccatcacaatcatagccatggggtgactgttaccactcatcaccatcatcacgatcatgaacatggccatagtcatggtcatggagaggacaagcatcatgctcatggngatgttactgagcaattgttggacatatcgaagactcaaggtgcagcaaaatgagaaatgaaagagaaacatcaatcttcaaggagcttatctgcatg

SEQ ID NO: 164080 - DNA, 427 bp, Arabidopsis thaliana columbia
atgatctgaaactttctgttgaaacactagaagccctgtcgaaactgaccaaagaaggcttaaagatgaaggtacctaggtacagtaagtctgcctatagtgggagaggtgacagagccgattcatcaacatggcctgaagttgaaggacctctatcggttattctctttgagggatggatgcttggttttaagcctcttccagctgacgttgttaaagcagttgacccacagctggaggttgtgaataagaaccttgaagcgtattacgacgcatgggacaagtacatcgatgcttgggtcgtcatcaaaatccaggacccaagttatgtataccggtggcgtcttcaggcggaaatcgccatgaggcaggatggccaagctgggatgtcggatgaggaggtgaatgactttgtgtcgcggtattt

SEQ ID NO: 164081 - DNA, 364 bp, Arabidopsis thaliana columbia
acttactttggcaacaaacaaacaacaacaaagagagaaattaacatggcgtcttttgcaaccatcgccgccgtacaaccttctgccggcgtgaaaggacttggaggtagctctcttgccggagctaagctcttcatcaaaccttctcgccaaagcttcaaaaccaaatccaccagagctggtgctgtggtggctaagtatggagacaaaagtgtatactttgatttagaagatttgggtaacacaacaggacaatgggatgtgtatggatctgatgctccttcttcttataacccactttagagcaagttttttgagacatttgctgcctctttcacaaagagaaggttgcttctcaaacttt

SEQ ID NO: 164082 - DNA, 353 bp, Arabidopsis thaliana columbia
cattggtctctcctccttcctactccacattctccagcttcaagcgtctaaaatcgagctcaatcttcggagattcacgtgacgatgagcaccaaaatcgcaacttaaagccacaaaagctaagagcaatggtgcttcaactgtgaccaaatgtgaaattggccaaagcttggaagagtcttcggcacaagcaactcctgacaagggatcgagaactttgctgaggtgtatgggaggagcaatgcaatcactaactgagtacggtatggccacgtgatggagcatctcaaagtatttgatattcctttggtgatgaacacctcgctagggatttgcttgctgatcaacttctc

SEQ ID NO: 164083 - DNA, 309 bp, Arabidopsis thaliana columbia
  unsure (1)..(309): unsure at all n locations
ctcatgctccctcaattcttcatgatctaactactaagagatctgattcactttcttcacgctctcctagtctcatcggctgtggttccctanctcttatctggacacaatgatggacctaactaaactgaagcctccacagatcactttttattgctcggcgttttccgtcttgctcacacttcatttcacgatacagcttgtatcgcagcatctcttccactggaagaaccctaaggaacaaaaggctatactcatcattgtgcttatggttcctatctaccccgatgtttcctttattgggttttt

SEQ ID NO: 164084 - DNA, 430 bp, Arabidopsis thaliana columbia
  unsure (1)..(430): unsure at all n locations
ctgacacttgaaaaaactcaaaaccgtctcatcatggcggcgtcacagacattctcactcctcgccttcactttctccctcctcgcctttgcttccaccgtgagtagccacaacatcactcaaatcctcgctgattctccagattactcttccttcaacagctacctttctcagacgaagctcgccgacgagatcaacagccgcacgacgattacagttctcgtccttaacaatggcgcaatgtctgctctcgccggaaaacatccactctccgttattaaaagcgctttaagcctcctcgtcctcctcgattactacgatccacaaaaactccacatgatctccaaaggcacaactctctccaccacactntaccaaaccaccggaaacgctcccggaaacctaggattcgtcaacatcaccgatctta

SEQ ID NO: 164085 - DNA, 470 bp, Arabidopsis thaliana columbia
aggatatcaaagaaaagagggacgacgatcttctggtgttacccactgatgcggcgctatttgaagatccttcattcaagaactatgcagagaagtatgctgaagatgtggctgcatttttcaaggactacgctgaagcccatgccaagcttagcaatctcggtgcaaaatttgatcctcccgagggcatagtcattgaaaacgttccagagaagttcgtagctgcaaagtattctacgggaaagaaggagctttcggattcgatgaaaaagaagataagagcagagtatgaagcaattggaggaagcccagataagccattacccacaaattacttcctcaacatcataattgccattggcgttttggtcctcttgtccactctctttggtggtaataacaactccgatttctctggtttctaattgacaaattatatattttgatttctcttacctacatacataatt

SEQ ID NO: 164086 - DNA, 463 bp, Arabidopsis thaliana columbia
aaacttttcttcactctcttgtctcttcaaacttcggttactccgttttagtcgacaacaatggcctctgtttcaaggaggttactgaggagagagacgatcccctgtttcagccacaccgtgaggaaactcttctccaccgttggatctccttcttttgctcagagactcagagatctccccaaagacttcccctctaccaacgccaaacgtgacgcctctctgcttattgggaaaacgcctcttgtgttcctcaacaaagtcactgaaggttgtgaagcgtatgttgcagccaaacaagaacatttccagccaacttgtagcattaaagacagaccagctatagccatgattgcagatgcagagaagaaaaaactaatcatccctggaaaaacaacactgatagagcctacttcaggaaacatgggaatcagtttggctttcatggctgctatgaaagggt

SEQ ID NO: 164087 - DNA, 465 bp, Arabidopsis thaliana columbia
tcacaaaacccaattagccggagatggccgcaacatccgccgctgctgcagctgcttcttccatcatgggtactcgggtggctcccggtatccatcccggttcaggtcggttcacagccgtgttcggtttcggaaagaagaaggcagctcccaaaaagagtgccaaaaagacggtgactacggaccggcctctttggtacccaggcgccatttctcctgactggcttgatggttccttggttggagattacggttttgatcccttcggtttaggcaaaccggccgagtatcttcaattcgatatcgattcactagaccagaatctggctaagaacttggccggagacgtgatcggaacccgtacggaagctggcgacgccaaatcgacgccgtttcagccgtacagtgaggtgttcggaatccagagattcagggaatgcgaactcatccacggacggtgggcga

SEQ ID NO: 164088 - DNA, 471 bp, Arabidopsis thaliana columbia
tgaaagtagaagaagcgtgtggattggacatgggcttaaagacacacaaattctttctacgaattttgttaatttttgttatatttccttcttcactattccgcttagagcacaacaccacgatgacgaccaaggccatggagagaggatttaagctgattctgggttctcaatccatggcgagaaagaggattttggctgaaatgggatatgattacactatcgtgactgcagacattgatgagaaagctattaggacagagaagcctgaagatttggttgtggctcttgctgaagccaaggcaaatgagattatatcgaaattgggaggtgagagccagtttgcaaaagatcctcaaccaactcttttgattactgcagacactgttgttgtgtacaaaggtgttattagagaaaaaccaaccactaaagaagaagctcgtgaatttatcaaaggctatttcggtcaca

SEQ ID NO: 164089 - DNA, 443 bp, Arabidopsis thaliana columbia
ttgaggtggttcgaaccaagaatgggctttatgccatacagtgctccggctgaagaaggtgcgatctctacgttgaagagagcacttgatgctctgaacacacatctcacgtctaacacttaccttgtcggacactctattacccttgctgatatcatcactgtctgcaacttgaacttgggatttgctactgtcatgaccaagaaatttacctctgaatttcctcatgttgagaggtacttctggactgtggttaaccaaccaaacttcactaaagtgttgggtgatgtcaaacagactgaagctgtccctcctattgcttccaagaaagctgcccagcctgcatagcccaaagaagagcctaaaaaaaaggaagccccagtagcagaggcacctaagcttgcttgagaggaagaggcaccaaagcccaaagccaagaaccc

SEQ ID NO: 164090 - DNA, 422 bp, Arabidopsis thaliana columbia
ctcaactttcgtctaagtcttgccgatttctcgagtttttctttatctacacgtggcactgtgttggctgtaagagctctgaggacagtcgcggtagaagagtcgtccgagaagaagatggtgaaagggattagggtttatgagcatggcggtcctgaggcttctgagagactcagaagatctccccaaagacttcccctgtaccaacgccaaacgtgacgtttattgttattgttttttactctatagatgtgttcctcaacaaagtcactgaaggttgtgaagcgtatgttgcaaccaaacaagaacattttcagccaacttgtagcattaaagacagaccagctattgtcatgattgtagatgtcattgaacaaattcccattcttctttgaattataacacttttttgtgtctacttt

SEQ ID NO: 164091 - DNA, 391 bp, Arabidopsis thaliana columbia
ctcgacccacccgtgcgaaaagctcaagccgagagagacaatggcatcaacattcacgagctcaagcagtgttcttaccccaacgacattccttggccagactaaagcctcaagctttaacccccttcgtgatgttgtctctctcggatctcccaagtacactatgggaaatgatctttggtatggacctgacagagtgaagtacttaggacccttttccgttcaaactccgtcttacctcaccggagaattccctggcgattatggttgggacaccgccggtttatccgcagaccctgaagcctttgccaaaaacagagctcttgaggtgatccatgggagatgggcaatgttgcgagcttttgtgtgcataacccctggaggtcttcaa

SEQ ID NO: 164092 - DNA, 429 bp, Arabidopsis thaliana columbia
ctttcgttagtttttccaatttcggatttggtcttgttgagaatatatttacgattttaattgagagattttgtgatagctcaatgtcaatggagtgtgtggttcaaggaatcatcgagacacagcatgttgaagctcttgagattcttcttcaaggtctttgtggtgttcaacgcgaacgtttaagagttcatgagttatgcttaagaagcggcccaaatcttggagttgtgtcatcagaagttaggctattatgtgatcttgatcaacccgaacccacatggacggttaaacatgttggtggtgcgatgagaggtgcaggagctgatcaaatctctgttttggttagaaatatgattgaaagtaaagtaagcaagaatgctttgcgtatgttctatgcacttcgttacaaactagaccatgagcttc

SEQ ID NO: 164093 - DNA, 466 bp, Arabidopsis thaliana columbia
gtcaaacttgttaagaatggtgttttgagattgccacctggattcagattccatcctactgatgaagaacttgtggttcaataccttaagaggaaagtttgttcttctcctttgccagcttcaatcatccctgagtttgatgtttgcagagctgatccttgggatttacctggcaatttggagaaagagaggtacttctttagcacaagggaagctaaatacccaaatgggaaccggtctaaccgggcaactgggtctggttattggaaagctaccggtattgataaacgggttgtgacctctagaggaaatcaaatcgttggtttgaagaaaactcttggcttctacaaaggcaaaccacctcatgggtcaagaaccgattggatcatgcacgaatttcgcctctcttcttcttctccgagttttatggtgcccactcagaacctggtacttctgcgtatcttct

SEQ ID NO: 164094 - DNA, 193 bp, Arabidopsis thaliana columbia
atcagaaagcttttaccctgagccgtcacttttttctccgatcaggccacccaataatacatagttcattgccggagaacaagaggtggtctatcaccccagcacacttagggcggcgctcgctgaggttatttctactcttaacgtcgaatctatcggctgaggcttcttagtctctttcatcatgatcact

SEQ ID NO: 164095 - DNA, 426 bp, Arabidopsis thaliana columbia
atcgaaacagacacagatatcatcagaacgaagaacttcagccaaaatctgatttttctctgtttcacgacaagaaatcgaattaacgaaatctaatgaaaccttcaaaatcgcatcacaaggagaaaaccgctcgtcggagagaggagaaactagaggaatccgataatccaaaatacagagatcgtgctaaagaaagaagagagaatcaaaatcctgattatgatccatcagagcttagttctttccatgccgttgctcctcccggagctgtcgatatccgtgctgctgatgcacttaagatatctattgagaaccagcaaatatcttggggggatgttgaacatacccatttagttaagggtttggattatgctttgttgaataaagtacgaagcgaaatcgttaagaaacctgatggtgaag

SEQ ID NO: 164096 - DNA, 450 bp, Arabidopsis thaliana columbia
  unsure (1)..(450): unsure at all n locations
attgggacccttgtttcctcgtgagagaattttcaatcctagggcttaaagagcacgttcctagtataaagctgattcacagatgcggagattcttgattaaccaagctaaaggtctcgtcgaccattctcgtcgtcaacatcaccacaaaagtccaagctttctctctcctcaacctcgtccccttgcttcttctcctcctgctctgtctcgtttcttctcttctacttcggagatgtctgcttctgattccacttcttctcttcccgttactcttgactccatcaatcccaaggttctgaaatgtgagtatgctgttcgaggagaaattgtcaacattgctcagaagttacaagaagacttgaagactaataaggatgcttatccctttgatgagataatctattgcaacattgngaatcctcaatctcttggtcagctgcctataaa

SEQ ID NO: 164097 - DNA, 456 bp, Arabidopsis thaliana columbia
cgagaactgaaagatttgtcatttgtctctcaaatatctgtggagagaagagaaattggaataaagaagacagtgttgtgagagagagagagagagagagagatgagttcgtctctacctctgaggctacttcttcctcttacaacttctctgatttctcctcctcctcctcctccagattctttccatgctccttcgtcgttcagatcgaaaaaccctaatttcaaacgccgattgtcttcttcttcctgttgttcttcccagtcgcagcttttctctgggagatgcagatcctattcgcggtgtgttaccatgtgcttaccagaacacatgagaaatcaagagaacacagaaatcttgacagataaagatgaccacattgaatgtgtgcttgaatcggatgaagattctggcctcaggattccgactcaagcacaggctatcgttgaaggatct

SEQ ID NO: 164098 - DNA, 458 bp, Arabidopsis thaliana columbia
tgaattctcctgcacctgaaagaactagatcaggactctccaggaagatgcttcttgctcccaaggatttaagttttgttggctacacatacaagaactttgacgctgtaaaaggattgcgtcattcacttgagatggcaagaactatgtctctagatcgatcaccagctgaggcgatgcctgtggagctgataagcggggaagcagcagaggcacagatggtatcatcgatggatgatccaatgataatttgaaagaaccgatcaaagatataagatcttcctcaggtttgggatcttaaagccttctaaaaaaaaataactgtacagcaagcccagaggttaaagaggaagaagatcaaaatggtttgtgtgggagattgattaacaatgttagcctttcctgattattctgtgtattagaagaagaagacaagagaagggagaaaaagatttaga

SEQ ID NO: 164099 - DNA, 449 bp, Arabidopsis thaliana columbia
caaaaaaaaaactcaagagagactttgtggccatggcagcctctctccaatccaccgctacattcctccagtcggcgaagatcgccaccgctccttctcgcggaagttctcacctccgatcgactcaagccgtcggcaaatcttttgggctcgaaacttcctcggctcgcctcacttgctccttccagtctgactttaaggacttcaccggtaaatgctccgacgctgtcaaaatcgccggattcgctcttgccacctctgctctcgtcgtctcgggagcaagtgcggagggagctccaaagagattgacctatgatgagattcagagcaagacatacatggaagtgaaaggaactggaacggctaaccagtgccctactattgacggtggctctgagactttctcgttcaaacccggaaagtatgcaggaaagaagttctgcttcgag

SEQ ID NO: 164100 - DNA, 404 bp, Arabidopsis thaliana columbia
gcaaacaggtgccagaacgcatgttccaatacccaatgacggaactgatgtttgggaaatcaaccttaaacacctaaaatttgggcataaaatagcgtctggttcttatggagatctgtataaaggtacatactgtagccaggaagttgctatcaaagtcctaaaggccagagcgtctagactcagatctagagaaagagtttgcccaagaagtctttattatgaggaaagttagacacaaaaatgttgttcagttcattggtgcttgcaccaagcctccacatctgtgtatcgttacagaattcatgcccggtggaagtgtatatgactatctacacaagcaaaagggcgtctttaagcttccaactttgtttaaagtagctatagatatttgcaaagggatg

SEQ ID NO: 164101 - DNA, 459 bp, Arabidopsis thaliana columbia
gtagaaaggaaatgaatctatacgcgcacgatctttctcttctcgatttcaattacaacgtctccggtcccttcggcgagccactatctcaccgcttcctctctcctggccctttcttccagggcgaagaagacgattaccgccgtaatacgagctacagtcacgacggagctaatggacgagaaccggacacagattcaagagcatctccgccgcatcgccacgacgggaggtctccgttacctctgggaatggattggagttctcctcctcgtcatttggaaggaagggacacggtttggccacatgatcatcgaactggttggagttactgtgtcactgtcccttcttgggttgaccttcccaagtcaagcgtttcagatcctgccgtgttttatagagtgcaagtagcgatacaatctcctgagggaatcacttctgctaggctggtacttagga

SEQ ID NO: 164102 - DNA, 461 bp, Arabidopsis thaliana columbia
ctactattcgccgttcgcttttccctcgccgtcgaaatcaacatggcgccgaagaaggataaggttccgccaccgtcatcgaagccggcgaaatccggaggtggaaagcagaagaagaagaagtggagcaagggaaagcaaaaggagaaggtgaacaacatggtgctgtttgatcaagctacttatgacaagcttctcactgaagctcccaagttcaagctcatcaccccttccattctctctgaccgtatgaggatcaatgggtcgctagcaaggagagcgattagggagctaatggccaaaggtgtgatcaggatggtcgctgctcactcgagccagcagatctacactcgtgccaccaacacctaagatgtttggtttctttattcacctaagatgtttggtttctttttcttatctcttgctgtttgattcttcagggacttgttagaatcttttgt

SEQ ID NO: 164103 - DNA, 368 bp, Arabidopsis thaliana columbia
cacgatttgagcagaatacgcaatgaggacaccgacgacgattctccttcttgtcggagctatcctcttctccggcgccggctatgtcagatccgacgcctccgaccaccgttacaaggaaggagacaccgttcctctctacgccaacaaggtcggcccatttcacaatccaagtgagacgtatcgatattttgatcttcccttctgtatcccagagggtgtgaaagagaagaaggaagctcttggcgaggttctaaacggggatcggctagttagcgctccatacaagctcaactttagagatgaaaaagaggctgaggtatactgcaacaagaagttgactaagaaaaggttaaacagttcaaaaa

SEQ ID NO: 164104 - DNA, 443 bp, Arabidopsis thaliana columbia
ctcgtccacatctttctcctttggtggcaaacacaacgacagatagagagaaacgatggcgtcgaactcgcttatgagctgtggcatagccgccgtgtacccttcgcttctctcttcttccaagtctaaattcgtatccgccggagttccactcccaaacgccgggaatgttggtcgtatcagaatggctgctcactggatgcctggcgagccacgaccagcttaccttgacggttctgctcctggtgactttgggtttgacccacttggacttggagaagttccagcgaaccttgagagatacaaagagtcagagctcatccactgtagatgggctatgctcgctgttcctgggattttggtaccagaagcattaggatatggaaactgggttaaggctcaggaatgggcagcactaccagggggtcaagccacttacttgg

SEQ ID NO: 164105 - DNA, 381 bp, Arabidopsis thaliana columbia
ctcctgtggacatccagcttccatgtcccatcatccatttgaagcatccctttgtttgccagacacctccaggtacttggcactaagtactcgtcctttagagcatccaatcctttattgaccaacgaaatatcccggccaatctccagcttgaataccccgtctgtatcttgcatccctgccatgccgtgcaggtatatctccaggttatggtagttcctgaagttcagagaccgtttcaggtatgttgagttcaaagtattgatctctaacacctcgccaatttctgagtacagtaagagtggataatgtggtgcgacatctggaacatttactattcttagaatgtttagtggttggagtgagtcgactacgtttttg

SEQ ID NO: 164106 - DNA, 435 bp, Arabidopsis thaliana columbia
cgatcttcgtcagaagtacaatgtcagatccatgccgatccgtaaagacgacgaggttcagatcgttcgtggtacttacaagggacgtgaaggcaaagttgttcaggtttaccgtcgcaaatgggtgattcacatcgagagaatcacgagggagaaggtgaatggaacaaccgtgaacgttgggattcagccgtcgaaagttgtgataacgaagcttcgtcttgataaagataggaaatcgcttttggagaggaaggctaagggacgtgctgctgctgataaggagaagggtactaagtttacgtctgaggatgttatgcagaacgttgattaagtaagaaggaagaagaaatcttcttgaaaggttttatcttttagagttattttcaattgctttttaattttcaagttttggatattttggaaatgttgtca

SEQ ID NO: 164107 - DNA, 476 bp, Arabidopsis thaliana columbia
  unsure (1)..(476): unsure at all n locations
cgggagaaggtccaggngctaagatgnctcactatggctatagcanncaagtaggcaacaaggatttaactcctttggntggcgagttcacagccaaatcnagcccatcgacanaacacctttancgtctttganncctcgagacccggacttggtccatttnctcnncagccaccggagacgttccacancctctcttgtttaggtgtccggatggtgtcagtaggatcgaccctctatgtctttggaggccgagacgcttcacgccaatacaacggtttctactcgtttgacacgaccactaacgagtggaaactgctaactccggtcgaagaaggacccactcctcgtagtttccactcaatggcagccgatgaggaaaacgtttacgttttcggtggagtgagtgctacggcacgactcaatacactagactcttacaacatcgttgataagaagtggtttcattgttcgac

SEQ ID NO: 164108 - DNA, 453 bp, Arabidopsis thaliana columbia
cttcttcttcctcgcttctcctcaaaactcttctccccgtaagccacctgaatcgtttctctacactctctggtatccgcgttggcgattcatggactcctctgctccggaacatctccaccgctgggtctcggcgtcgagtggcgattgtgaaagctgcgacggtggattcggattactcgtcgaaacggagcaatagcaatgagcagagagagacgattatgcttcctggttgcgattacaatcattggctcattgtaatggagtttcctaaagatccagcgccaagtagggatcagatgattgatacttaccttaacactcttgctactgttcttggcagcatggaagaggcgaagaagaacatgtatgcattcagtaccacgacatatactggattccaatgcaccatcgacgaagaaacatctgagaagttcaagggtttgcctggag

SEQ ID NO: 164109 - DNA, 449 bp, Arabidopsis thaliana columbia
gatcctcatgatcagcagtctatttctgaagctcttcttaagcttgttgctgataagcacctatgggcaaagtgtcggcaaaacgggttgaagaacattcaccaattctcttggccagagcactgcaaaacttatctatctcgcataaccagcttcaaaccaagacatccacagtggcaaagtgatgatggcggtgataattcagaacccgagtcacctagtgattctttgagggatatacaggatatatccttgaacttaaagttttcatttgatggaagtgggaatgataattacatgaaccaagaagggagctccatggataggaagagcaaaatcgaagctgctgtccaaaattggtctaaaggcaaagatagccgcaaaatgggatcactggagaggtagagggtaactctggaaattcccagcagtgccgagaaggaagttta

SEQ ID NO: 164110 - DNA, 461 bp, Arabidopsis thaliana columbia
gtttcgtgcatagattaggaatctcgaaaccctaattctgttttctacacgaaacccatcaaaatcgaattttgatcgtttctaatttctgccatttgattctcttcatcagtcacatttaggggaaacgagaagccctaatctttgattctttaatcgccatggctaatagctctttcaagttggaacacccactagagaggagacaaattgaatcttctcgcatcagggagaagtatccagacagaattccagtgatcgtagagagagctgaaagaagtgatgttcccaatatcgacaagaagaagtaccttgttccagctgatctaactgttgggcaatttgtgtatgttgtccgtaaaagaatcaagctgagtgccgaaaaggctatcttcgtctttgtgaagaacacattgcctccaactgctgcaatgatgtctgcaatctatgatgagaacaaa

SEQ ID NO: 164111 - DNA, 453 bp, Arabidopsis thaliana columbia
gtctgtcgctgtctctctcgtcctctcctctgtttcgtagccttctgcagcagatctctctttgtccttctctctccctcagatcactatggcacagcaggaagctagtccttcccctggtgctgaggttgttggtcgtgcctttgtggagcaatactatcatattcttcaccaatctcccggtttagttcatcggttttatcaagattcgagctttttaacccgacctgatgttaccggtgctgtgactactgtcacaactatgcaagcgatcaacgacaagattctgtcgttgaaatatgaagactacacggctgagatagaaactgctgatgctcaggagtctcatgagagaggtgttattgtgctggttacaggacgcttaaccgggaacgataatgttaggaagaagtttagtcaatcttttttcttggctccacaagacacaggata

SEQ ID NO: 164112 - DNA, 395 bp, Arabidopsis thaliana columbia
atccttgcatcgttctctttggccccttgcttttgtgttcgattctttccttcaaaccataacaatctcaatctcttattcccagggcagcgaaagattcaagttagttgcggtggtaagagtgaggtgttgaagagtgatacaatggaacctcatgaagcagaaacgttcgtgaacaagagaaccctttatgctcccattgagccatatagcagtggaaatttaaaggtatgagatgttcacactctctactgggagcatttaggcaacccccatcggacacccgtttgtttttttaaatttaataccgcgctggtagccacattacagtctgtattctatttttatatctagagattatttatatttttttcccatcaatctttacactagta

SEQ ID NO: 164113 - DNA, 456 bp, Arabidopsis thaliana columbia
cgctgccgcactatcgtctcctacctcctttgcctacaagctttcacgcgggagctcaacatcagccatggcggaacagactgagaaagcttttcttaagcagcctaaggtcttccttagctcgaagaaatctggaaagggaaagagacctggaaaaggtggaaaccgtttctggaagaacattggtttgggcttcaagactcctcgtgaagccattgatggagcttacgttgacaagaaatgccccttcactggaactgtttccattagaggtcgtatcttagctggtacttgccacagtgcgaaaatgcagaggaccattatcgtgcgaagggattaccttcactttgtgaagaagtatcagaggtatgagaagaggcattcaaacattccggctcatgtctcaccatgcttccgtgttaaggaaggagaccatatcatcattggccaatgcag

SEQ ID NO: 164114 - DNA, 314 bp, Arabidopsis thaliana columbia
aacgtgctttcgttcactggtatgtgggtgagggtatggaagaaggagaattttcagaggctcgtgaggatcttgcagcattggagaaggattacgaagaggttggtgctgaaggtggtgacgatgaggatgatgaaggagaggagtactaagaaggttgtcggttttatgtgggatttctattatctcgtgtttgggtgaataggctcgaaacttctagcatcagggagaagtattcacacagaattacagttatcgtattagagagtgggggaggccaatttgtctagttcgcttggattctgataatattt

SEQ ID NO: 164115 - DNA, 241 bp, Arabidopsis thaliana columbia
acaaaacaatcaagaaccactctttcgtgtcgcaataacaataagaaagaaagaaaaagaaaaccagagatggcgatgacgacagcatctacggtatttgttctaccggccaatgtcacctcggtcgccggcgcttcgtcgtccaggagctccgtgtctttcttgccgatgagaaacgccggttctaggctcgtagtcagggcagccgaagatcctggtccggctttcttttcttcaaaag

SEQ ID NO: 164116 - DNA, 462 bp, Arabidopsis thaliana columbia
aaaaaaagaaacaaataattccaaaaccttctctcttaatcaaaatcaagaaacttacaagatctggtgaaaaccatggaagaaggagattttttcaactgctgtttcagcgagattagtagtggcatgaccatgaataagaagaagatgaagaagagcaataaccaaaagaggtttagcgaggaacagatcaagtcacttgagcttatatttgagtctgagacgaggcttgagccgaggaagaaggttcaggtagctagagagctagggctgcaaccaagacaagtggctatatggtttcaaaacaagagggctcgatggaaaactaagcaacttgagaaagagtataacactcttagagccaattacaacaatttggcttcacaaatttgaatcatgaagaaagaaaagcaatctctggtctctgagctgcagagactaaacgaagagatgcaaaggcct

SEQ ID NO: 164117 - DNA, 440 bp, Arabidopsis thaliana columbia
gggtttagtcacactctcattctcgtttgtgtttttgattggcggagaattggtgatagataagcttcttcttccctcttctcaacttggtggatctgtcatcgatggcctctttgatgctcaacggggccattaccttccccaaaggtttaggttcccctggttccaatttgcatgccagatcgattcctcggccgaccttactctcagttacccgaacctccacacctagactctcggtggctactagatgcagcagcagcagcgtgtcgtcttcccggccatcggcgcaacctaggttcattcagcacaagaaggaggcttactggttctacaggttcttatccatcgtatacgaccatgtcatcaatcctgggcattggaccgaggatatgagagacgacgctcttgagccagcggatctcagccatccggacatg

SEQ ID NO: 164118 - DNA, 457 bp, Arabidopsis thaliana columbia
gtggattacacggtgcatctccggcggttcttgaaggaagcttaaagatcaatggctccagccgtctgaatggctctggaagagtggcggtggctcaaaggtctagacttgtcgtcagagctcagcagagtgaggagacttctcgccggtccgtgattgggcttgttgctgctggtttagctggtggctcgtttgttcaggctgtcctcgccgatgctatttcgatcaaagttggccctcctccagctccttccggtggccttcctgggacagataactcagaccaagcaagagactttgcattggcattgaaagacaggttttacttacagccattgccaccaacagaagctgcagctagagccaaagaatctgcaaaggatatcataaatgtgaagccattgatcgacaggaaagcttggccatatgttcaaaacgatcttcgttccaaggcttt

SEQ ID NO: 164119 - DNA, 437 bp, Arabidopsis thaliana columbia
acgcacccggaaatctcctcgctcatggagggtttagaaacccatattggttgcttgacattggtaatctcgctatagtgatccagctagtcggtgcttaccaagtctattgccaacccctctttgccttcgtcgagaaggaagcctctaggaggtttccagagagcgaattcgtcacaaaagagatcaagatccaactcttcccggggaagccctttaacttgaatctcttcaggctcgtatggaggacgttcttcgtgatgacaacaacgttgatctcaatgttaatgcctttctttaacgatgtagtcggtctcttgggggccattggtttttggcctttaacggtttattttccagtggaaatgtacattgcacagaagaatgttccgagatggggcacaaagtgggtttgctacaagtcttgagtgtgacat

SEQ ID NO: 164120 - DNA, 454 bp, Arabidopsis thaliana columbia
aagacgaataagttagttagcgatagaaagaattggaagaattcaactccgaaagctgtatattccggcaatctctggacaccggagattccgtctcctcaaggagtttggtccattagagatgatttacaagtcccttcttcgccgtattttcctgcttatgctcaaggacaaggaccacctcctatggtgcaagaacgtttccagagtatcattagtcagctcttccaatataggattattcgctgtggtggtgctgtggatgacgatatggcaaacataattgtagctcaactcctgtatcttgatgctgttgatcctactaaggatattgtcatgtatgttaattctcctggtggatcagttacagctggcatggctatattcgatactatgaggcacatccggcctgatgtgtccactgtttgtgttggtctaactgctagtatgggag

SEQ ID NO: 164121 - DNA, 483 bp, Arabidopsis thaliana columbia
gggtcgagcgccacgcgtccgcaagaagcttctcatcgagaaggaagagctaaagacggttgcagcggcaaaggtggagcagatcacagcggctcttcagacaggggcttgatccgacaagaaagctttcgaccccgtcgaaaccattaagcagggcttcatcaaattcaagaaggagaaatacgaaaccaaccctgctttgtacggtgagctcgcaaagggtcaaagtcctaagtacatggtgtttgcttgttcagactcacgtgtgtgtccatcacacgttctggactttcagccaggagatgccttcgtgtgtccgtaacatagccaacatggttcctcctttcgacaaggtcaaatacggtggcgttggagcagccattgaatacgcggtcttacaccttaaggtggagaacattggggtgatgggacacaaggcatgtggtgggatcaaagggcttatgtcttttcccttagatggaa

SEQ ID NO: 164122 - DNA, 427 bp, Arabidopsis thaliana columbia
caaaaaaaaaactcaagagagactttgtggccatggcagcctctctccaatccaccgctacattcctccagtcggcgaagatcgccaccgctccttctcgcggaagttctcacctccgatcgactcaagccgtcggcaaatcttttgggctcgaaacttcctcggctcgcctcacttgctccttccagtctgactttaaggacttcaccggtaaatgctccgacgctgtcaaaatcgccggattcgctcttgccacctctgctctcgtcgtctcgggagcaagtgcggagggagctccaaagagattgacctatgatgagattcagagcaagacatacatggaagtgaaaggaactggaacggctaaccagtgccctactattgacggtggctctgagactttctcgttcaaacccggaaagtatgc

SEQ ID NO: 164123 - DNA, 458 bp, Arabidopsis thaliana columbia
caacaaccaaacactcatttctccacatcttgagagaaaaaaacagagcaagtatattagagatctcatggcgatggcggtctccggagctgtcctcagtgggcttggttcttcgttcctcaccggaggcaagagaggtgccaccgcattggcaagcggcgtaggcactggagctcagagagttggcaggaaaactcttattgtcgctgctgcggctgctcagcctaagaaatcttggatccctgccgttaaaggtggtggcaacttccttgaccctgaatggctcgatggctcgctaccaggagatttcgggttcgacccattgggtttggggaaagacccggcttttctgaaatggtacagagaggctgagctgatccatggccgatgggcgatggcagcggttcttgtgatcttcgtcggccaagcctggagcggtgtggcattggtttgaagct

SEQ ID NO: 164124 - DNA, 463 bp, Arabidopsis thaliana columbia
caatctcttagctatttttcagatgaaaacaacctctgttggtttcttgagccagagcttgccaaagagattgtgagggtgcataaggttgttgggaatgctgtaacgcaagaccgcttcattgttgttggcactggctcaacacaattgtatcaggctgctctctatgctctctccccacatgatgactccggtcccattaatgtcgtgtcagccacaccctattatagtacatacccgttgattacagactgcctcaaatcaggtttatatcgatggggtggagatgcaaagacgtacaaagaagatggtccatacattgaacttgttacatctccaaacaaccctgatgggttcttgagagaatcagtagtgaacagtactgaaggtatattgatccatgatttggcttactattggccacagtatacaccgataacattaccagctgatcacgatgtta

SEQ ID NO: 164125 - DNA, 381 bp, Arabidopsis thaliana columbia
  unsure (1)..(381): unsure at all n locations
caagagagtccaacttgccgagacctacctcagccaggctgctttgggagacgcaaacgctgacgccatcggccgcggaactttctacggtaaaacagaggaaaaggagcccagcaagtaaacctgccagttcctgaagggtgtactgatcctgtggctgaaaactttgatccaacggctagaagtgacgatggaacctgtgtctacaacttttgagcaatattatcctgcttattaatttgctgttttactcctattgtctcttttggtttatttttctcctttgtgtaattgtggattggatcttgtcctcttttgttccctttttttttttttatgatgtacaacacattggtaatttaaaattgccttgtcattnaa

SEQ ID NO: 164126 - DNA, 191 bp, Arabidopsis thaliana columbia
aatcttttcagctctctccatcgccgacgtatctgtgactctcgtgatcatcgcctgaaaaaaatttgagataatggccagaaagttcttcgtcggaggcaactggaaatgtaacggaactgctgaggaggtgaagaagattgtgaacactcttaatgaagctcaggttccttcacaggatgttgtacagg

SEQ ID NO: 164127 - DNA, 457 bp, Arabidopsis thaliana columbia; identical to SEQ ID NO: 128448

SEQ ID NO: 164128 - DNA, 447 bp, Arabidopsis thaliana columbia
agtagatagaaggttttttttaatgagtccgcttttatgttagttcgtactatacaattcctttgtttgtgagaaaattttctcacaaaagaaaaggtaaaggaaataaaaagagttagagaatggattactacctatgccaagatcgcgtataaatggaaattttattgataaaacctttacaattgtagccgatatcttattacgagtcattccgacaacttccggagaaaaagaggcatttacttattacagagatggtgcgatttgattatcattattttttttctcgccgattttgattggaatagaaagaaaaacgagtattgaaaaaaaatctacgcttttgaaggtgaagtttataatataaaaaaaacaatcccttctgtcatgtattcacgattaatgcagccttagatgcttcaattgtgaattatagtattgagc

SEQ ID NO: 164129 - DNA, 436 bp, Arabidopsis thaliana columbia
gctgctagctctgcttgtgaccacatccgtgactgggtccttggaactccagagggtacgttcgtttccatgggagtatactccgatggctcttacagcgttccatcaggacttatctactccttccctgtaacttgtcgcaatggagactggagtattgtccaaggccttccgattgatgaagtatcaaggaagaagatggatttgactgcagaggagctcaaggaagagaaggacttggcgtactcatgcctctcttaaacccttctggagcaaaattttcatctataaggtgtgagatcagttaaagcctttcagggctttgtccgaataagaagtgtgtttgaaagatctccaaacactgttttataacctctttggtctctttgatgagtattgtccctggtctgtttctaaaccaggatattgttttttt

SEQ ID NO: 164130 - DNA, 455 bp, Arabidopsis thaliana columbia
ctataaacaagacaagacctcgcaaagctcaaaccttttccttctttttttctatcaagttcctcacttctcggatccgggtcctaaatctgggtcaaccctttttacgatcatcggaaatggaccctccactagtgaacgattcctccttctctgcagctaatccttcttcttacactctctccgagatttggcctttccctgtaaacgacgccgttcgctctggtctccgtttagctgttaactccggtcgagtctttactcgctctgaacattccggcaataaagacgtctccgcggctgaggaatctacagtcaccgatctaactgctggctggggaagtagaaagactagagatttgaactctgaggatgattcttcaaagatggtttcttccagcagcagtggtaatgaattgaaagaatcaggggataagaaaagaaaactgtgtgga

SEQ ID NO: 164131 - DNA, 466 bp, Arabidopsis thaliana columbia
cggacgcgtgggctctcaacgactcgatctggagcacaaactctgtcttcaaagagcgtcgaaacttagacatagccgccaccaccgacaggaacaacaaccagatcgactattatcagaagaagacaacttccgacaacatcaattccaactggaactggaagtcttctggttcaaacaacgacatgggtttaggattcggacctgtgggttcaaaatccaccgtcgatttaaacccaatcgacaaattcaactcaccgttcaacgacacgtggaaattcaactcagtcaacgttaacgttaacggttactcaccgtcaagcgccgttaacggagatttcaacaaaggggtttacacgtcgatgaagaagtatgggtacaacgtcaatctaaagaacaacaacaagaacaaaggaatcgatgaagatcatcagattcagaaaggtgggaagaagacagaaagaat

SEQ ID NO: 164132 - DNA, 453 bp, Arabidopsis thaliana columbia; identical to SEQ ID NO: 129439

SEQ ID NO: 164133 - DNA, 402 bp, Arabidopsis thaliana columbia
  unsure (1)..(402): unsure at all n locations
aataagagaaaaggtgggcatcgtgcatcaagagcagtttgaagcatcatcaagcttgtactatctatttccaccagcatagatattgtattccaaataagttgtagagttcagctgcaggatcagcttcgctcaggttcctttgtatcctcatttttgttttttgttttctgactctctttcccttccattgtatttccttgttgagcttgacaaactagaaggatgatatattgttaatacaacaaactcaaatgttctgtgtgttnaaaaaaaaaaaaaaatataaattaaaatatttaaaaaaatatataatataataaataaaaatataaaaattaaaaaatttaattatataattaaaaattaaatttaaatttataataaggggggggccgtttt

SEQ ID NO: 164134 - DNA, 418 bp, Arabidopsis thaliana columbia
cttgaaacgtactggttggaagaggaagatgaaactttaccacctggtgatccctctgcacaaggcttccagtttggaggaggtaatgatgcagccgtaccaccaggtggattcaacttccagtgaaggagctgaacatgacgatttgaagagtcgaaggagcttaaagagtttgggggcactggttaaaaagggtatgattagagagtctggtcttctgtgtaaaagtcagatggggtgccttacttagtctggcctggtccggtcagatccagtggttggtgggtttgtgtcatggtataagcttgttgggtgtgatttattatatttttttattttttgttttgttattattattgtattattatttattatatgtttatctttttttatatctttatttttttttatttttatt

SEQ ID NO: 164135 - DNA, 460 bp, Arabidopsis thaliana columbia
  unsure (1)..(460): unsure at all n locations
gagaccaccaaccaaagagatttgacagataacagaaaaatgttgaacttatgagctaaaaaagcttctcctccttaccaaagactcgacggtctaccggaaaaaatggctgccaatttctggaattcatctcactataaacagcttttggatccagaagaagtcgacgtagttcatgatctcgataaagaacgtggaatctcaattgatgattttaagctcatcaagttccatatgtctaatcatattatgaaattggctcagcacattaaagtgaggcaaagggttgtagctactgcaattacgtatatgagacgggtttatatcagaaagagtatggtagagtttgagcctcgacttgttgctcttacgtgcttgtaccctggcatctaaagctgaagaaagcatagtgcaggccaggaatcttgttntttacatcaaaagattgtatcctgatgag

SEQ ID NO: 164136 - DNA, 273 bp, Arabidopsis thaliana columbia
cctctgtttctgattaccaaacgtcgttaatacatttcttcaaattacgtttcttttggtctttcgttactctcaacaaagtttgatatctgattggtgttgattccaagtaagaaagatcaaaactttaggtaaagtatggatatgggtttccatgaaaatgagcaaaatcaagaatttgcgaatctaatggagattggatctgggcattacgggtgttcacattatagaagactatgcattgatttgagcaccatgttgcgatgagatatt

SEQ ID NO: 164137 - DNA, 367 bp, Arabidopsis thaliana columbia
gaatatctcatgaacatagatggctactacgatatgatcttcggagttgaggaaccaataattgtatgtcttcagtttaagaccagacaaaagggagtcaatgccgtttggaatggattctggtaagaagttctcgcttggagaggaaggccacaagatcgttggattccatggacaagctagtgatgttgttcacagcatcggagtcactatcgtgcccatcaccaccaccgagtgaaaaccagttagtcatatatactacatgaaacttccaataagattggagtgtgtgtgtgtgtgtgttctctttactatgttacttttaatacgttgttgttagtttaagtaacttactgtgcgctaataa

SEQ ID NO: 164138 - DNA, 459 bp, Arabidopsis thaliana columbia
aacaagaagaacaacaacactaagcaaaaaagaatagctcaagccgagagagacaatggcatcaacattcacgagctcaagcagtgttcttaccccaacaacattccttggccagactaaagcctcaagctttaacccccttcgtgatgttgtctctctcggatctcccaagtacactatgggaaatgatctttggtatggacctgacagagtgaagtacttaggacccttttccgttcaaactccgtcttacctcaccggagaattccctggcgattatggttgggacaccgccggtttatccgcagaccctgaagcctttgccaaaaacagagctcttgaggtgatccatgggagatgggcaatgttgggagcttttggttgcataacccctgaagttcttcaaaagtgggtccgggtggacttcaaagaaccagtctggttcaaagccggttcaca

SEQ ID NO: 164139 - DNA, 295 bp, Arabidopsis thaliana columbia
ctgcagctaaagtcaggagagctcaagatgctgttgtcaatggacgaccattctcagaaacccgagttgaagttctttacgcatgaacgaacagcttcaaaccgatgatgtcgatgttcccttaaccaaagtcagaccggttaagaaagtagcttctcgttgtcgtcaccggtgatcgtggattatttggcgttactatctatctttatctattttatacttatgtctttattattatttctttttccattttttccttttctttttttattttctttctcctattttaatttat

SEQ ID NO: 164140 - DNA, 439 bp, Arabidopsis thaliana columbia
aaacaaagctttgaatcctggtttggtttacgacatcgaggtcaaagagtacgtagctttcctctgcgccgtgggatacgagtttccggggattctagtctttcttcaagatccaactctttacgacgcatgtgaaacgagcaagctaagaaccgccggcgatctcaattacccatctttctccgtggttttcgcatcgaccggggaagttgtgaaatacaaaagggttgtcaaaaacgtgggaagcaatgtcgacgctgtgtacgaagtcggagttaaatctccggcgaatgttgagattgatgtttctccaagcaagcttgcgttcagcaaggagaagagcgtgttggagtatgaagtcacatttaagagcgttgtgctcggcggaggagtcggatccgtgccgggtcatgaattccggtcgatcgaatggacagac

SEQ ID NO: 164141 - DNA, 463 bp, Arabidopsis thaliana columbia
ggattgttttcattgatcctttcaagatggagaaagtgaccaactcagacttgaaatcctctgttgatggtggcgttgttgatgtgtatggagaagattcagccaccattgagcacaacataactccttggtctctctctgtttctagtggatattcattgctgagagatcctcgctacaacaaaggacttgctttcactgagaaagagagagacactcattacttgcgtggtcttctccctccagttgttcttgatcaaaagcttcaggagaagaggctgttgaacaatatccgacaatatcaattcccattacaaaagtacatggctctgacagaacttcaggaaagaaacgagagactgttttacaagctattgatagataatgttgaggagctacttcctattgtttatactccaactgttggtgaagcttgtcagaaatttggaagtattttcaggcg

SEQ ID NO: 164142 - DNA, 421 bp, Arabidopsis thaliana columbia
ctttgttggactctctttttctttcttcttcccttagtctattttaactcagaaacctctgtttttttttgttagagagaaaggtaagaaatgggtgttgatttgaggcaagtagttgctggtattctcaccattaccatgtttgtgatgcttggacagatgcttcatagagattactttgattctcttcaggagaaagctcagggagatgcacaagatattgaatttgaaggatctaaagtctctgtgaaagatggtcttgtcggaaccgttgaaggcagtaaaggactttggatggaagataacactgatcttactccttgttggccaacattactatctgatgacgctgtatcatcctaaagggtatgttacattctcacttaccaatggtcctgagtaccatatctctcaaatcact

SEQ ID NO: 164143 - DNA, 239 bp, Arabidopsis thaliana columbia
tgagagagcttcaatcgtatttgaagccatcagtctcttgttcgagagatcttttcacttactatgtctgctaaatcgcaggtcaggagaggtgatgagaggtctgtcgtctgagccttcaaagttgagggggttatccgaatgttggagatcataaagatcacactctaacatgaatgagcgcatgtcaatcccagtttcaagcttttagtctagttggtccaccatttcttttcagt

SEQ ID NO: 164144 - DNA, 455 bp, Arabidopsis thaliana columbia
gctagatgctcagcagaagaagctcaatctcccaatcctaccaaccacaaccattggatccttcccacagactgtagagctcaggagagtgcgtcgtgagtacaaggccaaaaaggtctcagaggaggactacgttaaagccatcaaggaagagatcaagaaagttgttgacctccaagaggaacttgacatcgatgttcttgtccacggagagccagagagaaacgacatggttgagtactttggtgagcagttgtctggttttgccttcactgcaaacggatgggtccaatcttatggatctcgctgtgtgaagccaccagttatctatggtgatgtgagccgtcccaaggcaatgaccgtcttctggtccgcaatggctcagagcatgacctctcgcccaatgaagggtatgcttactggtcccgtcaccattctcaactggttctttgtca

SEQ ID NO: 164145 - DNA, 365 bp, Arabidopsis thaliana columbia
cggaatggaattccgggccacgcgtccgaccagaaaccctagattcgcaatcaaatgtcaaatattcttaaatcgaatccgatacaacaaagggtccatctcatccttctcaggggagcgcttcctacataaaaaaaggttcaccggcgtcttcttcttcaccggctaagaaactgagtgctgctacatcgtctaacatcaaagcgatagctgaaacttattcttgcctagagtctggtaattctctctcagattgaacccttttccttgtttgtcagagaatctttggtctgcacaaacccaaatgagctagtaggtgctacttgtgggtgaactttcctgatgaatgcatacggtgaaatttt

SEQ ID NO: 164146 - DNA, 423 bp, Arabidopsis thaliana columbia
cgcctttagaatgtctatcgcatggccaagaatatttcctcatgggagaaaggagaaaggagtgagtcaagctggtgtgcaattctaccacgacctcatcgacgagctcataaaaaatggtataactccattcgttactgtttttcactgggacactccacaagatttagaagatgaatatggcggctttttaagcgaaaggattgtgaaggatttccgagagtatgcagattttgttttccaagaatacggtggaaaagtgaaacattggatcactttcaatgagccatgggttttttcgcacgctggctatgacgtaggcaaaaaggcacctggtcgttgctcttcttacgtcaatgctaaatgccaagactgacgatcaggatacgaggcttaccttgtcacttacaaacttcttatttc

SEQ ID NO: 164147 - DNA, 461 bp, Arabidopsis thaliana columbia
ggtaaaccttatgataaagaagagaaaaaagaaatcatatacggaagtatatgctttagggcaatatatatctatgtctgcccataaagcacggagagtaattgatcaaatacgtggacgttcctatgaagaagcacttatgatattagaacttatgccttatcgaggatgttatcccatttttaaattggtttattctgctgcagcgaacgctagtcacaataagggtttcaaagaaaccaatttagtcattagtaaagctgaggtgaaccaagggaatactgtgaaaaaattaaaacctcgtgcccgaggacgaagttacccaataaaacgatccacttgtcatataactatcgtattggaagatatatccttctatcaacaatatgaagaatatttaatgtatttaaaaaaacctggatgcagcaatgaaaacagaaatctaacatgttatgatacat

SEQ ID NO: 164148 - DNA, 387 bp, Arabidopsis thaliana columbia
  unsure (1)..(387): unsure at all n locations
cgaaacaagtaagaacaacaacccactaagcaaaaaagtataagctcacagccgagnagagaccaatggcatcgactattcactgagctgcaggcgggggttcttanccccaacaacattnccttggccagactaaagcctcaagctttaacccccttcgtgatgttgtctctctcggatctcccaagtacactatgggaaatgatctttggtatggacctgacagagtgaagtacttaggacccttttccgttcaaactccgtcttacctcaccggagaattccctggcgattatggttgggacaccgacagtttattcgcagaccctgaagcctttgccaaaaacagatctcttgaggtgattccattgggagacgggcaatgtt

SEQ ID NO: 164149 - DNA, 460 bp, Arabidopsis thaliana columbia
cccacgcgtccggcagacttcttgaatatgatgaaagggtttgttgctaatcaggtacatataaggactttgactattattaaacctctgtctcttcatagaattaacgagagagtgtaaagcaagatcttttagctctgaaatggaagagaaaagtcagtgagtgttataggggatgctatgatttggggactttctttcatgaaatggattcaccaaaaggaatatgatttgagatatttgaatggatgcttgaaaattggtgaaatctgctctcttgcaatgctagtgaatgctgagaaatctgagtgagatgtttgaaataaagagatgaaaatatgtaaaaaggtgtgaaaacagagttgttggtatttgaatgtgcaggttggatatgcagagaagatcgccaatgtgtggacaaaggttgctgaggaaacaaggcaatacgatagagagagct

SEQ ID NO: 164150 - DNA, 453 bp, Arabidopsis thaliana columbia
ctctctttctttctctctctctctccatctccctctctttctcttgcttttgttgtcactcatctttgttctctattataggtgccattcaagaaaatcgaatataaaccctactacttcgatcgatgttcatatctgtctttatttcaaccaaccaacgaagataggataaaaacatatccacaaaggctagaaaccatgcgaaataaccattcccttcgtctccaattgtggttccgtacactatttactgttggtgtagtcactcttcttatgatcgatgcgtttgtattacaaaacaacaaggaggacgacaaaacaaaagagattactacagctgtgaacatgaacaactccgatgccaaggaaatacaacaagagcttgaagatggttcaaggaacgacgatcttagctacgtagcaagcaaaagaaaagtgcctcgtggacctgat

SEQ ID NO: 164151 - DNA, 449 bp, Arabidopsis thaliana columbia
tctcaatctgctgcttctccttctcagtcatggtcatggatatcgatttcaacgagtacaagctcaggtgcgagcttcatggccacgatgatgatgttcgtgggatttgtgtgtgtaatgatgagaatatagctacttcatcaagagataggaccataagggtttggtcactggatccatctgataagcgcaagtatacctccgagaaaattctgctgggtcatactagctttgttgggccacttgcatggatcccaccaactgatgaataccctgaaggaagacttgtctctgggagtatggatactttcgtttttgtttggaatctgatgaatggagagaatattcagacattgaagggtcatcagatgcaagtcactggtgttgctattgataatgaggacatagtttcatcttcagttgatcaaaccctgaaacgatggagaaac

SEQ ID NO: 164152 - DNA, 457 bp, Arabidopsis thaliana columbia
gttagtcaccaaaaaaaaaaaaaaaacacaaaaagtttcaatggccgcctccacaatggctctctcctcccctgccttcgccggaaaggctgtgaacctttcccccgcggcatctgaagtcctcggaagcggccgtgtgacaatgaggaagactgttgccaagccaaagggtccatcaggcagcccatggtacggatccgaccgagtcaagtacttgggtccattctctggcgagtcaccgagctaccttaccggagagttccccggagactacggatgggacaccgctggactttcagctgatcccgagacattcgcaaggaaccgtgagctagaagttatccacagcaggtgggctatgctcggagccctaggctgcgtcttccctgagcttttggctaggaacggagtcaagttcggagaggcggtttggttcaaggccggttcacagatcttt

SEQ ID NO: 164153 - DNA, 452 bp, Arabidopsis thaliana columbia
gaaggataagaagaaaccaagctcttacattgctgacactacaactgcaaacgcgcaggtgaggacactatctgagacagtgaggctggacgcaagaacaaagctgctgaatccaaagtggtacgaaggaatgatgtcaagtggatatgaaggagttcgtgagatagagaagagactgtccaacactgtgggatggagtgcaacgtcaggtcaagtagacaattgggtctacgaggaggccaactcaactttcatccaagacgaggagatgctgaaccgtctcatgaacaccaatcccaactccttcaggaaaatgcttcagactttcttggaggccaatggtcgtggctactgggacacttccgctgaaaacatagagaagctcaaggaattgtactcgcaggtggaagacaagatcgaagggatcgatcgattaacaatgggatataagc

SEQ ID NO: 164154 - DNA, 463 bp, Arabidopsis thaliana columbia
ctccatcaagcaaccctctctctctctctctctctatcatcatcatcgcagaggagacgatcttacgcgacgaatccttgagagattgagagggacaagcgagttttgacccaaggattgttgacggtctatattgaacaagtaaacaaggatgcgtaagtggatctgttgtacatgtcaaatagaagactcaaatgaagagcaacaactgaaaagttcacagcagcaatctgatgcaaatcataagaattcaaaaccagcacctgttgcaaaacatgaggttaagaaggaagctcttcccatcgaggtccctcccttgtctttggatgaggtcaaggaaaagactgaaaattttggatccaaggcactgattggtgaagggtcttatgggagagtatattatgcgacactaaatgatggtgtggcggttgctctgaagaaacttgatgtcgcaacctgaagc

SEQ ID NO: 164155 - DNA, 420 bp, Arabidopsis thaliana columbia
caggaccttatccacagtccacacacagcgagactctatttactcgccggcggaagaacaaaatggcgggaagagcgattttctgtgtatcttgttcatctactccttccttgtgtatcccttattcaactgcttcgttttcatcgatgaatcgactggcgctccccgccgtccggatttctccccgaaccaacagatttcccaggattcactgctctatgtctgctaacgacatcaaagcgggaaccaatatcgaagtcgatggtgctccttggcgtgttcttgagtttcttcatgttaaaccaggaaaaggtgcggcatttgtgagaactaagatcaggaactatgtgaatggtagcacagtcgagagaacatttcgtgctggaatttctgttgaggaagctaatatatttaaagaaa

SEQ ID NO: 164156 - DNA, 391 bp, Arabidopsis thaliana columbia
cacaaacgcacatacttgagcaaagtcatcacaatgagcttcttcatcgaagattctggtctcatagtcactcagcttctctacagaatggctgttctcatcaccgtcttgagatggatcctcgcttggatcttacgctaccgatccagatccagatccacctcttcttccacttccgcctgtccttcgatttcctcacaggcgatcaaagaaagcctctccgtgacgacgttccgtgacgcagctgagagatctccggcgatgatcaacgacacctgcgctgtgtgtctcggagatctggaagatggagatgaggttagagaactcaggaactgtagccatatgtttcaccgtgagtgtattgaccggtggttggattatgaatgttgcg

SEQ ID NO: 164157 - DNA, 289 bp, Arabidopsis thaliana columbia
gtgatgtcctaagcgtggctggtttcaagaacaatgcgcttcagttcagcttcatatgccgcaggaacgtgttcttaagcattgagtgggacaaaaccaatgaggttgagcttaaaaacgcagtttaaaacgcggcaacacaccttgatacgcttgatgctttactctccgagtacactagctatgcggacacattatctatcccggaccactatgttttattctgggagctctgctggaacggttacaagataatttctccctatgaattacaggcttgctgtttaac

SEQ ID NO: 164158 - DNA, 409 bp, Arabidopsis thaliana columbia
ccctataatccaccgcgatcttgaaccttcaaacattctgcgggatgattcagggcatctgaaagttgcagactttggagtaagcaagcttgttactgttaaagaagacaagccttttacatgtcaagacatttcttgtcgatatatagctcccgaggttttcactagtgaagaatacgatacaaaagctgatgttttctcatttgcattgatcgttcaggagatgatcgaaggccgaatgccgtttgctgaaaaggaagacagtgaagcttctgaagcttatgctggcaaacatcggccattattcaaagctccatcaaagaattacccacatggtcttaaaacgttgatagaagaatgctggcatgagaaacctgcaatgtgaccaactttcagagtgatcatttaa

SEQ ID NO: 164159 - DNA, 312 bp, Arabidopsis thaliana columbia
gagctcaagtttgaaattcggagaagctagagtgttttctgagatggctcgtactaagcaaacagctcgtaagtctactggggggggggctcctaggaagcagcttgctacaaaggctgcacgtaagtctgcaccaaccactggaggagtcaagaagccccatcgttaccgtccaggaactgttgcactacgtgaaattcgtaagtaccagaagagtaccgagttgctgatcaggaagctccctttccagaggctagttcgtgagattgcccaggatttcaagactgacttgcgtttccagagccatgctgt

SEQ ID NO: 164160 - DNA, 455 bp, Arabidopsis thaliana columbia
cgcatctcttttcatttctctctgatttctcgatctctccgtccaactatgtctgccttcacaagcaaattcgccgatgagttgatcgccaacgctgcctacatcggcacacctggaaaaggtattttggctgctgatgagtccactggtaccattggaaagcgtcttgcgagcatcaacgtcgagaacgttgagaccaacagacgtaacctccgtgagcttctcttcaccgcccctggtgctcttccatgcctcagtggtgtcatccttttcgaagagactctgtaccaaaagagttccgatggtaagcttttcgttgatatcttgaaggaaggaggagttcttcccggtatcaaggttgcaagggtaccgttgagctagctggaaccgacggtgagaccaccactcaaggtcttgacggtcttggtgacagatgcaagaagtacctacaagct

SEQ ID NO: 164161 - DNA, 463 bp, Arabidopsis thaliana columbia
cagcaacaaacagagaaaatgtgtggcggtgctattatttccgattatgcccctctcgtcaccaaggccaagggccgtaaactcacggctgaggaactctggtcagagctcgatgcttccgccgccgacgacttctggggtttctattccacctccaaactccatcccaccaaccaagttaacgtgaaagaggaggcagtgaagaaggagcaggcaacagagccggggaaacggaggaagaggaagaatgtttatagagggatacgtaagcgtccatggggaaaatgggcggctgagattcgagatccacgaaaaggtgttagagtttggcttggtacgttcaacacggcggaggaagctgccatggcttatgatgttgcggccaagcagatccgtggtgataaagccaagctcaacttcccagatctgcaccatcctcctcctcctaattatactcctccgc

SEQ ID NO: 164162 - DNA, 379 bp, Arabidopsis thaliana columbia
ctttgtcctcccctgccttcgccggaaaggctgtgaagcctgccgcatcagatgtcctcggaagcggccgtgtgaccatgaggaagactgtcgccaagccaaagggtccatcaggcagcccatggtacggatctgaccgagtcaagtacttgggtccattctccggcgagcccccgagctaccttaccggtgagttccccggtgactacggatgggacaccgttggtctatccgccgacccagagaccttcgccaggaaccgtgagctagaagttatccacagcagatgggccatgctcggagccctaggctgcgttttccctgagctattggctaggaacggagtgaagttcggagaagcggtttggttaaaggtcgg

SEQ ID NO: 164163 - DNA, 452 bp, Arabidopsis thaliana columbia
cttgaataaaatcagaattacaaacaaaaatggttttgcaaaagcttcctctcattgggctgcttttgctcctgaccatcgtcgcctctccagcaaatgcagatggacctgtttgcccgccgtcgaacaaactaagccgggcaagtttccctgaaggttttttatttggcacggctactgcggcataccaggtcgaaggtgcgattaatgaaacttgtcgtggaccagccttatgggacatctactgtagaagatatccagagaggtgcaataacgataacggcgatgtggccgttgatttcttccatcgttataaggaagatatccaactaatgaagaatctaaacacagacgcctttagaatgtctatcgcatggccaagaatatttcctcatgggagaaaggagaaaggagtgagtcaagctggtgtgcaattctaccacgaccttatt

SEQ ID NO: 164164 - DNA, 350 bp, Arabidopsis thaliana columbia
acttggtttgccgatgattctcctgttatcaggaaaaaggcggtggcaatagctgtaggagattggtatttcgatagagcggaagtgaagttagtcgattgcccatacccgtgtgacaagagctgccacaacttggtgttcagatgattgtttgactatgttctttattctctctcatatatacataccttagaaaatttctttctttcaaaaggaaagattttgtatcctttggtagtaaccaatgcctcattggtatatgattaagtgtatcgtggaaaatcataataaaaaaacaaaacaaaacaaagtttgcttaaaaagagttcaatgtaatcaatcacagagaa

SEQ ID NO: 164165 - DNA, 451 bp, Arabidopsis thaliana columbia
ctttgcgcagtcaatttgctacaacttagaaaatggcggcggctacttcatccatcgctccttctctttcatgcccatctccttcttcttcatccaaaaccctttggtcttccaaagccagaaccttggctctacccaatatcggtttcctctcgtcttcttccaagtctctgaggtcgcttactgccaccgtcgctggaaatggcgccactggatcctcccttgccgctcgcatggtttcttcgtctgcggtcaaagcccctgtttctctcgattttgagacatctgtcttcaaaaaggagaaagtttctcttgctggttacgaagagtacattgtgagaggaggaagagacttgttcaagcatctcccagatgctttcaaggggattaagcagattggtgtgattggctgggatcttagggacctgccaggctcagaattaagggattc

SEQ ID NO: 164166 - DNA, 446 bp, Arabidopsis thaliana columbia
gtgataccggaatctcaatctcaaagaaagctggtatgatccctcttcaaatggaacttggaggtaaagatgcatgcattgttctagatgatgctgatcttgatttagttgcttccaatatcatcaaaggaggattctcttacagcgggcagagatgcactgcggttaaggtagtcctagtgatggaatcagtagcggatgagcttgttgagaaagtgaaagctaaagtggccaaactcacggtgggaccgcccgaagagaactccgatatcacggcagtggtgtcggaatcttcagctaatttcattgaaggattggtgatggatgctaaggagaaaggagcaacgttttgtcaagagtataaaagagagggtaacttgatttggccgttgcttttggataatgttagaccggacatgaggatcgcgtgggaggaaccattcggt

SEQ ID NO: 164167 - DNA, 458 bp, Arabidopsis thaliana columbia
gaaaagagtaaaaaagcacatggcctcattaccattggggcctcagcctcatgctcttgctccgccgctgcagcttcacgacggcgacgctttgaaacgccgtcctgaattggattctgataaggaaatgtctgcagctgttattgagggaaatgacgctgttactggtcatatcatttccactactattggaggcaaaaacggcgaaccaaagcagaccattagttacatggctgagcgggttgttggaacaggttcattcgggattgtttttcaggcgaaatgcttggaaactggagaatcagtagccattaaaaaggtcttgcaagatcgacgctataaaaaccgtgagttgcaactaatgcgaccaatggatcacccaaatggcatcttcttgaagcactgtttcttctctacaacgagtagagatgagctcttccttaaccttgttatggagt

SEQ ID NO: 164168 - DNA, 378 bp, Arabidopsis thaliana columbia
cttcgttatcagccgcgaaaatctgtgtcacgatcaacacaagctttcacggtgcttatacttcttctcgtagtgattctgattcttctgggtctcgggattttgtcactacctaatgctaatagaaactcttccaagacgaatgatttgaccaacattgtacgaaagagtgagacgagttctggagatgaagaagggaatggtgaacgttgggttgaagttatttcttgggagcctcgtgctgttgtttatcacaatttcttgactaatgaagaatgtgagcacttgatcagccttgctaaaccgagtatggttaagtcaaccttggtagatgagaaatccggtgtttgcaaagatagcatagtgagaactagctca

SEQ ID NO: 164169 - DNA, 457 bp, Arabidopsis thaliana columbia
tgaagattatggacaaacattctgcatattttcatgaagatgttcggcttcaagcagttactggtttgaaacatatattggctgcagctcatgctatcttccagactcataatgatggaactggaaaggcaaatgaaattcttgatacagttatgaataattatatcaaaactatgactgatgatgacgacaaggaggttgttgctcaggcttgcatcagtgttgccgatatcatgaaggattatggttacccagccattcaaaagtatttatcaccccttgttgatgcgacattgctactgctgacggaaaaagcagcttgccagcagttagaagatgagagtgatattgatgatgatgatactggacatgatgaggtcctcatggatgcagtttctgacctccttcccgcctttgcaaagtgtatgggttctcaatttgaacctgtctttgccca

SEQ ID NO: 164170 - DNA, 411 bp, Arabidopsis thaliana columbia
tttgtgactcttggagcactctcttctctttgtctctgtgactcacattcatccaatccaggcatgtcgacatctgaggataaaccggaaatcatcagtagagtagttcatcaggagggtgacgtggaaatcgtcgatagaagtcagaaggataaggacgaggaaaaagaagaagggaaaggtggattcctcgataaggtgaaagatttcattcatgacattggtgagaaactcgagggaaccattggctttgggaagccaactgctgatgtctctgcgattcatatccctaagatcaatcttgagagggcagatattgttgtggatgtgcttgtcaagaacccgaatccagttcctatcccttttatcgatgtcaactaccttttcgagagcgatgggagggaaactggt

SEQ ID NO: 164171 - DNA, 311 bp, Arabidopsis thaliana columbia
aacttgttgtagaagggaagcggcctatgtaggggcaccaagctgacggacacacccatgctgactcgtccgtcttagatagaggcgcctaacatgaactcactggccgtggtgttacagcgaaaggaatggaaaaactaggtgggcacgcaactttacagacttgtatcacaaccctcgatgaacagctgacgacaactaaccgagggccgaaccgatcggactaacgaacagaaaccaaagctgaatagtcaatgagactacaccatggaacagctcatataagctcgagagagaggatgttacacgca

SEQ ID NO: 164172 - DNA, 459 bp, Arabidopsis thaliana columbia
gttagtcaccaaaaaaaaaaaaaaacacaaaaagtttcaatggccgcctccacaatggctctctcctcccctgccttcgctggaaaggctgtgaacctttcccccgcggcatctgaagtcctcggaagcggccgtgtgacaatgaggaagactgttgccaagccaaagggtccatcaggcagcccatggtacggatccgaccgagtcaagtacttgggtccattctctggcgagtcaccgagctaccttaccggagagttccccggagactacggatgggacaccgctggactttcagctgatcccgagacattcgcaaggaaccgtgagctagaagttatccacagcaggtgggctatgctcggagccctaggctgcgtcttccctgagcttttggctaggaacggagtcaagttcggagaggcggtttggttcaaggccggttcacagatctttagc

SEQ ID NO: 164173 - DNA, 459 bp, Arabidopsis thaliana columbia
gaagaccaccaccactaagcaaaaaagaaaagctcaagccgagagagacaatggcatcaacattgacgagctcaagcagtgttcttaccccaacaacattccttggccagactaaagcctcaagctttaacccccttcgtgatgttgtctctctcggatctcccaagtacactatgggaaatgatctttggtatggacctgacagagtgaagtacttaggaccctttttccgttcaaactccgtcttacctcaccggagaattccctggcgattatggttgggacaccgccggtttatccgcagaccctgaagcctttgccaaaaacagagctcttgaggtgatccatgggagatgggcaatgttgggagcttttggttgcataacccctgaagttcttcaaaagtgggtccgtgtggacttcaaagaaccagtctggttcaaagccggttcacaaatc

SEQ ID NO: 164174 - DNA, 457 bp, Arabidopsis thaliana columbia
caaaaaaaagaaaacacaaaaacaaagattataatggcttcctcaaccatggctttgtcctcccctgccttcgccggaaaggctgtgaagcctgccgcatcagatgtcctcggaagcggccgtgtgaccatgaggaagactgtcgccaagccaaagggtccatcaggcagcccatggtacggatctgaccgagtcaagtacttgggtccattctccggcgagcccccgagctaccttaccggtgagttccccggtgactacggatgggacaccgctggtctatccgccgacccagagaccttcgccaggaaccgtgagctagaagttatccacagcagatgggccatgctcggagccctaggctgcgttttccctgagctattggctaggaacggagtgaagttcggagaaagcggttggttcaaggccggttcacagatcttcagcgacggaggat

SEQ ID NO: 164175 - DNA, 457 bp, Arabidopsis thaliana columbia
caaacagttggtttcttgccatcgcaaagagagaaaggagatgatgttaacatgcgcatcccaagaacccttttgccccaaccctgcatttcaattatcgctatttcgagacagatgctccaaaggatgttcctggagctccaaggcaatggtggtttggtggtggcactgatttcactcctgcttacatctttgaagaagatgtcaagcatttccattcgattcaaaagcaagcctgtgacaaatttgacccttccttctatccccgattcaagaagtggtgtgatgactacttttacatcaagcaccgtgatgagagacgaggacttggagggatattttttgatgatcttaatgactatgatcaggaaatgcttctgtcatttgccactgaatgcgcaaactcagtggtgccggcttatatacctatagtagagaaaaggaaagacatggaatt

SEQ ID NO: 164176 - DNA, 461 bp, Arabidopsis thaliana columbia
cgcgtacgaaaaaagacacaaaaagtttcaatggccgcctccacaatggctctctcctcccctgccttcgccggaaaggctgtgaacctttcccccgcggcatctgaagtcctcggaagcggccgtgtgacaatgaggaagactgttgccaagccaaagggtccatcaggcagcccatggtacggatccgaccgagtcaagtacttgggtccattctctggcgagtcaccgagctaccttaccggagagttccccggagactacggatgggacaccgctggactttcagctgatcccgagacattcgcaaggaaccgtgagctagaagttatccacagcaggtgggctatgctcggagccctaggctgcgtcttccctgagcttttggctaggaacggagtcaagttcggagaggcggttggttcaaggccgttcacagatctttagcgatggaggactcg

SEQ ID NO: 164177 - DNA, 461 bp, Arabidopsis thaliana columbia
  unsure (1)..(461): unsure at all n locations
gcaattttaattaaaaccttcgaacacatcgcttttatttttttctttagatctactcgctatggctactatcaccgttgttaaggctagacagatcttcgacagtcgtggtaatcccaccgttgaggttgatatccacacgtcaaatggtattaaggttacagcagctgttccaagtggagcttccactggtatctatgaggcctcttgagctgagggatggaggatctgactaccttggaaagggtgtatctaaggctgttggcaatgtgaacaacatcatcgggccagcacttattggaaaggacccaactcagcagactgctattgacaacttcatggtccatgaacttgacggaacccaaaacgagtggnggtggtgcaagcaaaagcttggagccaatgcgattcttgctgtgtctcttgctgtctgcaaagctgnggcttgtgtcagccgcatt

SEQ ID NO: 164178 - DNA, 464 bp, Arabidopsis thaliana columbia
cggacgcgtgggcaagaagaacaacaacactaagcaaaaaagaaaagctcaagccgagagagacaatggcatcaacattcacgagctcaagcagtgttcttaccccaacaacattccttggccagactaaagcctcaagctttaacccccttcgtgatgttgtctctctcggatctcccaagtacactatggggaaatgatctttggtatggacctgacagagtgaagtacttaggacccttttccgttcaaactccgtcttacctcaccggagaattccctggcgattatggttgggacaccgccggtttatccgcagaccctgaagcctttgccaaaaacagagctcttgaggtgatccatgggagatgggcaatgttgggagcttttggttgcataacccctgaagttcttcaaaagtgggtccgtgtggacttcaaagaaccagtctggttcaaagccgg

SEQ ID NO: 164179 - DNA, 460 bp, Arabidopsis thaliana columbia
ggaggaagatcatcattgacacttatggtggttggggtgctcatggtggaggtgccttctcaggaaaggacccaaccaaggttgacagaagcggtgcctatatcgtgaggcaggctgcaaagagcgtggtagcagcaggactcgcacgccgttgtatcgtgcaggtatcatacgccattggtgtccctgagccgctctcagtgtttgttgacacctacaagaccgggaccatcccagacaaggatatccttgtgttgatcaaggaagcatttgacttcaggccgggaatgatggccattaaccttgaccttaagaggggaggtaacttcaggttccagaaaaccgctgcgtatggccatttcgggcgtgatgaccctgacttcacttgggaggttgtcaagccgctcaagccaaaggcctagacagaaacaaagctggcaattgcaagaactgagttgag

SEQ ID NO: 164180 - DNA, 491 bp, Arabidopsis thaliana columbia
  unsure (1)..(491): unsure at all n locations
accgaaccggaggtcccgcccacgcgtacgaaaagaaaagaaaagtagagtactatcttcctcttaaaccaaccattcaaaatgttgcgtactatcttcctcttatctcttctctttgctctatccaatgcctctgttcaagatttctgtgtcgcaaacctgaaacgcgctgaaacccctgcgggttacccttgcattcgtcccattcatgtcaaagctacagactttgtcttctctggcttaggcactcctggaaacactacaaacatcatcaacgccgctgtcacacccgctttcgcagctcagttcccgggtctgaacggtctaggcctctctacagctagacttgacttagctcctaaaggtgtgatcccaatgcacactcaccctggtgcctctgaggttctctttgtccttactggctccattaccgctgngtttgtctcctcggcaaacgctgtctacgtgcagacactcaaaccaggacaggg

SEQ ID NO: 164181 - DNA, 450 bp, Arabidopsis thaliana columbia
acgcttctcaaaaaagacgataaaaggacgaattccataaaaaaaagacgcaaaatcgtcgtcgtcgtcttcgtctttgcatttcgtcggaatcttttgattcttgaatcggaatatctctgtttttgttttatccggactcaagatcaattcggattcttggaatttatttgattttttgttgttgttgttgaaaaagtggattctttggtttcgatttgtaataatcttcgtagaaaaaatggattctgattcttggagtgatcgtctcgcatcggcttcaagaagatatcagctcgatttcttgtctcgatctgacaatttcttggggtttgaggagatagaaggagaagatgacttcagggaggagtatgcttgcccgttctgttcagactattttgatatcggctctctatgctgtcacattggtgaagatcatcctatgcatgc

SEQ ID NO: 164182 - DNA, 458 bp, Arabidopsis thaliana columbia; identical to SEQ ID NO: 121923

SEQ ID NO: 164183 - DNA, 434 bp, Arabidopsis thaliana columbia
caacaaccaaacactcatttctccacatcttgagagaaaaaaacagagcaagtatattagagatctcatggcgatggcggtctccggagctgtcctcagtgggcttggttcttcgttcctcaccggaggcaagagaggtgccaccgcattggcaagcggcgtaggcactggagctcagagagttggcaggaaaactcttattgtcgctgctgcggctgctcagcctaagaaatcttggatccctgccgttaaaggtggtggcaacttccttgaccctgaatggctcgatggctcgctaccaggagatttcgggttcgacccattgggtttggggaaagacccggcttttctgaaatggtacagagaggctgagctgatccatggccgatgggcgatggcagcggttcttgggatcttcgtcggccaggcctgga

SEQ ID NO: 164184 - DNA, 453 bp, Arabidopsis thaliana columbia
ggcattgttgacacaaattttgctctgagtaaaacttgggaatagagagagactctgagtgagagagagattctgagtgagagacggagatggaggcagacgaaagcggcatctctctgccgtcgggacccgacggacgtaagcggcgagtcagttacttctacgagccgacgatcggagactactactacggtcaaggccacccgatgaagcctcaccggatccgtatggctcatagcctaatcattcactatcacctccaccgtcgcttagaaatcagtcgccctagcctcgctgacgcctccgatatcggccgattccattcgccggagtatgttgacttcctcgcttccgtttcgccggaatctatgggcgatccttccgctgcacgaaacctaaggcgattcaatgtcggtgaggattgtcctgtcttcgacggactttttgattttt

SEQ ID NO: 164185 - DNA, 449 bp, Arabidopsis thaliana columbia
gcaaattcatctatccatcatatttctctgctgctctctgctttcttcttcttcttcttcttcttcttcttcttcttcttcttctgcttagtttgattcaaaaaatctccttcctcttcttactttatctcgtattatccattaatcctaaaccctttagtctctccatcttccgcttcaacaatcagaatttgggtttggcgaaagatgctaactttgaaagtgagactaatcgtttgagtaaaaaacatgcgaattttgtgtgatgcttgtgagagcgccgccgctatcgtcttttgcgccgccgacgaagctgccctctgttgctcctgcgacgaaaaagttcataagtgcaacaagctggctagtcggcatcttcgtgtaggcttagctgatccgagtaatgcaccaagctgtgacatatgcgaaaatgcacccgcattctttta

SEQ ID NO: 164186 - DNA, 453 bp, Arabidopsis thaliana columbia
gacaaccacaagaacacaaaacacacaaaaacattgaggttctttctttgaagaagaaatggaaaaagttgatgtttatgatgagcttgttaacctaaaggcaacagagctgagattgggattaccagggacagaagaaactgtttcttgtggaaaaagcaacaaaagagttttacctgaagctactgagaaagagattgaatccactggaaaaactgaaaccgcttctcctccaaaggctcagattgttggatggccaccagttagatcttacagaaagaacaatgttcagacaaagaagagtgaatctgaaggtcaagggaaactatgtgaaagtaagtatggatggtgctccatatctaaggaagatagatctaacgatgtataaacaatatccagagttgatgaaatcacttgaaaacatgtttaaattctctgtgggagaatattttg

SEQ ID NO: 164187 - DNA, 455 bp, Arabidopsis thaliana columbia
cggacgcgtgggttcattgtagttaaacaaagattacgattatggccacatcagctatccaacaatcctccttcgccgggcaaacggctctcaagccctccagcgacctcatccaaaaggtgggcgtcttgggcggtggccgtgtgaccatgcgtcgtaccgtcaagtctactccccaaagcatctggtatggaccagaccgtcccaagtacttgggaccattctcggagaacacaccgtcttacttaactggagaataccccggagactacggctgggacaccgctggactctcggctgacccggagacattcgctaagaaccgtgagcttgaagtaatccacagcagatgggctatgttgggtgctctcggatgcacattccctgaaattctctccaagaacggtgttaaattcggagaagcccggtggttcaaggcaggctctcagattttc

SEQ ID NO: 164188 - DNA, 271 bp, Arabidopsis thaliana columbia
  unsure (1)..(271): unsure at all n locations
ggggcgancacgcgttcgcaccacccctgagaactgccagaattgcaaaatctttttcatcgcatggtcacctagtacatcaagagtgaggagtaagaggttggatgcacgctcaaatgacaggttcaagagggaattggatggtattcatgctttattgcatgcaacatatacttgttagattttttttcttcatcatcaatgtacgattcaatttctgaatggtacttacctaattttatattttgttacacatacattcttattttct

SEQ ID NO: 164189 - DNA, 369 bp, Arabidopsis thaliana columbia
gagataaagagatcacacgtgggaatccaacttaccaattgcaatggcgtcaatgaccatgacatgttcatttctccctaccgtgggaaaccttccggcaaacatctccagcaacagcagacgaagcctcacggtggtcaaagcctccgggagtgaaaacacaaccagcttggagaacaagaagcaagaacagagcatgaagatgaggagggatcttgtcttcacagctgcagctgcagctgtgtgctccttagctaaggtggcaatggcagacgatgagccaaagagaggaacagaagctgccaagaagaagtatgctccagtctgtgtcacaatgcctaccgccaagaaatgccgtaactgagtttt

SEQ ID NO: 164190 - DNA, 323 bp, Arabidopsis thaliana columbia
tggggcacaaagtcttgcacccacagtctatgagaccagcaagagagggtgagattcctgttaggggtaaaaattcttataaccctaaagctcctggaactatcatcacttaaacaagagacatgaccaagagtattctaacgagcattgttctgaaacgtaatgtgaccatgctggatatagcaagcacccgaatgcttggtcaagttggctttcttgcaaagggattctcgatatttgaggagcttggcatttccagaaatgttggtggcactagagaagtcaggatatctctgacactggatcctttaaaactttggagc

SEQ ID NO: 164191 - DNA, 359 bp, Arabidopsis thaliana columbia
ctactgcaatttttagggttttatcctccgaaagtctcatctctttttcttatcctcaacaaggagaaatggcggcgactcaacttacagcgtgaccagtgactatgtcagcaaggagcttagcctcgctggatggtctcagagcttcgagtgtcaagttttcatctttgaaaccagggacccttagacagagccagttccgtcgtttggttgtcaaagctgcttctgttgttgcccctaagtatacttcaattaagccattgggagatcgagttttggtgaagatcaaggaggcagaggagaagactttagggggtgtcttactttcattcactgctcaatcaaaacctcaaggtggt

SEQ ID NO: 164192 - DNA, 455 bp, Arabidopsis thaliana columbia
gaagacttgaatcacacaggagctcacaagattaacaacgctgtggctcaggctcttcttgctaagcggttggggaagaagaggagtattgctgagacaggagcgggtcaacatggtgtggctacagctactgtgtgtgcccgttttggtttggagtgtattatctatatgggtgctcaagatatggagagacaagcactcaatgtgttcagaatgcgacttcttggtgccgaggtgagaggagtccactctggaacagcgacattgaaggatgcgacatctgaagcgataagagattgggtgacaaatgtggagactacccattacatattgggatctgtggcgggtcctcatccttaccccatgatggtcagagactttcacgctgtgattggtaaagaaacaaggaaacaagcgttggagaaatggggcgggaagccggatgtcttggtggc

SEQ ID NO: 164193 - DNA, 469 bp, Arabidopsis thaliana columbia
ctctctctttctctattactctgtctcctctgttccggcgatgttccaacacgcgccttcttgcatttccctcatcatcatcttggctcttcaccattctatcacccgtttcacctgaaccggtcacagtccagccattccgggtcaaatcatccccacccgcaaccatacccgctttcccggagcaatccgatttctccggctgcccactcgatttaccagaagacctcttccacggcatcaagtcagcttgcagcggcaaaaagctccacaaaggaaaatgttgccccgtactaggcgcgtggctctactctgcttactcaaccactgctctaagccgttcgatttccgccgccgcaagaaactcatcctcctcctccgccgcggtaacgactcctgaagaagatatgcctttgcttcccgatgactcggagacttgcgttgacggatttaggaaatctctgaggca

SEQ ID NO: 164194 - DNA, 460 bp, Arabidopsis thaliana columbia
gatcgcgaaaatggaggttccaggttcatcgaagaagatgatcgcaacgcaagaagagatgtctgcagctaaaatagcgcgttggatctagagatatgtgcgctcatctcttgattccgctcaacaaatgtcgtcaggctgagttttaccttccatggaaatgtgaagacgagcgtcacgtttatgagaagtgtgaatacgagcttgttatggagagaatgcttgcgatgaagaagatccgtgaagaagaagctttggctaaacagaataaactacaaggaaacgctgctgttcctcttatccctaaaactgctaatgcttaggattcgattccttctccaatttgccgattccagattccgggattctctggaactgtgaagatgggggggactctgcttttcaatctttttcttcttgctagtgatgaaaaattggtgctacattttcagatgtgaat

SEQ ID NO: 164195 - DNA, 212 bp, Arabidopsis thaliana columbia
aaattcttttgtctctctgtatcatccaaaattcccagatttattcacggagttagaagaagaagatgaggagagttttcggcgcgaaaaagaacacagagcctcctccgtccattcaggatgcctctgatcggataaataaaagaggagattcggtagaagataagataaagaagcttgatgttgagctctgcaaatacaaagaacagctt

SEQ ID NO: 164196 - DNA, 427 bp, Arabidopsis thaliana columbia
caaagagagaaaatctgaaattgagagagacagagaaaaatggcgtcgcttctgaaagcattcatcgatccaaagaagaacttcctcgctcgtatgcatatgaaagccatatctactcgccttcgcagatacggtctgaggtacgatgatctgtacgatcagtattacagtatggacatcaaagaggctatgaacagattgcccagggaggtcgttgatgctcgtaaccagcgtctcaagcgtgccatggacctctccatgaagcacgagtacctccccaaggatcttcaggcggtgcagaccccattccgtggctatcttcaggacatgcttgctcttgttgagagggaaagcaaggaacgagaggccttgggagctctaccactataccagcgcacactcccataagcattcctttccccttttc

SEQ ID NO: 164197 - DNA, 400 bp, Arabidopsis thaliana columbia
gtgcttcgacaaaagctcttagatccacagagtcagaggctcgtctcttgtttgatcttggtttatgagcgggaaggagaaacccactctcggaggtacgcggattaagacccgcaaacggaatattgctgctcctctggaccctgcagccttttctgatgcagtggtccagatttaccatgataatgctggtgatctggaacttgttgccaaaagtattgagtcatcagaccttaatttcacaagatatggtgacatcttctttgaggttattttcataggaggacgcacacaacctggaacagtgaaatcttgtgaaagagaacgtcatacttactctgttattgattgtgaacccaagcggtgaagccattctgccatctgttggctacatacagaa

SEQ ID NO: 164198 - DNA, 293 bp, Arabidopsis thaliana columbia
gaagaagaagaagtaatggcttcctctatgctctcctctgccgctgtggttacctccccggctcaagccaccatggtcgctccattcactggtttgaagtcatccgcttctttcccggtcacccgcaaggccaacaacgacattacttccatcacaagcaatgggggaagagttagctgcatgaaggtgtggccaccaatcggaaagaagaagtttgagactctatcttacctccctgaccttactgacgtcgaattggctaaggaagttgactacctttctcgcaacaaatg

SEQ ID NO: 164199 - DNA, 411 bp, Arabidopsis thaliana columbia
caacaaatcttaaacgttttactttgtgctgcactactcaacctcaatggccgcctcaacaatggctctctcctcccctgccttcgccggtaaggccgtcaagctttcccccgcggcatctgaagtccttggaagcggccgtgtgacaatgaggaagactgttgccaagccaaagggcccatcaggcagcccatggtacggatctgaccgtgtcaagtacttgggtccattctctggcgaatcaccgagctaccttaccggagagttccccggagactacggatgggacaccgccggactttcagctgaccccgagacattcgcaaggaaccgtgaactagaagttatccacagcaggtgggccatgctcggagccctaggctgggtcttccctgagcttttggctaaaaa

SEQ ID NO: 164200 - DNA, 317 bp, Arabidopsis thaliana columbia
gacaaagctcgacaagtcgtcggcggcggtgtaaaaatagtcggagctatggcgatgcatgccggagttggcttatccaggatctgtgtctgagccggagcaggttacactggtacgatcatgatgaagaatggaaaattgtcggatttgttgggtgaattgtagagtttgtagaaggttttgggaatatttggagaagtgttatttggtattattttatttcaattgattctttaatttgggttaatttgttgtatttatgtattttcgtttttatgactttatttgtttaaattatagtaatttatattatttat

SEQ ID NO: 164201 - DNA, 245 bp, Arabidopsis thaliana columbia
caagaatccccaactctcaagattccaattttcttcttcctcaccgaacccacttttccttcgacctaggattcagattctgagtgtgaccgtgaacaagtcgccgtctttagtggtggttgcggctactactgcggcagagaagcagaagaagaggtatcctggagaatcaaagggttttgtggaggagatgaggtttgttgcttatctaactcattctaatgcttaagctcatgatggggcga

SEQ ID NO: 164202 - DNA, 236 bp, Arabidopsis thaliana columbia
cagcaaaggtgctcccgagcagatccttgaccttgccaatgccaggcctgaccttaggaagaaggtactctcttgtatggacaaggacgctgagcgcggtcttaggtcgttggcagtagctcgtcaggtggtacccgagaaaacaaaagaaagcccaggtggaccatgggaatttgttggcttgttgcctctttttgacccttcaagacacgactgtgccgaaaccattcgtaggg

SEQ ID NO: 164203 - DNA, 455 bp, Arabidopsis thaliana columbia
  unsure (1)..(455): unsure at all n locations
aaatacacccaaaacaagatgagctcctctgactcttcttccgccgaatcccgtctagccacggctaagacggttctcaccaccgcggcttcggtggctgcgaccgcaatgctagctcgatctttagtccaagattatttgcctgacgaggtgcatcactacatttcctatggattccgttccatctttggttacttctcatcccaaatgacgataatcatcgaagaatttgaaggttttgctcacaatgaagtctttgaagctgcagaggcctatctagccaccaagatctctccttctaacaaaagaatcaaagggagtaaacatgagaaagaaaacaactacaatgtcaccgtggagcgtgacgaagaagttgttgacacctacaatggcgtcaaattccagtggatcctncatagtcgtcatgtcgagttcaagcactttcacaccccacg

SEQ ID NO: 164204 - DNA, 455 bp, Arabidopsis thaliana columbia
gagagacttgtatctgtgccaagaccgataaggatgcattggacaggatgtcccaacacttgcggacaagtccaagtaggagatgtcggattcatgggatgcttaacacgaggcgaggaaggaaagccagtcgagggtgctgacgtgtacgtcgggggacgaataggaagtgactcgcatatcggagagatctataagaaaggtgttcgtgtcacggagttggttccattggtggctgagattctgatcaaagaatttggtgctgtgcctagagaaagagaagagaatgaagattgattcaaaagctattggattcttaataagtcaagagacctatgaatggttctctctctgagttcagactttgatacttgatacttgtatttgtattgtgcccacatttttgggttttgttgctttctcctttgttgaaacctgttacttttgtcttggtt

SEQ ID NO: 164205 - DNA, 253 bp, Arabidopsis thaliana columbia
tttttcttagaataaaatcagaattacaaacaaatatggttttgcaaaagcttcctctcattgggctgcttttgctcctgaccatagtcgcctctccatcaaatgcatatggacctgtttgcccgccgtcgaacaaactaagccgggcaagtttccctgaaggttttttatttggcacggctactgcggcataccaggtcgaatgtgcgattaatgaaacttgtcgaggaccaaccttatgggacatctactg

SEQ ID NO: 164206 - DNA, 335 bp, Arabidopsis thaliana columbia
ggcaaaggcgaacggagtcttggactacatgaaagaaaggggtttcacaccaagcatggcgaccgacaatagcctcatgtatatgcgtaggcggtctgcagatttcggaaaatcagaggaaatcttgagggaaatactggctaaggggatcaagccagacatcatatcgtacaacacagtcatttacgcctattgtagaaatactcggatgagagatgcatctagaatattttcagagatgaggaattcagggattgtccctgatgttatcacctacaatacgtttattggttcttatgcagctgactcaatgttagaggaggccattcgcgtcg

SEQ ID NO: 164207 - DNA, 308 bp, Arabidopsis thaliana columbia
ctatggtgtcacaagttgttgctgcttatatgatgatggacgcattgaacaagaaaggatacagcgcatgctcattctgtgttcgcgtctgcaagtgaacttttgacgatttttggactcgctgcccctgtctttataactatgatgtcaaaggttttgttctatacgctccttgtgtactttgctacatcaatgggtacaaatatcatagctgctcatcaggttatgcttcagatatataccatgagtacggtttggggggagcctctttctcaaactgcacagtcctttatgcctgagcttttatc

SEQ ID NO: 164208 - DNA, 373 bp, Arabidopsis thaliana columbia
acttccatataattaaaacacagagagacgaagtaaatcgagatctcgaataatgcgaatctagaggatctttacgaattccatagtcttgagatcgaaaggtttctatcgattcgttggtcaagaggagattgtgcgtgtgattcgtgagcatgggctgttcgttttcaggattgaacgcactttacgacgccgtcaacggtggaggtgacgtatggatcaatgagaatcgattcaggatcgtgaggcagctcggcgaatgaggtttcgcattcgtctttttggtcaaggtaattgtttgcttcgcttgctgggacgtatttcttattattctttctttttaattaatttgttcctttttcattctttttct

SEQ ID NO: 164209 - DNA, 392 bp, Arabidopsis thaliana columbia
  unsure (1)..(392): unsure at all n locations
tttttcttgaataaaatcagaattacaaacaattttggtttttcaaaagcttcctctcattgagcttctggttctcctgaccatagtagagggtccagcaaatgcanattgacctgtttgcccgccgtctaacaaactaagccgtgcaagtttccctaaaggttttttattttacacttattactgcaacataccaattcttatgtgcgattaatgatacacttcgtgttccatccttatgtttcatcaactagtttaatatattcaatcattttctttaatctatttctgctttatcatatttagtttttatttttagtgagtaggtaaattattatttttacttccttttattaacttatttttcttattttaattctttttcttttcat

SEQ ID NO: 164210 - DNA, 379 bp, Arabidopsis thaliana columbia
  unsure (1)..(379): unsure at all n locations
caatctccatagatagctagagagtaaaaagaacaaagatgtcgaaagaagtgagcgaanaaggcgaaagccaccatggaaaagacgacggggatcctccaccagctcctcttctcgacatgggtgagctcaaatcctggtctttctacagagctctcatcgctgagttcatcgctacactcctcttcctctacgtcaccgtcgctactgtcatcggccacaagaagcaaaccggtccttgtgacggcgttggcttacttggtatcgcttgggctttcggtggtatgatcttcgtcctcgtctactgcaccgtcgatatatctggtgatcacattaacccagctgtgactttacgtctgtttttggcccttaaggtctt

SEQ ID NO: 164211 - DNA, 420 bp, Arabidopsis thaliana columbia
aacagattggtcaaaagctcctttcaccgcttattacagaaactacaatgtcgagggatgtgtatgggttaatggaaaggcagggtgtcccgcaaattcccaatggttcactcaaaaactcgattcgaatggccagacaagaatgaaaggggtacagagtaaatacatggtttacaactattgctccgataaaaaaaggtttcctcgaggtgttcctccagagtgcagctaaatgattgattctttgattcataaataagttacttgacgttgtctttgtaactcaatggttcttcttatctataattttccaattcatttgctaccaaatatatgcgtgtttgtgtaagatcttttttacaatgaacaattaattcttccaatctattatatttatcattttttcttcttcttcttttc

SEQ ID NO: 164212 - DNA, 454 bp, Arabidopsis thaliana columbia
caaactagtgtcaattctctccaaggcaatgaagcagtagatcaaactgagaccagtggtcagaaaaacagtacagtgtctgataacaacactatttctttgtctctatctgaagaacctgcattggaaactcttaaagaatctgttgatacatcagctgagttaggagctgttactgatgaagtcgataaaccttcaagtatgttggaccatattgaacttgagttcgaagcacatatcaatgaacttaaagaagctggatctgatggtatcaacaaagttgaggaatctaaagatgatgaagaagctgcaaggagacataaaatgttggaagccattgaacgtgaatttgaagctgctcatgctggatttgaacaactaaagactgatgattccgcccaaggattagatgatgaacaatctgcaaagagacaaagcatgttggacgagattg

SEQ ID NO: 164213 - DNA, 395 bp, Arabidopsis thaliana columbia
gttccaatttaccaaaccatagagacttgaattaatgagaatctctcaactctcaaccaaaccttaagaaatccacaggcgagatatatctttataaactctgtcctcactaatggttctttaaccaacttacaagagctctatcttgccgcagtccgtccttttcaaagcatatcaatgtctacattgagtctatataattataaaacgctcatgaacagttgctacttgttaaaactctcacaggagcgcgttgtgttgctacattgttgcacgagatgaaacgccgtggtaaagactgccgttttggagtagtgtcaatgtgcattgggacggagatgggtgcagcagctgtgtttgagagaggagatggagttgatgatgctcgcatcgca

SEQ ID NO: 164214 - DNA, 283 bp, Arabidopsis thaliana columbia
ctggttctgctcttttagccgttgagactcttactgagaatcctaaggttaagagaggtgatggcaaatgggtagataagatttgggaacgtatggatgctgttgatgattacatccctatccctcagagacaaactgaattgccattcttgttagctgttgaggatgtgttctctatcactggacgtggtacggtggctacagggcgtgtcgagagaggtacggttaaggtaggagagactgtagatttagtgggtttgagggagactaggtgttacactgt

SEQ ID NO: 164215 - DNA, 276 bp, Arabidopsis thaliana columbia
  unsure (1)..(276): unsure at all n locations
cggagctatcgaaaattctgaatctgaaaggtttgagtgttgatgtcttcagatcggaaggttgtaagttgtgaagaagtttcaagacacagcaaaactaangattgttggcttattatttccggcaaggtgtatgatgagactccattcatggatgatcatcctggaggcgatgaagtcttgttgtcctcaacagggaaagatgctacaaatgattttgatgacgttggtcacagtgacactgcaagggacatgatggtcaaatatttcattggt

SEQ ID NO: 164216 - DNA, 453 bp, Arabidopsis thaliana columbia
cactaaacctatcttcttaaccaaaagatcaatttattacaaaaatgcagggagctctgtttatgaaaccaactattcttcttccggttccttcttcagtttcttctccaaaactcacttttcttcttcctcacgcaaccaaagcttcaagactctcatctctcagatcaaacaactcatcatcatcatcatccttaacgtctgaccctaacaccgtcgactataactcctccatcctttctgtttttccagctgaagcatgcgaagtaatcagtggatacgcttgttctgctgatatttaccctgaagtcaagctcgatacaaagcccgtctcacgtcccgtggcttcagagcccgttgacagagaatacgaagagtataacagccccaaaacggttttccgtgaagaggcctgcgatgatcttggaggagaattctgtgaacctgactttc

SEQ ID NO: 164217 - DNA, 233 bp, Arabidopsis thaliana columbia
gattagctacatagaggctcaagggagaatgaagagaaacgatagggtctggcacatcgctttgggaagcggattcaagtgttacgccgcgggttgcaaatgtaaccacacgatcaagacaccaaccgatggagcgaaatccgattgaatcgaacgataccctgtctttatccctgaaggtaccaaactatcaaattacggcttgttgatcctgggacgaggacaactattac

SEQ ID NO: 164218 - DNA, 258 bp, Arabidopsis thaliana columbia
ccaaatttgatcgtaaaaaagattcctatcttcttcaccattcttttcttgaaaaagaatcatgggcttatcttatagcgaggccggagttattatcgccggagttatcttgaatgattttatcaaatcagttcgttcttttcttgatattcgtcgtttgtttggttcggcatcttcagggagcactatcatcgacaagattccgatggacgatatgcttccggcatcaaagttcgaggatatatcatcaagggttaa

SEQ ID NO: 164219 - DNA, 430 bp, Arabidopsis thaliana columbia
gaagtcatgaagttgttccttctcgtcgtcggctcattgcaaatcgtttcttatccttccatccagatggttgggattggaagtggtttgccattaccatcgttaatggagatagtagcacaattagtggtttacttcttgatagaagattacactaactactggatccatagatggatgcattgcaaatggggttacgagaagattcatcgaatccatcatgagtacacatcacctatcggatacgcatcgccgtatgcgcattgggccgagattttgattcttgggattccgacgattcttggaccggcaattgctcctggccatataatgacgttttggttatggatatctttacgacaattcgatggcgattgatacctacagcggttatttttttccatggtatgtgtcaaaattatttccattt

SEQ ID NO: 164220 - DNA, 421 bp, Arabidopsis thaliana columbia
cggacgcgtgggcaaaaaaatcatcgtgaaacgttcgaaggccattttctttggacgaccatcggcgttaaggagagagcttagatctcgtgccgtcgtgcgacgttgttttccggcttgatcaaaatggggttgtcattcggaaagttgttcagcaggctctttgcgaagaaagagatgcgtattctgatggttgggctcgatgctgctggttagacgactatcctctacatgctcaaacttggagagttcgttaccactattccaaccattgggttcaacgtgcgagactgtgggatacattaacttctgcttgcccgcgtggaattttggacctctgcctgaggttctcaattctgttagctttgtcatacgattaagcagtgattttttctattttttgcctgccttaatttttgcc

SEQ ID NO: 164221 - DNA, 240 bp, Arabidopsis thaliana columbia
  unsure (1)..(240): unsure at all n locations
gtatgtttctagggagattgaataatctctgttcattgaatcgacaatacggtttatctgggaagaactcaaacgagggagtgtgggtgatcnaagcttatcgaacacttcgtgatcgtggtccttacccagcagatcaagttcttagaggtcttgtgggaagcttcgctttcgttgacttcgatactcaaactttctctgttttctcagctttgatttctgatggaggaaattgctttt

SEQ ID NO: 164222 - DNA, 456 bp, Arabidopsis thaliana columbia
gaaggaaccttttagcactagcgaagtcaagtgcttgatgatgcagctgttggatggtttgaaatacctccacacaaattggattatccacagggatctgaagccatctaatcttctgatgaacaattgtggggagttaaaaatatgtgattttgggatggcgcgccagtatgggagccctatcaagccttacacccagatggttattacccagtggtacaggccacctgaacttcttctaggagcaaaagagtactctacagcagttgatatgtggtcagtgggttgcattatggctgaactgttgtctcaaaagcctttgttcccgggtaagagtgagcttgaccaacttcagaagatctttgcggtccttggaacaccaaacgaagcaatatggcctgggttctcatcatttccgaatgctaaagccaagtttcctacacagccttacaatat

SEQ ID NO: 164223 - DNA, 329 bp, Arabidopsis thaliana columbia
ccaagttcatggggctcaatgttcagatggttatccttgggactggaaagaagaagatggagggtcagattcttgaactagaagagaaggggccagggaaggcggttggagtggcgaaattcaacgtgccattggctcatatgatcactgctggagctgacttcatcattgtcccaagcaggtttgagccgtgtggtctcattcagctgcacgcaatgagatatggaaccgtccctattgtggcatctactggtggacttgtggacactgtgaaagatggctacacaggtttccacattggaagattcatcgtcaagtgtgaagttgtt

SEQ ID NO: 164224 - DNA, 355 bp, Arabidopsis thaliana columbia
cttataccgatctagaaaagatggagctgctatctctctataagtccactcctccttcaagcaaagcaccttcctcttctttttggtgctgtgagattggtttaagattaaaccagacccatctaagggatctggaacaagcttcgtctctggttccactctgatcatcagagtattaaaaatggagtctttcttctccagatccacctccatcgtctccaaattgagtttcttggccttatggatcgtcttcttgatttcttcatcttcttttacttcgacagaagcatatgatgcgcttgatccagaaagcaacattacaatgaaatgggatgttatgagctggacttctgat

SEQ ID NO: 164225 - DNA, 334 bp, Arabidopsis thaliana columbia
gaaggactagcctacggtacgaggctcgtgtcgtgtgatgtgctaccggagtctattgactggaggaagaaaggagccgtggctagtgtcaaagatcaaggtggttgcgggagttgttgggcgttttcaaccattggagcagtggagggaattaaccagatcgttaccggagacctattaaccttgtcttaacaagatttggtcgattgtgactcttcattcaactatagttgttcgtttgtcttatttactatgcttttgagttcattatttcgatttgttgttttctttctttctttttttttttttttctagtttgtctttgttccttttt

SEQ ID NO: 164226 - DNA, 339 bp, Arabidopsis thaliana columbia
cttgtctgacttgaacccaattcaggtcatcattgacgccattgtcaacagtggtccacgtgaagatgctaccagaattggatgtggtggggttgttaggagacaagctgttgatatctctcctctaagacgtgttaaccaggctatcttcttgattaccactggtgctcgtgaagctgctttcacaaacatcaatactatcgctgagtgccttgccaatgaatcaagccacccaaactttttctatgagcacaagtatactctacagcagatgatatgtagtcagagagttgcattatggctgaactgttgtctcaacctttcccctgtccgttacaa

SEQ ID NO: 164227 - DNA, 426 bp, Arabidopsis thaliana columbia
gagccatcgatcgcaccgagtttgactttgactgggcggaagaagcagcctgaccaggttcaaacggctgatggatggggtaagttcactggaggattcttctttggagggatctctggggtgacttgggcttacttccttctctacgttcttgaccttccttacttcgtcaagtaaatgtagatcaaaatatatcgagtgtactttcaactctcttgcatcattgttttttactctttgtcttgatcaagaatcttgaaactcaggattgttaatgtatattactctttctttatcttattgacattaatttaaaaaaaaaaaaaaaaaaaaaaaaaaaaaaaaaataaaaaaaaaaaataaataaaaaaaataaatttataaataataaatataataattaaattttattattttataaaaggg

SEQ ID NO: 164228 - DNA, 455 bp, Arabidopsis thaliana columbia
ggatgggacaccgctggtctatccgccgacccatagaccttcgccaggaaccgtgagctagaagttatccacagcagatgggccatgctcggagccctaggctgcgttttccctgagctattggctaggaacggagtgaagttcggagaagcggtttggttcaaggccggttcacagatcttcagcgacggaggattggactacttgggcaacccgagcttggtccacgctcagagcatcttagccatttgggctactcaagttatcctcatgggagctgttgaaggctacagagtcgccggagatggtccattgggagaagcagaggacttgctttacccaggtggcagcttcgacccattgggcctcgctactgaccccgaggctttcgcagagttgaaggtgaatgagctcaagaacggaagggtggctttgttctctatgtttggattctt

SEQ ID NO: 164229 - DNA, 318 bp, Arabidopsis thaliana columbia
ggtcatttactcgaagctaaatgatctcaaaattgatggtatacaagaactagaatctgtgacgagtgacatggttcgtggaattaggactgctacctagccaatattggcgattaattcttatgtactagctaatggttggatcactaaatttgctgatttatacttatcttacatttgttaatcattcataatttatgttgagactctttcttacctttctgaccttaccgatttcgaattggttaaagaagttgacttccttattcgcaacaagtggttttcttgtatttaatttcaattggatcacagattttt

SEQ ID NO: 164230 - DNA, 461 bp, Arabidopsis thaliana columbia
gaagaacaatggcttcctctatgctctcttccgctactatggttgcctctccggctcaagccactatggtcgctcctttcaacggacttaagtcctccgctgccttcccagccacccgcaaggctaacaacgacattacttccatcacaagcaacggcggaagagttaactgcatgcaggtgtggcctccgattggaaagaagaagtttgagactctctcttaccttcctgaccttaccgattccgaattggctaaggaagttgactaccttatccgcaacaagtggattccttgtgttgaattcgagttggagcacggatttgtgtaccgtgagcacggtaactcacccggatactatgatggacggtactggacaatgtggaagcttcccttgttcggttgcaccgactcccctcaagtgtcgaaggaagtgaagagtgcaagaaggagtaccccaatg

SEQ ID NO: 164231 - DNA, 233 bp, Arabidopsis thaliana columbia
cgtaattgtgcttgtttcgcctagaatctctcgttcccccaaatatctcactctccggggcaagcttcgccgccgggaagatcttaccctatttcatcttccctctcctctgatatacccataaaaacacaaaaaaaacgaaaagataaaaactttggctttagttttgttgattttgtcattcaattcgatttctttttcttctttcaaattctaaggttttcaatttggtt

SEQ ID NO: 164232 - DNA, 410 bp, Arabidopsis thaliana columbia
tggaagaaaagtttccggaactaggtcttgagaaagaaggttgtgaagagatgagttggattgagtctgtactctggtttgctgatttccctaaaggagaatctcttggtgttctcacgaatcgtgagcgtacatctctatctttcaaaggcaaagatgattttgtccaagaaccgatacccgaggctgcaattcaagagatatggaggcgattagaagcccccgaggctcggcttggaaagatcatattaactccatttggtgggaaaatgagtgaaatggcagagtacgaaacaccattcccacatcgaggagggaatctctatgagattcagtatgtggcttactggagagaagaggaagacaagaacaggacggagacagataaatatctgaaatgggtcgatagc

SEQ ID NO: 164233 - DNA, 437 bp, Arabidopsis thaliana columbia
caaaactctgaatttcgatttcaatggagtcacgcgtgctgttacgcgccaccgcgaatgtcgttggaattccgaaattgagacgaccaatcggagcgatccaccgtcaattcagcactgcatcgtcttcctcgttctcggttaaaccaatcggaggaatcggagagggagcgaatctgatctccggtcgtcagcttcgtccaattcttcttctcgattcgtcggcgatcaacggaggagagaaaagagaaattctcaaaccggttaaagccgccgctgctgaaggtggagataccgctggggatgctaaagttggattcctcgccaagtatccatggctagtcactggattcttcttcttcatgtggtacttctcgaatgcgattttcaacatcctttactagaagatctataactactttccttattcctatttt

SEQ ID NO: 164234 - DNA, 463 bp, Arabidopsis thaliana columbia
gaataaaatcagaattacaaacaaaaatggttttgcaaaagcttcctctcattgggctgcttttgctcctgaccatcgtcgcctctccagcaaatgcagatggacctgtttgcccgccgtcgaacaaactaagccgggcaagtttccctgaaggttttttatttggcacggctactgcggcataccaggtcgaaggtgcgattaatgaaacttgtcgtggaccagccttatgggacatctactgtagaagatatccagagaggtgcaataacgataacggcgatgtagccgttgatttcttccatcgttataaggaagatatccaactaatgaagaatctaaacacagacgcctttagaatgtctatcgcatggccaagaatatttcctcatgggagaaaggagaaaggagtgagtcaagctggtgtgcaattctaccacgaccttatcgacgagctcataaa

SEQ ID NO: 164235 - DNA, 226 bp, Arabidopsis thaliana columbia
aacgaaagttccgaagaagaagaagaagaaggataaaagatgatttaccgaaagtggagtttggtgtccggcccaccggttatactgagcggagcgccaattgctgccgtctccgtcgaattcgtcttgcaaaacgtaactaaaggtgagcagaacaagaatgtctcaacacacacgtgagaagacaattggggagatgctacaaaatgaggcgttcatgttagtt

SEQ ID NO: 164236 - DNA, 281 bp, Arabidopsis thaliana columbia
ggagaggcggtttggttcaaggccggttcacatttcttcatcgatggagggctcgattacttgggaaaggctatcttggttcagggtcagggcattctgaccatttaggccacacaagttattctgatgggagccgttcaaggctacagagtcacaggaaatgggccattgggagaggccgaggacttgctttaccccggtggcagcttcgatccattgggtttggctaccgacccataggcatttcgctgagttgaaggtgaatgtatctaataacggta

SEQ ID NO: 164237 - DNA, 407 bp, Arabidopsis thaliana columbia
gttgagaagaagaagaagaagatgagcaccaaaagtgttaagatcagtgagactcagcaatctggtgagaagaaaatcatgggaaggaccggcaagaaaagtcttagcttattaccatctttgcctccaccctcagaggtggttacagggtcagatcctaggccaataagacagactacttccaggtccaagactagtttgcctgagaagaaacagagtggttctgctaatcttgttactaatccgaaacccgaaagcaagattagaccgaaaaggattggtttaaaggttactccaccttctcctccaacaaagcagctaatgaatttcaagaaagggaaagttcttgaaccaaaaccagaagattccactacaacatttgtcaatttcaagaagataggtgttca

SEQ ID NO: 164238 - DNA, 232 bp, Arabidopsis thaliana columbia
  unsure (1)..(232): unsure at all n locations
gtcgaaaaacagagttattttgtcggatcaaaatggtgaagattgagataggaagtgtgggtgactccttttgtgtagcagctgggaggcttacttgtctgaatttatcncaactcttctctttgtgtttgctggcgttggctctgctcttgcttttgccaagctcacatccgatgcagccttggaccccctggtcttgtcgctgcgctatgctcagcccttcccttttcgt

SEQ ID NO: 164239 - DNA, 436 bp, Arabidopsis thaliana columbia
aacaaacataagccaatggaaacaaaaaaattctaaggtgaaaaaagccaatcagaagctgagtaaactctaagctcacacaaaaatggcgtctcttcttggaacatcttcttctgcaatctgggcttctccttcactctcttctccttcctcaaaaccttcctcctcccccatttgcttcaggccaggaaaattgtttggaagcaagttaaatgcaggaatccaaataaggccaaagaagaacaggtctcgttaccatgtttcggttatgaatgtagccactgaaatcaactctactgaacaagtagtaagggagtttgattcaaagaagagtgcgagaccggtttatccatttgcagctatagtagggcaagatgagatgaaagtatgtcttttgttgaatgttattgatccaaagattgggggtggtatgatt

SEQ ID NO: 164240 - DNA, 405 bp, Arabidopsis thaliana columbia
cttcgccaggaaccgtgagctagaagttatccacagcagatgggccatgctcggagccctaggctgcgttttccctgagctattggctaggaacggagtgaagttcggagaagcggtttggttcaaggccggttcacagatcttcagcgacggaggattggactacttgggcaacccgagcttggtccacgctcagagcatcttagccatttgggctactcaagttatcctcatgggagctgttgaaggctacagagtcgccggagatggtccattgggagaagcagaggacttgctttacccaggtggcagcttcgacccattgggcctcgctactgaccccgaggctttcgcagagttgaaggtgaaggagctcaagaacggaaagttggctatgttctctat

SEQ ID NO: 164241 - DNA, 428 bp, Arabidopsis thaliana columbia
cccaatttttgtaatgacgggatagaaaaattcccaatgtccgctttatctttcattctcgattagaattcttcaaccaaaggtcactctctctccgttccattgcttctggatttcgtttttaagggttttacatttttcctgccttcttttacccatcagaggaagtttcaagccattttgttaatcagctctctcataagctaagatgtcgtcatcgccttttccagtcttggacaaccgaccaattgataagtggaaggttacggaattgaaagaagagcttaaaagacggagactaacaacaagaggcttgaaggaggaattggttaggcgtcttgatgaagcacttcgtgctgagcaagaagagtctgaaaggatcaatagtgctactgttgctgctgctgaaaaagccaatcaagagcctc

SEQ ID NO: 164242 - DNA, 341 bp, Arabidopsis thaliana columbia
ggtagtgttggagtaagaaaacacttttttacacgtcggatatttcagaaaaacaccttattcagctaaagtgttgaacggtgatctaaaagctcgggggatgaagggaaattggtcgatcggcccaaaggttctttattgccagtttttcacttttcgttccttgacaccatggtagggattatttacttccattcgaccggttgttttggccccaaacttgatttcggtgctaatcgcttgaaatttgttgttcactggcttcaacattggtccaaccattggttttaactttttcaacactttgttttctcaatggaaaaacctctgtttggaagctg

SEQ ID NO: 164243 - DNA, 387 bp, Arabidopsis thaliana columbia
gaagaacaatggcttcctctatgctctcttccgctactatggttgcctctccggctcaagccactatggtcgctcctttcaacggacttaagtcctccgctgccttcccagccacccgcaaggctaacaacgacattacttccatcacaagcaacggcggaagagttaactgcatgcaggtgtggcctccgattggaaagaagaagtttgagactctctcttaccttcctgaccttaccgattccgaattggctaaggaagttgactaccttatccgcaacaagtggattccttgtgttgaattcgagttggagcacggatttgtgtaccgtgagcacggtaactcacccggatactatgatggacggtactggacaatgtggaagc

SEQ ID NO: 164244 - DNA, 441 bp, Arabidopsis thaliana columbia
atgacacaagcggatttaggacttgcagatgcttatatcaatggagatttttctttcgttgataaagaatcaggacttttaaatctgattatgattctcattgctaacagagatacaaaatcaaatcttagtaagaaaaggggatggtggacaccgatgtttttaactgcgggtttagcatctgcaaagtattttctaaagcatgtctctaggcagaacactctaacacaagctcgtagaaacatttctcgtcactatgaccttagcaacgagcttttcggtttcttcttggatgataccatgacttactcctctgcagtattcaagtcggatgatgaggatctgagaactgcacagatgagaaaaatctcgcttctgattgataaggcgagaatagagaaggaccacgaggttttagagataggatgtggatggggactt

SEQ ID NO: 164245 - DNA, 322 bp, Arabidopsis thaliana columbia
accgcgcgaattccggtcgacccaccgtcggaactatctttcaatctatcttgattccaatccattcttcttcaagtgccggattctcggatcggatcttctaagtctagctggggataagggttactgtcactactcatgcctcaggctcgattttccgaccttgtacttcaaagccaaaattcctcaccggttcttccggtaggctgaaccgcgacttgtcactcacatagatcggttcacatgccaaatcctcaaggtttactgatgaaacttataaaaggctaaagttgccccggttggcatcccctgattatctcac

SEQ ID NO: 164246 - DNA, 450 bp, Arabidopsis thaliana columbia
aaaaaaaaaaaaaaaaaaacacaaaaagtttcaatggccgcctccacaatggctctctcctcccctgccttcgccggaaaggctgtgaacctttcccccgcggcatctgaagtcctcggaagcggccgtgtgacaatgaggaagactgttgccaagccaaagggtccatcaggcagcccatggtacggatccgaccgagtcaagtacttgggtccattctctggcgagtcaccgagctaccttaccggagagttccccggagactacggatgggacaccgctggactttcagctgatcccgagacattcgcaaggaaccgtgagctagaagttatccacagcaggtgggctatgctcggagccctaggctgcgtcttccctgagcttttggctaggaacggagtcaagttcggagaggcggtttggttcaaggccggttaacagatcttt

SEQ ID NO: 164247 - DNA, 459 bp, Arabidopsis thaliana columbia
agcaatacaagagaagcaattagaaaggcttaaccataattagagattcacaaccaaagcaaaatggcatcatacaagctcttccgcattgcttttctagtgtgcctctcttcctctatgatgatcaacacttgctcagcctcacgccgccttctccaacaacaacctcttcctcaaatcccaaatctgcctattccaacaatgggactacctccattgccatcgacgttgccacaaccgtctttaccaactctccccacaatgcccactgcaatgtctccatttccaatgccatcagctttgccacaaccaaatcttcccaccattcccacggcaatgcctccaatgccaactttgccttcatttccaacaacaattccttctcttccgactaatattccatccattccttctcttccaactaatctcccatccattccctctctgccgactagtctc

SEQ ID NO: 164248 - DNA, 447 bp, Arabidopsis thaliana columbia
aatcttatcactactctaaaagaatcttcatcatggcctcagtaacctcagccaccgttgcaatcccatctttcaccggccttaaagcctcaaccatcaaatcatccgccaccgtcagaatccaaactgctgctgttgcatcaccgaagcttacagtgaagtcatctctaaagaacttcggagtcgcggccgtagcggctgcagcttcaattgctttggccggaaacgccatggcaatagaagttctcttgggaggaggggatgggtcgttagcttttattcccaacgacttctctatagctaaaggagagaagattgtgttcaagaacaacgctggatacccacacaatgttgtcttcgatgaagacgagatcccaagtggcggcgacgtggccaagatctcgatggacgagcaagatctactcaacggtgcgggagagacgtacg

SEQ ID NO: 164249 - DNA, 336 bp, Arabidopsis thaliana columbia
ctgaagtgaagagggctgagactaccgagaagattttcctcactgtagtattagctgatactaaggataccaaggttaacgctagacccatatagagtctttgatttctctgcgaaagttggtccaaaaaaccacgtttatgagctcaaactggaacttgccgataaagtcaatgctgaggaaagcaaaatcaacattggagagagaagcatattctgcataattgataaagcacagccggaaaggtggaataagctactacgtgtgaagaacccgacacactctgccaaggctgatttgggacacgtgggctgatgcgggcgacgaacgcaccac

SEQ ID NO: 164250 - DNA, 457 bp, Arabidopsis thaliana columbia
gcactatcgtctcctacctcctttgcctacaagctttcacgcgggagctcaacatcagccatggcggaacagactgagaaagcttgtcttaagcagcctaaggtcttccttagctcgaagaaatctggaaagggaaagagacctggaaaaggtggaaaccgtttctggaagaacattggtttgggcttcaagactcctcgtgaagccattgatggagcttacgttgacaagaaatgccccttcactggaactgtttccattagaggtcgtatcttagctggtacttgccacagtgcgaaaatgcagaggaccattatcgtgcgaagggattaccttcactttgtgaagaagtatcagaggtatgagaagaggcattcaaacattccggctcatgtctcaccatgcttccgtgttaaggaaagagaccatatcatcattggccaatgcaggccattgt

SEQ ID NO: 164251 - DNA, 382 bp, Arabidopsis thaliana columbia
caatttctcaaaatcttaaaaactttctctcaattctctctaccgtgatcaagatgcagatctttgttaagactctcaccggaaagacaatcaccctcgaggtggaaagctccgacaccatcgacaacgttaaggccaagatccaggataaggagggcattcctccggatcagcagaggcttattttcgccggcaagcagctagaggatggccgtacgttggctgattacaatatccagaaggaatccaccctccacttggtcctcaggctccgtggtggtatgcagattttcgttaaaaccctaacgggaaagacgattactcttgaggtggagagttctgacaccatcgacaacgtcaaggccaagatccaagacaaaga

SEQ ID NO: 164252 - DNA, 415 bp, Arabidopsis thaliana columbia
gttagtcttcttctctgtttttgtctctttggctatatatattcaaacattgtgtgaacagaacacaaatcaacacaacacacacaactttgtgttctttaagttttgtttcagagatcaatggccgggactggattgtttgctgagattcttgatggagaagtatacaaatactacgctgatggtgagtggaaaacttcttcctcaggtaagagtgttgccatcatgaacccggccacgaggaagacacagtacaaggttcaagcatgcacgcaagatgaagtgaacgcggtgatggaactggcgaaatcagctcagaaatcgtgggcgaaaactcctctttggaaaagagctgagcttcttcacaaggctgcagcaatccttaaggacaacaaagctcccatggctgagtctc

SEQ ID NO: 164253 - DNA, 347 bp, Arabidopsis thaliana columbia
gcggcagcttcgacccattgggcctcgctactgaccccgaggctttcgcagagttgaaggtgaaggagctcaagaacggaaggttggctatgttctctatgtttggattcttcgttcaagccatcgtcaccggaaagggacctttggagaacctcgccgaccatttggccgacccagtcaacaacaacgcttgggccttcgccaccaacttcgtccccggaaagtgagcggctgcttattatgtgaatgagagcagagaaagagagtttgtttgtggtctattctatgtaaatttgagaactttcctttgtggtatctttgtatagaaatcgaacctctttttctct

SEQ ID NO: 164254 - DNA, 458 bp, Arabidopsis thaliana columbia
gtcactcacaatctccttatctctcacgcagaagcagttgtagcttaccggaaatgcgaaaagtgtaaaggtgggaagatcggaattgcacatagtcctgcttggttcgaagcacatgaccttgctgattcacaagacggtgcgtccatcgaccgtgcacttgactttattttgggatggcatctagacacaactacatttggagattatccacagatcatgaaagacattgttggacatagattgcctaaatttacaactgagcagaaagcaaaactgaaagcttctaccgatttcgttgggctcaactactataccttagtgttttcaaaccatttggagaaacctgatccttcaaaaccaagatggatgcaagattctcttattacaatggagtctaagaatgcgcaaaattacgccattggtagcaagcctttgaccgctgcattgaacgttta

SEQ ID NO: 164255 - DNA, 290 bp, Arabidopsis thaliana columbia
aaaaaacaaagactcgagttgatatgtctagtactaaagatatgtcaactgtccaaaacgcaactccttttaacggcgttgccccatccaccaccgtgcgagttacaatcgtccaatcctccaccgtctataacgatactcctgccactatagacaaagcggagaagtatattgtggaggcggcaagcaagggagcagagctagtgttgttcccggaggggtttatcggcggctatcctcgaggttttaggttcggtttagcggttggcgttcataacgataaacggcgt

SEQ ID NO: 164256 - DNA, 352 bp, Arabidopsis thaliana columbia
gtctaatcaatcaaagagaagtaagagaaatggcttattctaactgtggatgtggctcctcctgcaaatgtggtgactcttgcaggtgcgagaagaactacaacaaggagtgcgacaactgtagctgtggatcaaactgcagctgtgggtcaaactgtaactgttgatgaaattattatggtctaaaatcatatatatggcagaaaaattggggaaaatatgtgttttatgctaagagatgtgtgtgtgttgttggaataaagacgtgtccgttgtgttgagtatcaactctcttaagcttagacttttcccagctttgtattttcctatgtatggtaatggagtgatttgt

SEQ ID NO: 164257 - DNA, 442 bp, Arabidopsis thaliana columbia
  unsure (1)..(442): unsure at all n locations
cgtgaacttcttgaggtcatggactctgatgctgatggggttccaagtgagttctttgactatttcaaggtgctatgcattcaaggattccttacatgtagaaagcacgcggaacggattattctcttagttgaaatgttacaggattcgggtttcccttgcttcaaaggtggtccacgaaccattcaaaacctaagaaaaagattccatctaagtttaactgaagagcaatgtgtctcgttggtcctctctctcatcagcagtagcttagatgcttggcggacacgacaatatgattactaccaacgggtcttaaatggaatattgtgatgttccaaagaaccaacctaataaggggtaaaaactcacaacatacattggtatgttgggttagctcataaaacaatacgntttttgaggaacccttttcatagtagcaatc

SEQ ID NO: 164258 - DNA, 418 bp, Arabidopsis thaliana columbia
tccgggattcgccgcatccgcagccacgcgtgcggcagctgtcgacccatcgggcctcgctactgacctcaaggcttacgattagtaaggatgtgaagaagttgttgggagttactgcttaagcaaggcaagattgcataattagacaaataaaagctcattagtattgtattaccaatactgtgtagtaagctgagttcgtgagtgtgtgcctttgggaccgcgtacaattataatccgttttttagcggccaaactatgtaataatcgtagatctaaatatcagatttcccgttaccttactaagaaaaaacaaacataatgataactaaccatcggttcttaaatggaatattagagatgttccaaagaaccaacctaaataagggtaaaaaacttacttcttacattgtttttt

SEQ ID NO: 164259 - DNA, 430 bp, Arabidopsis thaliana columbia
atcacatcttattaactaaagagccttttacttgcgccacactctcaccgcaatggccgcctcgacaatggctctctccggtcctgctttgaccggaaaggccgttaagctatccccggcggcctccgaagtatttggaaccggccgaatcaccatgcgcaaagcctccaagcccaccggtccatccggcagcccatggtacggatccgaccgagtcaagtacttgggtccattctccggtgagcctccgagctacctcactggagagttccccggtgattacgggtggggacactgccggtctatccgccgatcccgagaccttcgctaggaaccgtgagctagaagttatccacagcagaagggccatgctcggagcccctagctgcgttttcctgagctattggctaggaacggagtgaagttcgga

SEQ ID NO: 164260 - DNA, 458 bp, Arabidopsis thaliana columbia
aatgcagcaggtgctaccgcaaggatgattgttgttcatcctcaactagtcccgctaaatcaagtacttccagtgttcttaagaggtctacctctaaaggaagatcaagaggagtccatggctgtttacacctgtatatattcccttgtttcgtcatccaatccacagatcttctctcatgttccggagctggttaaaatctttgggcaagtattggagtcgccagtcgaaaaagttgaagtgaaagcaattgtaggcagaactttctcccatctaatctcggtttatgggaatcagttgcagccaataataagtagtctaccgccttctcaagctaacgttctcgctgcgtttgcatccacgagttgattgtcgcttgtgatatatttaatatctcagaagcgaaaactgtcttcagcttttgtttttcttttgaagtctattctttgctcaattga

SEQ ID NO: 164261 - DNA, 231 bp, Arabidopsis thaliana columbia
  unsure (1)..(231): unsure at all n locations
gaaggcccgggccgacccacgcgnccgcngagnnnggnggcncngngaanacggcaganggngngnccggnccagnnccngccacnggaaagnnaaagggacaggagggngagaaanangcagacccggctaaaaacaangangnggnnnnngaaccagaagnngggncaaaannnncaagggacgcccaacagacnancaaagcaacaaagaangaggacancaaggagg

SEQ ID NO: 164262 - DNA, 354 bp, Arabidopsis thaliana columbia
  unsure (1)..(354): unsure at all n locations
gcaagaagcaanncnggagctcaancagcaacaacatctantctccntctnggcttagntaagtccttcgccctcccaagaagaagaagatgtcttgctgcggcggcaactgcggctgcggcagcggctgccagtgcggcggcggctgcggcggatgcaagatgttccctgatgtggaggccacagccaccaccaagaccttcgtcctcgctgctccatccaacaaggcgagctctggaggaatggagatggcggnggagagcggcgagaacggcggctgcggctgcaacacctgcaagtgtggcaccagctgcagcggctgctcctgctgctcctgcaactgaannctatcgc

SEQ ID NO: 164263 - DNA, 265 bp, Arabidopsis thaliana columbia
  unsure (1)..(265): unsure at all n locations
gcttcttagtcacggtattgatccacaaactcatcgtcagattaacgaatccaaaacggggtcgtctcaagttgttggtggggtggaaaacgatgccgnngagnattctttttccaatttagccgttaaaccgaagacgggganttcctgcgataacggagcttnngctggcggcacgacgacggacgaggatctncggcnnaatggggagagttattatagtggtaattcaggacatataatgcttgntnnggatttaactctt

SEQ ID NO: 164264 - DNA, 200 bp, Arabidopsis thaliana columbia
  unsure (1)..(200): unsure at all n locations
aacaaancnnaaacgnnnnacnnngngcngcactacncaaccncaanggccgccncaacaagggcgcgcnccnccccggccggcggcgggaaggccgncaagcnnncccccgcggcagcngaagnccnnggaagcggccgnnagacaangaagaagacgggggccaanccnnngggcccancaggcagcccaagagacgg

SEQ ID NO: 164265 - DNA, 452 bp, Arabidopsis thaliana columbia
  unsure (1)..(452): unsure at all n locations
cataagtttgtctattaaagatggaatcaaagacgttctggatcgttactcttcttctctgtggaacaattcaattagcgatttgcagatcagaagagaaaagcacagagaagacgatgatgctaggaggcgttcatgatctccgaggaaatcagaacagtggagagatcgagagtctcgctcgatttgccattcaagaacataacaaacancanaacaaaattcttgagttcaagaagattggcaaagcaagggagcaggtagttgcaggaacgatgnnccacttaaccctagaagcaaaagaaggtgatcagactaagaattttgaagcccaagtgtgggtgaggccctggnnggacnntaaacagttgcaggaggtcaaggaatcatcttcttgaatttcacttgttcaaggtaatgattacaaatgctctgagagaaattaattatat

SEQ ID NO: 164266 - DNA, 266 bp, Arabidopsis thaliana columbia
  unsure (1)..(266): unsure at all n locations
gaatgatcctaatccgtttagcttttaaaaaaaataagaagacatatttatcaacttgatcaacttgagcaagttgcagcagatattttcctcggccaagatctanagttttgagaatggcgatggtatcaggaagacganctactctaaaccccgacgcacctctttntattccggcagctgtacgacaagtggaagattnctcaccggagtggtggcaattggtgacaacttcgacttggtaccctgattactggatcagtcag

SEQ ID NO: 164267 - DNA, 343 bp, Arabidopsis thaliana columbia
  unsure (1)..(343): unsure at all n locations
ggctattggatttcaaagttttctttcggcgagtccacttcgcgtaccatttctatagaatgtggaatgcaaagttcagcgctcgggttcttgcttgcacaaaagcatttcacaaaccctctagttgctgttccttctgcagncagtgttgtctgtatggcgcttggcgggagcggcctggccgtgttctggagaaacctaccgattccggcagatgacaaggatgacttcaaagagtaaatgaagtaggaaaggcggtttgcatctnctccaaacgatgtgattgttttgttggaatgttagtaaacattacaaaatttgtgttgaaaaacatnaaacaaaa

SEQ ID NO: 164268 - DNA, 430 bp, Arabidopsis thaliana columbia
  unsure (1)..(430): unsure at all n locations
cttgtgtgggactaagagataccgttataagaagagccaaggaagtcccgttgtgcaaatatttcaggtcatagcagctgcgttgcgaaagaggaaaatggaactacctcaaagcattgtttatctttatgaagataaccctgaaggcattagaattgaacatactgatcagnntcacttgttggacaaggcggccatagttgcnnaaggagattttgaacaaacccttgatggagttgcaatcccaaacccttggaagctaagctcagtgaccaaagttgaggaagtaaaaatgatggttaggcttttgcctatttgggcaacaactataattttttggacaacatatgcccnaangatnacattctctgttgagcaagcttcaactatgagacgtaacattggaagccttaagatcccagctggttcc

SEQ ID NO: 164269 - DNA, 305 bp, Arabidopsis thaliana columbia
  unsure (1)..(305): unsure at all n locations
cctcccaccgctattgaacttaacgcttcacataatgttcgcatcagtcatgggattcccatctgatgagaagctgatcaaggagagtgaagagaagcttgcggntgtncttgatgtctacgaggcacatctctcaaagagctngtccttggtcggtgacttcgngagcnngactgatttggctcacctcccgttcactgattncttggngggnccgattggtaaagcttacatgatcaaagataggaatcacgtgagcgcgtggtgggannnnnttagcagccaggctgcgtggaaagagactg

SEQ ID NO: 164270 - DNA, 264 bp, Arabidopsis thaliana columbia
  unsure (1)..(264): unsure at all n locations
cgaactngnncggagagaaacgnaggggaccganctatcaaggctncaagggcaaacagaaagggaccacgacaagacaggaggccaaagcccacctgaaggtcccaagctatgtactaacaactgcggtttctttggaagcgctgccacaatgaacatgtgttctaagtgtcacaaggatatgttgttccaacaggagcagggcnctaannnngcatctgcagtgtctggaacatcgtcatccagcaacatcataaaggaaac

SEQ ID NO: 164271 - DNA, 452 bp, Arabidopsis thaliana columbia
  unsure (1)..(452): unsure at all n locations
cagatctaaagnngagtctgagctttcttctgtttgctctggaatccttaagctccttgactcgcatctgatcccatctgctggagcgagtgagtctaaggtcttttacttgaagatgaaaggtgattatcatcggtacatggctgagtttaagtctggtgatgagaggaaaactgctgctgaagataccatgctcgcttacaaagcagctcaggatatcgcagctgcggatatggcacctactcatccgataaggcttggtctggccctgaatttctcagtgttctactatgagattctcaattcttcagacaaagcttgtaacatggccaaacaggcttttgaggaggccatanctgagcttgacactctgggagaggaatcctacaaagacagcactctcataatgcagttgctgagggacaatttaaccctttggaccttcgatatgc

SEQ ID NO: 164272 - DNA, 166 bp, Arabidopsis thaliana columbia
  unsure (1)..(166): unsure at all n locations
gaagaagcaaaanggccacaagcgcancagcnnagcgcncaccaaccacanncnccacggcaagcgcccacaaaaacccgggcgggancncannccanggccnncagccccnccgncaaggnggcnccnccnccgccccacccaaaccagcaaccagcgggagaaa

SEQ ID NO: 164273 - DNA, 457 bp, Arabidopsis thaliana columbia
  unsure (1)..(457): unsure at all n locations
ggagagttcaagaaacaatggcaaagatgcaattatcaatctttatcgctgtcgttgcgcttatcgtctgctctgcatctgctaaaaccgcaagccctccagctccagtgctgccaccgacaccagctccagcaccagccccggaaaatgtgaatctcaccgagcttttaagtgtagctggtccgttccacacattcctcgactacctnctctcgactggagtcattgagactttccaaaaccaagctaacaacactgaggaaggcatcacaatctttgtccctaaagatgatgctttcaaagctcagaagaatcctcctttgtcaaatctcacaaaggatcagcttaacccccttggtctcttccatgctctgcctcattactattcgctttcggaattcaagaactggagccaatctggtccagtgagcacctttgctggtgggcaatactcctt

SEQ ID NO: 164274 - DNA, 459 bp, Arabidopsis thaliana columbia
  unsure (1)..(459): unsure at all n locations
cctcccaccgctattgaacttaacgcttcacataatgttcgcatcagtcatgggattcccatctgatgagaagctgatcaaggagagtgaagagaagcttgcgggtgttcttgatgtctacgaggcacatctctcaaagagcaagtacttggccggtgacttcgtgagcttggctgatttggctcacctcccgttcactgattacttggntggnccgattgggaaagcttacatgatcaaagataggaaacacgtgagcgcgtggtgggatgatattagcagccgtcctgcgtggaaggagactgttgccaagtattcattcccagcttaagatgtgttcancttcttggngnnncggcttgggttttatgagaggtttaataaaaggggaactaaatgtacctcttaatgtaatgttgccacctctgtgttctctttccttttggagtttaataagta

SEQ ID NO: 164275 - DNA, 236 bp, Arabidopsis thaliana columbia
  unsure (1)..(236): unsure at all n locations
aaacgctctcgncttcgagaacgngangaccttcgggctcgtctacaccgtctacgccacagccgttgaccccaagaacgggggtctcggaacaatcgcaccaaacgccataggtttcatcgttggagctaacatcctnnccggtggagctttcagcggagcttccantaacccagccgttgctttcggaccagccgatnnaagctngncgtggaccaaccactnggtttactggg

SEQ ID NO: 164276 - DNA, 299 bp, Arabidopsis thaliana columbia
  unsure (1)..(299): unsure at all n locations
agaagaccaaaaggactgctcctaagtccgatgatgtctacctaaagcttctcgtcaagctttaccggtttttggtgaggagatctaacagcaacttcaatgctgngannctgaaaaggcttttcatgagcaaagtcaacaaagctcctctttcactctctaggcttggggngntcatgactggcaaggatgacaagattgctgnnnnnnttgnncctatcactgatgatttgagagttcatgagattcctgccatgaaggttactgccttgnnnnntactgagagggctagggctaga

SEQ ID NO: 164277 - DNA, 323 bp, Arabidopsis thaliana columbia
  unsure (1)..(323): unsure at all n locations
aacttnctctcatctncaaannaaaancaaacagntncttaataacattttacttcatggctcgtaccaagcagacggctaggaagatcaaccggaggaaaggctccaaggaagcagctggcgacaaaagcggcgaggaaatctgctccggccaccggaggagtgaagaagccacacagattcagacccggaactgttgctttaagagaaatcaagaagtaccagaagagcactgagcttcttatccgtatactccctttccagaggcttgtcnnagagatcgctcaggacttcaaaaccgatcttcgtttccagagcagtgc

SEQ ID NO: 164278 - DNA, 264 bp, Arabidopsis thaliana columbia
  unsure (1)..(264): unsure at all n locations
caccaccacttcctctacctatctaattccgaatctggatttggatttggatctcatttcgattcaacgatgaaggtggttgataagatcaaatccgngacggagcaaggccaaacagctttctccttcgagtttatcccaccgaagacagaagatggcgtnnngaatctctttgaacgaatggatcgattggnctnnnatggacctaccttctgtgatatcacttggggtgctgatggatacgcagctgatctcactctcgag

SEQ ID NO: 164279 - DNA, 294 bp, Arabidopsis thaliana columbia
  unsure (1)..(294): unsure at all n locations
gtgtgtttttccgcagaatatcgacaaaatcccatatgtcgattgcccggttctcatcattcatggaacttcggatgaggtagtggattgttctcatgggaaacanctatgggaactctgcaaagacaagtacgagccgntctgggtgaagggagggaaccactgtgancatgaacactaccctgaatacattagacacctnaagaagnnnnaagcaacagtagatgagataccatgtccgaggatgagcagcgaccaatcagagtnnntnnttgatgcgccctcgaggagaag

SEQ ID NO: 164280 - DNA, 343 bp, Arabidopsis thaliana columbia
  unsure (1)..(343): unsure at all n locations
catacacactactaataaaccatgaagcttcttatgctcgcctttgtttttctattagctttggcgacttgtaaaggtgacgagtttgtttgtgaagagaacgagccattcacatgtaaccaaactaaacttttcaacangggcaatttcgaaaaaggcttcatctncnntgttgcatcttctgcttaccaggtggaaggcnnnnnangccctggacttaacgtttgggatagcttcactcaccgatgcccagagaaaggtggagctgannntggaaatggagacactacttgggactcatatactctttggcagaaagatntagacgtgatgggcgagctca

SEQ ID NO: 164281 - DNA, 390 bp, Arabidopsis thaliana columbia
  unsure (1)..(390): unsure at all n locations
caaggtcaagcaagcttaccaagctcgatacaagaaatcaatcgaggaagatgtcgcgcaacacacatctggtgaccttcgtaagctcttgcttcctcttgtgagcactttcaggtatgaaggagatgatgtgaacatgatgcttgcaagatctgaagtctaagatacttnacgagaaggtctcagagaaatcttacagtgacnnnnacttcatcagaatcttgacaacaagaagcaaagcacagctctgtgcaacactcaaccactacaacnncgagtatggaaacgccattaacaagaacttgaaggaagagtcggacgacnatgactacatgtttctnctaagagcnnnaatcacatgtttgacataccctgagaaggattttgaga

SEQ ID NO: 164282 - DNA, 443 bp, Arabidopsis thaliana columbia
  unsure (1)..(443): unsure at all n locations
ctctncgnnancccctcnctctaagggctaacgaagaacncactgagncacagcaacaagaagacccaagncaacaangacccaaggcagangaagaaaagggcncagaccccgactcaaactcagactcagacgcatcatcccaatcctgcggcgacgatttctacatctccgagtcagaaaatgaagcagaaggagacaacacaatcttcaactacgtaagaccaagtgacatacctcctgacccaaacgcaaacccagaaaccaacattcgccgattcaatcgagtcctcgatggcaaacgagtgaagcgtatgcaagaagaagaagaagataaatcccctttctatgaaaatcttttcgatttcctagagacccagaacggtggaaggagcaagatttaagagagatttgggctgatggtccattggagatgacgaaac

SEQ ID NO: 164283 - DNA, 455 bp, Arabidopsis thaliana columbia
  unsure (1)..(455): unsure at all n locations
aaaaaaacagnagagagagatatagagagcatcaatggcgtcgncgncaagactttgcgattcgtgcaaatcgacggcaggagctctattctgccgcgcagacgccgcgtttctctgcggcgactgcgacggtaagatccacacagctaacaaactctcatcacgtcacgaacgagtttggctatgtgaagtatgcgaacaagcaccagcacacgtcacgtgcaaagctgacgccgctgcgttatgcgtgacgtgcgaccgtgatatccactcanctaatccactctctcgccgccacgagcgcgtaccaatcactcctttctacgacgctgtaggttcagcaaaatccnnnncctcctccgtcaatttcgtaaatgaaagaggcggtgacgtcactgcttcgggggttttagctaaagaaggaatcggaatcactaatttggtctccgatcttg

SEQ ID NO: 164284 - DNA, 236 bp, Arabidopsis thaliana columbia
  unsure (1)..(236): unsure at all n locations
ctaaanaaacccannngngnnnnaaanctaaaanggctagaaannncgagcccccnnnganncgcnnngnncnggagcgggccacggcagcaanagncanggcnagaaaccnngaagaggaancaagnggnganacagagnncannaaagccccnggggagacgacnncngacccagaccgangcnnccagacncngncnncanangcaagcgagagcaagaagcagccacgnaag

SEQ ID NO: 164285 - DNA, 324 bp, Arabidopsis thaliana columbia
  unsure (1)..(324): unsure at all n locations
ggagaagagaaggctcctgagcatttaggcgctagccgggattacaatgttgacatgatgcctaagtttatgatgggaaatggcaagcttgttcgtacccttattcatacagatgttacaaagtatttgtccttcaaagctgntgatggaagctatgttttcgtcaaaggaaaggttcaaaaggtgccagctactcctatggaggccctgaaatcttctctcatgggcatatttgagaaacgtcgagccggcaagtttttcagttttgttcaagaatacgatgagaaggacccaaaaacacacgatggaatggatttgaccaga

SEQ ID NO: 164286 - DNA, 190 bp, Arabidopsis thaliana columbia
  unsure (1)..(190): unsure at all n locations
caacnagcgaggagaancaacnancaagcaanggcancgangaccangaccgcnaccnggggggcggccgacgccaagggggggggagccaccgncggacnaaggcncnccagagncagagccnccacgagcgacaacncacccagagaagaagagcaaggaacagancagcaccacaangaggagggac

SEQ ID NO: 164287 - DNA, 321 bp, Arabidopsis thaliana columbia
  unsure (1)..(321): unsure at all n locations
aaatctctctcgatctcaatttcgcaaaatggctgacaagaagatcagaatcggaatcaacggtttcggaagaatcggtcgtttggttgctagagttgttcttcagagggatgatgttgagctcgtcgctgttaacgatcctttcatcaccaccgagtacatgacatacatgtttaagtatgacagtgttcacggncagnggaagcaccatgagcttaaggtgaaggatgacaaaactcttctctgcggtgagaagccagtcactgnnnncggcatcaggaaccctgaggacatcccatggggggaggctggagctgactt

SEQ ID NO: 164288 - DNA, 454 bp, Arabidopsis thaliana columbia
gcaattggctcattagagaacagagaaaaaaaaaacaatggcaactcaagccgccgggatcttcaactccgccataacaaccgccgcaacctccggcgtcaagaaactccactttttctcaacaacccaccgtcccaaatccctctccttcaccaaaaccgcaatccgcgccgagaaaacagattcctccgccgccgctgctgcagcccccgccacgaaagaagctcccgtgggattcacgccaccgcagctagacccaaacacaccgtctccgatcttcgctggaagcaccggtggtcttctacgtaaagcgcaagtggaagagttctacgttatcacgtggaactcaccgaaagaacagatctttgagatgccgacaggaggagcagcgatcatgaaagaaggtccgaatcttctgaagctagcgaggaaagaacagtgtttagctttgggg

SEQ ID NO: 164289 - DNA, 193 bp, Arabidopsis thaliana columbia
  unsure (1)..(193): unsure at all n locations
aaaacaccgngctncnncnctccggnaacannatctaanccnnaaacactgcaaaaaancagaccaaancaaganngcgagggcggagagaagcnnaagcnaancaaacagagacaaaanccaagaggcagannnggaagaancncncacacaaacccagaaaacaccanaagagagaaaggaaanaacaaaa

SEQ ID NO: 164290 - DNA, 235 bp, Arabidopsis thaliana columbia
  unsure (1)..(235): unsure at all n locations
caaacctncagancataaanccaaaaccactcattnnncnannacngaaannnnncnnagagaagaagaagaagaagcaaaagggccacaagcgcancagcnnngcncncaccaaccacanncnccacngcaancncccacaaaaacccnaacnccancncaaaccaaggccnncgnccccnccgncnagggggcnccnccnccgcccaacccaaacnagcaaccaccgggagaa

SEQ ID NO: 164291 - DNA, 415 bp, Arabidopsis thaliana columbia
  unsure (1)..(415): unsure at all n locations
agagtttcctggngaagaaggactngcagctgctatcacggaggagctggaagacatggcagaggataatacatcatctagagcgggaaacttggttgtaccaaatttgtcttcagaggtgagtgacgtgacatcgtcctctggaccggttaagctggcagacctgcaaagaattctgaacaacctctctggtggccctgtaggtattgctggagatcaagacgaaggtttagcattaggggatatctcgaaaccggagttgataatgccattgcttgaggcgttgccggtacaagaacgactatcttcgcatttacctgagggtcattctagggcagaagatatactggagttgttgcagagcccctcttttcgtaaacaagagatgcatttacctatgtacttcgcacaagac

SEQ ID NO: 164292 - DNA, 309 bp, Arabidopsis thaliana columbia
  unsure (1)..(309): unsure at all n locations
agaagaagagaaacaacaagaaacaggaccggccaacnaaggaaccncaaggccacggagcgcgggcncggcccccccggcggcgcngaagcagnngagaggccagccaaaacggcggngggaagcaagagaggcnncnccgaaaccggggancacangcncaancnncaancnaacaaagaaggcnccgnngancncaaaaaccccncngcggggcccaaggagaagacnacccnnaaagagccgncnaagccnccggcnaaagcacangnggggggaaggccaccngngaggaaccacaggaagaac

SEQ ID NO: 164293 - DNA, 390 bp, Arabidopsis thaliana columbia
  unsure (1)..(390): unsure at all n locations
aacaaatcagataaagaaccaaagagcaaaaatatttcagaaatttgtttgttaatttggatttagaataaagtatagtataagaatttcttacaagaaaaagctactatatatatatatatatatatatatatatgttccttttttggtaaatatataatcatttgatttccttgctacaatgctactacatatttttaatatctgaatctcaaaactgtgatcagtatattatgatcaatccttcatgctctctagaaagtatctcanangagaaataagcgatagtcgtgtttaaataaaatatgttttgaactcttttnagtattaaaacagttccgttntntnnnncaattangcggaatgtatggcaaagctaatggcgaaaat

SEQ ID NO: 164294 - DNA, 405 bp, Arabidopsis thaliana columbia
  unsure (1)..(405): unsure at all n locations
ccacgcgnccgcttcactctctctaatcaaaaagcttttaacctctgccgttaaatctttctccgatcatgccgaccagaaacatcgccattggtggagtccaagaagaggtctatcaccccaacgcacttagggcggcgctcgctgagtttatctcgactttgatcttcgtcttcgccggctcaggctccggaattgctttcaacaagatcactgacaatggagcaaccactccttccggcctcgtcgccgctgccttagctcatgctttcggtctctttgncgctgtctctgttggcgctaacatttccggtggccacgttaaccctgccgntaccttcggtgtcttactcggnggnnacatcactctcctccgtggtattctctactggattgctcagcttc

SEQ ID NO: 164295 - DNA, 415 bp, Arabidopsis thaliana columbia
  unsure (1)..(415): unsure at all n locations
ggccgacccacgcgaccggnctctncaacaaactctatnctctcttcaatccaaactcccaccatcctccttccaaatcgccagatctctcccactccgaaaaaccttcccaatccgaatcaacaacggtggaaacgccgccggagcaagaatgtcagccaccgcagcatcaagctacgcgatggcattagcagacgtcgcgaaaagaaacgacacaatggaattaacagtcacagacatcgagaagctcgaacaagtcttctcagatccacaagtactaaacttcttcgcgaatccaacaatcaccgtcgagaagaaacgtcaagtcatcgacgacatagtgaaatcgtcgtctcttcaatctcacacatctaacttcctcaacgtcctcgtcgacgcgaatcggatcaatatc

SEQ ID NO: 164296 - DNA, 344 bp, Arabidopsis thaliana columbia
ctctgaggtatcttcgtttgatacaaggcgaaatcgatcttcttcttcttcttcttcatccccttgcgttttccatctccatcgtctgctgaaaccatttgatcgatctctcaggttacttagaatggcacaagaagccgatgggatcagattggaccaaagacatgggaaggctcgagtgagagttggaagagtttggcgtcatgctcatgatggatctcatcactttgttgaatggaatgttagcatcagtcttctctctcaactgctctcttcttacccgcttgatgataactctgatattgtcggcacaaataccattaaaaacactgtgtatgtgaaag

SEQ ID NO: 164297 - DNA, 359 bp, Arabidopsis thaliana columbia
aaatgatcttctcctccgatcattagtctctttaatctttctcagcctcttcttgttcgtgatctctcttcctccggaaaaagatgtcggccggtaacggaaatgctactaacggtgacggagggtttagtttccctaaaggaccggtgatgccgaagataacgaccggagcagcaaagagaggtagcggagtctgccacgacgatagtggtccgacggtgaatgccacaaccatcgatgagcttcattcgttacagaagaaacgttctgctcctaccacaccgatcaaccaaaacgccgccgctgcttttgccgccgtctccgaggaggagcgtcagaagattcaacttcaatctatc

SEQ ID NO: 164298 - DNA, 326 bp, Arabidopsis thaliana columbia
  unsure (1)..(326): unsure at all n locations
agaagaagagaaacaacaagaagnagnaagggcttcctctatgctctcctccgccgctgggggtacatccccggctcaggccaccatggtcgctccattcaccggcttgaagtcatccgctgcattcccggtcacccgcaagaccaacaaggacatcacttccatcgcaagcaacgggggaagagttagctgcatgaaggngnggccaccaattggaaagaagaagtttgagactctatcttacctccctgaccttagtgacgtcnaannggctaaagaagttgactaccttcttcgcaacaagtggattccttgtgttgaattcg

SEQ ID NO: 164299 - DNA, 431 bp, Arabidopsis thaliana columbia
cttcttattccattttttcaaaccacttgcataattcgaatcagatcttctcttcaatcgaaaaaaaagaaaggatttgctctagattgttgaatcgaagatgtcgacaagggaagagaatgtttacatggcgaaattagccgaacaagctgaacgttacgaagaaatggttgaattcatggagaaagttgcgaaaactgttgatgttgaggaactttcagttgaagagaggaatcttctctctgttgcttacaagaacgtgattggagcgagaagagcttcgtggagaatcatttcttcgattgagcagaaagaagagagcaaagggaacgaagatcatgttgctattatcaaggattacagaggaaagattgaatccgagcttagcaaaatctgtgatgggattttgaatggtcttgaagctcatctta

SEQ ID NO: 164300 - DNA, 417 bp, Arabidopsis thaliana columbia
aaacgttttactttgtgctgcactactcaaccttaatggccgcctcaacaatggctctctcctgccctgccttcgccggtaaggccgtcaagctttcccccgcggcatctgaagtccttggaagcggccgtgtgacaatgaggaagactgttgccaagccaaagggcccatcaggcagcccatggtacggatctgaccgtgtcaagtacttgggtccattctctggcgaatcaccgagctaccttaccggagagttccccggagactacggatgggacaccgccggactttcagctgaccccgagacattcgcaaggaaccgtgaactagaagttatccacagcaggtgggccatgctcggagccctaggctgcgtcttccctgagcttttgctagaaacggagtcaagttcggaga

SEQ ID NO: 164301 - DNA, 381 bp, Arabidopsis thaliana columbia
cactttcatcagccgttttgaatctccggcgacttgacagagaagaacaaggaagaagactaagagagaaagtaagagataatccaggagattcattctccgttttgaatcttcctcaatctcatcttcttccgctctttctttccaagctcataaaaaatggctgaggctgatgatattcaaccaatcgtgtgtgacaatggtaccggtatggtgaaggctggatttgcaggagatgatgctcccagggctgtttttcccagtgttgttggtaggccaagacatcatggtgtcatggttgggatgaaccagaaggatgcatatgttggtgatgaagcacaatccaagagaggtattcttaccttgaagattcctattgag

SEQ ID NO: 164302 - DNA, 223 bp, Arabidopsis thaliana columbia
  unsure (1)..(223): unsure at all n locations
cccggtcgaccacgcgtccggcaaagaaagttttagttttttttagtttgtgatagatgtctggttctgtatctggttgtggttctggtggttgtagtattgtatggtttaaaaaaaatcttanggataaaacataatccacctatattatcaaaactaaaacctcttacactgataactactatttgtctttcatccacaataacaaagacccaataatcac

SEQ ID NO: 164303 - DNA, 447 bp, Arabidopsis thaliana columbia
tgaagaaatgcgagttgcaatccaatgattggatccgtctatatttggaacttgcagttggtgtacgttatcagcagacttcagagagtgatctgtccaagttgcaggttctgaaagtggcaatagaaactaaggaagaagatgtgcagccaccgaataggagactcaagtccaaaagtctacatgtctacataacgtttaagggcttggccaaggctcctattggtgatgagattggtgagcatgttgaacgcaaagctatagttcgaagagtcattgatgagcgttcaggacacttgacgcttctcggtgggttttccaatgcgaaaaatgatttgaatcagtcctctgacgatgagcagccttttggaaagcgacgtcgcatatagctgagatgataaactaaagttatcgtgttaagtgcatttgtttcttgggggtgttttt

SEQ ID NO: 164304 - DNA, 436 bp, Arabidopsis thaliana columbia
gagagaaagagagaaagagagacagagataatggtttacagtgcgtgtttcctacaccagagcgcgagtggcttcatcagccgcacgatcatcatcttcctcctcatcccagcgtcacgtgtcgctctccaaacctgttcagatcatctgtaaagctcaacagtctcatgaagacgataactccgccgtctcccgccgtcttgctctcactctcctcgtcggcgccgctgctgttggttccaaagtatctcctgctgatgccgcctacggtgaagctgcaaacgtgtttgggaagccaaagacgaacacagacttcttgccatacaatggagatgggttcaaagtgcaggttccagcaaaatggaacccaagcaaagagattgagtatccaggacaagttcttaggttcgaagacaacttcgatgctactagcaat

SEQ ID NO: 164305 - DNA, 427 bp, Arabidopsis thaliana columbia
gttaccggattggattgattctttgccgagtttatctgtgttgagcttgagaaagaacgtgcttaatgggtcattgccttcttctttgagtagcttgtcaggtcttagagttcttgctttagctaataaccggtttaatggagctttgcctgatttaagccatttgacaaaccttcaagtgcttgatcttgaaggaaactcttttggaccgttgtttcctcggttaagtaacaagctggttactcttatactcagcaagaacaagtttagatctgcagtttcagctgaagaagtaagttctctgtatcagcttcaacatttggatctttcctacaatacattcgttggtccatttcctacttccttgatgtctcttcccgcgataacttacttgaacatttcacacaacaaactcaccgggcggctt

SEQ ID NO: 164306 - DNA, 412 bp, Arabidopsis thaliana columbia
ctagggttttgttatcaaagttttcgtttttttctggggcgtagaaagggtttatggtgatgaaacgaatatttcgtggactagagtttcagatctgggctcttcacccagaatttgaagaaacaacccttggctgtctgagtaaatcctttttcgcccactataatgaaagtttttgttttggtgttccctttgaattgcctatgatgataaaaacaattatcttagcggatttcagtgaggtttttttaaaatcaatgatctgaattgttacacacactgaggctttattagtttgatttgtttttgtttattggggaaatttggtttgcgatgatgataaaatagcacgaaagtgcgtgaagggcagtggacaaagcaatgaaaatttgttttgccgtgagctcttttt

SEQ ID NO: 164307 - DNA, 441 bp, Arabidopsis thaliana columbia
ccggaggaggttgggtcaacgcacacgccacattctacggtggtggtgatgcttccggcacaatgggaggtgcttgtggatacggaaacctatatagccaaggctatggaaccaacacggcggcgctaagcacggctctattcaataatggtctaagttgtggtgcttgcttcgagataagatgtcaaaacgatggaaaatggtgtcttcctggctcaattgtcgtcacagccacaaacttttgccctcctaacaacgccttaccgaacaacgcaagaggttggtgtaaccctcctcagcagcattttgatctctctcagcccgtatttcaacgcatcgctcaatacagagccggcattgtccccgtcgcttaccgaagagtgccgtgcgtgagaagaggaggaataaggtttacgataaacggacactcttactttaacc

SEQ ID NO: 164308 - DNA, 438 bp, Arabidopsis thaliana columbia
  unsure (1)..(438): unsure at all n locations
agctgttgcagctggcacggtaatggcagtggacatgtcatatcgtcttggttggatcgatgaatcgattgttaagagagtgaacaagatcctagtacgggcgaaattgcctacaactccgccagagagcatgaccgtcagcatgttcaagtccataatggcggtggacaagaaagtggcagatggactgctgaggctgattcttctcaaaggcccgctgggaaactgcgtgttcactggagattatgatcgggaagcgttggatgccacgcttcgtgcattctccaaatcctgagcatttcatatttgagataattttggtgttgttttgttcacatacgcatatgtactcatatatactgaccttgtaactagctttgtggaatgtgataataatgagatatttaanggaaaaaataaatatttattaatatattt

SEQ ID NO: 164309 - DNA, 377 bp, Arabidopsis thaliana columbia
aagaagaagagaaacaacaagaagtagtaatggcttcctctatgctctcctccgccgctgtggggacatccccggctcaggccaccatggtcgctccattcaccggcttgaagtcatccgctgcattcccggtcacccgcaagaccaacaaggacatcacttccatcgcaagcaacgggggaagagttagctgcatgaaggtgtggccaccaattggaaagaagaagtttgagactctatcttacctccctgaccttagtgacgtcgaattggctaaggaagttgactaccttctccgcaacaagtggattccttgtgttgaattcgagttagagcacggatttgtgtaccgtgagcacggaaacactccccggtac

SEQ ID NO: 164310 - DNA, 415 bp, Arabidopsis thaliana columbia
ctcttttccgacaatgtattagctgcatcagtagttgttaactcaaccatcatgaatgccaaggatccttctaagcatgtttttcaccttgtcacggataaactcaatttcggagcaatgaacatgtggttcctcctaaacccacccggaaaggcaaccatacatgtggaaaacgtggatgagtttaagtggctcaattcatcttactgtcctgtccttcgtcagcttgaatctgcagcaatgagagagtactattttaaagcagaccatccaacttcaggctcttcgaatctaaaatacagaaacccaaagtatctatccatgttgaatcacttgagattctacctgcctgaggtttatcccaagctgaacaaaattcctctttctggacgatgacatcattgttcagaaagac

SEQ ID NO: 164311 - DNA, 432 bp, Arabidopsis thaliana columbia
caagaagaacaacaacactaagcaaaaaagaaaagctcaagccgagagagacaatggcatcaacattcacgagctcaagcagtgttcttaccccaacaacattccttggccagactaaagcctcaagctttaacccccttcgtgatgttgtctctctcggatctcccaagtacactatgggaaatgatctttggtatggacctgacagagtgaagtacttaggacccttttccgttcaaactccgtcttacctcaccggagaattccctggcgattatggttgggacaccgccggtttatccgcagaccctgaagcctttgccaaaaacagagctcttgaggtgatccatgggagatgggcaatgttgggagcctttggttgcataacccctgaagttcttcaaaagtgggtccgtgtggacttaaaagacc

SEQ ID NO: 164312 - DNA, 434 bp, Arabidopsis thaliana columbia
  unsure (1)..(434): unsure at all n locations
gacaggtttggcattgttgagggactcatgaccactgtccactctatcactgctactcagaagacagttgatggtccatcaatgaaggactggagaggtggaagagctgcttccttcaacattattcctagcagcactggtgccgccaaggctgttgggaaagtgttgccatccctcaatggaaaattgaccggaatgtctttccgtgttccaaccgttgatgtctcagttgttgatctcaccgttagacttgagaaagctgcaacatacgacgaaatcaagaaggccatcaaggaggaatctgaaggcaaaatgaagggaattttgggatacactgaggatgatgttgtgtctaccgactntgttggtgacaacaggtcaagcattttcgatgccaaggctgggattgcattgagcgacaagtttgtgaagtt

SEQ ID NO: 164313 - DNA, 390 bp, Arabidopsis thaliana columbia
ggaagagactccgagtagcagaggatggaccgcgtccacgactgctaccattgatggtaagaaaggacttgtgatgcatggtggtaaagctccaaccaatgaccggtttgatgatctcttcttttacgggattgactctgcctaattaaggcagatttggtgatcatgaacgtttgtgaatgtgtgtgtgtgtgtgagggacttgactggcctgtcctttgtcagcttgaatctgcagcaatgagagagtactattttaaagcagaccatccaacttcaggctcttcgaatctaaaatacagaaacccaaagtatctatccatgttgaatcacttgtagattctacctccctgaggtttatcccatgctgaacaaaatcctctatctgga

SEQ ID NO: 164314 - DNA, 442 bp, Arabidopsis thaliana columbia
caagatccaaaactcttctttcaaacatggaccgaaccatgtttctttccctgacaatagcctcactcttggtcggagtcgtctcagctggtgactggaacatcttgaaccaactcagaggactcggctcatcgtcaagccaaaatggtatcgtttctaaaggtatcaagacggacctgaaaggatactgtgaaagctggaggatcaacgtggaagttcacaacatcagaaagttcgatgtggtgcctcaagagtgtgtatcgcacattaaggattacatgacgtcatcgcagtacaaggatgacgtggcgaggaccgttgatgaggtcattcttcatttcgggagcatgtgctgtagcaagtctaagtgtgacggcatggacgcttggatctttgatatcgttgacacgcttctctttaccatcctttacacaagaaaaat

SEQ ID NO: 164315 - DNA, 437 bp, Arabidopsis thaliana columbia
gggatttctaaaaaaaggtaagaaggaaaatggctgatcagctcaccgatgaccagatctcagagttcaaggaagcctttagcctcttcgataaggatggtgatggttgtatcaccaccaaggagctcggaaccgtgatgaggtctctggggcaaaacccaacagaagctgagcttcaagacatgatcaatgaagttgatgcagatgggaacgggaccattgatttcccggagttcctgaacctgatggcaaggaaaatgaaggacactgattcagaggaagagctcaaggaagcttttagggtttttgataaagaccagaatggtttcatatctgcagcagagcttcgacatgtcatgacaaatctcggtgagaagctatccgatgaggaagttgatgagatgatccgagaagcggatgttgatggcgatggtcag

SEQ ID NO: 164316 - DNA, 428 bp, Arabidopsis thaliana columbia
ggtttagggtttctgcaattcaaccatggcagagcagacggagaaggcgtttcttaagcaaccaaaagttttcttaagctcgaagaaatctggtaagggaaagaggcctggtaaaggaggtaatcgtttctggaagaacattggccttggtttcaaaactccaagagaggctattgaaggaacatacattgaccagaaatgtccctttactggtacggtttcaatcaggggtcgcatcttgtctggaacttgtcacagtgcaaagatgcagaggacgatcattgttcgtagggactatcttcattttgtgaagaagtatcgaagatatgagaaaagacactcaaacattcctgctcatgtttccccgtgcttccgtgtcaaagaaggagatcgtgttaccattgggcaatgcaggccattgtcaaaga

SEQ ID NO: 164317 - DNA, 418 bp, Arabidopsis thaliana columbia
agagcttcttgctcaccatccaggtgacccctaagcctggaggccctggaagtattgtgcactggcaccttgagtatgagaaaattagcgaggaggtagctcacccggaaactctcctccagttctgtgtcgaggtctccaaagagatcgacgaacatctcttggccgaggaagaggaggtgaagacaccagagacgcctagtttggtgggaaagctagagacagacgtggagatcaaagcttccgctgagaagttccatcacatgttcgccgggaaaccacaccatgtctctaaagcatctccaggaaacattcaaggttgtgatctttaacaaaggcgactggggtcaaagtcggtctatcgtcttctggaactacgttcatgatagagaggcaaaggtggctaaggagaggaatg

SEQ ID NO: 164318 - DNA, 326 bp, Arabidopsis thaliana columbia
gaaaaaccaaaagaagaagagaaacaacaagaagaagtaatggcttcctctatgttctcctccaccgctgtggttacctccccggctcaagccaccatggtcgctccattcaccggcttgaagtcatccgcttctttcccggtcacccgcaaggccaacaacgacattacttccatcacaagcaacggaggaagagttagctgcatgaaggtgtggccaccaatcggaaagaagaagtttgagactctatcttacctccctgaccttagtgacgttgaattggctaaggaagttgactaccttccttcggaacaagtggattcctt

SEQ ID NO: 164319 - DNA, 435 bp, Arabidopsis thaliana columbia
gattccgcagacaaacgagagagtgtggaggagacagtgatgatggaatacgatgaagaaaccaatcaattcgacgttgaattttgtccggttgagcatcctattgaaccggaggaagaagatcgtccggttaaatgtcccgtaccaatatcatcttctctcatccacaaaccaaaggagaaatcgaaaccggggtgggttaaacacagagccagcagctacgaaactccggtttatccaccgtcacgtcatcatgtacgtaacgtacgaaagagacacaactcgtttgacgtggaagggaacaacaatttcttcacgagatctcatgatgatgacgaaaccacctcttgaagatccaacgtcacgttctaccgagttctttaacaagtttaggagtttgagtcgaaacaaaatatcaaaactcttttgagatgt

SEQ ID NO: 164320 - DNA, 369 bp, Arabidopsis thaliana columbia
caattaaccaagtcgtgccagaaactgagcatgaaaaatttctgtggaaagaggcagaagagaggaacaaactacgaaaacaaaagagagcacagggtaaagaagagcatgagaagttgaaggacttagagaggctaaatgagttattagcagaaggacgagtattcctggacatgccagctcttgcagatcggaacagcatcctaattaaggatacttcccatgaaaactcattgatctgccagccacagcaacgaaatattcatggcagaatttttggaggcttcttgatgcgcaaagcttttgagttggctttctccaatgcttacaccttcgctggggtttcaccacgttttctcgaaattgatc

SEQ ID NO: 164321 - DNA, 438 bp, Arabidopsis thaliana columbia
caaaaagtttcaatggccgcctccacaatggctctctcctcccctgccttcgccggaaaggctgtgaacctttcccccgcggcatctgaagtcctcggaagcggccgtgtgacaatgaggaagactgttgccaagccaaagggtccatcaggcagcccatggtacggatccgaccgagtcaagtacttgggtccattctctggcgagtcaccgagctaccttaccggagagttccccggagactacggatgggacaccgctggactttcagctgatcccgagacattcgcaaggaaccgtgagctagaagttatccacagcaggtgggctatgctcggagccctaggctgcgtcttccctgagcttttggctaggaacggagtcaagttcggagaggcgggttgggtcaaggccggttcacagatctttagcgatgga

SEQ ID NO: 164322 - DNA, 420 bp, Arabidopsis thaliana columbia
ttccaattttgggttactaatctagcccatgaaatctggggtaaattgtattgatactgacttcgtaaccagtttttccattgatttacttcggaattcaaaaaggttttatttttcaattcataatgaaagattccgtgttcttgaaaaaaaacctttattttattcttaacaaaaaaggatgttatgcatatgttatattcaagaacagcctttaatttacaaaagttactaactttaatttgcgataatttgtaaaatgcatattcttgtgataaagagcagtggtcataactcattttttttttattggatattaaattttttatagtcgaaataaaataaagagtattttttttttttttctccatcttcttcattcttgaaaatatatttatcaagaattttttttgttgattc

SEQ ID NO: 164323 - DNA, 381 bp, Arabidopsis thaliana columbia
cttgttctaggcatgtctagattgtggatttttctatgtcacaaatcatggtataagtgaggaggtaaaggacgaggctttcgagcaaagcaagaagttctttgctcttcctttggacgagaagatgaaagtcttgaaaaacgaaaaacatcaaggctattcacccgtccttagtcaaatctctgataaccaaatccatggggattacaaagaaagttttttcattggaatcgaaggctccaacgatacaccattctgtcgcgctaacatttggcctaaccctgatgttttgtcggtatggcaggcgaccatggagaaatatcatcaagaagcattgagggtttgataggctcttgctagagttttggcattgtctctcaa

SEQ ID NO: 164324 - DNA, 444 bp, Arabidopsis thaliana columbia
gaaaaaaagaaatggcaacaaaccctaaagtctacttcgacatgaccgtcggtggcaaatccgccggtcgtatcgtgatggagctttacgccgacacaacaccagaaaccgccgagaatttcagagcactctgtaccggagagagaggaatcggtaaacaaggtaagccattacactacaaaggatcaagctttcaccgagtgattccgaaattcatgtgtcaagggaggtgatttcacagccgggaatggtaccggaggtgaatctatctatggatcgaagttcaaagacgagaactttatcaagaaacatacaggaccaggtattttgtctatggctaacgctggtgcgaacacgaatggatctcagttttttattttgactgagaagacttcgtggctcgatgggaaacatgttgtgtttggcaagtttgtgagggattga

SEQ ID NO: 164325 - DNA, 444 bp, Arabidopsis thaliana columbia
gtgctgtacgagacagataacttctacagagagaaacaaagatcgagacaaaaagaaacccttaaaggatttgaacggagaagacgaggaaaaacaaagacacaactctaacctttagagagagaaaaacaaatgtcgttccgtagcatagttcgtgatgtgagagatagtataggaagtctatcgaggcgtagtttcgactttaagttaagcagcttgaacaaagaaggtggtaaatcccgtggttcggttcaagattctcatgaggaacaacttgtagtaacgattcaagaaacaccgtgggcgaatctacctccagagttattacgtgatgtgatcaaaagacttgaagagagtgaaagtgtgtggcctgctcgtagacatgttgttgcttgtgcttctgtttgcaggtcatggagagatatgtgtaaagagattgttaaa

SEQ ID NO: 164326 - DNA, 312 bp, Arabidopsis thaliana columbia
gagaaatgcaaggaagcagaagctagggtgagagtagcttgaaaaacaggtaacttctctgggagaaggtgtatcattggaagctaaacttctgagccgaaaagaagcagctttgcgtcaaagagaggcggccctcaaagatgcaaggcagaatagagatgggactaatagagagactactgctcttcggtctcaagtagagactgcaaaactggagaccgctgctatagtagcacaacttcaaggagcagaatctgaagtcaatggtctacggacaatgacgcatagaatgatattgaccccaaatgagat

SEQ ID NO: 164327 - DNA, 221 bp, Arabidopsis thaliana columbia
ggagagtgaagagaagcttgcagaagtgcttgatgtctatgaagctcagctttctaagaacgagggacttggctggtgattttgtgagtctagctgatttggctcaccttcctttcaccgagtatcttgttggtcctattgggaaggctcatttgatcaaagataggaagcatgttagcgcttggtgggataagattagcatccgcgctgcgtgtaacgag

SEQ ID NO: 164328 - DNA, 422 bp, Arabidopsis thaliana columbia
agaacaatggcttcctctatgctctcttccgctactatggttgcctctccggctcaggccactatggtcgctcctttcaacggacttaagtcctccgctgccttcccagccacccgcaaggctaacaacgacattacttccatcacaagcaacggcggaagagttaactgcatgcaggtgtggcctccgattggaaagaagaagtttgagactctctcttaccttcctgaccttatcgattccgaattggctaaagaagttgactaccttatccgcaacaagtggattccttgtgttgaattcgagttggagcacggatttgtgtaccgtgagcacggtaactcacccggatactatgatggacggtactggacaatgtggaagcttcccttgttcgttgcaccgactccgctcaagtgttg

SEQ ID NO: 164329 - DNA, 419 bp, Arabidopsis thaliana columbia
  unsure (1)..(419): unsure at all n locations
gagaactctgctcttcttcttcttcctccgccatagctacaatgcttagtctctcaatcgctacgccggggacggcggcgatttttcgtagaggaactgcttcggcgacttcaacttcgtcttcattccatggtgtcagaatccagcaccaggtttctgctcgcgtccccgcggcggcgacgatatcgtcgtcgtctcctaaaccgtcggtggtgatgatgtcgaaaagagaggcggaattgaaagagataagatcgaagacgacggagcagttacaagaggaggttgttgaccttaaaggtgagctctntatgctgcgtctccagaaatcggcaaggaatgagttcaaatctagcgactttcgtcgtatgaagaaacatgttgctcggatgttgacggttaaaagagagagggagatc

SEQ ID NO: 164330 - DNA, 438 bp, Arabidopsis thaliana columbia
gaagaacaatggcttcctctatgctctcttccgctactatggttgcctctccggctcaggccactatggtcgctcctttcaacggacttaagtcctccgctgccttcccagccacccgcaaggctaacaacgacattacttccatcacaagcaacggcggaagagttaactgcatgcaggtgtggcctccgattggaaagaagaagtttgagactctctcttaccttcctgaccttaccgattccgaattggctaaggaagttgactaccttatccgcaacaagtggattccttgtgttgaattcgagttggagcacggatttgtgtaccgtgagcacggtaactcacccggatactatgatggacggtactggacaatgtggaagctttccttgttcgggtgcaccgactccgctcaagtgttgaaggaagtggaag

SEQ ID NO: 164331 - DNA, 323 bp, Arabidopsis thaliana columbia
caactgatgaagatgtgtcatcagagcctgaaaccagcgagaataacctctcgagtgaagcttcgcgtgcggcgaaggagagggagagtgcagaaacatcaagaatctctggctcgccagaaacttccaattctagcctcttagctaagaggaaagactgatacttctgaggctttcattagagctgaagatagtaagacgaatagctttaggattcttggacaagaagacgttcaaatgcccgctattccgagggttacggcctcgaatatgctgatgcacattctaatgagagaatcctaatgagtcaaggacgacagatt

SEQ ID NO: 164332 - DNA, 403 bp, Arabidopsis thaliana columbia
  unsure (1)..(403): unsure at all n locations
ttctcaccattgtttttctctgcaaaactaaagaaacaaaaaaaagaaaaatcggagaaaccaagaaaaaagaaatgggaagtgtagaagcaggagaaaagaaggctttaggatgggctgcaagagatccttctggtgttctctctccttactcctacactttaaggagcacaggagcagatgatgtgtatataaaggttatatgctgtggaatatgccatactgatattcaccaaattaaaaatgatcttggaatgtctaattatcctatggttcctgggcacgaggtagtaggtgaggtgttggaagtgggatcagatgtgagcaanttcaccgtaggagatgtagtcggagttggtgtggttgttggatgctgtagtagctgcaaaccatgcagtttata

SEQ ID NO: 164333 - DNA, 392 bp, Arabidopsis thaliana columbia
gagctaaggggtctagatcttcaaactggaacttttactctacggcagataaaagcagccactgataatttcgatgtaacaagaaagattggtgaaggtggatttggctctgtttacaagggtgaattatctgaggggaaattaattgcagttaaacaactgtctgcaaaatcgaggcagggaaatcgcgagtttgtaaatgagataggaatgatctcagctcttcaacatccgaatcttgtgaagctatatggatgttgtgttgaaggaaaccaagtgatctaggtggttgaggacgtgtagaacaactgggtatgtggagcgttatttgtaaaggatgatagtttttagacttatactagacttggtaataatggtaacatattttcatt

SEQ ID NO: 164334 - DNA, 406 bp, Arabidopsis thaliana columbia
ctaggtttctttgtcagcagtttcttggtctcaatcgtcaagagggtcacttcaacttctactgatgtaggatggctggctgataacattaaccacggccgactcgattacttttattggcttttagtcattctcagtggaattaacttcgttgtctatatcatatgtgccttgtggtttaagccaacgaagggtaaagactcagtagagaaggaaaatggcaagggattttcagttgaagactgctgaattttgttttgcaataattgtcttgtgtacaatattatcttgcaacaatgtcgctttccaattatgtttcttgtatattaagcaattggcttgtttttagattccttccggccttaaaatttgggacttttcccgttatgttattcactcttttttt

SEQ ID NO: 164335 - DNA, 440 bp, Arabidopsis thaliana columbia
taatttgtgagctctcttctctttgcgcagtcaatttgctacaacttagaaaatggcggcggctacttcatccatcgctccttctctttcatgcccatctccttcttcttcatccaaaaccctttggtcttccaaagccagaaccttggctctacccaatatcggtttcctctcgtcttcttccaagtctctgaggtcgcttactgccaccgtcgctggaaatggcgccactggatcctcccttgccgctcgcatggtttcttcgtctgcggtcaaagcccctgtttctctcgattttgagacatctgtcttcaaaaaggagaaagtttctcttgctggttacgaagagtacattgtgagaggaggaagagacttgttcaagcatctcccagatgctttcaaggggattaagcagattggtgtgattggctggggatctc

SEQ ID NO: 164336 - DNA, 432 bp, Arabidopsis thaliana columbia
gtcaaatataatcaattttaaatttcttctcttctcttcaaacgaatcgcctttttcgataatctctttgcatcgatttcatcatggctactcaaacggatctcgctcagcccaagcttgatatgaccaaggaggagaaagagaggttgaagtatttgcaattcgtgcaagctgctgctgtggaagctctgcttcgctttgctcttatttacgctaaggcaaaggacaagtctggtcctttgaaacctggtgttgaatctgttgaaggagctgtcaagactgtcgttggtcctgtctacgagaaataccacgacgtccctgttgaggtccttaaatacatggaccagaaggttgatatgtctgtgactgagcttgaccgtcgtgtcccaccagtcgtcaagcaagtgtctgcccaagccatctccgctgctc

SEQ ID NO: 164337 - DNA, 439 bp, Arabidopsis thaliana columbia
  unsure (1)..(439): unsure at all n locations
caaaaaactcttgaatttttcaagaacaaaagaaaaagacatctttaatggcggccatgaactcgagtgttctcacttgcagctacgcaattgctggctctggctcggtagagcttaaccagaaagttggtttggtgaattcatcagttgggtttggtcagaagaaacagatgattatgcctgtgatcaaagctcaacgcgttgttggtgatgatgttgatggatctaatggaagaccatcagccatggttttcttagcagctacactcttttccactgctgctggttctggttctgctaatgctggcgtcattgacgaatacctcgagaggagcaaaaccaacaaagaacttaatgataagaagagattggcatcaagtggagcaaactttgcgagagcattcactgntcaattcggaagctgcaagttccctgagaa

SEQ ID NO: 164338 - DNA, 442 bp, Arabidopsis thaliana columbia
cactactctaaaagaatcttcatcatggcctcagtaacctcagccaccgttgcaatcccatctttcaccggccttaaagcctcaaccatcaaatcatccgccaccgtcagaatccaaactgctgctgttgcatcaccgaagcttacagtgaagtcatctctaaagaacttcggagtcgcggccgtagcggctgcagcttcaattgctttggccggaaacgccatggcaatagaagttctcttgggaggaggggatgggtcgttagcttttattcccaacgacttctctatagctaaaggagagaagattgtgttcaagaacaacgctggatacccacacaatgttgtcttcgatgaagacgagatcccaagtggcgtcgacgtggccaagatctcgatggacgaacaagatctactcaacggtgcgggagagacgtacgagg

SEQ ID NO: 164339 - DNA, 434 bp, Arabidopsis thaliana columbia
actctgactaacattcttcttcacttatctcccatctttctctcttcaataataataaacatggatctcaccgacgtaatcatattcttgttcgctctctatttcatcaacctatggtggcgccggtacttttccgccggaagcagccagtgtagcttgaacattccaccgggaccaaaaggatggccactagtcggaaacctactccaagtcatattccaacgtcgccatttcgtcttcttaatgcgtgacctacgtaaaaagtatggtccaatattcaccatgcagatgggacaacgtacgatgattatcatcacggacgaaaaactcatccacgaggcactagtccaacgcggccctacattcgctttccggcctccggactcgccgatccggctcatgtttagtgttgggaaatgcgctataaactcggc

SEQ ID NO: 164340 - DNA, 376 bp, Arabidopsis thaliana columbia
ctaaggtagattacaaatctcctccaccaccatatgtttatagttctccaccaccaccatattactctccatcccctaaggtttactacaagtccccacctccaccatacgtctacagctccccacctcctccatactactctccttctcctaaagtcacttacaagtctccaccaccaccatatgtctacaagacgccttactattgattttgaattgtttccttaacaagaagcatgagtgctataattttatttatgattggttttgttgattcttctgattttgttctttgtttaactatcttgttatgctttttttaactaataaaatttggctatctttttaaaaaaaagaaaattaaaaatttttaatt

SEQ ID NO: 164341 - DNA, 405 bp, Arabidopsis thaliana columbia
ctccatttctctatctttctctctcgctgcttctcgaatcttctgtatcatcttcttcttcttcaagtgaaaaatggccgatggtgaggatattcagccacttgtctgtgacaatggaactggaatggtgaaggctggttttgctggtgatgatgccccgagagcagtgttcccaagtattgttggtcgtactaggcacactggtgtcatggttggtatgggtcagaaagattcttacgttggtgatgaagctcagtccaagagaggtatcctgactctgaattatacaatcgaacattgtattgtaagttactgggatgacatgcaacagatatggcattacactttatacatctagctttgtgtttccccttgggagcacccagatttacttacagtggcacc

SEQ ID NO: 164342 - DNA, 432 bp, Arabidopsis thaliana columbia
gagtaaagcttgaaactttggactaaaagaatggcgtctttgggtgtgtcggaaatgcttggtactccccttaacttcagggcaggttcaagatcgtctgctccgttggcatcaagcccatccacgttcaagactgttgctctcttctctaagaaaaagccagctcctgctaagtccaaggctgtctctgagactagcgatgagctcgccaagtggtatggtcctgacaggagaattttcttgcctgatggtcttttggatagatcagagatcccagagtacttaaacggtgaagttgctggagattatggttatgacccatttggtcttggaaagaagcctgagaactttgctaaataccaagcttttgaattgatccatgcgagatgggctatgttaggagcagctggtttcatcattcctgaagcctta

SEQ ID NO: 164343 - DNA, 436 bp, Arabidopsis thaliana columbia
aagaaaaagaaaaccagagatggcgatgacgacagcatctacggtatttgttctaccggccaatgtcacctcggtcgccggcgcttcgtcgtccaggagctccgtgtctttcttgccgatgagaaacgccggttctaggctcgtagtcagggcagccgaagatcctgctccggcttcctcttcttcaaaagattctccggcagctgccgctgctccggatggagctactgccaccaaacccaagccaccaccgattggtcctaagagagggtctaaggtcaagattctaaggagagaatcctattggttcaagaacgttggatcagttgttgccgttgatcaggaccctaagactcgatacccggttgtggtccggttcgcaaaagtcaattacgccaacatatcgaccaacaactatgcattggatgaggtcgaa

SEQ ID NO: 164344 - DNA, 442 bp, Arabidopsis thaliana columbia
catggtgtttgcttgttcagactcacgtgtgtgtccatcacacgttctggactttcagccaggagatgccttcgtggtccgtaacatagccaacatggttcctcctttcgacaaggtcaaatacggtggcgttggagcagccattgaatacgcggtcttacaccttaaggtggagaacattgtggtgataggacacagtgcatgtggtgggatcaaagggcttatgtctttccccttagatggaaacaactccactgacttcatagaggactgggtcaaaatctgtttaccagccaagtcaaaggttatatcagaacttggagattcagcctttgaagatcaatgtggccgatgtgaaaaggaggcggtgaatgtttcactagcaaacctattgacatatccatttgtgagagaaggacttgtgaagggaacacttgctttg

SEQ ID NO: 164345 - DNA, 411 bp, Arabidopsis thaliana columbia
cccacgcgtccgaaaaaaaacacaaaaagtttcaatggccgcctccacaatggctctctcctccgctgccttcgccggaaaggctgggaacctttcccccgcggcatctgaagtcctcggaagcggccgtgtgacaatgaggaagactgttgccaagccaaagggtccatcaggcagcccatggtacggatccgaccgagtcaagtacttgggtccattctctggcgagtcaccgagctaccttaccggagagttccccggagactacggatgggacaccgctggactttcagctgatcccgagacattcgcaaggaaccgtgagctagaagttatccacagcaggtgggctatgctcggagccctaggctgcgtcttccctgagcttttggctaggaacggagtcaagtt

SEQ ID NO: 164346 - DNA, 415 bp, Arabidopsis thaliana columbia
tagtgtgtgtgtgtgaatcttctcagcgaaagccaagttcttttctttgttggtgtttctgggtttattgcgacaatgggagctgagcattttagcctggtgaagttcaatagaggtttctttgtgtgtttatgggtgatgctctcgctatcttgcgcagcagcgagctatggctcttcaaggcaaaagtttgaggtgaagaagcatttgaataggctcaacaaacctcctgttaagactattcagagtccagatggagatataatcgactgttttcctattttaaagcagccagcttttgaccacccctttctcatagaccacaagattctagatgaggcctagttaccacccagaagggctttttgatgaccattatgtatttgctgaaccaaaggggaaagaaacttatatt

SEQ ID NO: 164347 - DNA, 439 bp, Arabidopsis thaliana columbia
caacaacaaatcttaaacgttttactttgtgctgcactactcaacctcaatggccgcctcaacaatggctctctcctcccctgccttcgccggtaaggccgtcaagctttcccccgcggcatctgaagtccttggaagcggccgtgtgacaatgaggaagactgttgccaagccaaagggcccatcaggcagcccatggtacggatctgacccggtcaagtacttgggtccattctctggcgaatcaccgagctaccttaccggagagttccccggagactacggatgggacaccgccggactttcagctgaccccgagacattcgcaaggaaccgtgaactagaagttatccacagcaggtgggccatgctcggagccctaggctgcgtcttccctgagcttttggctagaaacggagtcaagttcggagaggcggtt

SEQ ID NO: 164348 - DNA, 419 bp, Arabidopsis thaliana columbia
cgagctctcatcttcttcctcaggcattgcatatgataccgagaaccccttctttctcgtcgaagaatttaggggtttcttcaattctaccacgagcatcatcagtgaactcaagactatcagtttctagggtttttctcaatcattcgagctccaattttggtttcgccatcgattccaagaagagaaaagagtttatcgctaaagctgaagagagtactgaaggtgaaactgaggctgttgtggagaatgctgttgaaactgaagcggaaggagaaggagaagccactgttgcggcggaggaagctaaaccttcgtggaagacgagagtcaagctcggagatatcatggggctactgaacaagaaagctattgaggttgcagagacttgtaagaccggttcctggacttaggactgg

SEQ ID NO: 164349 - DNA, 387 bp, Arabidopsis thaliana columbia
  unsure (1)..(387): unsure at all n locations
aagagattcaggtgtggaaagatgtcgatggtgttctaacatgtgaccctactatatataagcgagctacaccagtaccatatctgacatttgacgaagcagccgagctagcttattttggtgcacaggtcttgcacccacagtcaatgagaccagcaagagagggtgagattcctgttagggttaaaaattcttataaccctaaggctcctggaactatcatcactaaaacaagagacatgaccaagagtattctaacgagcattgttctgaaacgtaatgtgaccatgctggatataacnagcacccgaatgcttggtaaagttggcttttttgcaaaggtattctcgatatttgaggagcttggcattttcgtagatgttgttg

SEQ ID NO: 164350 - DNA, 439 bp, Arabidopsis thaliana columbia
ctctctctctctctttctctctttttatatttttgtgtcccaatctcttcttcatttctgtttggttgccgagaaaacgcaggaaacttttctgcaaaaaaactcggtgaccatattcaaaactttcccacgttaattctctcttctttgttttgtttcagattcattacttttctccaaaaaactttcttcaagatctgttcttttaaataattatggcggaagaacatcgatgcgagacgcctgaaggtcaccgtctctgcgttaacaactgcggtttcttcggaagctcagcgacaatgaatctatgttcaaactgttacggcgatctctgtctcaaacaacaacaacaagcttccatgaaatcaaccgtcgaatcatctctctctccggtgatcgcacctgttctcgaaaactacgcggcggagttagagatccc

SEQ ID NO: 164351 - DNA, 436 bp, Arabidopsis thaliana columbia
attatcttcataatttggttggagacacagagattagaaaaggagaaggaatgcaattagatcagcttattcctaatgcatcacttagtagccgagatacgaatgctcgcatccaaccttttgttcttgatgaacttaaggaggcttttgagcttaatgatacagctcctgttgaattgcctccagcagagaagggagctcctaccactgtatcaaaatcaaaaagtgagtcaaaagataaggataggaaacatagaaaacataaagacaagaaggagaaagatagggaacataagaagcacaagcacaagcataaagataggatcaaagataaggataaagacaaggatcgagacaaatagaaggaaaaaagtggacaccatgattagaaaaggaagaacaatgggactgaagatgctgatgacgttcagaggca

SEQ ID NO: 164352 - DNA, 391 bp, Arabidopsis thaliana columbia
cttctcctccaccgcacagatccaagacattttgattacactccatcgccggcgaaaatggtgacggagaaagaaaacgaagaagtctcatgagggtatcaacagtaggttggctcttgttatgaagagtggtaaatacactcttggttacaagtctgttctcaaatccctccgtggctccaaagggaaactgattctaatctccaccaattgcccaccgttgagaagatcatagattgagtactactcaatgcttgctaaagttggtgtccaccattacaatggacataacgttgatttgggtacagctaggggaaagttcttacgtgtttctagttctaacattgtcgttttctgttattattaaattttctctgttaattttctggtg

SEQ ID NO: 164353 - DNA, 371 bp, Arabidopsis thaliana columbia
actatcatcacccatctccttagttctattttataattcctcttctttttgttcatagctttggaagtatagtcttatttctctggtaaggctcaataagaggagatgggtgaaaccgctgccgccaataaccaccgtcaccaccaccatcacggccaccaggtctttgacgtggccagccacgatttcgtccctccacaaccggcttttaaatgcttcgatgatgatggccgcctcaaaagaactgggactgtttggaccgcgagcgctcatataataactgcggttatcggatccggcgttttgtcattggcgtgggcgattgcacagctcggatggatcgctggccctgctgtgatgctattggactc

SEQ ID NO: 164354 - DNA, 267 bp, Arabidopsis thaliana columbia
cttctacagattcgatttgggtgtttttggtttttgattcggtaaagcttctcggtcacttgggcggtgattgaaactgaatcgagtgtgattgtgattgtgattgtgattgtgattgtgagggaattatggctcaagccgtagaatattggcacaagcaatagtcgattttaacccagtcgtttcttacgggggttttatgaattattattggtttgaatgcttgtgattatatctccttattatctctactctaaatcttaccct

SEQ ID NO: 164355 - DNA, 436 bp, Arabidopsis thaliana columbia
cagaaacaactcaaacatgggttccttcgacttgcctcacagttcatcgttcaagggagaaagtgaaatatttcttcggaatgtgttcgagaatatattgaaaacgtacctaaggaagaacccgacggcgaagacaatatgggaactggttcagtcgttggacaacgaaaagatctgctacgaccacttcactttcaggacactaaaggtcgatggttatggaatagactccttgtcgagttttttcatggcttatggatataaaattggtggtggacttgattttcccaagaagaaactacgagttctttggttttctccacctgatgttcacgttcctaatgatggtcacggtctaggcaacggccctttgccgcgacttgttatagctgaggttcttgtggacgaactaagccctgaatcacaggggataata

SEQ ID NO: 164356 - DNA, 407 bp, Arabidopsis thaliana columbia
gagaaactcaacgatttggctaaacaacacaacgaaaaaattggaccgatgttgaacgaattggctagaacagctcctgcatcagctcctttccaattcaccgtctttgatttctacaacgcgattcttactaggacgcagaggaaccaaaacttccgatttttcgttacgaacgcatcgtgctgcggagttgggacacatgatgcttatggttgcggttttcctaacgtacattcgaggctatgcgagtaccaacggtcttacctattcttcgacggacgtcacaacactgagaaggcgcaagagatgtttgggcatcttctttttggagccgatacaaatgttatccaaccgatgaacatacgtgagcttgtcgattaccctgccgatgaacctatgcgtgagtc

SEQ ID NO: 164357 - DNA, 416 bp, Arabidopsis thaliana columbia
actggattgctcaatgccttggctccatcgtcgcgtgtctcctcctcgtcttcgttaccaatggcgagagcgtaccgactcatggagtagcggccggtttaggagctattgaaggagtagtgatggagattgtggtgacctttgctctggtctacacagtctacgccacagcggctgatccaaagaaaggttcactcgggaccattgctccaattgctatcggtttcatcgttggtgccaacatcctcgcagcgggtccctttagcggtggttccatgaacccggccaggtcatttggaccagctgttgtcagtggtgacttctctcagatatggatctactgggtgggtccactagtcggtggtgcacttgctggacttatttaccgagacttctttatcggatcctacgcttca

SEQ ID NO: 164358 - DNA, 433 bp, Arabidopsis thaliana columbia
  unsure (1)..(433): unsure at all n locations
tgggaaaggaaataggggaatagatgcaccagatagccaaatgccgtttgggaaagaggcacaagaagggctcttaaagattggtgggcggaaaagcttgaaggtgttagtttatggagaagatcaatatgggcgatgcgtaggtgatttatactgcaatgggatctttgtccaggaggcaatgttaaagaaagggcttgcttggcattacttagcttatgacaagcgcccggttctcgcaaagtgggaaaaggaggcaaggcagaagcgtattggcttgtgggcttcttcaaatccagagaagccatgggactggagaaagaataataggcgggaatagtcaaccgactttgtttgggcanaatcacaaaccaagtaatcagcgtttaagacaattgagatttgtgattgttgagggttttttgttaaatcc

SEQ ID NO: 164359 - DNA, 406 bp, Arabidopsis thaliana columbia
gaggaatgtgatttaagaggttcgttgatcttgaagaagtacatggactttagaaagttagctatattggcgtctgatattaacaattgtcccaatctgaatattcttcccggtggtgcgtctgaaggaccagacccgagagaagttgagctgtatgtggaagagatactgtcactgatgcagttgggtgaggactataccgagttcatggtgtcaaaaatcaagtctttgacgtcggtagatcctgaattgttgccaacggctacaaaggcatttagaaataagagttttagcaaagcgattcaggatgtgacgagatattatgttatactagaagggttctttatggttgagaatgtgaggaaagctattatgatcgatgagcatgtccctgacagtcttacca

SEQ ID NO: 164360 - DNA, 442 bp, Arabidopsis thaliana columbia
attactgaaatttttcttagagaagaagaagaagaagcaaaatggccacaagcgcatcagctttgctctcaccaaccacattctccactgcaatctcccacaaaaaccctaactccatctcattccatggccttcgtcccctccgtctaggtggctcctcctccgccctacccaaactatcaaccaccgggagaaaatcctcctccgctgtcgtgagagctgagctaagcccttccatcgtcataagtctcagcacaggtctctccctcttcctcggccgtttcgtcttcttcaacttccagagagagaacgtagcaaaacagggcttaccggagcagaacggaaaaacccatttcgaagctggagatgatcgtgctaaggagtacgtcagtctcttgaaatcgaacgatccaattggattcaacattgttgatgttcttgc

SEQ ID NO: 164361 - DNA, 393 bp, Arabidopsis thaliana columbia
atgaaacaggtgaccatgtaggtgtatatgctgaaaatcatgttgaaatagttgaagaagctggaaagattgcttggccactctttagatttagtattttccatacatgctgacaaggaagatggctccccattggaaagcgcagtgccgcctcctttccctggtccatgcacacttgggactggtttggcaagatacgcagaccttttgaaccctcctcgaaagtctgcgttagttgccttggcggcctatgccactgaaccaagtgaagccgagaaacttaagcacctgacatcacctgatggaaaggatgagtactcacaatggattgttgcaagtcagagaagtcttttagaggtgatggctgcttttgcatctgcaaaacccccacta

SEQ ID NO: 164362 - DNA, 445 bp, Arabidopsis thaliana columbia
agaagtaatggcttcctctatgctctcctctgccgctgtggttacctccccggctcaagccaccatggtcgctccattcactggtgtgaagtcatccgcttctttcccggtcacccgcaaggccaacaacgacattacttccatcacaagcaatgggggaagagttagctgcatgaaggtgtggccaccaatcggaaagaagaagtttgagactctatcttacctccctgaccttactgacgtcgaattggctaaggaagttgactaccttctccgcaacaaatggattccttgtgttgaattcgagttggagcacggatttgtgtaccgtgagcacggaaacactcccggatactacgatggacggtactggacaatgtggaagcttccattgttcggatgcaccgactccgctcaagtgttgaaggaagttgaagaatgcaag

SEQ ID NO: 164363 - DNA, 399 bp, Arabidopsis thaliana columbia
cacaactcttttccatttagatttttgattttttttggttctctaaaggaggagagaaatgttggctatcttccacgaggcgtttgctcatccgccggaggaactcaacagtccggcatctgagaaatgctctaaacaaccaaaacttccagaagaaaccctaaatgatttcttattacgttaccctctcaacactttctccatgtctttcggacaagctgctgttcttgcttacgttcgtccctctgcttccttctccatccaccagaggttgttttgtggatttgatgacatctactgtctcttctttgggagcttgaacaatctgtgtcagctaaacaaacagtatggtctcaccaagacaacaaacgaggccatgtttgtgatcgaagcttatag

SEQ ID NO: 164364 - DNA, 438 bp, Arabidopsis thaliana columbia
  unsure (1)..(438): unsure at all n locations
cgaaagccttgagagagagaacacagacgataccaactttcttcaatctcgttgccgcagtatagagtatctcattcctcggatatagctctccttctgcggcggcgacaagaagctacaagaataaaaagtctgttttctctcttttcaagaaaccacttacttcgaaaatggctcgttctatctctaacgttaagatcgtatctgctttcgtctctcgtgaactctccaatgctatcttccgacgtggttatgcggccacggcggcgcaagggagcgtttcgagcggtggaagaagtggagctgttgcttcggctgtgatgaanaagaagggagtggaagaatcaacccagaagatttcttgggttccagatcccaaaaccggttattacagacccgaaaccggttccaacgagattgacgcggttgagctacgag

SEQ ID NO: 164365 - DNA, 397 bp, Arabidopsis thaliana columbia
gttgatgatgttgtggagggtcatgttgctgcattggaaaaaggtaggcttggtgaaagatagggactcactggggaaaaggctggtttcaagcttgtctttgacatggctgcactgattactggaaccaaaaagccaaactttagcattccattatgggccatcaacgcatacggatggttatctgatttaatctctcgggttacaggaaagctttcacttatcagtcctccgacagtgacagtgctgagacatcactggtcatactcttgtgataaggctaaagctggaacttggttattaaccctcgaaggcctaaaggaaggatttgtaggaaaattcttcctttggttgaaagagtcttgttccgtttatttaactaactgaaatttcaaat

SEQ ID NO: 164366 - DNA, 363 bp, Arabidopsis thaliana columbia
caccggactgtgaaattttggaacgaattgatttgatttgaatatggcaatcgcgaagaaattggaaaatgagatctcacgctcttctgcttcgtcatcatcatcatcgctgaacgaagctctgttaatctctactatgtgtatcatcggcttacaagtccatgtgcatatcaacgatggctctgtgttttctgggatattctacactgtctctcttgagaatgaattcagtattgtgttgaagaatgcaaaacttactaagaagggaagaagtaaatcgaatgtagaaagtgggaagattgtggagacacttgtgattttgtcttccaatattgttcaaattgttgcagagggagtcttgct

SEQ ID NO: 164367 - DNA, 335 bp, Arabidopsis thaliana columbia
caggagaattttcttgcctgatggtcttttggatagatcagagatcccagagtacttaaacggtgaagttgctggagattatggttatgacccatttggtcttggaaagaagcctgagaactttgctaaataccaagcttttgaattgatccatgcgagatgggctatgttaggagcagctggtttcatcattcctgaagctttaaacaaatatggcgctaactgtggccctgaagctgtctggtttaagactggtgctttgcttcttgatggaaacacattgaactactttggcaagaacatccctaataaccttgttctcgccgtatttgctg

SEQ ID NO: 164368 - DNA, 274 bp, Arabidopsis thaliana columbia
ggaatcccgggcgccacgcgtccggcaaagaagaaggaaacaacaagagttgtaatggcttcctctatgctctcctccggcgctgtggatacatccccggctcaggccaccatggaccttcatttaaccggcttgaagtcatccgctgcattcccggtcacccgcaagaccaacaaggacatcatttcctattcaggcaacgggggaagagttagctccatgaaggtgtggccaccaatggaaagaagaaatttgggactttattttaacttcc

SEQ ID NO: 164369 - DNA, 474 bp, Arabidopsis thaliana columbia
ccggaccggaatgcccgctcgaccatccgtgctatatctaaaacgttatactttgtgctgcactactcaacctcaatggccgcctcaacaatggctctctcctcccctgccttcgccggtaaggccgtcaagctttcccccgcggcatctgaagtccttggaagcggccgtgtgacaatgaggaagactgttgccaagccaaagggcccatcaggcagcccatggtacggatctgaccgtgtcaagtacttgggtccattctctggcgaatcaccgagctaccttaccggagagttccccggagactacggatgggacaccgccggactttcagctgaccccgagacattcgcaaggaaccgtgaactagaagttatccacagcaggtgggccatgctcggagccctaggctgcgtcttccctgagcttttggctagaaacggagtcaagttcggagaggcggtttggttcaag

SEQ ID NO: 164370 - DNA, 407 bp, Arabidopsis thaliana columbia
ttttgattcaaccatggctaatgcagcatcaggaatgttagtccatgatgactgcaagctgaaattgatggaattgaagacgaaaaggacacaccgtttcatcatttacaagattgaggagctgcagaaacaagtgattgttgagaaaatcggtgaaccgggtcaaacccatgaggaccttgctgcaagtcttccagctgatgaatgccgctatgccattttcgattttgattttgtcagttctgagggtgtcccaaggagcaggatttttttcgtggcatggtcttcggacacagcaagagtgagaagcaagatgatctatgcgagctccaatgacaggttcaagagagaactagacatttttatggcgagcttatgcaacctattcaaccgagatggatcttgat

SEQ ID NO: 164371 - DNA, 394 bp, Arabidopsis thaliana columbia
gcagtccgaatctgttacatcttacattggtcatcaccgcaactgtctgctgttggatgatgtgggcaattgtggacattgcgcagatgaaccctgtcattgtccctatcttaagcgaggtggagtagaaaccattctactcaaactaggaaaccaatgcacaaatttgagtaagagccccgctgctctttctgtatcttcttcaaacatatttgttttcccctttgtaattcttatcgtggtgtggaacaacgaaactatccccctctttactcaaacatattctgtctatcattcaattcttgaacagctttcatatactcaaagactctaccagagagtgagtgtattgttgatgaaataaaaacatttggcagaatattcgccatttccc

SEQ ID NO: 164372 - DNA, 448 bp, Arabidopsis thaliana columbia
  unsure (1)..(448): unsure at all n locations
atcgccattggtctctcagacactaaaagcgacgcttggagaaacctatggacaatatcgttgcacaaggtctttgcggccgtagcaatgggaatagctcttctcaagctaatccctaaacgtccattcttcctcactgtcgtctactccttcgcctttgggatatcgagtcccataggtgtcgggattggcataggaatcaatgccactagccaaggagctggtggtgactggacctacgcgatctctatgggccttgcgtgtggagtttttgtgtacgttgcggttaaccatctcatctcaaaagggtataagcctcgtgaggaatgttacttcgacaagccaatctacaagtttattgccgtcttcctcggtgttgctttgctctctgntgtaatgatttgggattgatttttggtgatatatacttagtttcaataaatagttt

SEQ ID NO: 164373 - DNA, 396 bp, Arabidopsis thaliana columbia
aaaaaaactcaagagagactttgtggccatggcagcctttctccaatccaccgctacattcctgcagtcggcgaagatcgccaccgctccttctcgcggaagttctcacctccgatcgactcaagccgtcggcaaatcttttgggctcgaaacttcctcggctcgcctcacttgctccttccagtctgactttaaggacttcaccggtaaatgctccgacgctgtcaaaatcgccggattcgctcttgccacctctgctctcgtcgtctcgggagcaagtgcggagggagctccaaagagattgacctatgatgagattcagagcaagacatacatggaagtgaaaggaactggaacggctaaccagtgccctactattgacggtggctctgagac

SEQ ID NO: 164374 - DNA, 400 bp, Arabidopsis thaliana columbia
  unsure (1)..(400): unsure at all n locations
cgggctcgacccgacgcgtccggggnctcttctctannaattcctcaagtcttcgagaaatctttcattctgtcttcaacgagcntnncactcgaagaatgtgtgaacggcagaaatatacccaccgagagtcaatnncaatctacnnatccaaannacctcaacgaaagggatcannagaaagaggaattgaagaagatctcntttactggtttgttctctcagntttggganggatacccttgatgtggttggctttgaagaaactccgaagctccgagggacaagcttgggttacttttagtgaagtcactgctgctggtcatgctgttcgtcagatgcaaaaatttcccttttatgataaaccaatgcgcttacaatatgcaaaaagcaagtcaga

SEQ ID NO: 164375 - DNA, 405 bp, Arabidopsis thaliana columbia
cttcttcttcttcttccttctctcaagaacagattttttttaaacgagcttgatcaataaattgtctcaagatctatggcggaagagcatcgatgtcagacaccagaaagcaaccgtctctgtgttaacaactgtggcttcctcggcagctccgccaccatgaatctctgttctaattgttacggcgatctttgtctcaaacaacaacaacaatcctcctccatcaaatccaccgttgaatcttccctctctgtatctcctccgtcgtcatcatcatcggagatctcttctccgatcatccctcctctccttaaaaatccatcagtcaagctagaggtaccggagaaaggcggtgatttcgctgccgacgacggagcagaatcagcaacagaggccgaatcggtg

SEQ ID NO: 164376 - DNA, 341 bp, Arabidopsis thaliana columbia
gagaaagaccctgagaagaagaagtacccgggaggcgcatttgaccctcttggatactcgaaggaccccaagaagctcgaggaattgaaagttaaagagatcaagaacgggcggcttgcgctgttggcgtttgtaggattctgtgtgcaacagtcggcttacccggggacaggaccattggagaacttggcaactcacttggcggatccatggcacaacaacattggcgatattgttatccctttcaactaatgaatgtaaaaatagaaatatgtgtaccttatgagctttatgtgtatcaaaaacactgtgtaatgaaagacagatttgtgaattcctgt

SEQ ID NO: 164377 - DNA, 366 bp, Arabidopsis thaliana columbia
tggggatggctggtgcttcttctttggatgagatcagacaggctcagagagctgatggacctgcaggcatcttggctattggcactgctaaccctgagaaccatgtgcttcaggcggagtatcctgactactacttccgcatcaccaacagtgaacacatgaccgacctcaaggagaagttcaagcgcatgtgcgacaagtcgacaattcggaaacgtcacatgcatctgacggaggaattcctcaaggaaaacccacacatgtgtgcttacatggctccttctctggacaccagacaggacatcggggtggtcgaagtccctaagctaggcaaagaagcggcagtgaaagccatcaaggagtggg

SEQ ID NO: 164378 - DNA, 452 bp, Arabidopsis thaliana columbia
  unsure (1)..(452): unsure at all n locations
gggaacctatcatttgcagaaacatccctcgtcttgttccaggatggacgaagccaatctgtattggaaggcatgcttttggtgatcagtatagagccactgatctcattgtcaatgaaccaggaaaactgaaactagtttttgagccaagtggatcttctcagaaaacagaattcgaagtcttcaatttcaccggtggaggtgttgctttagccatgtataacactgatgagtctattcgtgcatttgctgagtcctcgatgtacacagcttaccagaaaaagtggccactttacctctccacaaaaaacaccatcctcaaaatatatgatggaagattcaaggatatattcccagaagtttatgaagctaacttgagatccaagtatgaagcagcanggatatggtatgagcatcgtttgatagatgattatggtgcatatgccatgaaa

SEQ ID NO: 164379 - DNA, 457 bp, Arabidopsis thaliana columbia
cttcttcctccttcaatctctctcgttcgtatcatctgctctgcgatttcaatggcgagccgttggttgagacctgaggtgtatcctttgttcgctgctaccggagttgccgttgggatctgtgcgttttccttgatcagaaacatcaccggaaaccctgaagtcagatgcaccaaggagaacagggctgctggaattttggataaccatgcagagggagagaagtataaggaaaatttcctgaggaagtttgttcgcaacaagaaacctgaaatcatgcctggactcaacaagttcttcactgatcctacatactgaaaccatctttgcacaccgctttgtcgtattgtttctggaattgaatctctttgtgatataaaaccgcatttgtcaatttcacattgttgatgtatcctccagctgaagacacttgttaatgctgggcttatgttgtcac

SEQ ID NO: 164380 - DNA, 419 bp, Arabidopsis thaliana columbia
tggagctctgcaaatcctcgggcaagacgacgatttggaaaacgaaattaggtaaacgatggaggagatatttgctctgatagtctcaatgattctcatagttgcggtgattcctttgttcttttggaaacgtcggagagatgctagatcacgggaggaagttgctgaaccaccacaggttcaacctcgtgaaaacgtggcacgtgctggtggtggacggaggatgcgtaggagacctgcagcttctggtgctagctcctctacatccaatgttcaagaaaacggcagtgggagtgaagatgaagatgaagatgaagctggtggaactcaagccagagcatcaaagaagaaagagaagaagcgacaagagcgggaagcacaaagacaagctgaggaagctacacgcgagtcaaggaata

SEQ ID NO: 164381 - DNA, 236 bp, Arabidopsis thaliana columbia
cttagagcgtcatcttcaacatcctcataaccatagccgtcttattaggcatagctgctctaatcatctggctcattttcagacccaacgctatcaaattccacgtcaccgacgctaaactcaccgaattcacactcggaccaaccaacaacctccgatacaatctcgatctcaatttcacaattcgggaccctaaccggcggatcggggtgtactatgatgaaatcgaagtcaga

SEQ ID NO: 164382 - DNA, 384 bp, Arabidopsis thaliana columbia
atagctagctagagagtaaaaagaacaaagatgtcgaaagaagtgagcgaagaaggcaaaacccaccatggaaaagactacgtggatcctccaccagctcctcttctcgacatgggtgagctcaaatcctggtctttctacagagctctcatcgctgagttcatcgctacactcctcttcctctacgtcaccgtcgctactgtcatcggccacaagaagcaaaccggtccttgtgacggcgttggtttacttggtatcgcttgggctttcggtggtatgatcttcgttctcgtctactgcaccgccggtatctctggtggtcacattaacccagctgtgactttcggtctgttcttggcccgtagggtcttttggggcgagctc

SEQ ID NO: 164383 - DNA, 435 bp, Arabidopsis thaliana columbia
atacgagcaaaagaagaagagaaacaacaagaagtagtaatggcttcctctatgctctcctccgccgctgtggttacatccccggctcaggccaccatggtcgctccattcaccggcttgaagtcatccgctgcattcccggtcacccgcaagaccaacaaggacatcacttccatcgcaagcaacgggggaagagttagctgcatgaaggtgtggccaccaattggaaagaagaagtttgagactctatcttacctccctgaccttagtgacgtcgaattggctaaggaagttgactaccttctccgcaacaagtggattccttgtgttgaattcgagttagagcacggatttgtgtaccgtgagcacggaaacactcccggatactacgatggacgggactggaccatgtggaagcttccattgttcgatgca

SEQ ID NO: 164384 - DNA, 455 bp, Arabidopsis thaliana columbia
cttcactctcttctccttcctcaaaaccttcctcctcccccatttgcttcaggccaggaaaattgtttggaagcaagttaaatgcaggaatccaaataaggccaaagaagaacaggtctcgttaccatgtttcggttatgaatgtagccactgaaatcaactctactgaacaagtagtagggaagtttgattcaaagaagagtgcgagaccggtttatccatttgcagctatagtagggcaagatgagatgaagttatgtcttttgttgaatgttattgatccaaagattggtggtgttatgattatgggagatagaggaactggaaaatctacaactgttagatcattagttgatctgttacctgagattaatgtagttgcaggtgacccgtataactcggatccgatagatcctgagtttatgggtgttgaagtaagacaaagagcttgaaaa

SEQ ID NO: 164385 - DNA, 452 bp, Arabidopsis thaliana columbia
gtgcttgttatattgacagacatgagttcttatgcagatgctcttcgtgaggtttctgctgctcgagaagaagttcctggaagacgtggatatccggggtatatgtatacagatcttgcaactatttatgaacgcgcgggacgtattgaaggaagaaagggttccattacccaaatccctatcctgactatgcccaatgacgatatcactcaccctactccggatcttactggttacattactgagggtcagatatatattgataggcaacttcacaacagacagatatacccacccattaacgtgcttccatcactttctcggctgatgaagagtgctattggtgaaggaatgactcgcaaagaccattctgatgtgtccaaccagctatacgcaaattatgcaatcggaaaagatgttcaagccatgaaagctggtgttggagaagaagc

SEQ ID NO: 164386 - DNA, 373 bp, Arabidopsis thaliana columbia
caaaccttcacataaaaaaaatacttttgaatccgtgtttcattcatcgaatctttttccgataactatggctgaggaaatcaagaatgttcctgaacaggaggtgccaaaggtagcaacagaggaatcatcggcagaggttacagatcgtggattgttcgatttcttgggaaagaagaaagacgaaacaaaaccagaggagactccgatcgcttcagagtttgagcagaaggttcatatttcagagccggagccagaggttaaacacgaaagtcttcttgaaaagcttcaccgaagcgacagttcttctagctcctcaagtgaggaagaaggttcagatggtgagaagaggaagaagaagaaggagaagaag

SEQ ID NO: 164387 - DNA, 432 bp, Arabidopsis thaliana columbia
catctttcaatctctcttgattccaatccattcttcttcaagtgccgggttctcgggtcggatcttctaagtctagctagggataatggctactgtcactactcatgcctcggcctcgattttccgaccttgtacttcaaagccaagattcctcaccggttcttccggtaggttgaaccgcgacttgtcgtttacatcgatcggttcatcggccaaaacgtcgtcgttcaaggttgaagctaagaaaggagaatggttgcccggtttggcatcgcctgattatctcaccggcagtcttgccggtgacaatgggtttgacccagtgggtctagcagaggatccagagaacttgaaatggttcggccaggcagagctggtcaacggacgatgggctatgctcggtgtcgctgggatggctttggcggaagtttc

SEQ ID NO: 164388 - DNA, 459 bp, Arabidopsis thaliana columbia
  unsure (1)..(459): unsure at all n locations
aaaaccctaaaaaaccctaaaaaacccatctctttgtctctctttcttctctgaaagcagaggaagtaaacaatggcgataattccgttagcacagcttaatgagctaacgatttcttcatcttcttcttcgtttcttaccaaatcgatatcttctcattcgttgcatagtagctgcatttgcgcaagttctagaatcagtcaattccgtggcggcttctctaaacgaagaagcgattcaacaaggtctaagtcgatgcgattgaggtgttccttctctccgatggaatctgcgagaattaaggtgattggtgtcggtggtggtggtaacaatgccgttaaccggatgatttcaagcggtttacagagtgttgatttctatgcgataaacacggattcgcaagctctgntacaggcttctgctgagaacccacttcaaattggagaacttttaactcgg

SEQ ID NO: 164389 - DNA, 414 bp, Arabidopsis thaliana columbia
cgaccacgcgtccggttaggccaagaaacccatttaaaaaaaaagagagagagatggagagtttcccgatcatcaatctcgagaagcttaatggagaagagagagcaatcactatggagaagatcaaagacgcttgtgaaaactggggcttctttgagtgtgtgaaccatgggatttcactcgagcttttggacaaagtggagaagatgaccaaggaacattacaagaagtgcatggaagagagattcaaggaatcgattaagaacagaggtcttgactctcttcgctctgaagtcaacgacgttgactgggaatccactttctacctcaagcaccttcccgtctctaatatcttcgatgtccctgatctcgacgacgattacagaacgttaatgaaagacttcgccggaaaga

SEQ ID NO: 164390 - DNA, 351 bp, Arabidopsis thaliana columbia
ccacctctctcttcttcttcttgtgaccactcttcctgtctgttcactggaggtgaattttgatttttttggccgatcggatttgagtttttgaatctctgattgctgagaaaatgccggcgttttacggaggaaagcttacgaccttcgaggacgatgagaaggagagcgagtatggttacgttcgtaaggtttcaggtcctgttgttgttgccgatggtatggccggtgctgctatgtatgagttagtgcgtgatgaccatgataatttgattggggaaactattcgtcttggttgattattttttactatcctagttttctaggaaacaactggattgacagtttatt

SEQ ID NO: 164391 - DNA, 420 bp, Arabidopsis thaliana columbia
agctagtggatggatcatcttacttaggacagccattgccgttctctatctcgacattgatatggatcgaagtgttagtgatcggctacattgagttccaacgaaacgctgaactggactcggagaagcgtttgtatccaggaggcaagttctttgacccgttaggactagcgtctgacccggtgaagaaggctcagcttcagctagctgagatcaaacatgctcgtttagccatggttggattcttgggttttgcggttcaggcggctgcaaccggtaaaggaccgctcaacaactgggcgactcaccttagtgacccacttcacaccaccattatcgataccttctcttcctcctgatgtggtggcttttagcttctactggtgtcatgtaatgatgtggtggcttttagcttctact

SEQ ID NO: 164392 - DNA, 293 bp, Arabidopsis thaliana columbia
gtcgcacaagtcgtttatgattaagaagaagttgggaaagaagatgagacagaacaggcctattcctcactggattcgtcttcgtaccgacaacaccatcaggtacaatgccaagcgcaggcactggcgtagaaccaagctcggattctaagtgataagccttctaaaagagtcttctttatctgtttggtttagcatttcctcaagtcttctttttgttttaagttatgacattttcatatttctgtaagacttttactctattatgattcatgttaccaaattttcttaaa

SEQ ID NO: 164393 - DNA, 365 bp, Arabidopsis thaliana columbia
atttctcacattttcgtagccgcaagactcctttcagattcttacttgcagctatgggtaaagagaagtttcacattaacattgtggtcattggtcatgttgattctggaaaatcgaccacaactggtcacttgatctataagcttggtggtattgacaagcgtgtcatcgagaggttcgagaaggaggctgctgagatgaacaagaggtccttcaagtacgcatgggtgttggacaaacttaaggccgagcgtgagcgtggtattaccatcgatattgctctatggaagttcgagaccaccaagtactactgcacagtcattgatgccccatgacatcgtgatttcatcaagaacaatgatact

SEQ ID NO: 164394 - DNA, 372 bp, Arabidopsis thaliana columbia
aagttggtggtgatagagtgagagagaaacatggaaggcaaagaagaagacgtcaatgttggagccaacaagttcccagagagacagccgatcggtacggcggctcagacggagagcaaggactataaggaaccaccaccggcgccgtttttcgaacccggcgagctcaaatcttggtctttctacagagcagggatagctgagttcatagccactttccttttcctctacgtcaccgttttgacagtcatgggtgttaagagagctcccaatatgtgtgcctctgttggaatccaaggcatcgcttgggcttttggtggcatgatctttgctcttgtttactgtactgctggaatctcaggaggacatatt

SEQ ID NO: 164395 - DNA, 430 bp, Arabidopsis thaliana columbia
ggctaccctgatccgaggtttggttatgaccgcaacagcaatcacagttccttttcacatctcatgaatccacacagctcacaagaagtaccaagttttgaccaattgggatataatgatcatttgtattccaaccatggattgtatggactttacgggaatgtaattgactctggtcatgcatatggaacttttggttatgattcctggaaacttgggcgaggatggtatcccgttgatggttatagaaagaccagaagcttcaatcatgggcgtggttacagtgatgagaaagcagataggcttaatgagctatgtcgaggaccaaggagtagtgatttcaagaatccacaagttcttaactcttcaatgctagatgcaatgaagcaagacgtttcagcagtagatctccagcgctacaatggggaga

SEQ ID NO: 164396 - DNA, 464 bp, Arabidopsis thaliana columbia
gtttgatatcggctccttaagcatagtaatgactctgcttatttgcttcttattattatctttggctccaaaacttgaggctgagctcgcaacggtccaacatgctccaaaccccgatggctctatcagttttctggtgattggagattggggtaggcatggactctacaaccaatcccaagttgccctccagatggggagaatcggggaggagatggatatcaattttgtggtatcgacgggtgataacatctacgataacgggatgaaaagtatcgatgatcccgcctttcaactctcctttagtaatatctacacttctcctagcctgcaaaagccttggtaccttgtattggggaatcacgactatagaggagatgttgaggcacaattgagtcctatcctcagatctatggataggccgtggatttgcatgagatccttcatcgttgacgctgagatcg

SEQ ID NO: 164397 - DNA, 425 bp, Arabidopsis thaliana columbia
cttcaagatacgcttaacctggctaaatcaatggagaaagaactggaagcattgaagatgatcaaagacgccaaaggttctgtggaaaatgcagtacaagattcgggagtagagtatttagaggctagaaagatggatttgggacagcaggaaatgctttcagtggatgctgctaactccttgatgtctaccttgagagcacagcttgagccttttaggttcgttgttgatgagaatagtccatgggaagagaaatctgcagcagtaagattgacttgcaaaatgaagaaatcaataaggaacaaactgtggaagaaacgaaagagacggtgtgctgcagagatgcgtgctaaggagcctgaaagatttgaacaagctgatcgagaggcagatgaatggagggaaaaggaaatggccaaggacat

SEQ ID NO: 164398 - DNA, 421 bp, Arabidopsis thaliana columbia
tctctcttatctcctttcctttcattgtagttaacgaaaagattacgataatggcaacatcagctatccagcaatcctccttcgccggccaaacggctctcaagccctccaacgaactcctccgcaaggttggtgtatccggtggtggccgtgtgaccatgcgtcgtaccgtcaagtctactcctcaaagcatctggtacggaccagaccgtcccaagtacttaggaccattctcggagaatacaccgtcctacctaaccggagaataccccggagactacggctgggacaccgctggactctcggctgacccggagacattcgctaagaaccgtgagcttgaagaatccacagcatatgggctatgttgtgtgctctcggattgccattccctgagattctttccaaatcgggtgttaat

SEQ ID NO: 164399 - DNA, 446 bp, Arabidopsis thaliana columbia
ttatcgagaaaaatccaagatttactaaaaaaccactatctctctgctcttcctctgtctacattaatgtaattttgatcatcggattgggtgaaagaaacatcaaactcctaaaagagaagcctttaaagtttttttttaatcaaaaacaaaaggaagaaaattttcctttttgttttagatggcatgaatcatcatcatcgctttgctttcttgattctctatttcgtttgatgggatttgtttttctgggaatttattcattcacctgctgccatggctaaattatctttcaaggattctcttaaagctcttgaagccgatattcaacacgctaatacactagctttagattatcctcgggagaaggatggagcgcgcgttcagatgagattattatacagcccgactgctcaattttttctttttcttgtacaatggactga

SEQ ID NO: 164400 - DNA, 350 bp, Arabidopsis thaliana columbia
cgataggttaatcagatctggtgtccagaaagcagggagtccgaaccaatacgaaaaatctggcaacgaacagtttgtgactgaactaagcaaatgggtcttccacgaaaggggccatctgaaggctggtaatcttgtacaccatagggttggagaaacagatgagccagctatatataggataaaggatgacctggaattttctgtagagatatatgagtggtcaggaaagagctgggagccgtatgttgctaacgatgtgcaggttcagttttacatgatgagcccgtatgtgttgaaaaccctgtcaacagacaagaagggtctggtttatacatcttttaaagggt

SEQ ID NO: 164401 - DNA, 454 bp, Arabidopsis thaliana columbia
aaaaaaaaaaaaaaaaaaaaaaaaaaaaaaaaaattttttaaaaaaaaaaaaaaaaaaaaaaaaaaaaaagaaaaaaaaaaaaaaaaaaaaaaaaaaaagggggcggccgttttaaaggaccaaagtttacttccgcgtgcttgcaaggtaatattttttttttggggcccccaaatttaaatccacggcccgtgttttaaaaacgcgggaacgggaaaaaccctgggtttcccaaatttaatcgctttgaagaaaatccccttttcgccagttgggttaatagcaaaaaggcccgaacagatcccctttccaaaaatttgcccaccctgaatggcaatgggaaccccccctttaccggccctttaagcccggggggtgtgggggttccccccaggttgcccttttcattgccaggcccttaacccccgctcttttggtttttttcccttcttt

SEQ ID NO: 164402 - DNA, 467 bp, Arabidopsis thaliana columbia
aaaaaagaaaacacaaaaacaaagattataatggcttcctcaaccatggctttgtcctcccctgccttcgccggaaaggctgtgaagcctgccgcatcagatgtcctcggaagcggccgtgtgaccatgaggaagactgtcgccaagccaaagggtccatcaggcagcccatggtacggatctgaccgagtcaagtacttgggtccattctccggcgagcccccgagctaccttaccggtgagttccccggtgactacggatgggacaccgctggtctatccgccgacccagagaccttcgccaggaaccgtgagctagaagttatccacagcagatgggccatgctcggagccctaggctgcgttttccctgagctattggctaggaacggagtgaagttcggagaagcggtttggttcaaggccgggttcacaaatcttcagcgtcggaggatttgactacttgg

SEQ ID NO: 164403 - DNA, 449 bp, Arabidopsis thaliana columbia
gaagaacaatggcttcctctatgctctcttccgctactatggttgcctctccggctcaggccactatggtcgctcctttcaacggacttaagtcctccgctgccttcccagccacccgcaaggctaacaacgacattacttccatcacaagcaacggcggaagagttaactgcatgcaggtgtggcctccgattggaaagaagaagtttgagactctctcttaccttcctgaccttaccgattccgaattggctaaggaagttgactaccttatccgcaacaagtggattccttgtgttgaattcgagttggagcacggatttgtgtaccgtgagcacggtaactcacccggatactatgatggacggtactggacaatgtggaagcttcccttgttcggttgcaccgactccgctcaagtgttgaaggaagtggaagagtgcaagaag

SEQ ID NO: 164404 - DNA, 458 bp, Arabidopsis thaliana columbia
caccatcatcacacaccttcttcttcttcttcttctctctctatcacaagagagtcaaatccatggcttctacttcttccctcgctctctctcaagctctcctagctcgtgcaatctctcaccatggttctgaccaacgtggatctttaccagctttctctggactcaaatccaccggttcacgcgcctcagcttcgtctcgtcgacgtatcgctcaatccatgaccaaaaaccgatctctccgtcctcttgttcgcgctgcagctgttgagactgttgagccaaccactgattcgtcgattgtggacaaatcggtcaactcgattaggtttttggctatcgatgcgggggagaaggccaaatcaggtcatcctggtctttctatgggttgtgctccgatggctcacatttcggttggtgaggtcatgagtgataaccccaataacctttattggttc

SEQ ID NO: 164405 - DNA, 391 bp, Arabidopsis thaliana columbia
caccactcctacactaacacttatatcaccaacacattgtgttctactatacataaaattcagttcctaagtatttttgttttgttttgtgagatcgatggagagttacttgaggaaatggtgtttagtttctgtgtgggttttgcttttaggtttagggtttaaggtaaaagcagagcctcaagttccatgttacttcatctttggtgattctttggttgacaatggaaacaacaatcgtcttagatctattgcaagagccgattatttcccttacggcatcgatttcggcggccccaccggccgtttttccaacggcagaaccaccgtcgacgttctcactgagctacttggatttgataactacattcctgcgtatagtactgtgagt

SEQ ID NO: 164406 - DNA, 469 bp, Arabidopsis thaliana columbia
gaaacaacaagaagtagtaatggcttcctctatgctctcctccgccgctgtggttacatccccggctcaggccaccatggtcgctccattcaccggcttgaagtcatccgctgcattcccggtcacccgcaagaccaacaaggacatcacttccatcgcaagcaacgggggaagagttagctgcatgaaggtgtggccaccaattggaaagaagaagtttgagactctatcttacctccctgaccttagtgacgtcgaattggctaaggaagttgactaccttctccgcaacaagtggattccttgtgttgaattcgagttagagcacggatttgtgtaccgtgagcacggaaacactcccggatactacgatggacggtactggacaatgtggaagcttccattgttcggatgcaccgactccgctcaagtgttgaaggaagttgaagaatgcaagaaggagtacccg

SEQ ID NO: 164407 - DNA, 406 bp, Arabidopsis thaliana columbia
gtccgggatttactgaaccaccggcgagtcttaatctccgagagccggtaaatcaatcctcttcctcaaatttctagggtttgctcttcgtcggttctttacgcagatttcttcacactggatggaagattggtgaaaccctagctccactgtgtgaggatcaaaacatttgtttaagatgttcatggaggaggcgacaagtaatggtaaaggtacagagcataatcagccaaatggtttggtggaaagtgaagcattgaataattggagtgcaggatgtggtgctatggctaattctgcaaatgctagttccagagatagtaagaagatacaaacatataagcggagaaaactttggagatcttattctgctaataaatgttcggaaaatgatagaatttccatg

SEQ ID NO: 164408 - DNA, 454 bp, Arabidopsis thaliana columbia
ctcaacatggctagatccttgttgctctcgctaaccctcacattcctcttcgccggaattgtctcagctcgtgactggaacatcctgagccagctcaaaggaaccacaaccaccacgaagactagccaaaccggcgtcacatctttgaaagctcccaacctaaacggatactgtgagagctggagagtcaacgtggagcttaacaacataagggactttaaggtggttccacaggaatgtgtatggttcgtccaaaagtacatgacctcatctcaatacgaagatgacgtggagagagccgtcgatgaagccatcctctacctcggaaaaacttgttgcgagaagaagacatgcgatggcatggatgcttggatctttgacattgatgacactcttctctcaaccattccttaccacaagagcaacggttgtttcggtggtgagcaactgaaca

SEQ ID NO: 164409 - DNA, 321 bp, Arabidopsis thaliana columbia
  unsure (1)..(321): unsure at all n locations
cttgaagctgcggtttgtctctgcaccgctcttaaagccaatgtcttggggattaatctcaatgttcctattgatctaaccttgctgttgaactattgtggcaagaaagttcctcatggtttccaatgttcttgaagatttgagactttaaaagagaaaaatctctttggtttgctatgtttttatatgtttgnttctactgttatctattgtttttgtgagaaaaagctttgttctgtcacttgttgagttagatgtaatatcttgtgcttgttcatgataagaagccttttgtttctgttaaatatattgatttttaat

SEQ ID NO: 164410 - DNA, 428 bp, Arabidopsis thaliana columbia
caacaagtcgagttcttgtcgatgaaactctctgtcataaatccagaacttgagtgtcatatcgatgatttatccgcaaaacagtttcaggcttacttcacaggtcctccagaaggtgactcgaagcagtcaatcatggcggattttcggtcttttccattacatcagcaaggatctttagattactcagtcataaactcagaccacaccacatctctcggcgctaaagatcatacatcatcaagctgggaaactcactcacagtgtctttacaacagcttgagaaccgattctgtttccaatttcttcagcctcaagtaaaaaaattagggatagcctcattaaaaaaaacgcgggtttttggtggtggcttatccatttaatctatcttatctgaaatttgacccgaaagacagagggaacccttt

SEQ ID NO: 164411 - DNA, 434 bp, Arabidopsis thaliana columbia
gtttagaagaagcaatggccacttcagcaatccaacactcttctttcgctggccaaacgaccctaaagccatccaacgatctcctccgcaaaatcggagcctccaatggcggtggccgcatcatcatgcgtcgtaccgtcaagtctactcctcagagcatctggtacggaccagaccgtcccaaatacctaggaccattttccgaaaacacaccatcatacctaaccggagaataccctggagactacggttgggacaccgctggtctctcagccgatccagaaacattcgcaaagaatcgtgagctcgaagtgatccacagtagatgggcaatgttgggagctttaggctgcaccttccctgaaattctctcaaaaaacggagtcaaattcggtgaagccgtgtggttcaaggcaggatctcaaatcttctca

SEQ ID NO: 164412 - DNA, 447 bp, Arabidopsis thaliana columbia
ctcatccacaattttacgccaccgaacatttcgccaaaccacacattttgtctgctttctacttcgccagggaaagtggccagagctcatctacttcgcaagaactaagcaatctcttgtaagccaaaaggcagcacaagcaatcatgttgccaaagttcgatccaacagaccaaaaagcttgtctgtctcttcttgaggatgtgactaccaacgtaaagcagattcaagattctgtcttggaagcaatactttcacgtaatgctcataccgagtatcttagtggtttcctcaacggtcaagctgataagaaaagcttcaagaagaatgtacccgttgtaacctacgaagatattaagccttatatcgatcgtatcgccaatggagagccgtctgatctcatctgtgatcgacccatcagtgtactcttgactagctcaggtacttc

SEQ ID NO: 164413 - DNA, 457 bp, Arabidopsis thaliana columbia
gaaaccaaaggcagagaaaagagataacacacacaaaaaaaaatggcatcaacctcactcctcaaggcttctccggtgttggacaaatccgaatgggtcaagggacaaagcgttctcttccgtcagccttcttccgcttctgtcgtcctccgcaaccgtgccacctccctcaccgtccgtgccgcttcctcctacgccgatgagcttgttaagacagcgaaaactattgcgtctcccggacgtggaatcttggcgatggacgagtcaaacgcgacttgcgggaaacgtttggattcgatagggctagagaacactgaggcaaatcgtcaagctttccggactttgctggtctctgcaccgggactcggacagtacgtctccggcgcaattctatttgaggagactctgtaccagtctaccaccgaaggcaagaaaatggtcgacgtcctcgtcgagc

SEQ ID NO: 164414 - DNA, 413 bp, Arabidopsis thaliana columbia
  unsure (1)..(413): unsure at all n locations
attttcaattgtggtcgaaaattggaagaatgaggaggaggaggtgcgatcttcaaccgaagagaacgagaatgtgcgatcttcaaccgaagagaacgagtatgtgcgatcttccaccgaagctggtaggggagaagatcctcacgaggattccgataacatctctgagagcggtgcgatccacttgcaaattatggaacgctttaaccaaagatcgggttctgggtaaagcagcgncgcagtttttggggtttatgacgatggattcaaaggtctgttcagttagattccatctccgtcgcagcaaggaggaagaagaagacacgatggatctatctataaagcaggtagatttgcttaatcaagtcgagatatctagggtgtatcactgcgacggcttgttgttatgcgtg

SEQ ID NO: 164415 - DNA, 287 bp, Arabidopsis thaliana columbia
gtagacgcgatcctagttacggtgccacaggatcgaccttactcagctaccataggactgatggggggtgctgtgggtcctgactatgtggatgagtaccgaaaacctgagacctggcgtagctaacctgggacaactcgatgctcaagcgcgttctcatgggacaccagacagggcaatggtgatcattaaccctggtgaacccagctgggcagtgtcgtaagcgaagctaacagatgagagatattgaagttctgatatacacgagaaactggatcctctgggag

SEQ ID NO: 164416 - DNA, 470 bp, Arabidopsis thaliana columbia
gaactcttgactgtctctctgcggcgaaaaagagagcgaagcttgaaatctccgattaagccatgaatgctcccgaacgatatgagcgattcgtcgtccctgaaggcaccaagaaggtttcttatgatagggatacgaagatcatcaatgctgcttccttcacggttgagagagaagaccatacgattggaaacattgtccgcatgcaacttcatcgcgacgagaatgtcttgtttgctggataccaacttcctcatcctcttaagtacaaaatcatagtgaggattcacacaacaagccagtcttccccaatgcaagcatacaaccaggccatcaatgacttggacaaggagctcgactacttgaagaaccagtttgaggcagaggtggccaagttttcgaatcagttttaaggaccttggagttctccatcagcacatcggggaaaacgttttacattgtcttttgct

SEQ ID NO: 164417 - DNA, 411 bp, Arabidopsis thaliana columbia
attaacgagagtgagagagagagacacacacacagcgagtgaaaatgtctccggagaagaagagtcaaaacttccctccaataacggaatgcagagacggagagtacgattcgatagccgccgatcttgacgggactctgcttctctcaagaagctccttcccttacttcatgctcgtcgctgttgaagctggaagccttttacgtggactaatcctccttctctcgttaccattcgtcattatctcttacctattcgtatccgaatctcttggtatccagatcctcatcttcatctcattcgctggtctcaaaaatccgcgatatcgaacttgtctctcgcgcagttcttccacggtttcacgcggcggatgtgaggaaagacagttctgaggtgtttgatgagtgtaag

SEQ ID NO: 164418 - DNA, 412 bp, Arabidopsis thaliana columbia
aacactcatttctccacatcttgagagaaaaaaacagagcaagtatattagagatctcatggcgatggcggtctccggagctgtcctcagtgggcttggttcttcgttcctcaccggaggcaagagaggtgccaccgcattggcaagcggcgtaggcactggagctcagagagttggcaggaaaactcttattgtcgctgctgcggctgctcagcctaagaaatcttggatccctgccgttaaaggtggtggcaacttccttgaccctgaatggctcgatggctcgctaccaggagatttcgggttcgacccattgggtttggggaaagacccggcttttctgaaatggtacagagaggctgagctgatccatggccgatgggcgatggcagcggttcttgggatcttcgtc

SEQ ID NO: 164419 - DNA, 358 bp, Arabidopsis thaliana columbia
taggcagacaaagaagaagaagaagaagttctcggcgtgcttcaatggcgatatcagtagcagcttcgtcctctatggccgtgatggttccacgtgttcccgccgtatccacccgttgctccgccgtcccttatcttcctcctcgctcctttggccgatcctctttcaccgttccgttgaagcttgtttcagggaatggattgcaaaaagttgaattgttgaagacaagagcttcttcagaagagacctcgtccattgataccaacgaactcatcacagatttgaaggaaaagtgggatggtcttgagaacaaatctactgtacttatatatggaggaggagccattggtgctggttg

SEQ ID NO: 164420 - DNA, 376 bp, Arabidopsis thaliana columbia
aaaaaaagcaaagaacacttgaacgttttctagatagagatggaagggaaagaagaggatgttcgagtgggagctaacaagttcccggagaggcaaccgataggtacatcggctcagacggacaaagactacaaggagccaccaccagctccatttttcgagccaggcgagctgagttcgtggtccttctacagagccggaatcgccgagttcatagccaccttcctgtttctatacataacagtattgacagtgatgggagtgaagagagcaccaaacatgtgtgcctctgttggaatccaaggcattgcttgggctttcggtggcatgatctttgcccttgtctactgtactgctggaatctctggtgggcaca

SEQ ID NO: 164421 - DNA, 438 bp, Arabidopsis thaliana columbia
gttttctctgccgtctctctcattcgcgcgacgcaaacgatcttcagccatggccaccgccgcagatgttgacgctgagattcagcaggcgctcactaacgaagtcaagctcttcaaccgctggacctatgacgacgttacggtcacagacatcagtcttgttgactacattggagttcaggcagctaaacatgctacctttgttccccacaccgctggaagatactctgtgaagagattcaggaaggctcagtgccccattgttgagaggctcaccaactctctcatgatgcacgggaggaacaacggtaagaaattgatggctgtcaggatcgtcaagcacgccatggagattatccacctcttgtctgacttgaacccaattcaggtcatcattgacgccattgtcaacagtggtccacgtgaagatgctaccag

SEQ ID NO: 164422 - DNA, 459 bp, Arabidopsis thaliana columbia
tctctatctctttctaaaacacaaccatgactgtttcttcatctccatgggctctcatggctctctttctaatggtttcttcaacaatggtaatggctattcctccacgcaaggccattgatgtaccatttggtcgtaactacgtcccaacttgggcttttgaccaccagaaacagttcaatggcggttccgaacttcagcttatcctcgacaaatacactggcacaggatttcaatcaaaggggtcatatttgtttggacattttagtatgcacataaagcttccagctggtgacacagccggagttgtcacagctttctatctatcatctaccaacaatgagcatgacgagatagactttgagttccttggaaacagaacaggacaaccagctatattacagacaaatgtattcacaggaggaaagggaatcagagaacaacgaatctatctctggc

SEQ ID NO: 164423 - DNA, 469 bp, Arabidopsis thaliana columbia
caagaagccaaaataaaaccattgaagctagcagcagccgaagaagcggtcacattttccggcaaaacagacagatcgaccagtgaaagctcctatctcttcctgaggcattgtgatctcttgttaaaatggctagtactctgaggaacattcatgatcaaaatgttattgcttcagaagacactgtataccgctacttgtgtcccgtgaaaaagaccgggagcattatcgggaaaggcggcgagattgctaagcagataaggtctgagactaaatcaaacatgaggataaacgaggctttacctggttgtgaggagcgtgttgttaccatgtattccactaatgaggagttgaatcattttggagatgatggtgagcttgtttgtcctgctttggatgctcttttcaaggttcatgacatggttgtagcggacgctgatcaagatgatggtactgatgatgataatga

SEQ ID NO: 164424 - DNA, 443 bp, Arabidopsis thaliana columbia
gcagatcatggaatagtgaagaggacaatagatgcgaatgtgtcagaagcagaagggatttacagtgcactagagaagctgggaatagactggaacaaagtaggagaacagttggaagacgaaggagtagattccttcaagaagagtttcgagagtctgctcggtacactgcaagacaaggccaacactctcaaactagccagccattgaggaaatgagtcatcattatgtttttggttacgctaaaataaaaagaagaacctttggcttttgttcttcaatccttatgcatgctttctaaagtggttatgatggattttgcttgatgttccacattatgggttattctattttctttgttcttgtaagatgatgcttcagaagagtttgttactttttaccgtatttgtaatttacattttcactgaaaacaattggcgagt

SEQ ID NO: 164425 - DNA, 401 bp, Arabidopsis thaliana columbia
ggccgtgatttacagaaccaccggcgagtcttaatctccgagagccggtaaatcaatcctcttcctcaaatttctagggtttgctcttcgtcggttctttacgcagatttcttcacactggatggaagattggtgaaaccctagctccactgtgtgaggatcaaaacatttgtttaagatgttcatggaggaggcgacaagtaatggtaaaggtacagagcataatcagccaaatggtttggtggaaagggaagcattgaataattggagtgcaggatgtggtgctatggctaattctgcaaatgctagttccagagatagtaagaagatacaaacatatatgcggagaaaacttgggagatcttattctgctaataaatgttcggaaaatgatagatttt

SEQ ID NO: 164426 - DNA, 405 bp, Arabidopsis thaliana columbia
ggctaactctgaagccacactcggaacctacaagggtgacgctaagcttggtgatggagcagctgagagccttcacgtgaaggattacaagtactgagcatcgtccacgggttgaattgtgacgtttgtcatcttcctggatatatttctagggatttttcgtttttctacttgacattatcggattataagtgttttttcttcattttccttttggatatgtgcattgatttagactgggacatgttttcaacttttgagggaattgggaggctcaaattaccgatgatggcactggggttgacaaacttccttcagatggctacacctcttgaagctttggctggtgagatattgtatccctgataacttcatgttcaacatgcccttttttgtgcttggtgc

SEQ ID NO: 164427 - DNA, 314 bp, Arabidopsis thaliana columbia
ctctctctctctgttcttctatactctctctgcgaatttctaatttagtgtaagatggaggcatttgagcatatgatagtggatgagtttaacgaagaagacttctacgagacaatagaagctcccaagtttgtagacctcaccgcaccagatcatcgccctgaaggagatgatcgttactggttctgttctagagttggatgtgatcagaagcatgaggaatttttggattcggaagcaatctacaaaaaattcgttcttcgggtcatggcagctaggagtccaagtggtcggtcttcgaaaagctctttata

SEQ ID NO: 164428 - DNA, 431 bp, Arabidopsis thaliana columbia
acaattcttaagctagttttatacttttcttcttcctttcatttgggttaagagaagccatggataccgagtttctccgaaccctagatcgtcagattcttttgggtgtcttcgttgctttcgtcgccgttggtgctggtgctgcttattttcttacatcctccaagaaacgcagagtgtgtttggatccagagaatttcaaggagttcaagcttgttaagagacatcagcttagtcacaatgtggccaagttcgtttttgaactcccaacttctacttctgtgttgggtcttcccattggacaacacatcagttgcaggggaaaggatggtcaaggagaggatgttattaagccatacaccccgactacgttagactctgacgttggacgtttcgaacttgtcattaagatgtatccgcaaggacggttg

SEQ ID NO: 164429 - DNA, 458 bp, Arabidopsis thaliana columbia
gaaaaacaaaaatggcggttctttgctcgtcttcgacggtgatactctcttcttcttccgtgaaatcctccggaagtgagagaaagtctccgtttttagggttctctttaacggctatctcgaagccgtcggtacgagtcggcatttatgcgaattcgaaaagaggattgcaagtgaagtgtgaagctgagccgacgacgacgacttctcttgttccggcgaatcaacgatggatgttcgacgaagaagaagctaatggccctgacatctggaacacgacatggtatccaaaagcttcagaccatgtgaacacggacaagccctggtttgtggttgatgcaactgacaaaattcttggtagattggcatcgacaattgctaatcacatccgtgggaagaatcttgcctcttacactcctagtgtcgacatgggagcttttgtgattgtggtgaatgct

SEQ ID NO: 164430 - DNA, 321 bp, Arabidopsis thaliana columbia
  unsure (1)..(321): unsure at all n locations
gactcagttcccggcgagttcgactcggtgattgattttttcctagaaaaataaaatttcttcttaacgattgatcgattttggttttctatctttcgattctagatctagaattcaatttgtgaggtttggagatggcgagcgagctgatcaatcggcgacacgagacggatcaaccaaccgccgatgcttattacccgaaaccaatcaaaccatggttcacggtgactcgtccgatgcgttacatgctccgtgaacagagacttatcttcgttctcgttggcattgcaatcgcttctttggntttcacaattttccctt

SEQ ID NO: 164431 - DNA, 394 bp, Arabidopsis thaliana columbia
aaaaaaaacacaaaaagtttcaatggccgcctccacaatggctctctcctcccctgccttcgccggaaaggctgtgaacctttcccccgcggcatctgaagtcctcggaagcggccgtgtgacaatgaggaagactgttgccaagccaaagggtccatcaggcagcccatggtacggatccgaccgagtcaagtacttgggtccattctctggcgagtcaccgagctaccttaccggagagttccccggagactacggatgggacaccgctggactttcagctgatcccgagacattcgcaaggaaccgtgagctagaagttatccacagcaggtgggctatgctcggagccctaggctgcgtcttccctgagcttttggctaggaacggagtc

SEQ ID NO: 164432 - DNA, 381 bp, Arabidopsis thaliana columbia
cttcttctcgctgaaggtgtgtttggctctaacggtttaaagctttcttgaaacaccaattgaatcttttctctctaccggcaaaaaaaaaagattagtccttttaggtctggaaacgccaagatcactcgttctaaaccttagattttgtctgcatttcgggataatcatttcatcgtcagggttcttcaaccaaactacatttacagaagaagaagaagaagaaaagttcgttactttttatgcgtttggataaacaaactcaagtttcttcttcatacatcgatctgattttccagatcaaacttcgaaaagagaaaagccttctttaaatgattcgtgagttctccagtctacaaaacgacatcataaacattcaag

SEQ ID NO: 164433 - DNA, 451 bp, Arabidopsis thaliana columbia
cgttgtgaaatctaaccggattttggatcccgccatttaaccttggtcattagcgattccacaaatccaacatgtttttcacatcttcatatatatttagcatttatttattttttaaaaaattcaactctttttttaaaaggttatataaatattaaattaatatgatgttgtgaaatctaaccggattttggatcccgccattgaaccgtggttattagcgattccacaaatccaacatgttttcacattttcatgtatatttagcattttttttttttttttcttaaaagattttcaactcttttttttctataaatattaattaatatgacgttgttaaatctaaccggatttaaaaaaatatccaaaatccttaagagatgtgttatgttcaatatagtttacacataatttaaacttttaacatttatttttattttattaaatc

SEQ ID NO: 164434 - DNA, 456 bp, Arabidopsis thaliana columbia
ttcatcatggcctcagtaacctcagccaccgttgcaatcccatctttcaccggccttaaagcctcaaccatcaaatcatccgccaccgtcagaatccaaactgctgctgttgcatcaccgaagcttacagtgaagtcatctctaaagaacttcggagtcgcggccgtagcggctgcagcttcaattgctttggccggaaacgccatggcaatagaagttctcttgggaggaggggatgggtcgttagcttttattcccaacgacttctctatagctaaaggagagaagattgtgttcaagaacaacgctggatacccacacaatgttgtcttcgatgaagacgagatcccaagtggcgtcgacgtggccaagatcttgatggacgagcaagatctaactcacggtgcgggagagacgtacgaggttgctttggccgagccagggacttacagcttc

SEQ ID NO: 164435 - DNA, 395 bp, Arabidopsis thaliana columbia
  unsure (1)..(395): unsure at all n locations
ctcaacatcgtcatctctaacaatggcgccttctccgatcatcttctccgttcttcttctcttcatcttctcactctcatcatctgctcaaacacctttccgtcccaaagctctccttctcccagtaacaaaagaccaatctaccctccagtacacaaccgtcatcaaccaacgcacacctctcgtccccgcttccgtcgtcttcgacctcggtggtcgagaactctgggtcgactgcgacaaaggctacgtctcctccacttaccagtctcctcgctgcaactccgccgtctgctcacgtgccggctccacaagctgcggcacatgcttctcccctccgagacctggctgtagtaacaacactngcggcggcattccggataacaccgttaccg

SEQ ID NO: 164436 - DNA, 409 bp, Arabidopsis thaliana columbia
agctaaagcaaggagcaaccctaaccatggcgactcaaccagctactgaatctgtgcaatgcttcggaaggaagaagaccgcagtggccgtcactcactgcaagcgtggatctggtttgatcaagctcaacggttgcccaatcgagcttttccagcctgagatcctccgattcaagatcttcgagccggttcttctcctcggaaagcaccgtttcgctggtgtgaacatgaggatccgtgtcaacggtggtggtcacacatcccaggtttacgccatccgtcagagtatcgcgaaggctcttgttgcgtactaccagaagtatgtggatgagcagtcgaagaaggagattaaggatatcttggtgaggtatgataggactctgcttgtggcggatccgaggaggtgtga

SEQ ID NO: 164437 - DNA, 367 bp, Arabidopsis thaliana columbia
aagtaatcctaactatacaaaacacataacaatatggctccttcaacaaaagttctctctttacttctcttatatgtcgtcgtgtcattagcctccggtgatgagtccatcatcaacgaccatctccaacttccatcggacggcaagtggagaaccgatgaagaagtgaggtccatctacttacaatggtccgcagaacacgggaaaactaacaacaacaacaacggtatcatcaacgaccaagacaaaagattcaatattttcaaagacaacttaagattcatcgatctacacaacgaaaacaacaagaacgctacttacaagcttggtctcaccaaatttaccgatctcactaacgatgagtacc

SEQ ID NO: 164438 - DNA, 450 bp, Arabidopsis thaliana columbia
caaaacccaattagccggagatggccgcaacatccgccgctgctgcagctgcttcttccatcatgggtactcgggtggctcccggtatccatcccggttcaggtcggttcacagccgtgttcggtttcggaaagaagaaggcagctcccaaaaagagtgccaaaaagacggtgactacggaccggcctctttggtacccaggcgccatttctcctgactggcttgatggttccttggttggagattacggttttgatcccttcggtttaggcaaaccggccgagtatcttcaattcgatatcgattcactagaccagaatctggctaagaacttggccggagacgtgatcggaacccgtacggaagctgccgacgccaaatcgacgccgtttcagccgtacagtgaggtgttcggaatccagagattcagggaatgcgaactcatccacg

SEQ ID NO: 164439 - DNA, 449 bp, Arabidopsis thaliana columbia
cgcaataacaataagaaagaaagaaaaagaaaaccagagatggcgatgacgacagcatctacggtatttgttctaccggccaatgtcacctcggtcgccggcgcttcgtcgtccaggagctccgtgtctttcttgccgatgagaaacgccggttctaggctcgtagtcagggcagccgaagatcctgctccggcttcctcttcttcaaaagattctccggcagctgccgctgctccggatggagctactgccaccaaacccaagccaccaccgattggtcctaagagagggtctaaggtcaagattctaaggagagaatcctattggttcaagaacgttggatcagttgttgccgttgatcaggaccctaagactcgttacccggttggggtcggtttcgtaaagtcaatttcgccaacatatttgccaacaacttttcattggatgag

SEQ ID NO: 164440 - DNA, 453 bp, Arabidopsis thaliana columbia
  unsure (1)..(453): unsure at all n locations
attcgctgacaggaaacattgtggctttaaagaaagtgcggtgtgatgttaatgaacgggagagtttaaaatttatggctagagagattctgattttgaggagattggatcatcctaatgtcattaaattggaaggtttggttacttcgaggatgtcgagtagtttatacttggttttccgttatatggatcatgatttagctggtctcgccgctagcccggagataaaattcactgagcaacaggttaaatgctatatgaagcaactactttcagggctcgagcattgccataaccgaggagttctacaccgtgatattaaaggatcaaaccttcttatagatgacggtggagttcttagaataggtgatttcgggcttgcaacgttttttgatgcgagtaagaggcaagagatgacgaatcgngttgttactttatggtacagatcaccag

SEQ ID NO: 164441 - DNA, 412 bp, Arabidopsis thaliana columbia
aaacgctagaacaataactttgatcgttcttcttcttctcttgaatcggaaacaatggcggatgaacataagcatgaagaatcttcacctaatttggatccagcagtggaggttgtagagagggaatcgttgatggagaagttatcggagaagatccatcacaaaggtgattcgtcgtcttcatcatcatcagatgacgaaaacgagaagaagtcttcgtcatcgtctccaaagtctttgaaatcgaaggtttatcgtttgttcggaagagagagacctgttcataaggttctcggcggcggaaaaccggcagatatatttatgtggaaggacaagaaaatgtcaggaggtgtatttggcgtgctacagtggcatgggtgctatttgaattgatggagtatcatcttcttac

SEQ ID NO: 164442 - DNA, 356 bp, Arabidopsis thaliana columbia
tggatctgctagctcagcgcagctctctcagaaggaagctgatgtcaggatgatgtgtgccgctgaggttcatcttggaaccaagaattgcaattaccagatggagcgttacgtcttcaagagacgcaacgatggtatttacatcttcaaccttggcaaaacatgggaaaagctccagatggctgctagagttattgttgccattgagaacccacaggacatcatcgtccagtcagctaggccctatggacagagagctgtgttgaagtttgctcagtacactggagccaatgccattgctggaagacacactcctggtaccttcaccaatcagatgcagacatccttcagtgaac

SEQ ID NO: 164443 - DNA, 377 bp, Arabidopsis thaliana columbia
aaaaaaagctattgtttgaaagaagaagaagttaactatggcaaaggatgtggaagccgttcccggagaaggatttcagacaagagactatcaagatccgccaccagctccgtttattgatggagcggagctaaagaagtggtctttctacagagcagttatcgcagagttcgtagccactctcctcttcttatacatcaccgttttgacagtcatcggttacaagattcagtccgatactgatgccggtggcgtagattgcggcggagttggaatcctcggtatcgcttgggcctttggtggtatgatcttcatcctcgtctactgcaccgccggtatctctggtggtcacattaacccagcggtgacatttgggc

SEQ ID NO: 164444 - DNA, 457 bp, Arabidopsis thaliana columbia; identical to SEQ ID NO: 124240

SEQ ID NO: 164445 - DNA, 403 bp, Arabidopsis thaliana columbia
cgggaacgtacgtgacggaggttccgttgaaaggatcggcggagaaacactacaagagctggaagagcgagaaccatgtcttcgctgacgccattggccaccacatccaaaatgtcgttgttcacgaaggcgaacatgactctcacgggtctatcaggagttgggactacacatatgatggaaagaaggagatgttcaaagagaagagagagatagatgatgagaataaaacattgacgaaaagaggactggatggtcacgtgatggagcatctcaaagtatttgatatcatctacgaatttattcccaaatctgaggatagctgcgtctgcaaaatcactatgatatgggagaagcgcaacgatgactttcccgaaccaagcggcttcatgaaattcgtcaa

SEQ ID NO: 164446 - DNA, 340 bp, Arabidopsis thaliana columbia
gtggatttggtaagggcggaggatttggcggtggaggcttcggaggtggtggcggaggtggaggcggaggaggtggcggaatcggacaccactaaacaaaaacacatgaagaagttgcattgagtgcatgtctcacgtcacgtacaacatggtttacaagtttgagagtgttgttaccaaatatagtactagttttatctttttatgtactttgtctctatttgaattactagctatgagttttgttagacgtacgcactctaataatattcattttatcatgtaaaacgctaggactgtatttggttgtaagtcaatgttcttaaaaaaatattgatga

SEQ ID NO: 164447 - DNA, 360 bp, Arabidopsis thaliana columbia
gctaaaactaaatacaaagaaacagagatgggtttggttacagaggaggtgagagctaaggcagagatgtacaccggagatgagatatgtagagagaagacaaagtgtttcctcaaggaaatatctatgcccaatggtttattaccattgaaggatatagaagaggttgggtatgacagagagtcaggtgttgtatggctgaagcagaagaagagcatcactcacaagttcacagagatagataagcttgtctcctatggaaccgaagtcacagccattgttgagaccgggaaaatcaagaagctcactggagtcaaagccaaggaacttcttatttgggtcactattaatgagatctat

SEQ ID NO: 164448 - DNA, 482 bp, Arabidopsis thaliana columbia
  unsure (1)..(482): unsure at all n locations
gtgaaagaactgaattgaaaaaaaagaaggagtagtaaaaaaagacgcggtatttggttcatttgtcctatatgtgcaaatcaaaatcgggcaaatttttccttttactcggggtagagcataaacctaaaaaatggaataaaaaaaggaagaagcccgttcaggaacaagaaaaaaccatcgccatttcaactgaatctcgatgaaaaaaaaaaatatcaatgaatcaatcatttttttagaggattttaatatctaataaaaggcgccaaaactcaaaatttcttttacttttggggcaagcccttccgttataagttagaaagaaaaaccctctatgaaaaaagggtaggttggaatcaacacatngattttttcacaatttttattgaaccgtatgcaccaaaaggtgccttgacggctcctaaggaataaaaaattatcctaatcaaccgactttatcgagaaagattatttttttt

SEQ ID NO: 164449 - DNA, 456 bp, Arabidopsis thaliana columbia
ctcgtccacatctttctcctttggtggcaaacacaacgacagatagagagaaacgatggcgtcgaactcgcttatgagctgtggcatagccgccgtgtacccttcgcttctctcttcttccaagtctaaattcgtatccgccggagttccactcccaaacgccgggaatgttggtcgtatcagaatggctgctcactggatgcctggcgagccacgaccagcttaccttgacggttctgctcctggtgactttgggtttgacccacttggacttggagaagttccagcgaaccttgagagatacaaagagtcagagctcatccactgtagatgggctatgctcgctgttcctgggattttggtaccagaagcattaggatatggaaactgggttaaggctcaggaatgggcagcactaccagggggtcaagccacttacttgggaaacccagtccc

SEQ ID NO: 164450 - DNA, 381 bp, Arabidopsis thaliana columbia
gccggctccgtcgtcctccgcaacggccgcctctccgagatcctcggcgagctccaggagatactggacaagggggagaaggggaaagacggagaagggggcgggggcgccgacatgacggacgcgctcactagacaggtgcgcaacttggctatggaggttaaacaacttgcttcttcccgtggatctataactgttcttaatggaggttctggtcaaacaggggtgtcaggtttgatagtacctgcagcaactgttggagcactcggttatggttacatgtggtggaagggcatcttctttgcggacctaatgtatgtgactaagcgtaacatggcaaatgctggttccagtatgactaaacatctggagcaagtgcaa

SEQ ID NO: 164451 - DNA, 160 bp, Arabidopsis thaliana columbia
caaacgaagaagataatatcaaggaaaatcaagaactcaaagcaaaatgataagatgataattggtccggattcttgaaaattgctttcactgtgactctagtttgtgtttggtcatcgttgatgcccttaatgaaccttggatagtattttgccaattt

SEQ ID NO: 164452 - DNA, 460 bp, Arabidopsis thaliana columbia
ctctttaaaagaaattcgtaagtactatcaagaagcagaagatggcccaaaaggtggaagcacaaggagggaaaggagccaacctatgggacgatggatcgacacatgacgccgtgaccaagattcagctcgcagcaggcatagacggaattcaatatgttcagtttgattatgtcaagaacggacaacccgaacaagctcctcttcgtggtaccaaaggccgtgttctcccagctgatccgtttgtgattaaccatccagacgaacatctagtttctgtagaaggttggtatagccctgaaggtatcattcaaggaattaagttcatctccaacaagaagacttctgatgtcattggatccgatgagggtactcacttcactctacaagttaaagacaagaagatcattggctttcatgggtctgccgggggcaatcttaattctcttggggcttactt

SEQ ID NO: 164453 - DNA, 385 bp, Arabidopsis thaliana columbia
ctctccgtgtctgtgaaatcgattcaggttaaggatgtcgagagctacatacattatcggtgcccttgcgggatctgcggtagtagcttacgtgtgtgacaaagttatttctgatgataagctttttggaggtactacaccaggaactattactaacaaggaatggggtgctgcgactgaagagagattacaagcatggccaagagttgctggtcctcccgtcgtcatgaaccctatcagtcgccagaatttcatcgtcaagtcacgtcctgaataacttttgatgccttctcgtgcatcgttctcattcgttatggattcattttcgaatatctgctcttttgtgtttgatttgaagatcggctgattgctctagctggttata

SEQ ID NO: 164454 - DNA, 305 bp, Arabidopsis thaliana columbia
ctagtctcttctgatttgtaccctaacgtttactcgacttatctaaagccgtgaacctcgccggaattcttaaagtcgcgatttttccttaacgccgtttgattcccttacggcctttgaggtccaggagatagcaaatttgttggtgagtactgaaaaatggaggaagagaacgaagtagtgaagacgtttgcagagcttggtgtgcgtgaggagcttgttaaagcttgcgagagattgggatggaagaacccttccaaaattcaagccgaagcccttgcttttgctctcgaagggaaagatgt

SEQ ID NO: 164455 - DNA, 348 bp, Arabidopsis thaliana columbia
accaagaacaattgggttcttgttgaaataagcatctctttctagcgactttgagagagctgcgacgttgtggactcttgatccaccagagagagatgcttatttggctaacgaatccaccttgatgttcaccaagatcaattggggtcttgttgaaatcgcttgcacaaggcctgctcttgagcttatcaaggtctagctagcttaccaagctcgatacaggatatcaatcgaggcagatgtcgcgcaacacacatgtggtgaccttcgtatgctctcgcttgctgtcgtgagcactgtcacgtatgaaggagatgatgtgaacatgatgctggcaagatctgaagc

SEQ ID NO: 164456 - DNA, 438 bp, Arabidopsis thaliana columbia
gtcaatgaccatgacatcttcatttctccctaccgtctcaaaccttccggcaaacatctccagcaacagcagacgaagcctcacggtggtcaaagcctccgggagtgaaaacacaaccagcttggagaacaagaagcaagaacagagcatgaagatgaggagggatcttgtcttcacagctgcagctgcagctgtgtgctccttagctaaggtggcaatggcagacgatgagccaaagagaggaacagaagctgccaagaagaagtatgctccagtctgtgtcacaatgcctaccgccaagatatgccgtaactgagtttgctatttaaccagcaactgtatctatgtcgtataactattctcagtgtggtttgtaaggatcatatttgattaaatctataaaacccgttgttaatgtattgaatcatcgatgcgatc

SEQ ID NO: 164457 - DNA, 358 bp, Arabidopsis thaliana columbia
ggaaataaatcaagaaagtttcaacaatgtgaaggaaactgatgatgcgatagacaaaacacaacccgaaattcgggatattgaaagcttgtcttccgtcagcaaaacacaagacaaaccagagccagaatatgaagttccaaaccaacagaaaagggaaataaccaatgaagttccaagcctggagaattcaaagattgaagaagaactacagaaaaaagatgaagaatctgagaacaccaaagatttgttttcagtagtaaaagaaactgaaccaacattgaaagaaccggcaaggaaatcactatctgaccacatccaaaaagagcctaaaacagaggaagatgaaaatgatgat

SEQ ID NO: 164458 - DNA, 285 bp, Arabidopsis thaliana columbia
ccttggaatacggaatgcctccggcttcgggaatggggcttggaattgacaggctggtgatgctgttgacgaactccgcgagtataagagacgtcattgcttttcctgttctgaaacttcagcagtaacactgaaacatgcaagtggtaatgcatgttgtagcttttatagcattcttgtgtatctttattggtgatttctccagcaggaagttggaggaagaatgtgtaacagacgtcattagatagcaaaacaagaagttattttaaaaaaaaaaataaaata

SEQ ID NO: 164459 - DNA, 337 bp, Arabidopsis thaliana columbia
catcttcacaggaaacaatggtgtttgtgaagtcctccaaatcgaatgcttacttcaagaggtaccaagtgaagttcaggagaaggagagatgggaagactgattacagggcaaggatccgtcttatcaatcaagacaagaacaagtacaacacccctaagtaccgttttgttgttcgatttaccaacaaagacattgtggcacagattgtatctgcaagcatagctggtgacattgttaaagcttcggcttacgcacatgagcttcctcagtatggactcactgttggtcttaccaactatgctgcagcttactgtactggccttcttttgggctc

SEQ ID NO: 164460 - DNA, 452 bp, Arabidopsis thaliana columbia
aagaacaacaacactaagcaaaaaagaaaagctcaagccgagagagacaatggcatcaacattcacgagctcaagcagtgttcttaccccaacaacattccttggccagactaaagcctcaagctttaacccccttcgtgatgttgtctctctcggatctcccaagtacactatgggaaatgatctttggtatggacctgacagagtgaagtacttaggacccttttccgttcaaactccgtcttacctcaccggagaattccctggcgattatggttgggacaccgccggtttatccgcagaccctgaagcctttgccaaaaacagagctcttgaggtgatccatgggagatgggcaatgttgggagcttttggttgcataacccctgaagttcttcaaaagtgggtccgtgtggacttcaaagaaccagtctggttcaaaagccgttcac

SEQ ID NO: 164461 - DNA, 313 bp, Arabidopsis thaliana columbia
ctctgctccagggggaaattaaaaaagtggaaccttttcatctcctggagcgatcaatttctttttcatcatatcgctgactctcgtcttcgtcgtctttgatcgtatcgaggaattgggtttagttcgattcgatcatcagctatctcaatttttctggggattgttctaaaggtttctagtgacttgtttaaagtggttggtattggataatgccttctctcatctcacagcaatggcaggagaggactagtggattcttttgttcatcaggaacgaagctcatggaagcacggcagactgttggttgttt

SEQ ID NO: 164462 - DNA, 372 bp, Arabidopsis thaliana columbia
ctctaatcaaaaagcttttaacctcagccgttaaatctttctccgatcatgccgaccagaaacatcgccattggtggagtccaagaagaggtctatcaccccaacgcacttagggcggcgctcgctgagtttatctcgactttgatcttcgtcttcgccggctcaggctccggaattgctttcaacaagatcactgacaatggagcaaccactccttccggcctcgtcgccgctgccttagctcatgctttcggtctctttgtcgctgtctctgttggcgctaacatttccggtggccacgttaaccctgccgttaccttcggtgtcttactcggtggtaacatcaactctcctccgtggtattctctactg

SEQ ID NO: 164463 - DNA, 469 bp, Arabidopsis thaliana columbia
gaagaagtaatggcttcctctatgctctcctctgccgctgtggttacctccccggctcaagccaccatggtcgctccattcactggtttgaagtcatccgcttctttcccggtcacccgcaaggccaacaacgacattacttccatcacaagcaatgggggaagagttagctgcatgaaggtgtggccaccaatcggaaagaagaagtttgagactctatcttacctccctgaccttactgacgtcgaattggctaaggaagttgactaccttctccgcaacaaatggattccttgtgttgaattcgagttggagcacggatttgtgtaccgtgagcacggaaacactcccggatactacgatggacggtactggacaatgtggaagcttccattgttcggatgcaccgactccgctcaagtgttgaaggaaagtgaagaatgcaagaaggagtacccgggcgccttca

SEQ ID NO: 164464 - DNA, 331 bp, Arabidopsis thaliana columbia
aagaaaacactgaagaagaaatggggttccttaagccaaccatggcgattctttttctagcgatggtcgccgtttcatcagccgtggacatgtcaatcatctcctacgacgagaaacatggcgtctccaccaccggtggccgtagcgaagccgaggttatgagtatctacgaggcatggttggtgaaacacggcagggctcagagccagaactgtcttgttgagaaagatcgacggatcgagatctttaaagacaatctttgtcacttcgatgaacatagcgagtagaatctctgctgtagattgcaccggccttgcaccaggaccggaag

SEQ ID NO: 164465 - DNA, 440 bp, Arabidopsis thaliana columbia
caacttaaggccagttttcaaaatgttggacttgaccgtccctctgatctcgttgcactctctggtggtcacacatttggtaaaaaccagtgccaatttattatggatagactatacaactttagcaacactggtttacccgaccctactcttaatactacatacctccagacacttcgtggacaatgtccccgcaatggtaaccagaccgtcttagttgatttcgatctacgcacaccgacggtttttgacaataaatactatgtgaatctgaaagagctaaagggacttatccagacggatcaagagttgttttccagccctaatgccactgacacaatccccttggtgagagaatacgctgatggcactcaaaaattcttcaatgcttttgtggaagcaatgaatagaatgggaaacattacacttttcactggaac

SEQ ID NO: 164466 - DNA, 452 bp, Arabidopsis thaliana columbia
aaacgagcacacaactcactaaacactcaaacaaaaatacaaacattaagatgatgatgaagattagctttaacacatgctttcaaatcttactaggatttatcgtcttcatcgcatcaatcactttactaggtcgaatattctcaaggccttccaaaaccaaagaccggtgtcgccagcttcctcctggccgaccaggatggcccatcctcggcaatctacccgaactaatcatgactcgtcctaggtccaaatatttccaccttgccatgaaagagctaaaaacggatatcgcatgtttcaactttgccggaacccacaccatcaccataaactccgacgagatcgctagagaagcttttagagagcgagacgcagatttggcagaccggcctcaactttccatcgtagagtccattggagacaattacaaaacaatgggaacctcatcg

SEQ ID NO: 164467 - DNA, 294 bp, Arabidopsis thaliana columbia
cggacgcgtgggctatggtctaaagagcggcctgtttccaaggaatctcctctgaaaatagagcatgaatatgaagtcacaagtttcccataaatgtgttcaaacatttctatttaactacttgggttgtccattacaaatgcataaataagtgaatgaatagttgtggttaataattaaactatatatctatgtatgcgagattgtgttatattgacattctctgctacttggaatccttccttatgaagggtataatatactttctagctcataaacgaatgagtaaaagtt

SEQ ID NO: 164468 - DNA, 433 bp, Arabidopsis thaliana columbia
tgtaattcaggttggagctcaaactgagacagagctcaaagaaaagaagctgagagtggaagatgctcttaatgctacaaaggctgctgttgaggaaggtattgtcgttggtggtggttgcactctgctccggcttgcatcaaaggtcgatgccatcaaggatacccttgaaaatgatgaagaaaaggttggagcggaaattgttaaaagagcactgagttaccctctgaaattgatagctaagaatgctggtgttaatggaagtgttgtcagcgagaaggtgctggctaacgataatgtgaaatttggatacaatgctgcaaccggcaagtatgaagacctgatggctgcaggcatcatcgacccgacaaaggttgtgagatgttgcttagaacatgccgcctcagttgcaaagacgttcttgatgtctgac

SEQ ID NO: 164469 - DNA, 460 bp, Arabidopsis thaliana columbia
caccaccgccatgctcggtgctgttccacctaggtatggatacactggtggtgagatcggccttgatgtttacttctccatggctagaggaaatgcctctgtgcctgccatggaaatgaccaagtggttcgacaccaactaccattacatcgtccctgagttgggccctgaggttaacttctcttacgcatcccacaaggcggtgaatgagtacaaggaggccaaggctcttggtgttgacaccgtccctgtacttgttggcccagtctcttacttgctgctttccaaggctgccaagggtgttgacaagtcattcgaacttctttctcttctccctaagattcttccgaactacaaagaagggattaccgagcttaaggctgctggtgccacctggattcagcttggagagccctgccttgttatggatcttgagggtcagaaacttcaagcctttact

SEQ ID NO: 164470 - DNA, 446 bp, Arabidopsis thaliana columbia
ctgtaatctatcccagtgaaaagcaaaagcagaatgctgtgcgtctctcacagaagactagtcatgcaattgcaacatctttgaatgtcgtccaaacatcccattcttttgcggacttgatgctactcaacaaagcaactgagttaaagctggagaacccctcaaattacatggttgaaatggcaagagttgagtcgctattccatgtaagcagcttagaggcaacgcgatttttggatacatttgtttccatgattccggactcgagtggacgtgttaggctacatgactttcttcggggtcttaaactgaaaccttgccctctttctaaaaggatatttgagttcatcgatgtggagaaggtcggatcaatcactttcaaacagttcttggttgcctcgggccacgtgttgacacagccgctttttaagcaaacatgcgagcta

SEQ ID NO: 164471 - DNA, 233 bp, Arabidopsis thaliana columbia
ggaagcaatacacaagttatggagcaaaataaaagagtgtttgtttctgttttaaaatgtcttttttaaaaggcagataagtctgtctaggattaggttaaaaggtgagtgatctcatgcaatatatgagtttcagtgggttattcttacacgcttaggctcccatgtttcgcaacttgcaagagttgaatattattgtttttgaaaaggaataagagagccttcttgcatat

SEQ ID NO: 164472 - DNA, 462 bp, Arabidopsis thaliana columbia
aacaaaacaaaaaaaaaaatggaggccgggaaaacaccaccgacgacgacaacaacgacggagaagaaaacggagcaagtgaaagacaacgacttgccgaccgatagcccttacatggcgacgggtactttggaagattacaaattgaaagcttatggagccgaaggtcaccaagagcctactcctggtcttggaggtggctccaccgatgctcctactccttctggcgacgcacccgccgccactaccaccgatgcgaaagctccgtgaaaaaaaagaaagactataataatgaacgggttttgtggatcgtcggaaaacaaacccataattgtagtatgttcaataactgatccagcttcgtttcttaacgtttttatggtttaattaaaaatgtatttgcgtctaatgctgaatgctaaagttcgagtttcggattaaatgaagttgtaacgatttaat

SEQ ID NO: 164473 - DNA, 307 bp, Arabidopsis thaliana columbia
  unsure (1)..(307): unsure at all n locations
taaaaaacaagtggaagctttaaaacgagagggagagagcaaaaatggcgacgtcgggaacgtacgtgacggaagttccgctaaaaggatcggccgagaaatactacaagaggtggaagaacgagaaccatgtcttccctgatgctatcggccaccacatccaaaatgttaccgttcacgaaggcgaacatgactctcacgggtctatcaggagttggaactacacatgggatggaaaggaggaggtgttcaaggagagatgagagatagacntttagaccaaaacgttgtctttaatgatgtgttg

SEQ ID NO: 164474 - DNA, 436 bp, Arabidopsis thaliana columbia
gtgaattcggaagtcttcaattggaatttggatcgtgggattttggaaatggcatcgaaacggattttgaaggaattgaaggatctgcagaaggatcctcctacttcatgtagcgcaggacccgttgcggaagacatgtttcattggcaggccactataatgggtccatcggatagcccttattctggaggagtttttcttgtaaccatccatttccctccagattacccatttaagcctcctaaggtggcttttaggacgaaggtgttccatccaaacattaacagcaatggaagcatctgcctcgacatcttgaaggagcagtggagtcctgctctcacaatttccaaggtgctgctatcgatctgttctttgttaacggatccaaacccagatgatcctttggtccctgagatagctcacatgtacaagacag

SEQ ID NO: 164475 - DNA, 430 bp, Arabidopsis thaliana columbia
attcaatttccgtgctgatcgaatggtcatgcatgcaaaggccctcgaatacaaagatttcgacaagtttgatcgcgtacgtgtccctgatatacgttatgcaggaatgctccaatatgatggagagcttaagcttcctagccgctatcttgtttctccaccattgattgacagaacttctggtgaatatctggcacacaatggcgttcgtacttttgcttgcagtgagactgtgaagtttggccatgtaaccttcttctggaatggcaaccgctctggatatttcaatgaaaagttagaagagtacgttgagattccaagtgatagtggaatatcattcaatgtccagccaaagatgaaagcactggaaattgccgagaaagcaagggatgctatccttagtggcaagtttgaccaggtgcgtgtaaac

SEQ ID NO: 164476 - DNA, 349 bp, Arabidopsis thaliana columbia
  unsure (1)..(349): unsure at all n locations
gcgaagctgaacatgaacacagacgcagccgatatgttgaacgaagcagctcagctcgaagaaaagagacaacgaggcggcagaggatcttgattcttgagacacaaagtgttacatcttgttgtaaaatttgatgagcttcaagaattctttttaagaagaagagaaagaaaaaatacggttaaaaacttgttgctggattgtttgattggggatgtaatgtaaccatagggagagaaaacaattgaatgtttgtttgtatgcaatacatgttgtaagttttaatggtcaaatgtttcgaaaatccanaaaaaaaaaaaaaaattaaaatattataattaataaataa

SEQ ID NO: 164477 - DNA, 474 bp, Arabidopsis thaliana columbia
cttgtgggatcaagaatctgactgatgaagaggccaaggttgttggaggagccaatcacagccacgccactaaggatctccacgatgccattgcatctggcaactaccccgagtggaaacttttcatccagaccatggatcctgcagatgaggataagtttgactttgacccacttgatgtgaccaagatctggcctgaggatattttgcctctgcaaccggttggtcgcttggttctgaacaggaccattgacaatttcttcaatgaaactgagcagcttgcgttcaacccgggtcttgtggttcctggaatctactactcagacgacaagctgctccagtgtaggatctttgcttatggtgacactcagagacatcgccttggaccgaattatttgcagcttccagtcaatgctcccaaatgtgctcaccacaacaatcaccatgaaggttttatgaacttcatgcacagag

SEQ ID NO: 164478 - DNA, 271 bp, Arabidopsis thaliana columbia
  unsure (1)..(271): unsure at all n locations
tgatgaatactctgacaccaaaagaggaggatgcattttccaaagagaaagagagagaaatgggttccaagattgtccaagttttcttgatgttggctctattcgccacttcagcactcgctcaagcccctgctcctactgccaccgccactcctncgtccgcaactccccctccagtcgcaactcctcctccagtggctaccccaccacctgctgcaacccctgccccagccacgccaccacctgctgcaaccccagctcctgccactac

SEQ ID NO: 164479 - DNA, 470 bp, Arabidopsis thaliana columbia
gttgcattaccaccaaggagctgggtactgtgatgcgttcccttggacaaaacccaaccgaagcagagcttcaagacatgatcaacgaagtggatgctgatggtaacggtaccattgatttcccagagttcttgaaccttatggctcgtaagatgaaggacaccgactctgaggaagagctcaaggaagcattccgggttttcgacaaggaccagaacggtttcatctcagcagctgagctccgccatgtgatgacaaaccttggtgagaagcttactgatgaagaagttgatgagatgatcaaggaagctgatgttgatggtgatggtcagattaactacgaagagtttgttaaggtcatgatggctaagtggtgctgttttagaaccaaacaatggctctataaacttggtttgcatctcttacatataaattcttatggtatgttctataatttttattcatgggac

SEQ ID NO: 164480 - DNA, 440 bp, Arabidopsis thaliana columbia
agtcatcgtcgtcgtctcttctctcaaaatcaaaaaggttgttataaaaatggctgaggcaacgtctgctttgaggaagcctgtgttcacaaaggttaatgagttgagaccaggaaccaatggccactctctgaatgtgaaagttgtcaacacgaagatggtgatgcagagaggaggaggtcgtcccatgggtcctcagtcacgtcagatgcggattgccgaatgcttagttggtgatgagactggaatcataatctttactgcaagaaatgaccaagtggatatgatgaaagaaggcagtgtagtgactctgcgtaatgcgaagatcgacatgtacaagggttctatgaggcttgcagttgatagatggggacgtggtgaagttgcaaaagagcccacagacatcaccgtggaagatgataacaatctttcgctgatcg

SEQ ID NO: 164481 - DNA, 207 bp, Arabidopsis thaliana columbia
gtcgaccacgcgtccgaagttttatctttgtttttacttttatttgttagtaatgtagtggaccgaaaatcggatcacaagtggacattggtccgagggatggtttatttggttcgttataatataacgtcaagtgtaatcttattgtgggtattaatggtattatcctatttaatgatacatagaggaagaggttaaactattggg

SEQ ID NO: 164482 - DNA, 357 bp, Arabidopsis thaliana columbia
aagcttcaacctgaagtagagaaggttttgctggagatggagtttcgtggtgtacctagaaacacagagactttcaatgtgttgattaacaatctttgtaaaatcaggagaactgaagaagcaatgacattgtttggtaggatgggtgaatggggttgtcaaccagatgctgagacttatcttgttctgattaggagtttgtatcaagcagcgaggatcggtgaaggggacgaaatgatcgataagatgaaatcagcgggatatggtgagcttttgaataagaaagagtattacgggtttctcaagatattgtgtgggattgagaggcttgagcatgcgatgagtgtgtttaagagc

SEQ ID NO: 164483 - DNA, 459 bp, Arabidopsis thaliana columbia
aggagatgttcaaagagaaggagatttcaacgttgatggatggtcttgagaagtactggcctagtctcagttgtggttctccatcatcatgcaatggtgggaaagggtcattttggggccacgagtgggagaaacatgggacttgttcttctcctgtttttcatgatgagtataattacttccttaccacacttaatctctacttgaagcataatgtcacggatgtcctttatcaagctggctatgttgcttccaacagtgaaaagtatcctctaggaggtatcgtaacagccattcagaatgcatttcatatcacccctgaagtggtttgcaaaagagatgcaatcgatgaaatacgtatatgcttctataaagattttaagcccaaggactggtgtggttcacaagatttgacatctagaaagtcatgccccaagtacgtaagtttgccggaataca

SEQ ID NO: 164484 - DNA, 459 bp, Arabidopsis thaliana columbia
  unsure (1)..(459): unsure at all n locations
tcacaatctaatggcgattccaatgtccatggcaatggcgactcctacagattccgtgagcagagtctggagtatgtcttctctcaaatcagctcttccctccaccgcatcactccgattaccttcctcgtcttctcgccgtccggttactcttcgtctcccaatctcttctccttcactcccatctttctccggtctctctccggtcaatcctctcctctcaatcggacttccagattggcaaagctttgagaatggattcaaaattgttgacggtggtggtcgtatctacgcgatgagacacggacgacgtgttccgaagctgaacagaccaccggaccagcgcaaagctcttctgcgaggactcacgactcagcttcttaagcatgggagaatcaagacgactcgagctagagctagtgcgatgnaagaagttcgtgacaagatgattacattggc

SEQ ID NO: 164485 - DNA, 427 bp, Arabidopsis thaliana columbia
  unsure (1)..(427): unsure at all n locations
gaatatgaatattccgttgaagaagacttgctcctgaaatcctttggaccgaaactcgtaaaattatttcccttcaatttctctgaaatctattcaccgtctcctttgtctcctcctccaaatcgatcgttcctcgtcgtcgtctgattttctctacgattgctttttctgtctagctcgataagataaaacaaaactaatttttgaagagtttttttttttgggtttgggagcgatgggtcaagcttttcgtaagctattcgatactttcttcggcaatcaagaaatgagggtcgttatgctggggctggatgctgctggaaaaacaactattctctacaagcttcatattgngaaagttttgtctactgttcccaccattggattcaatgttgagaaagttcagtacaagaatgtgatgttcaca

SEQ ID NO: 164486 - DNA, 466 bp, Arabidopsis thaliana columbia
aacttgaagatggcagaactttggccgactacaacattcagaaggagtccacactccacttggtcttgcgtctgcgtggaggtatgcagatcttcgtgaagactctcaccggaaagaccatcactttggaggtggagagttctgacaccattgataacgtgaaagccaagatccaggacaaagagggtatcccaccggaccagcagagattgatcttcgccggaaagcaacttgaagatggaagaactttggctgactacaacattcagaaggagtccacacttcacttggtcttgcgtctgcgtggaggtatgcagatcttcgtgaagactctcaccggaaagactatcactttggaggtagagagctctgacaccattgacaacgtgaaggccaagatccaggataaggaaggaatccctccggaccagcagaagttgatctttgccggaaaacaattggagga

SEQ ID NO: 164487 - DNA, 456 bp, Arabidopsis thaliana columbia
ctataaacaagacaagacctcgcaaagctcaaaccttttccttctttttttctatcaagttcctcacttctcggatccgggtcctaaatctgggtcaaccctttttacgatcatcggaaatggaccctccactagtgaacgattcctccttctctgcagctaatccttcttcttacactctctccgagatttggcctttccctgtaaacgacgccgttcgctctggtctccgtttagctgttaactccggtcgagtctttactcgctctgaacattccggcaataaagacgtctccgcggctgaggaatctacagtcaccgatctaactgctggctggggaagtagaaagactagagatttgaactctgaggatgattcttcaaagatggtttcttccagcagcagtggtaatgaattgaaagaatcaagggataagaaaagaaaactgtgtggat

SEQ ID NO: 164488 - DNA, 454 bp, Arabidopsis thaliana columbia
ttatcgagaaaaatccaagatttactaaaaaaccactatctctctgctcttcctctgtctacattaatgtaattttgatcatcggattgggtgaaagaaacatcaaactcctaaaagagaagcctttaaagtttttttttaatcaaaaacaaaaggaagaaaattttcctttttgttttagatggcatgaatcatcatcatcgctttgctttcttgattctctatttcgtttgatgggatttgtttttctgggaatttattcattcacctgctgccatggctaaattatctttcaaggattctcttaaagctcttgaagccgatattcaacacgctaatacactagctttagattatcctcgggagaaggatggagcgcgcgttcagatgagattatcatacagcccgactgctcaattttttctttttcttgtacaatggactgattgtaagc

SEQ ID NO: 164489 - DNA, 412 bp, Arabidopsis thaliana columbia
  unsure (1)..(412): unsure at all n locations
cactcttctagcatcttgaagcttaaatctcagccgtccgatcatgccgatcagaaacatcgccattggccgtccagatgaagccacccgtcccgatgccttanaggcggcgttggctgagttcatttcaactttgatctttgtcgtcgccggttcaggctctggcatggctttcaacaagctcanctgaaacggagccaccactccttctggtctcgtagctgctgcagtggctcatgcctttggactcttcggcgctgtctcagatggtgccaacatctctggtggacacgttaaccctgccgtcaccttcggggctttcattggtggtaacatcactctccttcgtggtatcctctactggagtgctcagcttctcggctccggcgtcgcttgcctcatacttaaattc

SEQ ID NO: 164490 - DNA, 459 bp, Arabidopsis thaliana columbia
  unsure (1)..(459): unsure at all n locations
accaggaactctctgctacgactgtgaagcctgcaaggctggtctgcttgacaacatcaagaactcatggaaaaaggtggctaaggtcaacattgtcttcctcatattcctcattatcgtctactctgttggttgttgtgcgttcaggaacaacaggaaacgcagttggtaatagattctaatgcgttgaaaccaagactaaggccagagaagatatctgaagtgtcatcatcttactgtcaagtaagttaaagcagcatttaagacaactcgttgatcgcttgtcttngtgtgtggggattgcaatttcaatgtattttctctcttaaatttgcaacataatgagttacaaaagcacttgcttgtgcttctatttcgactcttttgtgtgttgagtagcttatacatctgttgagacgagtgagatttgtaaaagaagttccatttcactttgcgttt

SEQ ID NO: 164491 - DNA, 440 bp, Arabidopsis thaliana columbia
  unsure (1)..(440): unsure at all n locations
atggtgacgaaggagcaagtcgaagcttcattgacttcgaaacttaagccaattcatctcgaagtcattgacatatctggaggttgtggttcgagttttgaagtggaggttgtctctgaacaattcgaagggaagagattgctggagaggcatcgtatggtgaatgctgcgctagaagaagaaatgaaagagattcatgctctctctattaagaaagctcagactccacaacaatggaagccaccatcacaagactctgcaaccttaaccaaagatgcctgaatttctgttttttaaaagccttgtgacaaagaacagagcatttactatgttgatactttgtggttactgtactccgattactgcttttgatgaagtgtaaacacttttttaaaaaaaaaaaaaantaaaatttaaaaataatttttttaaaataaaaa

SEQ ID NO: 164492 - DNA, 441 bp, Arabidopsis thaliana columbia
catctttctcctttggtggcaaacacaacgacagatagagagaaacgatggcgtcgaactcgcttatgagctgtggcatagccgccgtgtacccttcgcttctctcttcttccaagtctaaattcgtatccgccggagttccactcccaaacgccgggaatgttggtcgtatcagaatggctgctcactggatgcctggcgagccacgaccagcttaccttgacggttctgctcctggtgactttgggtttgacccacttggacttggagaagttccagcgaaccttgagagatacaaagagtcagagctcatccactgtagatgggctatgctcgctgttcctgggattttggtaccagaagcattaggatatggaaactgggttaaggctcaagaatgggcagcactaccagggggtcaagccacttacttgggaaacc

SEQ ID NO: 164493 - DNA, 410 bp, Arabidopsis thaliana columbia
gtgaagaccgagagagatttatagcagaggaaagtgaaatcatgaaagggattctagggtttgaatacgggatagttcaggcgccattaggaccagatatctccggaccagagcttgtagccgccgtcgctaatgcaggagggattggtcttctcagatgtcctgattgggagtgtcctgattacttgagagagcttataagaaagacaaagacattgacagagaaaccatttgggatcggtgttgttcttgcgtttcctcatgatttgaacattaagacaatcttagaagagaaagtggctgtcttgcagctttattggggtgattgttcacaggagcttgtggatgatgctcactttgccggtgtcaaagttattcctcaggtggggaatggcgaagaagctagaaag

SEQ ID NO: 164494 - DNA, 470 bp, Arabidopsis thaliana columbia
caaaaaaaagaaaacacaaaaacaaagattataatggcttcctcaaccatggctttgtcctcccctgccttcgccggaaaggctgtgaagcctgccgcatcagatgtcctcggaagcggccgtgtgaccatgaggaagactgtcgccaagccaaagggtccatcaggcagcccatggtacggatctgaccgagtcaagtacttgggtccattctccggcgagcccccgagctaccttaccggtgagttccccggtgactacggatgggacaccgctggtctatccgccgacccagagaccttcgccaggaaccgtgagctagaagttatccacagcagatgggccatgctcggagccctaggctgcgttttccctgagctattggctaggaacggagtgaagttcggagaagcgggttggttcaaggccggttcacagatcttcagcgacggaggattggactacttggg

SEQ ID NO: 164495 - DNA, 457 bp, Arabidopsis thaliana columbia
agaggttgatgaacagatgatgaacgtccagaacaaaaactcctcatactttgttgaatggattccaaataacgtgaaatcaagcgtctgcgatatagctcccactggtttgaaaatggcatcaactttcattggaaactcaacttcaatccaggaaatgttcaggcgtgtgagtgaacagttcactgccatgttcaggagaaaggctttccttcattggtacacaggagaaggaatggacgagatggagttcactgaagcagagagtaacatgaatgatcttgttgcagagtatcagcaatatcaagatgctacagtcggtgaagaggagtacgaggaggacgaagaagaagaagaagcctaaagaaaagatgattgattattacttttgtaaggctgtaagttcgtcgcactcatttccttttacctctttttctgaattgggattctctctttt

SEQ ID NO: 164496 - DNA, 441 bp, Arabidopsis thaliana columbia
taagaatctcaagcgtaataaccacagagagagttagactcaaatgttgtttcatgtttttttgataatggtgatcactggaatttgagataattaataaaagttgtgatgttaattcgaaacaaaaaaaaaaaaaaaaaaaaaaaaaaaaaaaaaaaaaaaaaaaaaaaaaaaaaaaaaaaaaaaaaaaaaaaaaaaaaaaaaaaaaaaaaaaaaaaaaaaaaaaaaaaaaaaaaaaaaaaaaaaaaaaaaaaaaaaaaaaaaaaaagggggggccccttttaaagaatcaaattttactaccccgtgtttgaaaataaaaattttttttttaggggccccaaaataaaaatcccgggccggggtttaaaaacggggggacgggaaaaacccggggttacccaaattaaaaggctttgaaaaaaatcccctttttcccag

SEQ ID NO: 164497 - DNA, 470 bp, Arabidopsis thaliana columbia
aaaaacccggcgaaaaagggaaattcgaattcgtcttctgttgatcattgcttcacttctgcttccagagcttttactcagaagaagctcgctgatctcaaatctctctttttttccctcgcttccaagtctcagagcaatgaccaatacgtctcgtaccctgttttccaggagtattttggtctgagtggttctttaggagaaaggatctttgatatggttactcaacacaggaaagatgataaaatgacttttgaagatcttgttattgctaaggcaacatacgagaaaggaactgatgatgagattgctgagtttatttaccagactttggatgttaatggcaatggggtcttgagaaggtctgatttagagtcgttcctggtggggattttgaagaggtgttctccactgagagttctgatgcggaatcaagtgattacaaggagatggtagatgcgctactcgat

SEQ ID NO: 164498 - DNA, 313 bp, Arabidopsis thaliana columbia
gaattcctttcttcagcttcttgtggtgtgacgcatactcgtcgcagtcttgagatatgggcgccgcaagttccaacgtcggtgccatcaacagagctccgttgagcttgaacgggtcaggatcaggagctgtatcagccccagcttcaaccttcttgggaaagaaaggtgtaactgtgtcgagattcgcacagagcaacaagaagagcaacgggtcattcaagggggtggctgtgaaagaagacaaaccaaccggtggagaccgatggagaggtcttggctaccacacttctgatgatcaacaagacattac

SEQ ID NO: 164499 - DNA, 363 bp, Arabidopsis thaliana columbia
attgcttctgcttccaagtggactcgtgaaggaatggctacgcttgcagctctcaacgtcctcggaagagtcaaagggtacccgatttggcatgacccgaaccgagtcgatccattcttgaacgaaaacgcttcaccgcccaatgccagtccaagcatcgtcaactcaaaggccttaggattgcctgtttcgaagctatgagttaagtatgaagaaggggagatttggaagaatccttttagtgaatatatgatggtgtcaagttgtgtttatgtattgtatatgaaacaaccatgttggatcatataaatcactcctttaaagtgttacattgttgatgagtctattagacgattacccact

SEQ ID NO: 164500 - DNA, 439 bp, Arabidopsis thaliana columbia
  unsure (1)..(439): unsure at all n locations
ctcgatttcgcctagcttcttctgagcatccgccgcttccgtctacagaatggattctcaaataaaacacgccgtggtcgtgaaggtcatgggtaggactggttctcgtggtcaggtcactcaggttagagtcaaattcactgattcagaccgtttcatcatgaggaacgtgaaaggacccgtcagagaaggagatgtcctcactctcctcgagtccgagagagaagctagaagactccgttgattccaccacanaaaaaaatggctcaattcttagagaaggcaacttcggctctcagcgaagccaaagaatccgttacaagcaccgctgaatccgtcacggcttctctcactgatgctgagaaaaccgntaaccaaaccgccaggagcactctaactgacgccgagacaaccgttgcagcatctgttgaaacggtca

SEQ ID NO: 164501 - DNA, 434 bp, Arabidopsis thaliana columbia
caaaagaagaagagaaacaacaagaagtagtaatggcttcctctatgctctcctccgccgctgtggttacatccccggctcaggccaccatggtcgctccattcaccggcttgaagtcatccgctgcattcccggtcacccgcaagaccaacaaggacatcacttccatcgcaagcaacgggggaagagttagctgcatgaaggtgtggccaccaattggaaagaagaagtttgagactctatcttacctccctgaccttagtgacgtcgaattggctaaggaagttgactaccttctccgcaacaagtggattccttgtgttgaattcgagttagagcacggatttgtgtaccgtgagcacggaaacactcccggatactacgatggacggtactggacaatgtggaagcttccattgttcggatgcaccgac

SEQ ID NO: 164502 - DNA, 427 bp, Arabidopsis thaliana columbia
cttggtgacagaagaaaagagttgaggaacagagaaaatggcagcacaagcacttgtgtcttcttcacttacctcctctgttcagacagctagacagatatttggctcaaaaccagttgcgtctgcctcacagaagaagagttcctttgttgttaaagctgctgcaactccacctgtcaagcaaggagccaacagaccattgtggtttgcttcatcgcagagtctctcttacttggatggcagcttacctggtgactatggattcgaccctcttggtctttcagacccagaaggtactggaggattcattgagccaagatggctagcatacggagagatcatcaacggacggttcgccatgttgggtgcagctggagctattgctcctgagattttaggaaaggctggtctgatttcagcagagact

SEQ ID NO: 164503 - DNA, 352 bp, Arabidopsis thaliana columbia
cccacgcgtccgcaatcctcaatgatcaatttggttatagcattagcatagtttccattgaagaaagtgtaacgttgtttgaaatgtggggttttgtgattgaaaacacagggagagtgtagcggcggaaaaggtgaaggaagcacacaggaaggtaatggttgcaaaccatccagatgcaggtggtagccatttactagcctgtaagatcaatgaagctaaagacgtgatgctaggcagaactaaaaacagcggatccggtttttgatgcatatttcaattcaaagacttacttatgaatcatcttatgttataggactgtgatgtcaaactgcagatattatgctaattt

SEQ ID NO: 164504 - DNA, 364 bp, Arabidopsis thaliana columbia
  unsure (1)..(364): unsure at all n locations
gtctctctcttacattttgaaaccctaatttctcttcttttccccaaaaaaaaatgtctgaagttgagtaccggtgctttgtcggcggccttgcctgggccaccaatgatgaagatcttcaaaggacgttctcacagttcggcgacgttatcgattctaagatcattaacgaccgcgagagtggaagatcaaggggattcggattcgtcaccttcaaggacgagaaagccatgagggatgcgattgaagagatgaacggtaaagagctcgatggacgtgtcatcaccgtgaacgaagctcantcgagaggtaacggcggtggcggaagaagccgtggtggaagcggtgggggttaccgcaacgg

SEQ ID NO: 164505 - DNA, 452 bp, Arabidopsis thaliana columbia
gcaaaacaagaagaacaacaacactaagcaaaaaagaaaagctcaagccgagagagacaatggcatcaacattcacgagctcaagcagtgttcttaccccaacaacattccttggccagactaaagcctcaagctttaacccccttcgtgatgttgtctctctcggatctcccaagtacactatgggaaatgatctttggtatggacctgacagagtgaagtacttaggacccttttccgttcaaactccgtcttacctcaccggagaattccctggcgattatggttgggacaccgccggtttatccgcagaccctgaagcctttgccaaaaacagagctcttgaggtgatccatgggagatgggcaatgttgggagcttttggttgcataacccctgaagttcttcaaaagtgggtccgtgtggactttaaagaaccagtctggttcaaa

SEQ ID NO: 164506 - DNA, 164 bp, Arabidopsis thaliana columbia
cgacgagctctcatcttcttcctcaggcattgcatatgataccgagaaccccttctttctcgtcgaagaatttaggggtttcttcaattctaccacgagcatcatcagtgaactcaagactatcagtttctaggggttttctcactcattcgagcttcaatttt

SEQ ID NO: 164507 - DNA, 441 bp, Arabidopsis thaliana columbia
gattggaactggtttcagctacacgacagataaaagtgatatccgtcatgacgaaactggagttagcaatgatctttatgattttctgcaggctttctttgcggagcaccctaagttggcaaaaaacgacttttatattactggagagtcatatgctgggcactatatcccagcttttgcttcccgagtccataaaggaaacaaggctaatgagggagttcatattaacctaaagggattcgctattggaaatgggcttacagatcctgcactccaatacccagcctatcctgactacgctttggaaatgggtctaatcacgcaaaaagagcatgatcgcttagaaaagattgtcccactgtgcgaactatcaatcaagctttgtggaactgatggcacaacttcttgtttggcatcatatcttgtctgcaactctttggt

SEQ ID NO: 164508 - DNA, 453 bp, Arabidopsis thaliana columbia
tgaaaagcttcaatctcaaaacatagcagctctctcaataaaccaaacccaaatgcaagctgtgtagagagaaacggagtgaggaaggaaggagatgggaggggtgacgtcatcggtggcggcgaagtttgccttcttcccgccgagtccaccgtcttacaaggtggtgaccgacgagctcaccggactgttgcttctcagccctttcccccaccgcgaaaacgtagaaatcgtaaagcttcggaccaggagaggcacagagatcgtgggcatgtacgtgaggcatccgatggctacctccacgctcctctactcccatggcaacgccgccgatctgggacagatgtatgagctcttcattgagcttagcatccatctcaaggttaatcttatgggatacgattactccgggtatggacaatctactggaaagccgagtgagcataacacgta

SEQ ID NO: 164509 - DNA, 207 bp, Arabidopsis thaliana columbia
cattcggcgctcttttggaatgaagaacaagataagcaatggcccatacataaaaatctgggaatcctaaaaatgtttgcattgggggtgttgcacgtcctccaagggggggctttttcggatctttttaatcttaacctgccacaaagcttgaatctttagctattgcagctgctttgaaaagagcaaatgttgatccagcttttg

SEQ ID NO: 164510 - DNA, 421 bp, Arabidopsis thaliana columbia
aaaaaaaaaaaacacaaaaagtttcaatggccgcctccacaatggctctctcctcccctgccttcgccggaaaggctgtgaacctttcccccgcggcatctgaagtcctcggaagcggccgtgtgacaatgaggaagactgttgccaagccaaagggtccatcaggcagcccatggtacggatccgaccgagtcaagtacttgggtccattctctggcgagtcaccgagctaccttaccggagagttccccggagactacggatgggacaccgctggactttcagctgatcccgagacattcgcaaggaaccgtgagctagaagttatccacagcaggtgggctatgctcggagccctaggctgcgtcttccctgagcttttggctaggaacggagtcaagttcggaggagcgggttggtt

SEQ ID NO: 164511 - DNA, 448 bp, Arabidopsis thaliana columbia
gactgcaatctctgttgatggaaagatcatccaagttgtctctaaccgaaacccgtctcttctcccttggaaggagctaggaattgacattgtcatcgaaggaaccggagtgtttgtggatagagaaggtgcagggaaacacattgaagctggtgccaagaaggttatcattactgctccaggcaaaggagatattccaacttatgtcgttggtgtcaatgcagatgcttacagtcatgatgaacctatcatcagcaatgcatcttgcactaccaactgtcttgctccctttgtcaaagttcttgaccagaaattcggtatcataaagggtacaatgacgactactcactcttacaccggtgaccagaggttgctagacgcgagtcaccgtgatctaaggagagcaagagcagctgctttgaacattgttcctacttctacaggagca

SEQ ID NO: 164512 - DNA, 229 bp, Arabidopsis thaliana columbia
aacgctgggatcgacgtcatcactggagctgtaggagatatggaagagagaggaatctatgaagcattcaaagtgaagcaagcggttctgctttcagccacagaagcatctgagatgatattgcgagtggatgaaatcattacatgtgctcctaggaggagagaagacaggatgtgaaaaactcaacacaaacacatgaacgtggtgggagcctacagattccatgatt

SEQ ID NO: 164513 - DNA, 194 bp, Arabidopsis thaliana columbia
gtacgcctgcgtaccgtccgtatttcctgttcgacttcacgcgtccgcggacgcgtgggcaagtgtggtgagcccggtcacatggcgagagactgttctgaaggcggtggaggttacggaggaggcggcggtggctacggaggtggaggcggatacggcggaggaggtggtggctactgaggttctttccttac

SEQ ID NO: 164514 - DNA, 370 bp, Arabidopsis thaliana columbia
caacaaccaaacactcatttgtccacatcttgagagaaaaaaacggatcacgtgtattagaggatctcatggcgatggcggtctccggagctgtcctcagtgggcttggctcttcgttcctcaccggaggcaagagaggtgccaccgcattggcaagcggcgtatgcactggagctgattgaaagggagcaaatgttgttccagctcttgttcaagaagttgactctggcaaagtttttagcgctactttgggggaggctcctgctcgccaagctgcttaaggggcaggaatccctaactctgttatctgtactacagctaacaaggtttgtgcatcaggcatgaaagcggtaatgattgctgctcaaag

SEQ ID NO: 164515 - DNA, 444 bp, Arabidopsis thaliana columbia
gtggaggagatagccgtcaggctgttgctcttcaatctggtgggcggagtcggcgaaggaggcagcttagcaaatgctctgtcgcttctggatccgctagcattcaggctctcgtcacttcttgtttggattttggtccttgtactcactacaacaacaacaatgcattgtcttctctctttggatcgaatagtgtttctttgaatcgaaaccagaggagattgaatcgtgctgctagctccggtggagccatggcagtgatggagatggaaaaggaagctgcggttaacaagaaaccacctacggagcagcgtcgagttgtagtgacaggcatgggagttgaaacatcattgggtcatgacccacataccttctatgagaatttgctaccaggcaacagtggtattagccagattgaaaattttgattgttctgaatttccta

SEQ ID NO: 164516 - DNA, 369 bp, Arabidopsis thaliana columbia
gttctcacgatgatgttaagaaagtttatgtaggacaaggccaagatggtgttgcagctgtcaagtttgaatacaaaaatggttctcaggttgtttttggagatgaacgtggaacgagaacattgctaggattcgaagagttcgagcttgaatcagacgaatatataacatccgtggaagatactacgaaaaaaactttggagttgatactgtagtgacaacgctgattttcaagactagcaagaacaaaacagctggaccgtttgggattgtatctggcacaaagtttgaattcaagaaagaaggttacaagatcactgggttccacggacgagctggtggagatgttaatgctattggagcttattt

SEQ ID NO: 164517 - DNA, 384 bp, Arabidopsis thaliana columbia
acctagagaagcaaaacatccgtataagaaaaatggcacaagctacgcgtcagtcttctctacaaggggaacttgaggtagatattgagatcaaagcatcggcaaagaagttccatcacatgctctctggaagaccacaagatgttgcgaaagccactcctgacatccagggatgtgctttgcatgagggagagtttggcaaagttggcagtgtcatattctggaactatgctattgatgggcagcccaaggtggcgagggagaggatcgaggcagtggatcaggagaagaatctgttagtgctcagggtaatagatggagatctgacgaaagagttcaagagcttcttggtcactatccaggcaaccccaaagctaagaggac

SEQ ID NO: 164518 - DNA, 457 bp, Arabidopsis thaliana columbia
ccaaaatgttaccgttcacgaaggcgaacatgactctcacgggtctatcaggagttggaactacacatgggatggaaaggaggaggtgttcaaggagagaagagagatagacgatgagaccaaaacgttgacgttaagaggacttgagggtcacgtgatggagcatctcaaagtgtacgacgtcgtctaccaattcattcccaaatctgaggatacctgcatcggcaaaatcactttaatatgggagaagcgcaacgatgattccccagaaccaagcgggtacatgaaattcgtcaagagcttggttgctgacatgggaaaccacgttagcaaaacttaatcatcatttccacagtcgtcgtcgttatcatcattattattatcatcactattttgatttatatagtttgaatgttttaggattataaatggggtcttggtgtttgtaaattttatg

SEQ ID NO: 164519 - DNA, 444 bp, Arabidopsis thaliana columbia
ccagagtaaagcttgaaactttggactaaaagaatggcgtctttgggtgtgtcggaaatgcttggtactccccttaacttcagggcagtttcaagatcgtctgctccgttggcatcaagcccatccacgttcaagactgttgctctcttctctaagaaaaagccagctcctgctaagtccaaggctgtctctgagactagcgatgagctcgccaagtggtatggtcctgacaggagaattttcttgcctgatggtcttttggatagatcagagatcccagagtacttaaacggtgaagttgctggagattatggttatgacccatttggtcttggaaagaagcctgagaactttgctaaataccaagcttttgaattgatccatgcgagatgggctatgttaggagcagctggtttcatcattcctgaagctttaaacaaatat

SEQ ID NO: 164520 - DNA, 451 bp, Arabidopsis thaliana columbia
ctcactctctcactgtcggcaaactaacttattcacttttccggcactgattctgctcgggaaaaacaactccggcacaaaatgcagctttttccagtcatgttagccacactctgcattgtcctgcagcttctcattggctcgtcagctttggctacgacaaatcgccacgtgtcaaactctcattggcttcccgcagtagctacatggtacggaagccccaacggtgacggcagcgacggaggagcgtgtggttacggtacgttggtggatgtgaagccgttacatgcgagggttggagcggtgaatccaattctcttcaaaaatggtgaaggttgcggagcttgttacaaggttcgatgcttggacaagagcatttgttcccggagagccgttaccgtcataattaccgatgagtgtcccggctgctctaaaaccagcactcactttg

SEQ ID NO: 164521 - DNA, 413 bp, Arabidopsis thaliana columbia
  unsure (1)..(413): unsure at all n locations
ctcggcgagggaagagttcgtgtacctcgcaaagctcgcagagcaagcggaacgttacgaagaaatggttgaattcatggaaaaagtcgctgaagccgttgacaaagacgaactcaccgtcgaagaacgtaatctcctctccgtcgcttacaaaaacgtaatcggcgctcgtcgtgcttcctggagaatcatctcttccattgaacaaaaagaagagagtcgtggtaacgatgaccatgtgaccacgatccgtgattacagaagcaagatcgaatctgagttatcgaaaatctgtgacggtattcttaagcttcttgatactagacttgttcctgcttctgctaatgnggattctaaggtttttaccttaagatgaagggggattatcataggtatttggctgagttaaaact

SEQ ID NO: 164522 - DNA, 420 bp, Arabidopsis thaliana columbia
catctttcaatctctcttgattccaatccattcttcttcaagtgccgggttctcgggtcggatcttctaagtctagctagggataatggctactgtcactactcatgcctcggcctcgattttccgaccttgtacttcaaagccaagattcctcaccggttcttccggtaggttgaaccgcgacttgtcgtttacatcgatcggttcatcggccaaaacgtcgtcgttcaaggttgaagctaagaaaggagaatggttgcccggtttggcatcgcctgattatctcaccggcagtcttgccggtgacaatgggtttgacccgttgggtctagcagaggatccagagaacttgaaatggttcgtacaggcagagctggtcaacggacgatgggctatgctcggtgtcgctgggatgctttt

SEQ ID NO: 164523 - DNA, 477 bp, Arabidopsis thaliana columbia
aagaacaatggcttcctctatgctctcttccgctactatggttgcctctccggctcaggccactatggtcgctcctttcaacggacttaagtcctccgctgccttcccagccacccgcaaggctaacaacgacattacttccatcacaagcaacggcggaagagttaactgcatgcaggtgtggcctccgattggaaagaagaattttgagactctctcttaccttcctgaccttaccgattccgaattggctaaggaagttgactaccttatccgcaacaagtggattccttgtgttgaattcgagttggagcacggatttgtgtaccgtgagcacggtaactcacccggatactatgatggacggtactggacaatgtggaagcttcccttgttcggttgcaccgactccgctcaagtgttgaaggaagtggagagtgcaagaaggagtaccccaatgccttcattaggatcatc

SEQ ID NO: 164524 - DNA, 432 bp, Arabidopsis thaliana columbia
cgatgatgatgaggaagaagatgaggatgaagagtacagcgacgatgaggatgaggatgatgatgaggatggtgatgatgaggaagcggagaatcaagttgtgccgtggtctgcggcggcgcaagttcctccggtgatgagttcttcatcttctgacggaggaagcggaggttcagtgacgaagaggacgagggctagagagaattcagatcttctctgctccgatgatgagatcggaagctcttcagctcaagggtcaaactattctcggccgttgaagcgatcggcgtttaaatcaacggttgttgtttaacttacactctaccgtatcgtcagaatgaactgtgccgatacattgtcttcttcgatccttgtgatctccaaaactagaagcgattttattccgttggattcctttttctttttttgttt

SEQ ID NO: 164525 - DNA, 411 bp, Arabidopsis thaliana columbia
ctcctttatttcagtcttcttttacaaatcataatcttctctttgattccatcttgtgaaccaccggcataagaaaatatgacaattgctttaacgatcggaggaaacgggttttcgggtctaccaggatcgtcgttttcttcatcatcttcgtcgtttcgattaaaaaacagcagaagaaagaacacgaagatgctcaacagatcaaaagtcgtttgttcttcttcatcttctgtaatggatccgtataagactcttaagatccgacccgattcatctgaatacgaggtcaagaaagctttcagacaactcgctaaaaaggtttgaccttttgtttagctcaatcatcttagatctgggtttttaaaatttgacatctttttgaacgattttgatttgatttgttgcttt

SEQ ID NO: 164526 - DNA, 460 bp, Arabidopsis thaliana columbia
gctctttttgctcttagatcttccctctcatccggatcaagcttcaaaatttgtatgctttattcgatttaatgtctttgatacacttgttcttgttgttgggtctgctgagccttgaagctgcggcgtcgttttcaccgggatcgcgctcgattctccgggacatcggcagtaacgtcgccgatcagaaagacaacgctatcgaattgaacgctaccaactttgattcagttttccaagattcccccgccaaatatgccgttttagagttcttcgctcactggtgccctgcatgtagaaactacaagccacattatgaaaaagttgcaaggctattcaatggagcagacgcagtatatcctggtgtcgttttgatgaccagagttgattgtgcgataaagatgaatgtaaagctttgtgacaagttctctatcaatcattatccaatgctcttttgggc

SEQ ID NO: 164527 - DNA, 413 bp, Arabidopsis thaliana columbia
gttgaagctaagaaaggagaatggttgcccggtttggcatcgcctgattatctcaccggcagtcttgccggtgacaatgggtttgacccgttgggtctagcagaggatccagagaacttgaaatggttcgtccaggcagagctggtcaacggacgatgggctatgctcggtgtcgctgggatgcttttgccggaagttttcaccaagatcggaatcataaatgttcctgagtggtacgatgctgggaaagagcagtattttgcatcgtcgtccacattgttcgagatcgagttcatattgtttcattacgttgagatcagacggtggcaagacattaagaacccacgaagtgtgaaccaagaccctatctttaagcaatacagtttacctaatggtgaagttgggtccctggt

SEQ ID NO: 164528 - DNA, 329 bp, Arabidopsis thaliana columbia
gggtactgattggattgtcaatgaaatgaagaaatctggacttcgtggacgtggtggtgctggtttcccttctggtcttaagtggtcctttatgcctaaagtttctgatggccgtccctcctatttggttgtcaatgctgatgagagtgagcctggaacttgtaaagatagggagatcatgcgtcatgaccctcacaaattgttggaagggtgtttgattgctggtgttggaatgagagctagtgctgggtatatttacatcaggggcgaatatgtgaatgagcgtttgaatctaaattaggctttaagtgaagcgtttgcagttggtc

SEQ ID NO: 164529 - DNA, 434 bp, Arabidopsis thaliana columbia
aaaaaaatataagaatatcctctggtatggagggaattgcacgtattgaaattcaaaaaagaatcgatctcatccagatcataatctatatgggatttcctaaattattaattgaagataaaccccgaagagtcgaagaattacagatgaatgttcaaaaagaactaaattgtgtcaatagaaaactcaacattgctattaccagaatttccaatccgtatggggatcctaatattcttgcagaatttatcgctggacaattaaaaaatcgcgtttcttttcgaaaagcaatgaaaaaagctattgaattaactgaacaggcgaatacaaaaggaattcaagtacaaattgcaggacgtatcgacggaaaagaaattgcacgtgttgaatggatcagagaaggcagagttcctttacaaacaattgaagctaaa

SEQ ID NO: 164530 - DNA, 456 bp, Arabidopsis thaliana columbia
ctaggaaggttctcaaagaagatgctgtaagattctatgctgctcaagttgtcgttgcactcgagtatcttcactgtcaaggaataatttaccgagacttgaaaccggaaaacgttttaatccaaggcaatggcgatatctctttgtcggattttgatctgtcttgcttgacatcttgcaaacctcagctgttgattccgagtatagacgagaagaagaagaaaaagcaacaaaagagtcaacaaactccaatcttcatggctgaaccaatgcgtgcatcaaactcatttgttggcactgaagagtacattgctccggaaattatatccggagcaggacatacgagtgcagtagactggtgggctcttggtatacttatgtatgaaatgttatacggatacactccttttagaggaaaaacaagacagaagactttcaccaatgttcttcaaaaag

SEQ ID NO: 164531 - DNA, 397 bp, Arabidopsis thaliana columbia
ctttcaatctctcttgattccaatccattcttcttcaagtgccgggttctcgggtcggatcttctaagtctagctagggataatggctactgtcactactcatgcctcggcctcgattttccgaccttgtacttcaaagccaagattcctcaccggttcttccggtaggttgaaccgcgacttgtcgtttacatcgatcggttcatcggccaaaacgtcgtcgttcaaggttgaagctaagaaaggagaatggttgcccggtttggcatcgcctgattatctcaccggcagtcttgccggtgacaatgggtttgacccgttgggtctagcagaggatccagagaacttgaaatggttcgtccaggcagagctggtcaacggacgatgggctatgctc

SEQ ID NO: 164532 - DNA, 449 bp, Arabidopsis thaliana columbia
catcgatctttagagtctgctttagctcacatcctctccgtaaagctcagcaatttaaacctaccaagcaacacactcttcgaactgttcataagcgttttagaagaaagccctgagatcatcgaatccacgaagcaagatcttatagcagtcaaagaaagagacccagcttgtataagctacgttcattgcttcttgggcttcaaaggcttcctcgcttgtcaagctcatcgaatagctcataccctctggaaacagaacagaaaaatcgtagctttattgatccaaaacagagtatcagaatctttcgccgtcgatattcatcccggagcgaagatcggaaaagggattcttttagaccatgcgacgggcgtggtgatcggagagacggcggtggttggagacaatgtttcgattctacacggagtgaccttgggaggaacagggaa

SEQ ID NO: 164533 - DNA, 350 bp, Arabidopsis thaliana columbia
taaaaacacaacaacaacattcaagaaatggccatcttctgtttccttgtagaccagagaaagaaagtccgggggaggaagccagcggccgggttgtgctcaagatgcggaggaggagcagttgttgccgacatgagaacctccacaagattctgtggggtccctttttaccgcaaagcttggaaagctatcgtctgtcatatctgcggtgctgtcctcaaatcataccactgagtctgatgaaccaacaacgttttttgttttaattcattcgctttatttttccaacaagctacttgccattgtttgtcgcttgattgcctactttagactcttatgtcttaacttat

SEQ ID NO: 164534 - DNA, 453 bp, Arabidopsis thaliana columbia
agacaggatgtttttgcaatcctggcgcatgtgcaaagtatctcgagttatcccattctgagctacggtctaatgtagaggctgggcatatttgctgggatgacaatgatgtgataaatggaaaaccaacaggggctgttagggtttcgtttggttatatgtcaacctttgaagatgccaagaaatttattgatttcatcataagttcatttgcttcacctccaaagaagactgggaatggaaccgtcgtcagtggaaggtttcctcaacttcctagtgaagaccttgaaagtaaagaatcttttccaagccactaccttaagtcaattactgtatacccgatcaagtcatgtgctggattttctgtgatacgttggccactttgcagaacaggcctgctgcatgatcgagaatggatggttcagggtctgaccggtgaaattcttacccaaa

SEQ ID NO: 164535 - DNA, 203 bp, Arabidopsis thaliana columbia
  unsure (1)..(203): unsure at all n locations
ctagtctaaagcccagatatttcaaagtccaaacgtttagtcgtcaaaaagcctaatgttatgatagattctaaataagtattgggggatttggttggatataaaggtggntccttaaaggcctggatttggaaatataatgggttcggtggattcacgaaccgtattttttttcacaataatatacaaaaaggtatttccgg

SEQ ID NO: 164536 - DNA, 373 bp, Arabidopsis thaliana columbia
aaaaaaacatcgcacaagaaaataaaagatttgtagaatcaactaagaaaatggctagcactatgatgactacattgcctcagttcaatggtcttcgagccaccaaaatctctgcagctcctgtacaaggcctggcaagtgttcagcccatgagacgcaagggaaatggagctttgggtgcaaagtgtgacttcatcggttcatcaacaaatctgataatggtaacgtcgacgaccctgatgttgttcgcggggagattcggacttgcgccatcagccaataggaaggcgacagctggacttaagttggaggcacgtgactcaagtctacaaacgggtgacccggccgggttcacgcttgcggacactttggc

SEQ ID NO: 164537 - DNA, 423 bp, Arabidopsis thaliana columbia
  unsure (1)..(423): unsure at all n locations
gaaaaataaaaaagaagaaactaacaaaacaaaaaaaaaaaaaaaatggaggccgggaaaacaccaccgacgacgacaacaacgacggagaagaaaacggagcaagtgaaagacaacgacttgccgaccgatagcccttacatggcgacgggtactttggaagattacaaattgaaagcttatggagccgaaggtcaccaagagcctactcctggtcttggaggtggctccaccgatgctcctactccttctggcgacgcacccgccgncactaccaccgatgcgaaagctccgtgaaaaaaaagaaagactataataatgaacggggtttgtggatcgtcggaaaacaaacccataattgtagtatgttcaataactgatccagcttcggttcttaacgtttttatgggttaaattaaaaat

SEQ ID NO: 164538 - DNA, 449 bp, Arabidopsis thaliana columbia
ctccaccggatctcgaaatcggagaattagccaaacgatggccgccgacggaatattccgcagcatcttcgagggttgtatctccggccttgattccgccatcgaacggcgtccttaccacaaaaactgcggatgtgctcttcacgataaatcaagtggcgctgggaaaaatcaaaatcagcgacggccgccgtcttgtcgccgccacggaagctcagagagcatctcgttcccgatccgaaggtcttggagcgaaggcaacatcatggctatgaatctcttctcctcatcgtcgtcttcttctaatctccaatcgctttcttcgtcttcttcgctctcaaatctggcatcagatttaccggtggataatgctgcgacggaggaaccgagcagatctaataaacagctacgatggacgattgatgaaggtgaagatgattgatgatgat

SEQ ID NO: 164539 - DNA, 396 bp, Arabidopsis thaliana columbia
  unsure (1)..(396): unsure at all n locations
tttccgtagaatctatggtggaagcaagaggaacggtagtcgcccacctcacttttgcaaaagcagtggtggtattgcccgtcacatcctccaacagctggagacaatgaacattgttgagctcgacaccaaaggaggaagaaggatcacttccagtggccaaagggatttggaccaggttgctggccgtattgcagttgaaccttgaagatcttaatgttcttttttgttcttcttctacttttgaggccattgtgcttttagtgtttatctttacttttaagaattgttaccatttcattctcaagacttgcgctcataatgttcaaaaatttatctttttggcgatggctttggacattnacngacnagancccttagacaaaaaacttgacc

SEQ ID NO: 164540 - DNA, 471 bp, Arabidopsis thaliana columbia
atcaaggaaatggcgtacgcttctcgttttctctccagatctaagcagctacaggggggtctggtcattttgcagcagcaacatgctattccagtccgagcttttgctaaggaagctgctcgtccaacctttaaaggagatgagatgttgaagggtgtcttttttgatatcaagaacaaattccaggctgctgttgatattctccgtaaggaaaagatcacccttgatccagaggacccagctgccgtaaaacagtatgcaaatgtaatgaagaccatcaggcaaaaggcagacatgttctcagaatctcagcgcattaaacatgacattgatactgagactcaagacattccagatgctcgtgcatacttgttgaagttgcaggaaattcgcaccaggagggggcttactgatgagcttggtgctgaggccatgatgttcgaggctttggagaaagtcgagaaggacata

SEQ ID NO: 164541 - DNA, 462 bp, Arabidopsis thaliana columbia
gcttcacctgaaacctctcctctgccacatctctctttctctctcacacatacattatttcaattattgttttttttataactccaatcttgaatcttgacgatctctggtttcttcattcaaaggaggagactttttggggtttttagactttgcttgtctagttttgtcttgtgtgtggtgatgtcttatagtaattcaaacccggaaaattattcagctgcaacgagctcgccggagcttaaactatatcaagcatttatcttttctgttccaatttgtttcacatttattattctcttcttgttatacttgatctacctccgtcgtagtagctctgatttggcttctcttggaatgcgaactactttcatcctcgggaactttctcttcacgaatgaattaagattgagcaaagagctgagagagatgcttcccattgttgggtttaagagaggttta

SEQ ID NO: 164542 - DNA, 282 bp, Arabidopsis thaliana columbia
gtaggacggctctcctaggcgatgctgaaaggctcataggctgctgaggcagtgcgcatgcaacatgtgctagctcactgagtgggattactctaccgacattcgttgcccagactcgtgcctatcgctggaaccggctacgtgatgttgtctgtctcggatctgccaaggacagtatgggagaatgactctatggtgtggacctgacagagggaagtacttaggaccctttgccgctcaaacttcgtcttacctcaccgtagatttccttgccaatgctgg

SEQ ID NO: 164543 - DNA, 455 bp, Arabidopsis thaliana columbia
  unsure (1)..(455): unsure at all n locations
ggaggagcagggctcgaagtggtgcaagggaaggtatgggttgtgtatgggtttaacggatgtgaagtagatgatgttcattactacgatcctgttcaagacaagtggacacaagtggaaacattcggtgtgaggccttccgaaagaagtgtattcgctagtgcggctattgggaaacacattgtgatttttggaggtgaaattgcgatgcacccgctagctcacgtgggttcaggtcaattgaccgatggaacttttgcattggacacagagacgttgcaatgggagaggctggataagtttggtggggaggaagagactccgagtagcanaggatggaccgcgtccacgactgctaccattgatggtaagaaaggacttgtgatgcatggtggtaaagctccaaccaatgaccgggttgatgatctcttcttttacgggattgactctgacta

SEQ ID NO: 164544 - DNA, 449 bp, Arabidopsis thaliana columbia
agaatctgactgatgaagaggccaaggttgttggaggagccaatcacagccacgccactaaggatctccacgatgccattgcatctggcaactaccccgagtggaaacttttcatccagaccatggatcctgcagatgaggataagtttgactttgacccacttgatgtgaccaagatctggcctgaggatattttgcctctgcaaccggttggtcgcttggttctgaacaggaccattgacaatttcttcaatgaaactgagcagcttgcgttcaacccgggtcttgtggttcctggaatctactactcagacgacaagctgctccagtgtaggatctttgcttatggtgacactcagagacatcgccttggaccgaattatttgcagcttccagtcaatgctcccaaatgtgctcaccacaacaatcaccatgaaggttttatgaac

SEQ ID NO: 164545 - DNA, 407 bp, Arabidopsis thaliana columbia
cttgggttacacctgatgaacctggttctagccaagtacattacggtgcggttcaggggaaatatgagtttgttgctcaagggacttaccataactacacgttttacaagtataagtctggctttattcatcactgccttgtctctgaccttgagcatgatacaaaatactattacaagattgaaagcggtgaatcttctcgagagttttggtttgttacaccaccacatgtacatccagatgcttcctacaagtttggtattataggcgatatgggtcagacattcaactcgttatccacgttggaacattacatggagagtggagctcaggctgttttatttcttggagatctttcttatgctgatagatatcagtataatgacgttggtgtgagatgggatagc

SEQ ID NO: 164546 - DNA, 358 bp, Arabidopsis thaliana columbia
acgcattgcttcatcattaccaaatcatcaacttaatcgtttctctcaaatttagggttttctcttttctcgaaagtcttgcggttttctgaatcatctctatctggtttgagggtttcgtttgatatctggagaaaggggtttctggaaacaaggagttcataattcgcgatcttgatctatcgatcttcatttatatataaaagcgtgaatgagattatgatggagtcgaaaggtggcaaaaagaagtccagcagtagtagttccttattttacgaagctcccctcggttacagcattgaagacgttcgtacaaacggggggattaagaaattcaaatcttctgtctactcaaact

SEQ ID NO: 164547 - DNA, 431 bp, Arabidopsis thaliana columbia
gttctctcttccgtcaatatggaaggcgtcaccgtcgtgtctttcttccttcttttcatcgccaccgccatggccgccaagtccaccgtctccttccgtgacggcatgttaccaaacggagacttcgagctaggaccaaaaccatcagacatgaaaggaacagaaatactaaacaaactagcaataccaaactgggaagtcacaggattcgtcgaatacattaaatcaggacataaacaaggagacatgcttctcgttgttcccgccggtaaattcgctgtaagacttgggaacgaagcatcgatcaaacaaagacttaaagtggttaaaggaatgtattactcactcacttttagtgctgctagaacttgtgcacaagacgagagacttaacatatctgtagcacctgactccggtgtgattccgattca

SEQ ID NO: 164548 - DNA, 463 bp, Arabidopsis thaliana columbia
cgtttataccccggaggcaagttctttgacccgctaggtttagcggctgacccggagaagactgctcaacttcagttagctgagatcaagcatgcacgtcttgcgatggtcgccttcttgggattcgcggttcaagcggctgcaacaggtaaaggtccactcaacaattgggctactcacctcagtgatccactccacaccaccatcatcgataccttctcctcatcttaaaatcattatcatgtgagattctatttgtaacttatgtaaaaacagagctatgatgatactgaatcgactttgggcttttgcttgtttggtttatttacatgtttggcccatgacattaaaaaaaaaaaaaaaaaaaaaaaaaaaaaaaaaagagaataaacataaaaataaaaaaaaaaaaaaaaaaaaaaaaaaaaaagggggcggccgttttagaggatccaagcttacc

SEQ ID NO: 164549 - DNA, 452 bp, Arabidopsis thaliana columbia
atgagttctaagtttgatatcggctccttaagcatagtaatgactctgcttatttgcttcttattattatctttggctccaaaacttgaggctgagctcgcaacggtccaacatgctccaaaccccgatggctctatcagttttctggtgattggagattggggtagcatggactctacaaccaatcccaagttgccctccagatggggagaatcggggaggagatggatatcaattttgtggtatcgacgggtgataacatctacgataacgggatgaaaagtatcgatgatcccgcctttcaactctcctttagtaatatctacacttctcctagcctgcaaaagccttggtaccttgtattggggaatcacgactatagaggagatgttgaggcacaattgagtcctatcctcagatctatggatagccgttggatttgcatgagatcc

SEQ ID NO: 164550 - DNA, 378 bp, Arabidopsis thaliana columbia
atctagttccatctggtcaacagctttctcttgctcgtcatttgtactcccctgagtgcgaagccgccgtcaatgagcagatcaatgttgagtataacgtgtcgtatgtgtatcacgctttgtatgcatatttcgatcgtgacaacgttgccctcaagggtctcgccaagtttttcaaggaatcgagtgtggaagaacgagagcacgctgagctgttgattgagtatcagaacaaacgtggtgggagggtcaagttacagcccatggtgttgcctcagtctgagtttgatcatcctgagaaaggagatgctctctatgctatggagttggctctttcattggagaaactagtcaatgaaaagctcctaaacctgcaca

SEQ ID NO: 164551 - DNA, 456 bp, Arabidopsis thaliana columbia
gaagaacaatggcttcctctatgctctcttccgctactatggttgcctctccggctcaggccactatggtcgctcctttcaacggacttaagtcctccgctgccttcccagccacccgcaaggctaacaacgacattacttccatcacaagcaacggcggaagagttaactgcatgcaggtgtggcctccgattggaaagaagaagtttgagactctctcttaccttcctgaccttaccgattccgaattggctaaggaagttgactaccttatccgcaacaagtggattccttgtgttgaattcgagttggagcacggatttgtgtaccgtgagcacggtaactcacccggatactatgatggacggtactggacaatggggaagcttcccttgttcggttgcaccgactccgctcaagtgttgaaggaagtggaagagtgcaagaaggagtacc

SEQ ID NO: 164552 - DNA, 440 bp, Arabidopsis thaliana columbia
cttaaaacttcttacctaaaatagaaatttgattttttgagaaatggcttcaaaaatttcagcctctcttgtcattttcctcacattcaacattctttttttcactttaaccaccgcatgtggcggtggctgcagttccacccctaaacccaaacctaagcccaagtccaccggaagctgccctaaagacactctcaagctcggcgtttgcgccaatgttctcaaggatcttctcaaaattcagttgggaacaccaccagtgaagccttgttgttcgctcctcaatggtttagttgatcttgaggctgccgcttgtctctgcaccgccctaaaagctaaaggtttaagcattaatcttaatgttcccgtctctctcaaccttcttctcaatggttgggggaaggaggttcctttcggcttcggatgggcttgatatatct

SEQ ID NO: 164553 - DNA, 461 bp, Arabidopsis thaliana columbia
ctatttctctcttcatacatatctcaagcagataaagttgatcggatactagaatgggaggaggatttagagttttgcatttggtgaggccattcttggcttttctgcctgaggttcaaagtgctgataggaaggttccattcagagagaaggttatctacactgtcatctctctcttcatctttcttgtctgcagtcagcttcctctttatggaatccattccaccaccggtgcggatccattctattggatgcgtgtcattcttgcgtccaaccgtggaactgtcatggagctcggtattactcctattgttacatctggacttgtgatgcaactcttggctggttccaagattattgaggttgacaacaatgttcgtgaggatcgtgccctcttgaatggtgctcagaaacttctaggtattctgattgccattggtggagctggtgcatatgttctt

SEQ ID NO: 164554 - DNA, 445 bp, Arabidopsis thaliana columbia
ttgagatatcaatactcctgtgagaacaaaatgaagctttcttgtggtacaagctttgcgttcttacttctgtttcttcttgcggcacaatctgtgcatgtctatgcgggtagcttccacaaagacgttcagatacattggggtgatggccgcggaaagattcacgacagagatggaaaacttctttctctctcgctcgacaaatcctctggatccggttttcagtctaaccaggagtttctctatggcaaagccgaggttcaaatgaaacttgttcctggtaattcagctggaacagtgacaacattctatctaaaatctccgggaactacgtgggatgagatcgatttcgagttcttgggaaacataagtggtcatccatatactctccatactaatgtttacacaaaaggcacaggagacaaagaacaacaatttcatctat

SEQ ID NO: 164555 - DNA, 419 bp, Arabidopsis thaliana columbia
tgaaggtcgtaagatgtgaccattgtttcttactctttgaagagcttggtaaaagcgataaatggctacaatgtctcgaggtgttcaggtggatgcagaaacagcggtggtatatcccagataatggagtctactcgaaattgatatctgtaatggggaaaaagggtcagacccgtatggcaatgtggttgttttccgagatgaaaaacagtgggtgtcgtcctgatgcttctgtttacaacgctctcataacggctcatcttcatacacgagacaaggcaaaagctttagagaaagttcgtggatacttggacaaaatgaaagggattgagcggtgtcaacccaatgttgagacttataatatccctgtgagggcttttgctcaatctgggatagtggacccaagtcatgctttgttt

SEQ ID NO: 164556 - DNA, 463 bp, Arabidopsis thaliana columbia
ctagagttaagttacatatagagtaaggaagagatggcagttaggtgtctagccgggttcctcgatgctctcatggtgtctcaagcaggcaccgcaacaagaccggctccaaccaagaatgtcggagctggtcttgacgaccaaaagaactttgtagcgttcgctggtgtcggtggagctgctggaattggtggagccggtggtgttggatactggactcggtggagcacccggtcgagtccatgctattggatgcgtgtcattcttgcgtccaaccggggaactgtcatggagctcggtattactcctattgttacatctggacttgtgatgcaactcttggctggttccaagattattgaggttgacaacaatgttcgtgaggatcgtgccctcttgaatggtgctcagaagcttctaggtattctgattgccattggtgaggctgttgcatatgttcttt

SEQ ID NO: 164557 - DNA, 427 bp, Arabidopsis thaliana columbia
gatcagagagacctcccattggagttgctatatgtatctctgctgccattggagctcctgcggttgcgggtttgtacactatactaagtccacttgggaaagattataatgattctaatgaagacgaggagaatcaactgaagcaacgtgaagaagggtctgttaatcgtcggtttactttagagaggaggtattcgtttgcctctgcttccacgggggttggggatgggatggttccggtgagtgatcctcagtggagtggtggaattttggatatttgggatgatatttcattggcttatctttctcttttctgcactttctgtgtctttggatggaacatggagagagttgggtttgggaacatgtatgttcacatagctacgtttattttcttctggttggcacctttctttatattcaactt

SEQ ID NO: 164558 - DNA, 415 bp, Arabidopsis thaliana columbia
gaacattgttgtcaaatacaacaaagaccagatcattcatgttaatctcactcaagacaacccaaggccattggaagcagggaaaaaaatggacctgacgtattctgtgcaatggattccaacaaatgtcacatttgctcgccgctttgacgtatatctggattatccgttctttgaacaccagatccactggttctccatctttaactcgttcatgatggttattttcctcaccggtttggtctcaatgatattgatgaggactctcagaaatgattatgcgaagtatgctagagaagatgatgatcttgagagcttggaacgggatgtaagtgaagaatctggttggaaacttgtgcatggagatgtgttcaggccagcaagtagtctagttctgctctcagcggtagttggt

SEQ ID NO: 164559 - DNA, 447 bp, Arabidopsis thaliana columbia
cgccgattctctctctctctctctcgagtctctcgacggtcgcatatcaaaagtccatttctttcttctctttggaggatcagcaactatggatgaagagtacgaagtcatagttctgggtactggtctcaaggagtgcatccttagtggtcttctctccgtcgatggtcttaaggtacttcacatggacaggaatgactactacggtggagagtcaacttctcttaatctcaatcagctgtggaagaagttcaggggagaagagaaggctcctgctcatttaggttctagcagagactacaatgttgacatgatgccaaagtttatgatggctaacggaaagcttgttcgtgtccttattcataccgatgtgaccaagtacttgtcttttaaagctgttgatggaagctatgtttttggccaaggcaaggtccaaaaagtgccagc

SEQ ID NO: 164560 - DNA, 456 bp, Arabidopsis thaliana columbia
gtgacttcttctgtaaccatttttctattccgatcaaaccatggcgtatttagctccgatttcttcatccttatccatattcaagaatccccaactctcaagattccaattttcttcttcctcaccgaacccacttttccttcgacctaggattcagattctgagtatgaccatgaacaagtcgccgtctttagtggtggttgcggctactactgcggcagagaagcagaagaagaggtatcctggagaatcaaagggttttgtggaggagatgaggtttgtggctatgagacttcatactaaagatcaagctaaggaaggtgagaaagagactaaatctattgaggaacgtcctgttgctaaatgggaacctactgttgaaggttacttgaggtttcttgtggatagtaaattggtttatgatactcttgaactgattattcaagactccaattt

SEQ ID NO: 164561 - DNA, 446 bp, Arabidopsis thaliana columbia
aaaaaaaacacaaaaagtttcaatggccgcctccacaatggctctctcctcccctgccttcgccggaaaggctgtgaacctttcccccgcggcatctgaagtcctcggaagcggccgtgtgacaatgaggaagactgttgccaagccaaagggtccatcaggcagcccatggtacggatccgaccgagtcaagtacttgggtccattctctggcgagtcaccgagctaccttaccggagagttccccggagactacggatgggacaccgctggactttcagctgatcccgagacattcgcaaggaaccgtgagctagaagttatccacagcaggtgggctatgctcggagccctaagctgcgtcttccctgagcttttggctaggaacggagtcaagttcggagaggcggtttggttcaaggccggttcacagatctttagcgatg

SEQ ID NO: 164562 - DNA, 454 bp, Arabidopsis thaliana columbia
caaaacacataacacaatgggggcaccaatggcctctttccttgtcttagcattctcccttgcttttgtctctcaaaccaccgcaaattacttctactcttcccctccaccaccggttaagcattactctcctcctcctgtttacaagtccccaccaccaccggttaagcactactcgcctcctcccgtttacaagtccccaccaccaccggttaagcactactcgcctcctccggtttacaagtctcccccaccaccggttaagtactactcccctcctccggtttacaagtcttccccaccaccggtttacaagtctcccccaccaccggttaagcactactcccctcctccggtttacaagccactccccaccaccacccaagaagcactacgaatacaaatctccttctccttcggtccattactcttcacctacgggataccattcttc

SEQ ID NO: 164563 - DNA, 454 bp, Arabidopsis thaliana columbia
gatctctctacttcaataaatctccaccttactttaagaacaagaaaaacacagtattaacaaatggcaggaatcaaagttttcggtcacccagcttccacagccactagaagagttctcatcgctcttcacgagaagaatgtcgactttgaattcgttcatgtcgagctcaaagatggtgaacacaagaaagagcctttcatccttcgcaacccctttggtaaagttccagcctttgaagatggagacttcaagattttcgaatcaagagcaattactcaatacatagctcatgaattctcagacaaaggaaacaaccttctctcaactggcaaggacatggcgatcatagccatgggcattgaaattgagtcgcatgagtttgacccagttggttcaaagcttgtttgggagcaagtcttaaagcctttgtatggtatgaccacagacaaaa

SEQ ID NO: 164564 - DNA, 146 bp, Arabidopsis thaliana columbia
attagccagtcatatgttagctttatggctactgtttgtgtgaatggtcagtaagcacacctatagcaatgtcgttggtgattcgtttcaacactagaacaggatttaacccagtttttggttatggatcatcaactatatcttag

SEQ ID NO: 164565 - DNA, 229 bp, Arabidopsis thaliana columbia
catctctctcatcatctttggccatggcaaaagacttggatgtgaacgagagtggaccaccggcggcgcgagactacaaggatccgcctcccgcaccatttttcgacatggaggagcttatgaaatggccgctttataatgcgtcggtgcgcgccgtcgcagctgatccagatagaccaatctggttgccgggaagtactcctccatagtggctaaacggtgtcctttc

SEQ ID NO: 164566 - DNA, 402 bp, Arabidopsis thaliana columbia
caacaacactaagcaaaaaagaaaagctcaagccgagagagacaatggcatcaacattcacgagctcaagcagtgttcttaccccaacaacattccttggccagactaaagcctcaagctttaacccccttcgtgatgttgtctctctcggatctcccaagtacactatgggaaatgatctttggtatggacctgacagagtgaagtacttaggacccttttccgttcaaactccgtcttacctcaccggagaattccctggcgattatggttgggacaccgccggtttatccgcagaccctgaagcctttgccaaaaacagagctcttgaggtgatccatgggagatgggcaatgttgtgagcctttggttgcataacccttgaagttcttaaaagtgttt

SEQ ID NO: 164567 - DNA, 406 bp, Arabidopsis thaliana columbia
cttgacagaccgcttctggtccgaagcttttgatacctgagactgaatctatccattgcaggtcaacatgattattgctaagaacacagcatactcatgtctgtattaatatattgcccataagatagtattaatttatgtagtagttttcatgtttctgtctttgtatcctcctccttcacttgtgtcccatatttgagaacaaacaaagctgtataatcaggtttttcgtatagatgtttttttccgcttaaaaaaaaaaaaaaaaaaagaacaaaaattaaaaaaaaaaaaactgaaaaaaaccaaaaagaaaaaaaaattaatcacattgaaaaaaaattcaaaatttaaaacaaatggctgaccagctaaaaaggacccaacctaatggccctttccaaca

SEQ ID NO: 164568 - DNA, 373 bp, Arabidopsis thaliana columbia
aggaattgctgaccgtatgagcaaagagatcaccgctcttgcacctagcagcatgaagatcaaggtggttgcaccgccagagagaaaatacagtgtctggatcggaggatcaatccttgcatccctcagcaccttccaacagatgtggatttcaaagagtgagtacgatgagtcaggtccatcgattgttcacaggaaatgcttctaagtgtgtcttgtcttatctggttcgtggtggtgagtttgttacaaaaaaatctattttccctagttgagatgggaattgaactatctgttgttatgtggattttattttcttttttctctttaaaaccttatggttgtgtcaagaagtcttgtgtactttattttt

SEQ ID NO: 164569 - DNA, 460 bp, Arabidopsis thaliana columbia
tggagacccttctctcccctcgtgcgctctctcctcctctcaatcccaaacctttgtcccttcaccagaccaaacccacttcacattcattgtctctctcaaaacccaccaccttctccggtcctaaacacctctccacccggttcactaaaccggaatcaagaaactggttaatagatgcaaagcaaggactagctgctttagctttatctctaactctcactttctcacctgttggcactgctttagcctctgagttcaatatcctcaacgatggtccacctaaagaaacttacgtagtcgatgacgctggtgttcttagtcgagtgacgaagtcagatcttaagaagcttttgtctgatcttgaatacagaaagaaactgagactcaatttcatcactgtccgaaagctcaccaataaagcagatggcgttgagtatgcagaccaggttttggaaaa

SEQ ID NO: 164570 - DNA, 458 bp, Arabidopsis thaliana columbia
tgaaggtcaacaacgtcgagaataatggcatcatctctttgtgcttcttctgccatcgctgccatttcttctccaagtttcttgggtggtaagaaactgaggctgaagaagaagttgactgttccagctgtgtccaggccagatgcgtcggtgcgcgccgtcgcagctgatccagatagaccaatctggttcccgggaagcactcctccagagtggctagacggtagcctccctggtgacttcggatttgatcctcttggtctttcatcggacccggacagtctaaaatggaacgtacaagccgagatagtccactgccgatgggctatgctaggagccgccgggatattcatcccagagttcctaacgaagatcggaatcctcaacacttcgtcatggtacacggcgggagagcaagagtatttcacggacaaaaccacactctttggtcgtgagct

SEQ ID NO: 164571 - DNA, 454 bp, Arabidopsis thaliana columbia
cacgcgtacgctatggagaggaaacactgccaatgttatccgttatttccccactcaggccttgaactttgccttcaaagattacttcaaaagacttttcaactttaagaaggacagagatggttactggaagtggtttgctggtaacttggcatctggaggagcagctggtgcctcttcccttctgtttgtgtactcccttgactatgcccgtacccgtctagctaatgatgccaaggctgcaaagaaaggaggtggaggaagacagtttgatggtcttgttgatgtctacagaaagacacttaagactgatggtattgctggtctgtaccgtggattcaacatctcatgtgttggtatcattgtctaccgtggtctgtactttggactctatgactctgggaagcctgttctcctcactggtgacttacaggacagtttcttcgctagtttc

SEQ ID NO: 164572 - DNA, 99 bp, Arabidopsis thaliana columbia
aggacaaggcaattttaaattaccaatgtgttgtacatcataaaaaaaaaaaaagggaacaaaagaggacaagatccaatccacaattacacaaagggg

SEQ ID NO: 164573 - DNA, 392 bp, Arabidopsis thaliana columbia
aaaaaaaaacgatcacgaagatggcgaaagcaagctttattctactcggaactctcttcctcttcggagccatagcttcaattcaggcaaaagaagatctcaaggaggttactcacaaggtttacttcgatgtagagatcgacggcaaatccgctggtcgcgttgttataggactatttggcaaggcagttcctaaaactgcagaaaacttcagagctttgtgcacaggggagaaaggtgtagggaagagtgggaaacctctacactacaagggaagcaagttccatcgaatcattcccagctttatgatccaaggaggtgacttcacgcatgggaacggtatgggtggagaatcaatctatggtcagaagtttgctgatgagaactttaag

SEQ ID NO: 164574 - DNA, 451 bp, Arabidopsis thaliana columbia
gtcttatcatttatctctctaacggcgaggcaatgggttttccggtgggatattctgagctacttctcccaaaaatctttttctacttgttatctttcttaggtttgatacgtaaactcatctccacaatgttcaagatcattggtctaccagatttcttacaacctgaaccggtttcaacctcatggcccgacccaccacccacgttgaccaaacctgactcagcagcaatactagccggagagatgttaccggttgttcgattctcggatataaaccgaccggaatccgagtgttgcgcagtgtgtctctacgatttcgagaacgacgacgagatccgacggctgacgaattgtcgacatatatttcatcggggatgtttggaccgttggatgatgggttataatcagatgacgtgtccactttgtcgtacacagtttatacctgatca

SEQ ID NO: 164575 - DNA, 372 bp, Arabidopsis thaliana columbia
ctggaattaccggtggctttggttcttctcgccgtggtggcaccaaatttgattgctggcacattcagagacagttggattggtttagctatatgtttaggtattggatgttacttgcttcaagaacacattagagcttcaggtggattcagaaatgcatttactaaagccaatggtatctccaacaccgtcgggatcatctgtctcgtcgtcttccccgtctgggctcttatcttttaagttaactcttcagtttctttttccatttgtctttttttttttcatgtaagagtgattgctttgtacgatctgtctctcctggtaactctatcaatgaatgtgatttgaataagaattgcttcagcaataaga

SEQ ID NO: 164576 - DNA, 374 bp, Arabidopsis thaliana columbia
attacatcgtccctgagttgggccctgaggttaacttctcttacgcatcccacaaggcggtgaatgagtacaaggaggccaaggctcttggtgttgacaccgtccctgtacttgttggcccagtctcttacttgctgctttccaaggctgccaagggtgttgacaagtcattcgaacttctttctcttctccctaagattctcccgatctacaaggaagtgattaccgagcttaaggctgctggtgccacctggattcagcttgacgagcctgtccttgttatggatcttgacggtcagaaactacaggcctttactggtgcctatgctgaacttgaattaactctttctggttagaatgttcatgttaagacc

SEQ ID NO: 164577 - DNA, 443 bp, Arabidopsis thaliana columbia
cgaaattcgtattctctcatttcttctacggagatttgcatcgaagaaactgactcgcttgtggaatcaacaacaagacgatgtggcgctgcgtctctcgtggctttcgagctcctgcttcaaagacctcttcactctttgatggcgtctctggatctcgcttttccagattcttctccactggttctaccgatacgagatcctcttatacgatagtggatcacacttatgatgcggttgtggtgggagctggtggtgctggtcttagggcggcgattgggttatcggagcatggctttaacaccgcttgcattactaagcttttccccacaaggtcacatactgttgctgctcatggtggtattaatgctgcactgggaaatatgtccgaagatgactggagatggcacatgtatgacactgtcaaaggaagtgactggcta

SEQ ID NO: 164578 - DNA, 374 bp, Arabidopsis thaliana columbia
acaatggcttcctctatgctctcttccgctactatggttgcctctccggctcaggccactatggtcgctcctttcaacggacttaagtcctccgctgccttcccagccacccgcaaggctaacaacgacattacttccatcacaagcaacggcggaagagttaactgcatgcaggtgtggcctccgattggaaagaagaagtttgagactctctcttaccttcctgaccttaccgattccgaattggctaaggaagttgactaccttatccgcaacaagtggattccttgtgttgaattcgagttggagcacggatttgtgtaccgtgagcacggtaactcacccggatactatgatggacgggactggacaat

SEQ ID NO: 164579 - DNA, 383 bp, Arabidopsis thaliana columbia
gagaatcaaaacaatggccactgtgaaaatctctctttccttggcttcgctatcaccatcttcttcttcttcttcaattcaatctaagttatcaccatctttcattcccaatgcggcacctgcaaaggcggtgaagttgcgattcaatggaaagtccctgagagcaaaaccaatggtatacagatcatctcgctccgttggagtcacctgctctgcttcatcttctctgacgactcttccctctgctcttctcttcgattgcgatggcgttcttgttgataccgagaaggacggtcacaggatctccttcaacgacactttcaaagagagagatttgaatgttacgtgggatgttgatttatacggcgagttacttaaaatcg

SEQ ID NO: 164580 - DNA, 460 bp, Arabidopsis thaliana columbia
gagaaagagagaaagagagacagagataatggcgtacagtgcgtgtttcctacaccagagcgcattggcttcatcagccgcacgatcatcatcttcctcctcatcccagcgtcacgtgtcgctctccaaacctgttcagatcatctgtaaagctcaacagtctcatgaagacgataactccgccgtctcccgccgtcttgctctcactctcctcgtcggcgccgctgctgttggttccaaagtatctcctgctgatgccgcctacggtgaagctgcaaacgtgtttgggaagccaaagacgaacacagacttcttgccatacaatggagatgggttcaaagtgcaggttccagcaaaatggaacccaagcaaagagattgagtatccaggacaagtccttaggttcgaagacaacttcgatgctactagcaatctcaatgtcatggtcactcctaccgac

SEQ ID NO: 164581 - DNA, 459 bp, Arabidopsis thaliana columbia
cccagtgaaatgatcaagtgtgttgaagtcttcaaagggttttatgaaacgaaaacgaaacacaggaagcttacgtggatctattcactgggaacttgtcacataaacgggaagtttgatcaaaaggccatcgagttaatagtgtctacttaccaggctgctgtgcttctactctttaacacaactgacaagttaagttacactgagatcttggctcaactgaacctaagccatgaagatctagttaggttgcttcattccttgtcatgtgctaagtacaagatactccttaaggagccaaacaccaagactgtctcccagaatgatgcctttgagttcaactccaaattcaccgatagaatgcgcagaatcaagatccctcttcccccagttgatgaaaggaagaaagtcgttgaagatgtcgataaagacagaagatatgcaattgatgctgccatt

SEQ ID NO: 164582 - DNA, 439 bp, Arabidopsis thaliana columbia
ctcaaaccatgctgcttacttcaggcgtcaccgccggccattttttgaggaacaagagccctttggctcagcccaaagttcaccatctcttcctctctggaaactctccggttgcactaccatctaggagacaatcattcgttcctctcgctctcttcaaacccaaaaccaaagctgctcctaaaaaggttgagaagccgaagagcaaggttgaggatggcatctttggaacgtctggtgggattggtttcacaaaggcgaatgagctattcgttggtcgtgttgctatgatcggtttcgctgcatcgttgcttggtgaggcgttgacgggaaaagggatattagctcagctgaatctggagacagggataccgatttacgaagcagagccattgcttctcttcttcatcttgttcactctgttgggagccattggagc

SEQ ID NO: 164583 - DNA, 456 bp, Arabidopsis thaliana columbia
cttcactctctctaatcaaaaagcttttaacctcagccgttaaatctttctccgatcatgccgaccagaaacatcgccattggtggagtccaagaagaggtctatcaccccaacgcacttagggcggcgctcgctgagtttatctcgactttgatcttcgtcttcgccggctcaggctccggaattgctttcaacaagatcactgacaatggagcaaccactccttccggcctcgtcgccgctgccttagctcatgctttcggtctctttgtcgctgtctctgttggcgctaacatttccggtggccacgttaaccctgccgttaccttcggtgtcttactcggtggtaacatcactctcctccgtggtattctctactggattgctcagcttcttggctccgtcgccgcttgtttcctccttagctttgccaccggtggcgagccaattccagcg

SEQ ID NO: 164584 - DNA, 448 bp, Arabidopsis thaliana columbia
cgaaaaaaaaaaaaaaatggtaattctcagcaacgtctcgttgttctcctgctgcaacatctctcagaaaccatctctcttttctccgtcttctcgtagttctcattgtcccattcgttgctcacaggcacaggaagggaaagaagtggttaccagtcctttgagaagtgtggtttggtcattaggagaagaggtttcaaagagaagtctatttgcacttgtctctgcttctctcttctttgttgatcctgctcttgcttttaagggttgaggtccctatggtcaaggagtcaccaggggacaggacttatctggcaaagatttcagtggccagactcttatcaggcaggacttcaaaacgtccatcctaaggcaagccaacttcaagggtgcaaagttgttaggtgctagcttctttgatgcagatctaacaggtgctgatttatcg

SEQ ID NO: 164585 - DNA, 403 bp, Arabidopsis thaliana columbia
aaacactaaaagtagaagaaaaatggcgactcttaagggttctgattctggtcctgctccttctgatgatgctgagcaattgagaaccgcttttgaaggatggggtacgaacgaggacttgatcatatcaatcttggctcacagaagtgctgaacagaggaaagtcatcaggcaagcataccacgaaacctacggcgaagaccttctcaagactcttgacaaggagctctctaacgatttcgagagagctatcttgttgtggactcttgaacccggtgagcgtgatgctttattggctaatgaagctacaaaaagatggacttcaagcaaccaagttcttaatgagttgcttgcacaaagacatcaacgcagctgcttcacgctaggcaagcttaccatgctc

SEQ ID NO: 164586 - DNA, 457 bp, Arabidopsis thaliana columbia
tcacattcctttactcactctctctctctctctaaaaacagagctcaacaataatgatccactaaaaaagattctcttttctcttcttctccggtgatttacttacttaacaatcatggcgtcgtcggagggattagcaagcgttgatccttggtcattccgtcaaaacttcaacatcgattcgtggctactctctgattccttctcacacgacagtgatatactcgctaaagctcttcacagatccatctccacttccaccgaatcatctcctctttctccttcatctttcttcgactcttcaaccgccgccgtcgatttttctcctcctcaaactctctccaacgtctctttcggctcagatccagaaatccccgccgctagtgctcttggtctcgggaaacgaaaacgtggtcctggtgtttccggtggtaaacaaacgaaacgccgatctcga

SEQ ID NO: 164587 - DNA, 445 bp, Arabidopsis thaliana columbia
attcgttattagtgtggtaagaaagaaaaccctaaaccaccggaaatcgatttgtttggaagatggatatcgagcagaagcaagccgagatcattgatcagctcgtgaagcgagcttctacttgcaaatccgaggctctgggcccgctcatcatcgaagccacatcgcatccttctctcttcgccttctccgagattttggctctacccaatgttgcccagcttgaaggaaccacagattctgtgtacctggatctactacgcttgtttgcccatggcacctggggagactacaaatgcaatgccacccgtcttccgcacttgtcccctgaccaaattcttaagcttaagcagctcactgtcctcacccttgctgagtctaacaaggtattgccctatgatacactaatggtcgagttagatgtttccaatgttcgcgaactcga

SEQ ID NO: 164588 - DNA, 298 bp, Arabidopsis thaliana columbia
atctgagatcggaaacgacaaacctaattttcccgaagaatcgagaccattatgtggaggagaatcgtttcatcgcatcttaaatccatctccgccgtcgggtcctgcgcggctccgtcgtgcaggcacgccgtcgtagagtccactcacctttctctctcgactcgtgcatcctccattcccgcatattcctccatattctctcgtttaatcggctccgctgcagcggatactgctgtgaagaagcgtggggaagatgagatgcctatggcaaccggtcacgagaaggcggcactac

SEQ ID NO: 164589 - DNA, 464 bp, Arabidopsis thaliana columbia
caaatacacaacttgtaacttcaaatagattactttcaaagaagagagagagaaagaaagatggagaagaacatgaagtttccagtagtagacttgtccaagctcaatggggaagagagagaccaaaccatggctctaatcaatgaagcttgtgagaattggggcttctttgagatagtgaaccatggattaccacatgacttaatggacaagatcgagaagatgacaaaggaccattacaagacatgccaagaacaaaagttcaatgacatgctcaagtccaaaggtttggataatcttgagacagaagtcgaagatgtcgattgggaaagcactttctacgttcgtcacctccctcaatccaatctcaatgacatttcagatgtgtctgatgaatacaggacggccatgaaagactttggtaagagactggagaatcttgctgaggatttgttggatctact

SEQ ID NO: 164590 - DNA, 387 bp, Arabidopsis thaliana columbia
cggacgcgtgggctccgaactgttgtaacttttttgattttgagagaaacatgaccttttgtttattgattgttttgttgtatttagattaaattcatcttgcaattgtacccctttttttctgtcccacgatgaaactagtacacaagaaattagagagacaaactaaaaaatatatacacaaaactaagaaaataaactaaaaaaataaataaaatgaaacaataaaaagaacatgaaattaaaataaaactgtgacaaatggctgaagaatgaaccgtccacatcaaggacctagcaatttacaaaaaataggggggggcctttttaaggtaccaaatttaaaattcctgtctttccaaccttttaattttttttaggggcccc

SEQ ID NO: 164591 - DNA, 453 bp, Arabidopsis thaliana columbia; identical to SEQ ID NO: 129773
  unsure (1)..(453): unsure at all n locations

SEQ ID NO: 164592 - DNA, 350 bp, Arabidopsis thaliana columbia
tgcgagtttgcggatctttggcttaatgagatggaagagtacaacaaagagaacaagaaggaagctgataacgcaaagtagaaagaaagaagtaagaggtatgttgttacttaccaacacgagtagtgaacttcctttacatagtgttggctttgtagagccagggatcattagtcttgtggagggctatggagttttttttaatttcattgaattcgttaaatcattcgcaaacactattagtacctatattgaggtcatatggtataataaccctattcgtttgtttatttgttgtgttttgtacctttgatggtattttatttgtataattgatatgtgaatttatg

SEQ ID NO: 164593 - DNA, 332 bp, Arabidopsis thaliana columbia
caagacaaaagttagtgaaatcaaaaagcaggttcttgggtctgatagtgagtgagtagttttgcttcttttttttttgctagcagaaattattccccacaagttttgttttttccactgatttttaagttttgtttttttatgccttgtggtagttttctatggcagtgtggagaaaatgattggattttagaaaaaaaaaaaaaaaaaaaaaaaaaaaaaaaaaaaaaaaaaaaaaaaaaaaaaaaaaaatataaaaaaatattatgggctgccctattaaagggatccatttttttcttaacttgttgaattctacatctgtttcttat

SEQ ID NO: 164594 - DNA, 458 bp, Arabidopsis thaliana columbia
gtattaaaaaacgaaaccccaattttacgtttccacatcaaagtgaaatagagaacttcattctctttttttttcatttcatgcctattggcgttccaaaagtaccttttcgaagtcctggagaaggagatacatcttgggttgacatatagtgcgacttgtcagatatatcgggctatatgggatttccccattttctccctcgatcgagatatcctctgtttcgctcaaaaagattgattgaattatcaaaaatttgtaacgcgaagcgcaaaaaataaagtggaattaaatgcagggagtatttagattgatattagattatcaaaatttttttatggtttacgtgatcggactaataaaatgaagtatccaggctccgtttagcaaaaacccaattgataattaatatataatatttttataattactacttctattatatgcaaaattatgat

SEQ ID NO: 164595 - DNA, 459 bp, Arabidopsis thaliana columbia
agaaaagtcattgaaaaccaaaaaaaaaagaagaagatcaaaaaaaaaaggatgtcagaagaagaagtggtggtgttgaacttctggccaagcatgttcggagcaagagtgatcatggcattagaggagaaagagatcaagttcgagtacaaggaagaagatgtgtttggtcagaagaccgatctattgctccaaagcaacccggttaacaagaaaattccggttctcatccacaacggtaaaccggtatgcgagtccaatatcatagtcgaatacatcgatgaggtctggaaagacgataagactctccgtctactaccttctgatccttatcagaagtcacagtgtagattttgggctgatttgattgacaaaaaggtttttgacgctggaagaagaacgtggacaaagaggggcaaagaacatgaagaagcgaaacaagagttcatagagatattg

SEQ ID NO: 164596 - DNA, 451 bp, Arabidopsis thaliana columbia
aaagtgaggaagatacactgaagcaaaagagcaagtcatggcggcgacatcttcctctgcttttctccttaatccgttgacttctcgccaccgtcctttcaaatactcgccagagctctcttctctctccttatcctctcgaaaggctgctgctttcgatgtttcctcagctgctttcacgctcaagagacagagccggagtgatgttgtgtgcaaggctgtatctatcaagccagaagctggtgttgaagggctcaatatcgccgataacgccgctcagcttattgggaaaactccgatggtgtacttgaacaatgtagtcaagggctgtgttgcaagtgttgctgctaagcttgagatcatggaaccatgttgcagtgtcaaggataggattgggtacagtatgattactgatgctgaagagaaaggacttataacacctggaaagagt

SEQ ID NO: 164597 - DNA, 458 bp, Arabidopsis thaliana columbia
  unsure (1)..(458): unsure at all n locations
cactgaagagagaaagcttgaagacggcgagagctccatcttttctcaggcatctcttatcttcaaatcacaatgtctctggttgcaaatgaggagtttcagcacattttgcgtgtgctcaacactaacgttgatggtaagcaaaagattatgtttgcccttacctctatcaaaggtattggaaggagattggccaacattgtctgcaagaaagccgatgtcgacatgaacaagagggctggtgagttatctgcagctgagattgacaacctcatgactattgttgcaaacccaagacagttcaagattccagactggtttttgaacagacagaaagattacaaggatgggaagtactctcangttgtctccaatgcccttgacatgaagctcaaggatgatcttgagcgtctcaagaaaatcagaaaccaatgtggtctgagacattactggggtct

SEQ ID NO: 164598 - DNA, 455 bp, Arabidopsis thaliana columbia
gacgaacaacaacaacaccaacagaagacagaaatggcaaccgcagctctctccgccgcccgacccaaccgccttagctcagcctcctccgatgttcctctccaccccctatatctccctaccaagctccaatttccttcccgtaagactcagctgtggcgctccgccgcgattctcttacccacacggcggcgatgcgctccgcctagagctagttctcgcgccgacgattctccacccttcgatatgtctgtggagacggcgcttaaggttctcggagtctccgaaggagcttccttcgacgaaattcttcgtgccaagaaatcgatcctggcttctcgtaaggacgaccccaacgccatctctcaagctgaggctgcatatgacatgctgctgatgcagagcctaaaccaacgccgagcaggaaaagttgaagcaacaacattcgctacgct

SEQ ID NO: 164599 - DNA, 403 bp, Arabidopsis thaliana columbia
aattgggtcttttctctctctgaggcatgtcacctgttgctaaagtctctgagtttcacagagaagggaacgattggttttgcaagacaggactgtcaagtgatatcactgttgttgttgatgatgtgaagttccatcttcataagtttccattggtttcaaaatgtggaaagctagcaaggatgtatgaagattctaaaagcactgataagcaatctctctggacaacagtccttgaagagttccctggtggtgcagacaatttcttgatagttgcgagattctgttacggggctcgagtagatatcacctcggaaaacttagtttccatacactgtgcagctgagtaccttgaaatgacaaatgaatatggggaagataacttgatttcccaagttgaaac

SEQ ID NO: 164600 - DNA, 438 bp, Arabidopsis thaliana columbia
  unsure (1)..(438): unsure at all n locations
gcaaaagaagaagagaaacaacaagaagtagtaatggcttcctctatgctctcctccgccgctgtggttacatccccggctcaggccaccatggtcgctccattcaccggcttgaagtcatccgctgcattcccggtcacccgcaagaccaacaaggacatcacttccatcgcaagcaacgggggaagagttagctgcatgaaggtgtggccaccaattggaaagaagaagtttgagactctatcttacctccctgaccttagtgacgtcgaattggctaaggaagttgactaccttctccgcaacaagtggattccttgtgttgaattcgagttagagcacggatttgtgtaccgtgagcacggaaacactcccggatactacgatggacggtactggacaatgtggaagcttncattgttcggatgcaccgacttc

SEQ ID NO: 164601 - DNA, 457 bp, Arabidopsis thaliana columbia
ttttgaagaagttcatatgcgttgcggatcttcgtactcaaattgctgggtatttatatggtattagtcccccggataatccccaggtgaaggagatccgttgtgttgtgatggtgccacagtggggaaatcatcagctagttcacctgccgtcatctcttcctgagcatgatttcctaaatgatcttgagcccttgggatggttgcacacacagcctaacgagctgcctcagctatcaccacaggatgtaacctctcattcccgtattctggagaacaacaagcaatgggatggagaaaaatgcatcatcctgacctgcagtttcactccgggctcctgctctttgacgtcatataagttgacccaaaccggatatgaatgggggcggcttaacaaggacaatggcagcaatcctcacggttaccttcccacccattatgaaaaggttcagatgct

SEQ ID NO: 164602 - DNA, 456 bp, Arabidopsis thaliana columbia
gatccttctctcatcctcagaaagaatggctcaaaccatgctgcttacttcaggcgtcaccgccggccattttttgaggaacaagagccctttggctcagcccaaagttcaccatctcttcctctctggaaactctccggttgcactaccatctaggagacaatcattcgttcctctcgctctcttcaaacccaaaaccaaagctgctcctaaaaaggttgagaagccgaagagcaaggttgaggatggcatctttggaacgtctggtgggattggtttcacaaaggcgaatgagctattcgttggtcgtgttgctatgatcggtttcgctgcatcgttgcttggtgaggcgttgacgggaaaagggatattagctcagctgaatctggagacagggataccgatttacgaagcagagccattgcttctcttcttcatcttgttcactctgttggg

SEQ ID NO: 164603 - DNA, 454 bp, Arabidopsis thaliana columbia
ggataacacaataattgacctggttgaaaaatatgggccaaagaaatggtctactatatctcagcatttacctgggcgcataggaaagcaatgtagggaaaggtggcataaccatcttaaccctgggattaataaaaatgcatggactcaggaagaggaactgactcttattcgtgcgcatcaaatttatgggaataaatgggcagagcttatgaaatttttgccaggaaggtcagataattcgataaaaaatcattggaacagctcagttaaggagaagttggattcctactatgcatcaggtcttttagatcagtgtcaaagctcgccattaattgcccttcagaacaaatctatcgcttcatcttcctcgtggatgcacagcaatggagatgaaggtagttcaaggccaggggttgatgctgaggaatcagaatgcagccaagcttcaact

SEQ ID NO: 164604 - DNA, 454 bp, Arabidopsis thaliana columbia
ggttattctcagaaccctcagcagatgcaactccagcaacaacatcaacaacaacagcagcagcaacagtggtcaagacgccctcagcttcctggaaacgctagtaacgctaatgaggtggttcagcagacgacccagcccgaagctagcagcgatgctaatggtcaagactggaaggctacgttaaggctaccacctcctgatactcgttatcagacagcggatgtgacagctacaaagggaaatgaattcgaagattactttctgaaaagagatctgttaaagggaatatatgagaagggttttgagaagccatctgcaattcaagaagagagcattccaattgctttaactggtagtgatattcttgctagagctaaaaacggtacaggaaagactggtgccttctgcattccagtcctcgtgaaaattgacccaaataacaatgttattc

SEQ ID NO: 164605 - DNA, 461 bp, Arabidopsis thaliana columbia
aaaaaaagaaaacacaaaaacaaagattataatggcttcctcaaccatggctttgtcctcccctgccttcgccggaaaggctgtgaagcctgccgcatcagatgtcctcggaagcggccgtgtgaccatgaggaagactgtcgccaagccaaagggtccatcaggcagcccatggtacggatctgaccgagtcaagtacttgggtccattctccggcgagcccccgagctaccttaccggtgagttccccggtgactacggatgggacaccgctggtctatccgccgacccagagaccttcgccaggaaccgtgagctagaagttatccacagcagatgggccatgctcggagccctaggctgcgttttccctgagctattggctaggaacggagtgaagttcggagaagcgggttggttcaaggccggttcacagatcttcagcgacggaggattggact

SEQ ID NO: 164606 - DNA, 456 bp, Arabidopsis thaliana columbia
cttcttctcttttcacagttctgtttctccctctctctaaatgatggcaaacaactgtaatttagtcagtgttctatgtgtaattttggtattgaccctctttcacaaccccatcactgtcgccggacagaatagtccggtggtcgccttgttcacctttggtgactccaacttcgacgccggaaacaaacagactctcaccaaaaccttagtcgctcaaggtttctggccgtacggaaaatctcgagatgatcccaacggcaaattctccgacggcctcatcactccggacttcctcgctaaattcatgaagattccgctcgcgatcgcgccggcgcttcaaccgaacgtcaatgtctcacgtggagctagtttcgccgtcgaaagtgctactctactcggagctccggtggaatctatgactctgaatcaacaagtgaaaaaattcaatcaaat

SEQ ID NO: 164607 - DNA, 247 bp, Arabidopsis thaliana columbia
ctccagaagattcttcgacttaatctgatgtgattaggaagagcaatagaggaagagaagaatcagaaaaaatggatccggcgactaattcaccgattatgccgattgatttaccgattatgcacgacagtgatcgttacgacttcgttaaagatattggctctggtaatttcggcgttgctcgtctcatgaccgattgagtcaccaaggagcttgatgctgttaaatacatcgagggaggagaaaa

SEQ ID NO: 164608 - DNA, 459 bp, Arabidopsis thaliana columbia
gaaaaatgtctgcgatactccaaggagctggagctgcaacggctctctcgccgtttaattctatcgattccaacaaactcgttgctccttctcgctcttctctttcagtgaggagcaagagatacattgttgccggatctgatagtaaaagctttggttctagcctcgtagctcgtcgctctgagccgttgataccaaatgctgttacgacgaaggcggacactgctgcgagctctacttcatcaaagcctggacatgagctattacttttcgaggctcttcaagaaggtctagaagaagagatggacagagatccacatgtatgtgtcatgggtgaagatgtaggccattacggaggctcatacaaagtaactaaaggcctagctgataagtttggcgatctcaaggttctggacactccaatctgtgaaaacgccttcaccggtatgggcattggag

SEQ ID NO: 164609 - DNA, 442 bp, Arabidopsis thaliana columbia
cttagagaaggcaacttcggctctcagcgaagccaaagaatccgttacaagcaccgctgaatccgtcacggcttctctcactgatgctgagaaaaccgttaaccaaaccgccaggagcactctaactgacgccgagacaaccgttgcagcatctgttgaaacggtcaagaccgaggctgcagccgcaccagacaaagcgtctggtgtgtctacacaggctaaggatgcagtggacaaagctttttctagaggtatagaaggagccaaatctttgcttcaaactttcgaagcgaagagcagcgatatttcctcaaagcttgttggaggtgttaccaatcttgtgagtggagcatcgagcagcaccgtggcaaaccgagaccttccagtatctacagacaaccagcctctgctagcgtctggtgaaaagacgccgtggtggaag

SEQ ID NO: 164610 - DNA, 448 bp, Arabidopsis thaliana columbia
gatcatatcaggagctcaacgtgtccatatcccagaagtcttggagcaacgtgcaggagaatgtggcattgatgtcaagacaatatccacatacattgattcattcaggtacggggcgcctctacacggtggatttggagtggggctggagcgagtggtcatgcttttctgtgcactgaacaacattcggaaaacatccctcttccctcgtgaccctcaaaggctttcaccctaatatcttttcaactgaaagctatttagtgaataattgtccaactccacaaatttttctcatgaagcttttagagatttttacttcttgttgtctaactctcctccttttttataagtgaatcttggtttttgttttgtgaaaaacaaaaaaaaaataaatacaaacaaaattatcttacttattaaaaaaaaactctatattattaaaaattta

SEQ ID NO: 164611 - DNA, 350 bp, Arabidopsis thaliana columbia
tagtggcctaccatggaggagctaagtgacggaggaacaacaaatggcggtgagattactccctacggtagcttcaagagaccgaggacttcgtcttcctcagctggtgagtataggaaggatagagaagagtggagtgatgcggcgattgcgtgtttgttagatgcgtattcggataagttcacacagcttaatcgagggaatctccggggaagagattgggaagaggttgctttatctgtgtgtaggggtgtagaaagggtcagatcgttggttcaaacttttgaaaccaagagcatcgattttacctcaaagcttgatgtaggtgttaccaatcttgggagtggagc

SEQ ID NO: 164612 - DNA, 217 bp, Arabidopsis thaliana columbia
attgcctacaagccaccaagcttcaccggttaatttccctttgcttttgtgtaaacctcaaaactttatcccccatctttgattttatcccttgtttttctgcttttttcttctttcttgggttttaatttccggacttaacgtttgttttccggtttgcgagacatattctatcggattctcaactgtctgatgaaataaatatgtaatgttctat

SEQ ID NO: 164613 - DNA, 453 bp, Arabidopsis thaliana columbia
ctcgtccacatctttctcctttggtggcaaacacaacgacagatagagagaaacgatggcgtcgaactcgcttatgagctgtggcatagccgccgtgtacccttcgcttctctcttcttccaagtctaaattcgtatccgccggagttccactcccaaacgccgggaatgttggtcgtatcagaatggctgctcactggatgcctggcgagccacgaccagcttaccttgacggttctgctcctggtgactttgggtttgacccacttggacttggagaagttccagcgaaccttgagagatacaaagagtcagagctcatccactgtagatgggctatgctcgctgttcctgggattttggtaccagaagcattaggatatggaaactgggttaaggctcaggaatgggcagcactaccagggggtcaagccacttacttgggaaacccagt

SEQ ID NO: 164614 - DNA, 453 bp, Arabidopsis thaliana columbia
catgtctcaagccgatttcggtcgtctcgaactcgagctcgccgaagttgagatgcctggactcatggcttgtcgtaccgaattcggaccttctcagccattcaaaggcgctagaatcaccggatctcttcacatgaccatccaaaccgccgtactcatcgaaaccctaactgctctcggtgctgaagtcagatggtgttcctgcaacatcttttccactcaagaccacgccgccgcagccatcgctcgtgactccgccgctgttttcgcctggaaaggtgagactcttcaggagtactggtggtgtaccgagcgtgctctagattggggtccaggtggtggtcctgatctgattgttgatgatggtggtgacgctactcttttgattcatgagggtgttaaagctgaggagatctttgagaagactggtcaagttcctgatcctacttctac

SEQ ID NO: 164615 - DNA, 257 bp, Arabidopsis thaliana columbia
acaaaccttaacttggattctttctggtcaccatggcttcggttactttctctgtccccaagggtttcactgaattctcaggattgcgaagctcctctgcttctcttcccttcggcaagaaactttcttccgatgagttcgtttccatcgtctccttccagacttctgcaatgggaagcagtggtggatacaggaaaggtgtgactgaggccaagcttaacgtggccattaatggattcggtaggatcggaaggaac

SEQ ID NO: 164616 - DNA, 444 bp, Arabidopsis thaliana columbia
aaatctcacaatcttttctctccaaattctcttctctctgaatcaatccaatcatggttgagccggcgaacaccgttggaattccggtgaaccacatcccattgttgaaggatgagctcgatatcgtgatccccacgatccgtaacctcgatttcctggagatgtggaggccttttcttcagccttaccatctgattatcgtccaagatggagatccatcgaagaccattgctgtccctgaagggttcgattacgaactctacaacaggaacgacatcaaccgtatccttggtcctaaagcttcctgcatttccttcaaagactctgcttgtcgttgcttcggctacatggtctccaagaagaagtacatcttcactattgatgacgattgcttcgttgctaaagatccatctggaaaagctgtgaacgctcttgagcaacaca

SEQ ID NO: 164617 - DNA, 309 bp, Arabidopsis thaliana columbia
gggatggtcttgagaacaaatctactgtacttatatatggaggaggagccattgttgctgtttggttatcttccattgttgttggtgccatcaactctgttcctctgcttccgaaagttatggaacttgtcggtctcgggtacactggatggtttgtctacagataccttctcttcaagtcaagcagaaagtaattggctgaggatattgaatccttgaagaagaagatcgcaggaagcgaatagattcattttcaaataaaaccagcttttctctctgtatgttttcctgtaatatcgcgttatatta

SEQ ID NO: 164618 - DNA, 454 bp, Arabidopsis thaliana columbia
gagtttacaggagcgagaagattccttcgtggctcaagacaagaaaattcattgcggctttgtcaaaggtcccaaaggatcttcaagcactgggtttgacctgacagaagatgatactaattatatcagtagatgccacatcgctgttagctcatgcatctttggcaattctgatcgtttgaggcctcctgccaacaaaatgataagtcgggtgtcgagaaaaaatgtatgctttattgtggtcgggggccagattaccatgccaacactttcttgagaaagacatgccccaaacagagcaagatttatttgtgtcttggaaatggtttttgtgaaaaatatttctttctcacatattccgaggggaggaaaaataccaaaaatgttgccacacacgacttttctcatcaacaaggtactcaatctgtgtggacagcaagttaccacttcagtt

SEQ ID NO: 164619 - DNA, 433 bp, Arabidopsis thaliana columbia
acgggcagattctcacatttgcaaacatgacgactcagatcagcaagaagagaaagtttgtagcggacggtgtgttctacgctgaattgaatgaggttcttacaagagagctagcagaggatggttactctggtgttgaggttagggttactcctatgaggactgagattatcatcagagctacacgtactcagaatgttctcggtgagaaggggaggagaattagggaattgacttcccttgttcagaagagattcaagtttccagttgacagtgttgagctttatgccgagaaggttaacaacagaggtctctgtgccatcgctcatgctgagtctttacgttacaagcttcttggtggtctcgctgttcgtagggcttgctaatgtgtgttgagcgtttgttattgatagttagactttttttttctttt

SEQ ID NO: 164620 - DNA, 458 bp, Arabidopsis thaliana columbia
atcaaaactttgtctcatcgcatctttttccccaaattctcacaaaccttctcttctcaattccaccaaaccctcagattctcaatctccgatcgtcggaaattctcagcgatggccggagctggcgtcgatgatttcgttaaaggaaatgtttttccgaatggtgtcgctctcatcactctcgatcgaaccaaagctctcaacgccatgaatttagatatggatataaagtataaaagctttcttgatgaatgggaatctgatccgagagtgaaatgtgttatcgttgaaggaagcacatctagggccttttgtgcagggatggatattaaaggagttgctgcagaaatccaaaaggacaaaaacacacctcttgtgcaaaaggtatttacagcagagtatacactgatatgtgcaattgctgcgtacaaaaagccatatatttcattgatggatgg

SEQ ID NO: 164621 - DNA, 447 bp, Arabidopsis thaliana columbia
aatttcttcttcagccggcgattaagcttcccaataagacaatctccgaccgccgcaacatcacgaaggattcttcaccgtgtgaactttacgcagtctttcctctttcgtagacgctaaagaagttgaaattgatctgatctcgtttagcagatctaccttcgattcgattcttctccttcctgatatcgcttcattgttcaaattcggcacaaaatggtttatcactcgagttttgtggatgaagaaggagtaacaaaggcatgttgttgtccattgcttcctctcaagagtcatataaaaggtcctgcacctgtttcagaacaagataaaactgatatagtagacgaggcaatcaccttctttcgtgctaatgtcttcttcacaaactttgatatcaaaagtcctgctgataagctccttatttacttgacgttttatataaat

SEQ ID NO: 164622 - DNA, 371 bp, Arabidopsis thaliana columbia
gtattcgctagtgcggctattgggaaacacattgtgatttttggaggtgaaattgcgatggacccgctagctcacgtgggtccaggtcaattgaccgatggaacttttgcattggacacagagacgttgcaatgggagaggctggataagtttggtggagaggaagagactccgagtagcagaggatggaccgcgtccacgactgctaccattgatggtaagaaaggacttgtgatgcatggtggtaaagctccaaccaatgaccgggttgatgatctcttcttttacgggattgactctgcctaattaaggcagatttggtgatcatgaacgtttgtgaatgtgagtgtttgtgagtgtttctttatttt

SEQ ID NO: 164623 - DNA, 435 bp, Arabidopsis thaliana columbia
gaaagattgaggaagctgctaaacttctttgttgggagaaaaagtatgaacacggtgagattgcaatttggcagaagagagtcaatgatgaggcatgccgatcaagacaagatgatcctagagccaatttctgcaaaaccgatgataccgatgatgtctggtacaagaaaatggaggcatgtattacaccgtatccggagacaagtagctcagatgaagtagctggtggtgagcttcaggctttcccagataggctcaatgcagtgccgcccaggatctctagcggttcgatctctggtgttactgttgatgcctatgaagacgataacagacagtggaaaaaacatgtgaaagcctacaagagaatcaacagtctacttgacactggaaggtaccgtaacatcatggacatgaacgcaaggtttggtggatttg

SEQ ID NO: 164624 - DNA, 442 bp, Arabidopsis thaliana columbia
acgcgagcggcagattactacatatgctaaaatgtttgatattatgaagaatgggaggaatcagggggctcaaggatggtctaagaagatttgcatggcgttcttacaagggaagaggcagggtatgatcacgccttcttctaaagttatcatcaagttccttatcgtcatgcaaaagcacggttacattggcgagtttgagtatgttgatgaccacaggtctggtaagattgttgttgagcttaatggaaggctgaacaagtgtggagttatcagtcctcgtttcgatgtcggtgttaaggagattgaaggatggactgctcgtctacttccttccagacagtttggtttcattgttctgacgacctcagcgggaattatggatcatgaagaagctaggataaagaactttggtggcaaaatttttggtttctttttctga

SEQ ID NO: 164625 - DNA, 455 bp, Arabidopsis thaliana columbia
cacattattctctctttttcttcacttttctatcgacaaataccaataccccttccgataacatgggtcatgaatggatcgatgcagagagggagttcaaatggagcgaggatgtcaaagttgaaagtgaagtgactgagatcgttcttgttcgccatggagaaaccacttggaatgctgccggaagaatccagggacaaattgaatcagaccttaacgaggttggactaaagcaggctgttgcaatcgctgagaggttgggaagaggaaagacctgtagctgtgtattcatcagacctcaaacgagccaaagacactgctcttatgatcgccaaaacttgtttctgtcccgaggtgatcgaagtacctgacttaaaggagaggcacgtgggtagtctccaaggcctgtattggaaagaaggagcagagaaagaacctgaagcttactctgcctt

SEQ ID NO: 164626 - DNA, 359 bp, Arabidopsis thaliana columbia
atttgcagaagagagaaaaacaaaaatggcggttctttgctcgtcttcgacggtgatactctcttcttcttccgtgaaatcctccggaagtgagagaaagtctccgtttttagggttctctttaacggctatctcgaagccgtcggtacgagtcggcatttatgcgaattcgaaaagaggattgcaagtgaagtgtgaagctgagccgacgacgacgacttctcttgttccggcgaatcaacgatggatgttcgacgaagaagaagctaatggccctgacatctggaacacgacatggtatccaaaagcttcagaccatgtgaacacggacaagccctggtttgtggttgatgcaactg

SEQ ID NO: 164627 - DNA, 420 bp, Arabidopsis thaliana columbia
caaaagacaaaaagatattgatgtctctccaacgacccaatgggaactcgagttcgtcttcttcccacaagaagcacaaaactgaggaaagtgatgaggagttgttgatggttcctgacatggaagcagctggatcaacatgtgttctaagcagcagcgccgacgatggagtcaacaatccggagcttgaccagactcaaaatggagtctctacagctaaacgccgccgtggaagaaaccctgttgataaagaatatagaagcctcaagagattattgaggaacagagtatcagcgcaacaagcaagagagaggaagaaagtgtatgtgagtgatttggaatcaagagctaatgagttacagaacaacaatgaccagctcgaagagaagatttctactttgacgaacgagaacacaatgc

SEQ ID NO: 164628 - DNA, 436 bp, Arabidopsis thaliana columbia
tttttcagcctcaaatctgacaaatcatattcacagcgatctccttcttccacatcgcaacccaatccctctctgtctcttcctcaattcttattctctctcgcaaaggtttggttttttgaagacagagaggagatttgagattttgggtttcaatggcggtttcaagtgctttcgttggttgtccaaagcttgagactttattgaatcaccataatctatctccttcttcttcttcttcgtcctctgtttcacagacaccattgggtcttaatggggttcgtgttcttccgaagaacaatagaaccagacgaggtttgatccaaaaagctcgttgtgagctctctgcttcttctgattctgcgtctaatgcagctagcatctttgctcttgaacaactcaagaactctgcagctgatcgatttacaaaggaaag

SEQ ID NO: 164629 - DNA, 457 bp, Arabidopsis thaliana columbia
ctaaaggacctcagattcgtgatcttagaagaggtgttgagattgtaattgctacacctggtcgtttgattgatatgttggaatgtcaacacactaatttgaagagagtgacttaccttgtactggatgaggctgacagaatgttagacatgggatttgaaccccaaattagaaagattgtatctcagatccgacctgatagacaaacacttctttggagtgcaacatggccacgagaggttgaaactcttgccaggcagtttctacgagatccatataaggccattattggatcaacagatctaaaagctaaccagtctattaaccaagtaatcgagattgtaccgacgccagagaaatacaacaggctccttacactacttaaacagttaatggatgggagtaaaatcctaatttttgtggagacaaagagagggtgtgatcaagtgactagaca

SEQ ID NO: 164630 - DNA, 328 bp, Arabidopsis thaliana columbia
gaaggaataagagcatttcctttacatagccggaaaggagagaagtacaaatccgttaagcttctcgtgaaggtggagtttgtgtgagacatgattaagaaagatacagcatttaaacttgtctggtaggtttgagtgccacagagtttgtgaatttggaggatttgtatgtgtgagagagaatgtatgcttgatttgttgtttgtaatattatgtacataaaagacgaaagtgagagagagagagacggtcttgtatcgtgtgttgttgtattattatgtagtagtctcgtgtaacacttgaatcgtatgatgatttgtggtttttg

SEQ ID NO: 164631 - DNA, 312 bp, Arabidopsis thaliana columbia
aaaaccctggacccttattctgctactctcatttgtagttgttaaactaaaataacccatttgtgttttaaatctaaaatggctagaaatttcgagctttctttgattctctttgttctgtatctgtccactgcagcaatagtcatggctcgaaaccttgaagaggaatcaagtggtgatacagagttcattaaagcctcttgtgagacgacgccgcacccagaccgatgctctcactctttgtcttcatatgcaagcgagatcaagaagctgtcacgttagcttcgctgcacctctcttgtcgaaaggata

SEQ ID NO: 164632 - DNA, 382 bp, Arabidopsis thaliana columbia
cactaaacctatcttcttaaccaaaagatcaatagattacaaaaatgcagggagctctgtttatcaaaccaactattcttcttcctcttccttcttcagtttcttctccaaaactcacttttcttcttcctcacgcaaccaaagcttcaagactctcatctctcagatcaaacaactcatcatcatcatcatccttaacgtctgaccctaacaccgtcgactataactcctccatcctttctgtttttccagctgaagcatgcgaagtaatcagtggatacgcttgttctgctgatatttaccctgaagtcaagctcgatacaaagcccgtctcacgtcccgtggcttcagagcccgttgacagagaatacgaagagtataa

SEQ ID NO: 164633 - DNA, 379 bp, Arabidopsis thaliana columbia
ttacctccctcacaccctaaaactcagcaacaatggccgttaccttttcagatctacacacagaggagggtgtcaaatccgtggaggagcacctcgccggaaaaacctacatctccggagatcaattgtctgtggatgatgtcaaggtttacgctgccgttccagtgaaacccagcgatgccttccccaatgctagcaagtggtacgagtccgtggcttcccaacttgctaaaagtttccctggaaaggccgttggagtacaattcggtggctctgctgctgctgctccagctgttgaagctgaggcacctgcagctgcagctgatgatgatgatgacatggatctctttggtgacgagaccgaagaagaaaagaaagc

SEQ ID NO: 164634 - DNA, 134 bp, Arabidopsis thaliana columbia
ctctttcaccacataaaaactcataaactcgatcgaaccaaagctaaacgaaaaacttaaaacccaaatcttatcactactctaaaagaatcttcatcatggcctcagtaacctcagccaccgttgcaatccca

SEQ ID NO: 164635 - DNA, 350 bp, Arabidopsis thaliana columbia
aaaggataaagagagacgccatgggaagaaaacctgctaggtggttaccgtcagaatcaggggtaggccatacccaaagtctcgctactgtcgtggtgtgccagatccaaaaatcaggatctacgatgttggtatgaagaggaagggtgttgatgagtttccattctgtgtccatttggtgtcatgggagaaggagaatgtgtcaagtgaagcacttgaagctgcccgtattgcttgcaacaagtacatggtgaagtctgctggaaaagatgcttttcattcgaggattaaggttcatcctttccatgttctcaggattaacaagatgctttcgtgtgctggagctgata

SEQ ID NO: 164636 - DNA, 352 bp, Arabidopsis thaliana columbia
  unsure (1)..(352): unsure at all n locations
acaacatccgccgccccaatacgttcaacgcggtaattacgctcagaatcaccaacaacagtttcaacaagcgccgtctcagccgcatcaataccaacagcaacagcagcaacaacaacaatggcttcgaagaggtcagatccccggcggtaacagtaacggtgacgctgttgtagaagttgagaaaactgttcaatccgaagttatcgacccaaactcggaagattggaaagcaaggctaaaactacctgcacctgatactcgatacagaacagaggatgtgacagccaccaaagggaacgagtttgaagattactttntgaaacgggagcttctcatgggaatatatgag

SEQ ID NO: 164637 - DNA, 419 bp, Arabidopsis thaliana columbia
agaacaacaaccaaacactcatttctccacatcttgagagaaaaaaacagagcaagtatattagagatctcatggcgatggcggtctccggagctgtcctcagtgggcttggttcttcgttcctcaccggaggcaagagaggtgccaccgcattggcaagcggcgtaggcactggagctcagagagttggcaggaaaactcttattgtcgctgctgcggctgctcagcctaagaaatcttggatccctgccgttaaaggtggtggcaacttccttgaccctgaatggctcgatggctcgctaccaggagatttcgggttcgacccattgggtttggggaaagacccggcttttctgaaatggtacagagaggctgagctgatccatggccgatgggcgatggcagcggttcttgggatc

SEQ ID NO: 164638 - DNA, 466 bp, Arabidopsis thaliana columbia
cctactcttaatactacatacctccagacacttcgtggacaatgtccccgcaatggtaaccagaccgtcttagttgatttcgatctacgcacaccgacggtttttgacaataaatactatgtgaatctgaaagagctaaagggacttatccagacggatcaagagttgttttccagccctaatgccactgacacaatccccttggtgagagaatacgctgatggcactcaaaaattcttcaatgcttttgtggaagcaatgaatagaatgggaaacattacacctctcactggaactcaaggacaaatcagacagaattgtagggtggttaactccaactcgctgctacatgatgtggtcgaaatcgttgactttgtcagctctatgtaacataacgttgtctcgatatatgtggcaaccaaaaatatgttttatgaaataaagtgttctcaaaatggttatgaag

SEQ ID NO: 164639 - DNA, 346 bp, Arabidopsis thaliana columbia
ccaactccaaagtgatcaaagagagaaagagatagagaatcgccatggcaaagatgtcagcactttctatcttcgccatctttatcatcctcgttctggttatctttgaaatacctgagatagaagcacatgatagcgagtgtctgaaagaatatgggggtgatgttgggtttggcttctgtgcgcctaagatatttccgacgatttgttatagaaattgccaaaaggacaagggggctaatggtggaaaatgcctctggggagagggcggtaaagtgaaatgcttatgccacttctgcagcaatgaatcttttaatcaggttataaggcttaccttgaaacttgc

SEQ ID NO: 164640 - DNA, 352 bp, Arabidopsis thaliana columbia
tttctctgatcatcacattattctctctttttcttcacttttctatcgacaaataccaataccccttccgataacatgggtcatgaatggatcgatgcagagagggagttcaaatggagcgaggatgtcaaagttgaaagtgaagtgactgagatcgttcttgttcgccatggagaaaccacttggaatgctgccggaagaatccagggacaaattgaatcagaccttaacgaggttggactaaagcaggctgttgcaatcgctgagaggttgggaaaagaggaaagacctgtagctgtgtattcatcagacctcaaacgagccaaagacactgctcttatgatcgccaaaa

SEQ ID NO: 164641 - DNA, 402 bp, Arabidopsis thaliana columbia
cggacgcgtgggtacagtcaaatcactcagagaaagctactaggtctctcctcgacatttgctttcaattcgatccagtaattttcttctcatcggagagagaaaaaaaaaatggaagacccgttgattggtagagatagtcttggtggtggtggtacggatcgggttcgtcgatcagaagctatcacgcatggtactccgtttcagaaagcagctgcactcgttgatctggctgaagatggtattggtcttcctgtggaaatacttgatcagtcgagtttcggggagtctgctaggtattacttcatcttcacacgtttggatctgatctggtcactcaactatttcgctctgctttttcttaactttttcgagcaaccattgtgggtggggaaaaaccct

SEQ ID NO: 164642 - DNA, 409 bp, Arabidopsis thaliana columbia
aaaaaaaagagagaagaaaaatggtgttgacaatctatgctcctttattcgcttcttcaaagagagctgttgtgacattggtggagaagggagtatcattcgaaactgtcaatgtcgatctcatgaaaggagaacagagacagcctgagtatctcgcgattcagcctttcggtaaaatcccagtcctcgtcgacggagactacaaaatcttcgagtcgcgtgcgatcatgaggtatatagcagagaagtatagatcacaaggacctgatcttttggggaagactattgaagagagaggacaagtagagcaatggttagacgttgaggctacaagttaccatccaccactattggctttaacgctcaacattgtctttgcaccacttatgggtttccctgctgatgagaa

SEQ ID NO: 164643 - DNA, 467 bp, Arabidopsis thaliana columbia
attagagaatgatgtgagcgacatactcgacctcacatttagtatggacgcagatgaggaaaaacacattctttacgagaagactgaggtgacggactatgaacttaaacctggaggacgaaacatacgggtaacagaagaaacaaaacatgaatatgttgaccttgtggccgaccacatacttaccagtgctatacgccctcaaatcaacgctttcctagaaggcttaaatgagttgatacctcgtgagcttgtatcaattttcaatgataaagagcttgagctcctaatcagcgggttgcctgagattgattttgatgatctaaaagcaaataccgagtataccagctacacggtagggtcccctgttattcgttggttctgggaggttgtcaaagctttcagcaaagaagatatggctagatttcttcaatttgtcactgggacatcaaagggtcccttggaag

SEQ ID NO: 164644 - DNA, 384 bp, Arabidopsis thaliana columbia
  unsure (1)..(384): unsure at all n locations
gacaacaagtactacgttgatctcatgaaccgacaagggctattcacttctgaccaggatctcttcgtggataagaggacacgtggcattgtggaaagctttgcgatcgaccagcagctgttttttgattattttactgtggcgatgatcaagatgggtcagatgagtgtcttaactggaacacaaggagagattcgttccaattgttcagccagaaacacccaaagtttcatgtccgttttggaagaaggcatagaggaagctatttccatgatctaaataaccataaatctcgacctttcctttgtcaactctggttttatttagttcatgcacttgtggttgggttgtcgaatgcgtnaaactatctgataaataagaacg

SEQ ID NO: 164645 - DNA, 406 bp, Arabidopsis thaliana columbia
gttcagctttctctttccaaaatcaaaagctctccgatcagtttctccggcttaggaaattaattgaaggaaggtgatgagaggtactactgagaatacggatctgttcgatcccaaaacccaaatggatcctgacttcactcgtcatggttcttcctccgacggcgattttggattcgcttttaacgacagtaacttctctgatcgtttgcttcggatcgagatcatgggtggaccttcggattctcggtctgaagttgaaaggtgtacgagtatcgctgattgggctcgtcatcgcaagagaagaagagaagatatcaagaaggaatctggtgtcacgatttcagacattgtggcatgtcctgaggagcagattttaactgatgaacaacctgacatggatgga

SEQ ID NO: 164646 - DNA, 347 bp, Arabidopsis thaliana columbia
  unsure (1)..(347): unsure at all n locations
ctgaaatcctgatattagaaaacgtggtcatgtttggttcaaactaggaattttagtccgaaagctttcacgataggtcgggagactcgggacggttgattgacacatttacatgtcaaagtgtctttttggggtgctacaatggatgaaaaaccaatggccggtcaagaacataggaccgatgattccatcaatgtacttagacaaacgattagcaggtgacaaagactacggaatcaacctcttcaatgcccaagtcaacgaatgccttgattggcttgactcaaaaccgcccggntcagtgatctacgtgtcttttggaagcttggccgtcttanaagacgatc

SEQ ID NO: 164647 - DNA, 395 bp, Arabidopsis thaliana columbia
acaaaccagaaatgggaggagtgtccttcctctccactgttccttccttcaccaacacaaccaatcatcaacatctcactacactctcttcttcttctcatcgctctgctgttatacgatgttccaagattgaacctcaagtttccggtgaaagtttagctttccaccgccgtgatgttctcaaactcgccggcactgcagtcggaatggaattaataggcaacggtttcattaacaatgtgggtgatgcaaaagctgctgacttgaatcaacgtagacaacgatccgagtttcaatcaaagatcaagattttgctttcaaccaccattaaggctaaaccggagcttgtaccttccttactcaaactagctctcaatgatgctatgacttatgat

SEQ ID NO: 164648 - DNA, 343 bp, Arabidopsis thaliana columbia
taagatttttaactttaaacgagagtttcgtttatttactcaaaaatttacttctgaaatctctatttgaatttcggggaaaaaaatcctaagtaagggaatgcagagagatggtcggagtatcgccggtgaagactaagctgtgtgatcggtttaaccgatccgtcggcggcaggaattgccaccggaaacacgtcgaggacgggtgatccagttttctaaactctcgtctctcgaattcttcgaagatatcgaaaaactgtaaatcttttttttcggctactcttttacaaaattctctaatcatcgttgtaaagtaaaaaaccatggtcggagcaaaacc

SEQ ID NO: 164649 - DNA, 384 bp, Arabidopsis thaliana columbia
caactatgttgctgtgttggagagggaagcttcaaattctgcttccttgtgcatcctcaaagattatggaattccctcggaaagatccgctgatctgctcgagccatatgttgatccaatagatgacacccaagcgcttgaccaaggtattggagacagccctgtgtcaaatctggaaatcggctttgatggactggtgtgggcataaaatattcgaaaaggcgtccgcagatggaaaccactgaaagctcatacagcttccccgaacatatgggaaagctttcagcttcatcctcattcataaggtcttgtgctgctcaaactcaaagtttagtgaattctttcttctttattcaaacctctatggattgagtttaatagaaa

SEQ ID NO: 164650 - DNA, 378 bp, Arabidopsis thaliana columbia
gaacaatggcttcctctatgctctcttccgctactatggttgcctctccggctcaggccactatggtcgctcctttcaacggacttaagtcctccgctgccttcccagccacccgcaaggctaacaacgacattacttccatcacaagcaacggcggaagagttaactgcatgcaggtgtggcctccgattggaaagaagaagtttgagactctctcttaccttcctgaccttaccgattccgaattggctaaggaagttgactaccttatccgcaacaagtggattccttgtgttgaattcgagttggagcacggatttgtgtaccgtgagcacggtaactcacccggatactatgatggacggtactggacaatgt

SEQ ID NO: 164651 - DNA, 331 bp, Arabidopsis thaliana columbia
gacccgtctgacgacttgtgatcctcacacgaaacgcctggtcgttagctcggctacccctcaagaagttgaacaaaagaaggagattatcttcacatatgacgtcgatttccaggaaagtgaagtgaagtgggcatctagatgggatacttatcttctgatgagtgataaccaaatccactggttctctatcgtcaattctctgatgatcgtcctattcctatctggtatggtggcaatgataatgctgaggaccctttaccgtgacatttcacgatacaacgagctcgagactcaagaagaagctcaagaagagacgggatggaagctt

SEQ ID NO: 164652 - DNA, 450 bp, Arabidopsis thaliana columbia
cttcttcttcttcacccagaaaagtaaaacaaaagtcaaaacaatggcgccgagagcagagaagaagcccgcggagaagaaaccagccgccgagaaaccagtagaggagaaatcaaaagccgagaaagctccggcggagaagaaaccaaaagccggcaagaaactcccgaaggaagccggggccggcggcgataagaagaagaagatgaagaagaagagtgtggaaacttacaagatctacatcttcaaggttctgaaacaagttcatccagatattggtatttcaagcaaggctatgggtattatgaacagtttcatcaacgacatcttcgagaaattggcatcggaatcttcaaagctcgctaggtataacaagaagccgacgattacttctcgggagattcagactggctgtagactcgttcttcctggtgagctcgctaacacgct

SEQ ID NO: 164653 - DNA, 429 bp, Arabidopsis thaliana columbia
cggaagaagagaaaagcgtgatgaagcaagtgatggtggcgattgatgaaagcgaatgtagtaaacgcgctcttcaatggacgctcgtgtatctcaaagatagcctcgccgattccgacatcatcctcttcactgctcaacctcatcttgatctcagctgcgtctatgcttcctcttatggcgccgctccgattgagcttataaactcattgcaagagagtcataagaacgctggattgaatcgtcttgatgaaggaaccaaaatttgtgctgagactggggttactccaagaaaggtgttggaatttggaaatcctaaagaagcgatatgtgaagctgctgagaagcttggtgttgatatgcttgtggttggaagccatggtaaaggagcattacaaaggacttttcttggaagtgttagcaattact

SEQ ID NO: 164654 - DNA, 419 bp, Arabidopsis thaliana columbia
gtaccatggaggctcaggaaggagttgccatcgaaattgctgaagctgttgttggagctctgaatggagagcttgctgctactgcagtcaatgcacctatggtttctgctgaggttctgaccgagctgaaaccatatgtggtgctagccgagaaactaggaagactggcagtgcaactggtggccggaggaagcggtgtgaaaaacgcgaaaatcacatacgcctcagcaagagccactgatgatcttgacaccagacttctccgagccatgatcaccaagggaatcatcgagccaatctctgacgtatatgtcaatttggtcaacgctgatttcacagccaagcagagaggtctcagactctcagaggaacgtgtgcttttggatggttcaccagagagcccattggagacaataact

SEQ ID NO: 164655 - DNA, 354 bp, Arabidopsis thaliana columbia
gacttgttggtgtctctgaggaaactaccactggtgttaagaggctttaccagatgcagcaaaatggaactcttttgttccctgccattaacgttaacgactctgtcaccaagagcaagttcgacaacttgtatggttgccgtcactcactccctgatggtctcatgagggccactgatgtcatgatcgctggaaaggttgctgttatctgtggatatggtgatgttggaacgggatgcgctgctgacttgaatacggagttggctacacgtatttgtgactggagttgatcctattctggactcttcaaggcttgatggaagggatttcaaggttttttacctttgaggattg

SEQ ID NO: 164656 - DNA, 369 bp, Arabidopsis thaliana columbia
attggtcctggttgataatgaagaagatgtacaatcttccaagagatttgccggaggaggtgctctgtagaattccgttgacatctctgaggcctgtccgatctacttgcaaaaagtggagcactttatccaaatgtgggagctttgcaaagaagcaccttgctcaagcaaaagtactagcagacgcaaaggagtttatggtggtcttgatgatgaattttagggtttatttgatgagagtcaatcttcaaaacaacgttgttgaatcatcatcatcatcatcatcatcatcatcatcatgtataaaacgtggagctaaacttattagcttaggcgatgaagaagctgatatatcttaagtctttcact

SEQ ID NO: 164657 - DNA, 358 bp, Arabidopsis thaliana columbia
catttttcgtttcttcacattcacaaaacatctctctctttcttctcccattcactcactatcttgctcctagaaaaagatggcgagaatgagtttgatgatcatgatgattatggttgctgtgaccatgattaacattgctaagagtgatcccattgcaccatgttacttcatatttggtgactctttggttgataatggcaacaataatcagcttcagtcattagctagagctaattactttccttacggtattgactttgctgccggtccaaccggtcggtttagcaacggcttaaccactgtcgatgttatcgctcagcttttgggtttcgaggactacattacaccttacgct

SEQ ID NO: 164658 - DNA, 249 bp, Arabidopsis thaliana columbia
tggggaagctgacctctgcctttcctcctccattaatcaaggaatataaatcagctttaaactcagtcctcttatggaagacaaaaaagcaaatatttattcgtaaatataacttcagaaccctttcaacaaaactctctctgttctttctccgtggagaagttaaagatgacgatgtcggagaactcaagaaacttggaagctggtttgctactgaggaagaaccaaaacgacatcatcgaatgtcgt

SEQ ID NO: 164659 - DNA, 235 bp, Arabidopsis thaliana columbia
gggttgggtttcttctcccttcctacatcctctttcttctctttctctacactttcatctaatggccggcctgagatggagagagtggtggaacacgatggccttccccacccggcgtatctggaatcgtttcaccgttcgcgtcgggtttcgacacagcggacttttgaggttagaacatgacgtgagttcttgcgagtatgaacacatacacataatgccggatttgtaacac

SEQ ID NO: 164660 - DNA, 319 bp, Arabidopsis thaliana columbia
gaaacgatggcgtcgaactcgcttatgagctgtggcatagccgccgtgtacccttcgcttctctcttcttccaagtctaaattcgtatccgccggagttccactcccaaacgccgggaatgttggtcgtatcagaatggctgctcactggatgcctggcgagccacgaccagcttaccttgacggttctgctcctggtgactttgggtttgacccacttggacttggagaagttccagcgaaccttgagagatacaaagagtcagagctcatccactgtagatgggctatgctcgctgttcctgggattttggtcccag

SEQ ID NO: 164661 - DNA, 421 bp, Arabidopsis thaliana columbia
aaggaaagctggaacagtgcatagctctgagcttaaggcacttgaacaaaagacagagtttaacatggaggagatattgcggaaatacattcgttatgcgttgaatgagaaaccgtttaatcccgaccttgttgctgatctcattcatctaagaaaagcttctggtttgaatgattctcagattcctgagattttaaatgagatctctcgtcgtattgtcaaggaaaaaggtccggtagtgatgaaaatgcaaggctttaccgaaaaaggattcaagagaaaactcgccgtgcaagcgctttttggaaagatttactatctttctgagcttcctgacttctgctcaaaagacaactccttaatcgtcaaggaaatattcggcgttacagatgaagacgcagagaaagctgcgatacacgct

SEQ ID NO: 164662 - DNA, 229 bp, Arabidopsis thaliana columbia
ggctcgacaactggagttttgatcccaccgtttatagaagacgaccactctcctttacctggatggatggtggagtctctcaaagctgtcaagtacttacacgaagaatattcatccagttcaactgattacttgctttttatgagggttcgctatgatattgccttaaagaaacgagacctcttatcttatatacttacctaatctatcaccgttctacgtttcttat

SEQ ID NO: 164663 - DNA, 427 bp, Arabidopsis thaliana columbia
atcgaaacagacacagatatcatcagaacgaagaacttcagccaaaatctgatttttctctgtttcacgacaagaaatcgaattaacgaaatctaatgaaaccttcaaaatcgcatcacaaggagaaaaccgctcgtcggagagaggagaaactagaggaatccgataatccaaaatacagagatcgtgctaaagaaagaagagagaatcaaaatcctgattatgatccatcagagcttagttctttccatgccgttgctcctcccggagctgtcgatatccgtgctgctgatgcacttaagatatctattgagaacagcaaatatcttggaggtgatgttgaacatacccatttagttaagggtttggattatgctttgttgaataaagtacgaagcgaaatcgttaagaaacctgatggtgaaaa

SEQ ID NO: 164664 - DNA, 455 bp, Arabidopsis thaliana columbia
  unsure (1)..(455): unsure at all n locations
accaaaagaagaagagaaacaacaagaagaagtaatggcttcctctatgttctcctccaccgctgtggttacctccccggctcaagccaccatggtcgctccattcaccggcttgaagtcatccgcttctttcccggtcacccgcaaggccaacaacgacattacttccatcacaagcaacggaggaagagttagctgcatgaaggtgtggccaccaatcggaaagaagaagtttgagactctatcttacctccctgaccttagtgacgttgaattggctaaggaagttgactaccttctccgcaacaagtggattccttgtgttgaattcgagttggagcacggatttgtgtaccgtgagcacggaaacactcccggatactatgatggacgatactggacaatgtggaagcttncattgttcggatgcaccgactccgctcaaagtgtgaagg

SEQ ID NO: 164665 - DNA, 433 bp, Arabidopsis thaliana columbia
ggcggggatcataagccctagccctacggctctttatttcaccagtaatgtcggtgggaggcgactgaaagcagtgagctgggcgggaaagagtgtctccgggaacgttatccgccggagaagcttgagaattgctgcggagctgaaattcgtgaatgcagaagaagcaaaacagttaatagctgaagaaggttactcggtggtggatgtaagagacaagactcaattcgagagagctcatataaaatcttgctcccatattcctctcttcatttacaacgaagacaacgatattggcacgatcataaagaggacagtgcacaacaatttctcagggctcttctttggtttacctttcacgaaagggaatccgggaattcttaaatctgttagaaaccagttttttcaagacagcaaacttttacttgtttgc

SEQ ID NO: 164666 - DNA, 403 bp, Arabidopsis thaliana columbia
  unsure (1)..(403): unsure at all n locations
cgagtggaagcttttaaacaaaattaaaaaagagagagagaaatggcgacgtcgggaacatacgtgacgcaggtgccgttaaaaggaacggtggagaaacacttcaagaggtacaggaacgagaactatctcttccctgacactatcggccaccacatccaaagtgttactgttcacgatggcgaatgggacactcaaggaggcatcaagatttggaactacacactcggagatggaaaggaggaggtattcaaggagaggagagagatagacgatgacaataagatagtgaaggttgtaggattggaaggtcacgtgatggagcagttcaaggtgtatgagattgacttncaatttattcccaactctgaaaaagattgcgtctgcaaaatcactatgatat

SEQ ID NO: 164667 - DNA, 357 bp, Arabidopsis thaliana columbia
gaaaaatcagaaaaggagagaaaaattaaaaaagtctctcttttctctttttcttcttcgtctcccatattctccgatcaaaaatatatttctctctcactttccttggttttctcggcggcttcttcttctcctatttctccctcaaatcgttttctccagttttcttgggataaatcttcctcctttctgcagacgccatgtcggacaaaggtcgtcccttgccaaaatttggtgaatgggatgtgaatgatccagcatcagcagaaggttttacagtgatattcaacaaagctagggatgagaaaaagaccggtggcaaaccgggatcacccggtaaatccagtgagggtcatg

SEQ ID NO: 164668 - DNA, 363 bp, Arabidopsis thaliana columbia
gtgtttcaaggttcgtcttcgtcagcatcccctaggggagctggtttgagtagaagcttctcatcacacaggaatgtcccttctgagaaaatttctcaatcaagtttgacatctgaaaagactcttgaggttcctctgactgagggttccggtaataaattgattgtgaagctgccgcggggtcgaagtcctgctcaaagtgtgagtggaggctctttggaggaccctgcaccagtgaatagcagagtttcttcacctgtgcatacggtgaagcaggaactgtgtgacaataactggagagaaaaaaatcattcttatcgagctgatgtgagctctgtcttgaatgccgagtcttggcaaagc

SEQ ID NO: 164669 - DNA, 412 bp, Arabidopsis thaliana columbia
aacaaagcttctcactttcttcacccaaccatgaattccccaagacccatctccgtcgtctccaccttcgcttcaccatcctccacctctgacccaacccgaaaacccttaagcttatggccaggtatgtaccattcacctgtcaccaccgctctttgggaagccagatccaaaatcttcgaatctcttctcgatcctcctaaagacgctccaccacagagccagcttctcaccagaactccttctcatagccgtaccaccattttctaccctttctccactgatttcattctcagagagcaatacagagatccttggaacgaggtccgtatcgggatcttgctcgaagatctcgatgctttagccggcactatctccgtcaagcattgttctgatgatgatagtacaacga

SEQ ID NO: 164670 - DNA, 440 bp, Arabidopsis thaliana columbia
tccaacttcaataaaggggaaccaacgtaaccctaattttgctttctcctctttgttcagaaaattttccctttactctcaaattccttttcgatttccctctcttaaacctccgaaagctcacatggcgtctcgaaactatcggtgggagctcttcgcagcttcgttaaccctaaccttagctttgattcacctggtcgaagcaaactccgaaggagatgctctctacgctcttcgccggagtttgacagatccagaccatgtcctccagagctgggatccaactcttgttaatccttgtacctggttccatgtcacctgtaaccaagacaaccgcgtcactcgtgtggatttgggaaattcaaacctctctggacatcttgcgcctgagcttgggaagcttgaacatttacagtatctagagctctacaaaaaccaca

SEQ ID NO: 164671 - DNA, 396 bp, Arabidopsis thaliana columbia
caaagaggaagaagaagaaggaggaggtatagcaatgggggtcgattattacaaggttcttcaggtggatcggaatgcgaaagacgacgacttgaagaaagcttatcgcaaactcgccatgaagtggcatccagacaagaaccctaacaacaaaaaagacgccgaagccaaattcaagcagatctccgaagcttacgatgttttgagtgatcctcaaaagagagccatctatgatcaatatggagaagaaggtctaacaagccaggctccgcctcccggagcaggcggcgggttttcggatggaggggcttcgttccggttcaacggtagaagcgcagatgatatcttctcggagttctttggctttacaagaccatttggtgactcacgtggtgc

SEQ ID NO: 164672 - DNA, 470 bp, Arabidopsis thaliana columbia
ctcctaaagctgatcgtagacttgagcgtttcaagaacagacgctttaaggttactacaagtgatgatcttgtgatcagacgtcttgctaaagaagataaagctactgtatttgctactgatgctattctagctgctcttatgtgtgctcctagatcggattattcatgggatcttgtgattcaacgagttgggaataagcttttcatttgataagagagatgggtcaccgctcgattagagatctgatcatgagacttgttaggagcctctgcctgagggctaagatgatattaactctgctcattctctaggtctggaggctgcttatattaatcagaattttgctcaacaggttgtgggtaagaatgggaaaagggaaacttttgatgagccaattcctaatgttaatgaaggtgaagagaatgcttctattgcttataggtataggaaatggaagcctgatgatag

SEQ ID NO: 164673 - DNA, 454 bp, Arabidopsis thaliana columbia
gaagtaggcagacaaagaagaagaagaagaagttctcggcgtgcttcaatggcgatatcagtagcagcttcgtcctctatggccgtgatggttccacgtgttcccgccgtatccacccgttgctccgccgtcccttatcttcctcctcgctcctttggccgatcctctttcaccgttccgttgaagcttgtttcagggaatggattgcaaaaagttgaattgttgaagacaagagcttcttcagaagagacctcgtccattgataccaacgaactcatcacagatttgaaggaaaagtgggatggtcttgagaacaaatctactgtacttatatatggaggaggagccattgttgctgtttggttatcttccattgttgttggtgccatcaactctggtcctctgcttccgaaagttatggaacttgtcggtctcgggtacactggatgggttg

SEQ ID NO: 164674 - DNA, 414 bp, Arabidopsis thaliana columbia
  unsure (1)..(414): unsure at all n locations
cttgaatctgcaaatcgacttcccccggagaatgcgatcggagatcggaaactggtcgttatctccgcttcactctctcagattacatcttagttttatcaagtttctttgattcaaatttacctgctccaattgctttttctttctcttcatcggaaatttctacgaatgcttctgtttgttcgctttgaaagttgcttaatcataacattttcgtcttcgattctatatgcgttagtaattatactctgtctaagctttcctagaggtgataaatcggtggatcgtagcggcagtgatcgatttgaaaggaattgctgctctctactcgcggtgtttagtttacgattggaatatggngaagatatttagctggttaggggtgttattgtcattgatctcattagtccctgt

SEQ ID NO: 164675 - DNA, 448 bp, Arabidopsis thaliana columbia
  unsure (1)..(448): unsure at all n locations
cgatatttgttctcccagatcttcgtttcgtctcttcgttctcaaactcatggcgactattccggttaacccgaaaccattcttgaacaacttgaccggcaagactgttatcgtcaagcttaaatggggaatggaatacaaaggttttctcgcctctgttgactcctacatgaacttgcagctgggaaacaccgaagaatatattgatggacaattgacagggaaccttggagagatcttgatcaggtgcaacaatgttttgtatgtccgtggtgtgccagaagatgaagagcttgaagacgctgatcaagactaacctgtattgagtacttagaaattgcaagtctgtgtgttttaatttttggattctgtgagcactttaatcttagtgtgattgtggtgaattttaaaaaanaaaatatataatttaatattaattanntattat

SEQ ID NO: 164676 - DNA, 440 bp, Arabidopsis thaliana columbia
  unsure (1)..(440): unsure at all n locations
ccagctggcaaataaccggaattttgttcccgagatcgcactcgaccggacattcgttaattcaaccggctgggaatctagaccggtttacgttgaggttaccggatgatgtacaacggtaatttatgaagagatggtggtctaattcatataagaaaagcttatggtttgaatgattctcagattcctgagattttaaatgagatctctcgtcgtattgtcacngctttcctgtccggatcgttatagtatttatttctttttacggcatttatacgttatcatattttttagtgttttttattatttgttttggatatctttttttatatttttttttgagacttttcagtatttttgttttaataaagttttattttgtttaattcgttaagttatattatttgtgtagttttaatattgtattacttcgttttttt

SEQ ID NO: 164677 - DNA, 244 bp, Arabidopsis thaliana columbia
gccttgcgtattactctatcattctctctctctcactctcctttgttttttcttatcatgatttgtttgagagatctctctgtttttccctaatacatttcgtcctctttgttgttgttttctttttgggatctttttgatatttgtataactttgattggaccatgggattaaacctgagggaagaagttctgattgtaattttcttcattatttttttaattaataaagtcttgtttaatat

SEQ ID NO: 164678 - DNA, 490 bp, Arabidopsis thaliana columbia
gagagagagaaatacaaagaaaaataaatggagaacggcaaatgcaacggagccacgacggtgaagttaccggagatcaaattcaccaagcttttcatcaacggccagttcattgatgctgcttcagggaagacgtttgagacgatagaccctaggaacggtgaagtgatcgcaacaatagccgaaggagacaaagaagacgttgacttggccgttaacgctgcacgttacgccttcgaccatggtccttggcctcgcatgaccggcttcgagagggcaaagcttatcaacaaattcgcagacttaatagaggaaaacattgaggaattggctaaacttgatgcggttgacggtggaaaattgtttcagttgggaaaatatgctgatattccggccacagccggtcattttcgatacaatgcgggtgcagcagataaaatccacggcgagactcttaaaatgacgcgtcaatctttgttcggatacaccc

SEQ ID NO: 164679 - DNA, 324 bp, Arabidopsis thaliana columbia
tgagtgtcgtacttatgataattaaaaaatatgtttttgatgttcgaattatgaaactttaggtatggatcaatgtttgttcttcttgtcccttgttgttatgtttgtgtttttggtttggttgatgattgtaatgtgataaatgaatatgaatagtacaatacacatcatatgtttcatataaaaaaacaattttaatatttttattttttttataatttttatattctttcttttatttatttttttttctattccttttttttatatttttcatactctttatattttatttttttttttttttttttatctttacttttt

SEQ ID NO: 164680 - DNA, 257 bp, Arabidopsis thaliana columbia
  unsure (1)..(257): unsure at all n locations
gagaaaattcagcatttttgatagctcaagcacttgattctttccaaaggggtttnctgagatcacaaaggccaagtaacaatggcgaaaggagttgtagttttactttattattttttttatcttttttttttttttttatttttaatttttttgttttaagttttttattttttttttttttttttattttcttttttttttttttttttatttattttttttttttttttttttttattttttttttttttttt

SEQ ID NO: 164681 - DNA, 328 bp, Arabidopsis thaliana columbia
  unsure (1)..(328): unsure at all n locations
gaatttatggcttaagatagtcttcaaagctacatacaaaactatattacaatttcgaagctgcccatggccatggcgttacagattatagcttcttcttcttcatcaccaacgattacaaaatctcaccttttctcttatcctcctctgcaatctcgntataaagcttcgaaacctaacctctcctcatggttttctcttctgggttcttctcggttctctccttacattggtttaaagcatttgggcatctcaatctcgccgaaatcttcaaacccagagaagaagagaagatgtangagtatgatgattcgtgcgtctctgtttg

SEQ ID NO: 164682 - DNA, 432 bp, Arabidopsis thaliana columbia
ccgatcgtgttttcttagtgagatggcggaagagaaggtaaaagatgaagctatgcaaataatgggaatgtttcaaattcttccgagacttgtcgtctttgatctcgattatactctctggcctttctactgtgagtgccgttcgaaacgagaaatgccatctatgtatccacaagcaaagggtatattgagtgctttgaaagagaagggtatcgaaatggctattgcttcgagatctcctacttcagatattgctaacacatttcttgataaattgaacattaagcccatgtttgtggccaaggaaatatactcaagttggagtcataagacggaacattttcagaagatacacacaagaacgggagtgccgtttaccgcgatgctcttcttcgatgatgaagaccgaaacattaaatcaagttcgaaaat

SEQ ID NO: 164683 - DNA, 442 bp, Arabidopsis thaliana columbia
ccaatctggttaagctggagaaggcgggatcgcactcgggttcgaatcccgctccggcttcgggttcggatcctattaaccgggttcccctcgctcaggtcgtcgaggattgcgtcagacgctggttccaggatacgctcaaggaagccaaatctggtgacgttggtatgcaggtcttggttggtcagatgtattgcagcggctatggaatccctaaagatgaaaacaagggtcgtgcttggattaacaaagcttcaagaactagatcatcagcttggcaagtgagtgataagcctccagggtataatgcaagcgattcagattccaatgataagaaagattgatgatcatcttttgaatgtttgtattgccattgactttgatttgttagtttctctctcctttgttaactctacttgatttattcaaatttgaagccttt

SEQ ID NO: 164684 - DNA, 344 bp, Arabidopsis thaliana columbia
aaaaagcgtattcctcgtgagcactaacttctcactcattcttcttcttcagctgaatccaaatacccatttccatttttaaccgtggttggattgttttgagagttgaaggaagaagatgacgtctgacggagcaacgtcgacgtcagctgcagctgcagcagcagcgatggcgacgaggaggaaaccgtcgtggagagagagggagaacaatcggagaagagagcggcggagaagagctgttgcggcgaagatttatactggtcttagagctcaaggtaactacaatcttccaaaacattgtgacaacaatgaggttcttaaggctctttgttctgaaagct

SEQ ID NO: 164685 - DNA, 436 bp, Arabidopsis thaliana columbia
aagaaagaaagaaaaagaaaaccagagatggcgatgacgacagcatctacggtatttgttctaccggccaatgtcacctcggtcgccggcgcttcgtcgtccaggagctccgtgtctttcttgccgatgagaaacgccggttctaggctcgtagtcagggcagccgaagatcctgctccggcttcctcttcttcaaaagattctccggcagctgccgctgctccggatggagctactgccaccaaacccaagccaccaccgattggtcctaagagagggtctaaggtcaagattctaaggagagaatcctattggttcaagaacgttggatcagttgttgccgttgatcaggaccctaagactcgatacccggttgtggtccggttcgcaaaagtcaattacgccaacatatcgaccaacaactatgcattggatg

SEQ ID NO: 164686 - DNA, 375 bp, Arabidopsis thaliana columbia
caggcagcccatggtacggatctgaccgtgtcaagtacttgggtccattctctggcgaatcaccgagctaccttaccggagagttccccggagactacggatgggacaccgccggactttcagctgaccccgagacattcgcaaggaaccgtgaactagaagttatccacagcaggtgggccatgctcggagccctaggctgcgtcttccctgagcttttggctagaaacggagtcaagttcggagaggcggtttggttcaaggccggttcacagatcttcagcgatggagggctcgattacttgggaaaccctagcttggttcacgctcagagcattttggccatttgggccacacaagttattttgatgggag

SEQ ID NO: 164687 - DNA, 434 bp, Arabidopsis thaliana columbia
cttcttcgtctccatttcatcgtcttctcgctgttctgctatattccgtttcgttggatgaggagaagaagaaagtgaaaaaagttgtgaaatagagagagtttgtttcatgggcaattcatgtcgtggttcttttaaggacaaaatctacgagggcaatcatagtaggcccgaggagaattccaaatccaccaccactactgtttcctctgttcattctcctactacagaccaagatttctccaaacagaacaccaatccagctcttgtgattcctgttaaagaacccattatgcggcgtaacgttgacaatcaatcttactatgttcttggtcacaagactcctaacattcgtgatctttacacgttgagtcgtaagttaggacaaggacaattcgggacaacgtatttgtgtactgatattgccacaggtg

SEQ ID NO: 164688 - DNA, 87 bp, Arabidopsis thaliana columbia
ggggcacacaagttattttgatgggagccgttgaaggctacagagtcgcaggaaatgggccattgggagagggcgaggactttcttt

SEQ ID NO: 164689 - DNA, 456 bp, Arabidopsis thaliana columbia
aattttgacaagtcttgacgaagaagaagaaacagagctgcttcaatggcttctaactcattactacgttcttcttcaaatttcttcttaggatcccatatcataatctcatctcccacccctaaaaccaccagaaaaccctctttccctttctccttcgtctcccgtgctaaataccaaatcactcgatcgtctcaagacgaaaattcgccaaatggtaaacccaattcgccattctcgtcgcaagtagccttagcagctattctactatcttcaatttcatcttcgccgctagctttagctgtagtggacgaaccagcttctccgtctgtcgttatagaatctcaagctgtgaagccatcgacgccatcgccattgttcattcagaacgagatacttaaggctcctagtcctaaatcatcggatctcccagaaggatcacagtggcgatacagc

SEQ ID NO: 164690 - DNA, 426 bp, Arabidopsis thaliana columbia
atttgggtcaaatgtttgagcttttcgttgagcttagcaatcgccttcgcgtcaatcttatggggtatgattactctggttatggtcagtctactggacaggctagcgagtgtaatacatatgctgatatagaggcatcatataaatgcctcaaggaaaagtacggtgtaaaagacgatcaactgatagtatatggtcaatctgttggtagtggacctacggttgatctagcttcacgcacacctaacttaagaggcgtggttttacagtgtcctatcctgtctgggatgagggttttgtatcctgtgaaatgtacatattggtttgacatttacaagaatattgacaagatcggctcagttacctgtcctgtattagtaatccatggtactgcggatgaagtagttgattggtctcacggaaaac

SEQ ID NO: 164691 - DNA, 400 bp, Arabidopsis thaliana columbia
atttttgacctgaaccgcttcgtttccgatcggaggaagtatctggtgatgacgggaggcttgcataatgaggaggcgggttcactggctacgccgactagtgctaggcacattgggaagagagctcgcaagaacaaaagcctcaccgtctcttttgacgagaaagatctcaaggattttgtgactggttttcacaagaggaagaagaaaagaagaaaggaagctcagaagcagcaggaggaagcttttaggcggaaacgaatcgaggcccgtaagaataggaaattggaagagctaatggttgctggtaatggcgaggataatgaagatggggaagctgaagatgaagtggatgcagaggatgaagaagcaaagcctggtgcttcaacatctgtcacga

SEQ ID NO: 164692 - DNA, 408 bp, Arabidopsis thaliana columbia
agtttatggaactcttttcgaggcagagcatcggtctactttctacttcccttattggaactttcctccagctagatggatagttccgaggcaacgaaagttccaaagcgatctgaagattataaacgattgccttgatggcctcattcaaaatgctaaagagacaagacaggaaacagatgttgagaagctccaggaaagggactacactaatctcaaggatgcaagtcttttgcggttcttagtcgatatgcgcggtgttgacattgatgaccggcagctgagggatgacttgatgactatgctaattgctggtcatgagacaacagcagcagtacttacttgggctgttttccttctgtcacaaaatcctgaaaaaattaggaaagctcaagctgagattgatgc

SEQ ID NO: 164693 - DNA, 152 bp, Arabidopsis thaliana columbia
gtccgagtacttggcacgatgactccagaaatgtcaatctttgtggaagtgccaatcacataggcctggggaacacgtctcaaaggaacaccattgatcttgaatggtccagtcacaagaagcaaaccagaggcaagctgcttaaggaagac

SEQ ID NO: 164694 - DNA, 464 bp, Arabidopsis thaliana columbia
aaaaaaaacacaaaaagtttcaatggccgcctccacaatggctctctcctcccctgccttcgccggaaaggctgtgaacctttcccccgcggcatctgaagtcctcggaagcggccgtgtgacaatgaggaagactgttgccaagccaaagggtccatcaggcagcccatggtacggatccgaccgagtcaagtacttgggtccattctctggcgagtcaccgagctaccttaccggagagttccccggagactacggatgggacaccgctggactttcagctgatcccgagacattcgcaaggaaccgtgagctagaagttatccacagcaggtgggctatgctcggagccctaggctgcgtcttccctgagcttttggctaggaacggagtcaagttcggagaggcggtttggttcaaggccggttcacagatctttagcgatggaggactcgattacttgg

SEQ ID NO: 164695 - DNA, 483 bp, Arabidopsis thaliana columbia
caaaactctcactccaaaactctcaattttgccttcctttgatcgaatactacaatggcgtctgtatctgcaattggagttctcaaggtacctcctgcttcgacttccaattccaccggaaaagccacggaggcggttcccacgaggactctttctttctcctcctctgttacttcatccgacgacaagatttcactcaaatccaccgtctcccgtctttgtaaatctgttgttcgcaggaatccgatcatcgtctctcccaaagccgtctcagattctcaaaactctcaaacttgtctcgatcctgatgctagcagcagtgttttggggataatcttaggaggtggagctggaactcgtctttatccacttacgaagaagagagcgaaaccagctgtgcctcttggtgctaactataggcttattgatattcctgtgagccaactggttgaatagcaccattatcaagatctatggtcttac

SEQ ID NO: 164696 - DNA, 363 bp, Arabidopsis thaliana columbia
cctaacgataatggtggctatgagatctccgtcttttctccgtcgtgtttctcaccgccgattataaaatacttatctactaccatctccttgtcggaaacggcgagctaagtcgattagggttttaattgagaagaaataaaaaggatattttggtatggaggtgaaggaatcgaagatagatatggatgattcagtcaataaggagattggggaattaccaaaagatatgccttgtactagtaactatgaggaccatagttttcataatcatgttgaagaagatgtcactgaggatcttccttgtggtggtgatgatattgatgctgatgcttctattaaaaaagaggttgcagagttcga

SEQ ID NO: 164697 - DNA, 425 bp, Arabidopsis thaliana columbia
gaagaacaatggcttcctctatgctctcttccgctactatggttgcctctccggctcaggccactatggtcgctcctttcaacggacttaagtcctccgctgccttcccagccacccgcaaggctaacaacgacattacttccatcacaagcaacggcggaagagttaactgcatgcaggtgtggcctccgattggaaagaagaagtttgagactctctcttaccttcctgaccttaccgattccgaattggctaaggaagttgactaccttatccgcaacaagtggattccttgtgttgaattcgagttggagcacggatttgtgtaccgtgagcacggtaactaacccggatactatgatggacggtactggacaatgtggaagcttcccttgttcggttgcaccgactccgctcaagtgttg

SEQ ID NO: 164698 - DNA, 427 bp, Arabidopsis thaliana columbia
gctgagttaggagctgttaccgatgaagtcgataaaccttcaagtatgttggaccatattgaacttgagttcgaagcacatatcaatgaacttaaagaagctggatctgatggtatcaacaaagttgaggaatctaaagatgatgaagaagctgcaaggagacataaaatgttggaagccattgaacgtgaatttgaagctgctcatgctggatttgaacaactaaagactgatgattccgcccaaggattagatgatgaacaatctgcaaagagacaaagcatgttggacgagattgaacgtgattttgaagctgctacaaaaggtcttgaagagctaaaggctaatgattcaaccggcgacaaggatgatgatgaacacgttgcaaggagaaaaattatgctttgagctattgaacgcgagtttg

SEQ ID NO: 164699 - DNA, 346 bp, Arabidopsis thaliana columbia
gtcatacttaatggcttccaattcggagaaaaatcctcttctttcagatgagaaacccaaatcgacggaggagaataagagttctaagccggaatcagcttctgggagttcaacttcatcagctatgcctggcttgaatttcaatgcttttgatttctctaatatggctagtattctcaacgatcctagcatcagagaaatggctgagcaaatagctaaagatcctgcgtttaaccaattggctgagcagcttcagagatctattcctaacgctggccaggaaggtggtttccctaactttgatcctcaacagtatgtcaatacaatgcaacaggttatgcataac

SEQ ID NO: 164700 - DNA, 452 bp, Arabidopsis thaliana columbia
tcttcatcttcatcttcctcctcgcggatccattttgaggagtctctttttgtttcttgaagatagactgggcgtcacggagcagctgagtatatgctacgagtgttgcattccggaggctgttctttcagatgattggcagtagctatattatgcttgaacggtgccataatgggcatctgtctaatgaagcgctgctgctcatggtttcttttgatctcgtttctctctgcactaacgaatgaaaatgaagcaattagtcctgatggtgaggcgcttttgagttttagaaatggagttttggcttctgatggtgttattggtctgtggagaccagaggatcctgatccatgtaactggaaaggagtgacctgtgatgcaaaaacaaaaagagttatagccttgagtcttacttatcacaaattaaggggacctttaccccctgagcttgg

SEQ ID NO: 164701 - DNA, 263 bp, Arabidopsis thaliana columbia
gtgatattgaagaggcttttcatgagcaaagtcaacaaagctcctctttctctatctaggcttgtggagttcatgactggcaaggaagataagattgccgtcttggttggaactataactgatgatttgagggtacacgagattccagccatgaaagtgactgccttgaggttcacagagagagcaagggctcgcattgagaaagctggaggtgtatgcttaacctctgaccagctcgctctgagagcttcattgggccagaa

SEQ ID NO: 164702 - DNA, 380 bp, Arabidopsis thaliana columbia
ccaaaccatgccttccgatttaactcaagacgaattcacccaactctcccaatcaatcgccgagttccacacgtaccaactcggtaacggccgttgctcatctctcctagctcagcgaatccacgcgccgccggaaacagtatggtccgtggtgagacgtttcgataggccacagatttacaaacacttcatcaaaagctgtaacgtgagtgaagatttcgagatgcagtgggatgcacgcgcgacgtgaacgtgataagtggattaccggcgaatacgtctcgagagagattagatctgttggacgatgatcggagagtgactgggtttagtataaccggtggtgaacataggctgaaaaatataaatcggttacgacg

SEQ ID NO: 164703 - DNA, 464 bp, Arabidopsis thaliana columbia
accaacccgtccggagagagactccattgttgaagtgtgttcactgaactcctcctcaaacaacaatggcgacgacggttacactcaaatccttcaccggacttcgtcaatcatcaacggagcaaacaaacttcgtctctcatgtaccgtcatcactttctctccctcaacgacggacctctctccgagtaaccgcagccagagccactcccaaactctccaaccgtaaactccgtgtcgccgtcatcggtggtggaccagcaggcggggcagctgcagagactctagcacaaggaggaatcgagacgattctcatcgagcgtaagatggacaattgcaagccttgcggtggcgcgattcctctctgtatggtcggagaattcaacttgcccgtggatattattgatcggagagtgacgaagatgaagatgatttcgccgtcgaacattgctgttgatattggt

SEQ ID NO: 164704 - DNA, 368 bp, Arabidopsis thaliana columbia
gagtgatccaaaatcttcgttagcagcatattctggcgtcgaagggccttgattggggctcttatacgaggtctatcactcagaattattgccttgtactaatcgcgagaagaaactttagggtttcactgtttcagagttttgattggtgaattataaaagatgcagcactctgcacagatgattccgatggttcttccttcatttccgcccaccaataatatcaccaccgaacagatccaaaagtatcttgatgagaacaagacgctgataatggcgatcttggaaaatcagaacctcggttaacttgcagaatgtgctcagtatcaagctcttctccagaagaatttgatgtatcttgttgcaat

SEQ ID NO: 164705 - DNA, 400 bp, Arabidopsis thaliana columbia
aacaaaaaaacctagcttctctcacaaaacgcatgcaacaacaatcgaaattaagaatcaatcaaagcttcttcgttcgatcacactagaaagaaagatggcaacgtctggtgcgatttcaggagctactgtctcttccttcttcaccaaaactactactacttcaaacccatctcccaaactccattcctctgcttctcttttatcacagaaaactgtgtttcaaggagtttcgttggaagattcgaagaagagtgtatcagagatcttcgctgtctccgagagaaagatcggagggttaaatgggttgagaagattcgaaatcaaagcgagagcagcagcttctaagacaatagaggttgaagtagataagcctttgggtctgactctaggacagaag

SEQ ID NO: 164706 - DNA, 395 bp, Arabidopsis thaliana columbia
tgcacagagagaaagctgatgtattctacaagggatgaagctgacaagactgggtcaatgactgataactctggaatcagaaagatccttcccaagtctgagatctgcgactttgaattcgagccctgcggctactctatgaactcaattgaaggggatgcaatctccacgatccatgtgacccctgaagatgggtttagctacgctagcttcgaagctgtgggttacgacttcaacacccttgaccttagccagctggtgacaagggttctctcttgcttcgagcccaagcaattctctgtagctgtgcactcgagcgttggagcgaactcatacaagccagagattactgtagacttggaagactatgggtgcagagagaggacatttgagtc

SEQ ID NO: 164707 - DNA, 434 bp, Arabidopsis thaliana columbia
cgcgagccaccctgagacggaatatcctaaactccggttcatcaggagttgcagtgcttctttggctccggtgatattgtccaggcttgaggaagcgtttggagcaccggtgctcgaggcctatgcaatgacagaggcaacacatttgatgagctcaaaccccttaccagaggaaggtccacacaagcctgggtctgttgggaaaccggtaggtcaagaaatggcgatccttaatgagaaaggcgagatccaagagccaaataacaaaggagaggtttgtataagaggtccaaatgtgaccaagggttacaagaataacccagaagccaacaaggcaggtttcgagtttgggtggttccacactggtgatatcggttactttgataccgatgggtatttgcatctggtgggtcggatcaaagagcttattaacc

SEQ ID NO: 164708 - DNA, 320 bp, Arabidopsis thaliana columbia
caaaccaaaaaagagagtccaccaactctacacgcaattcatccaattatcttgctgtcgccattcgccaatatccatccccatcttcttcgatttctgagattcggtcgaaaatcatcagatgggttttcagaacgaagctagctcctcctcttatacccttaaaatacctccaccggccagagaggactcgcctcttctcggcaagggaccttccctcttcagccagtttaagaccttcgccaacgtcttcatcgctgtcgtcggcgctggtgttcttggtcttccttacgccttcaagcgaaccggatggctcatgg

SEQ ID NO: 164709 - DNA, 141 bp, Arabidopsis thaliana columbia
caattatatagctttccatttctgtggctttgtaatctgatcggaaatcgaaaacaaacaattttattttcttaaaaaaacaagatcgtggaggagagatggatgatcggcacgaaggagaccatcatgatatagaggttg

SEQ ID NO: 164710 - DNA, 417 bp, Arabidopsis thaliana columbia
ctaaatttcgtcaactccacagcgactcgattcgatcaaggaaatggcgtacgcttctcgttttctctccagatctaagcagctacaggggggtctggtcattttgcagcagcaacatgctattccagtccgagcttttgctaaggaagctgctcgtccaacctttaaaggagatgagatgttgaagggtgtcttttttgatatcaagaacaaattccaggctgctgttgatattctccgtaaggaaaagatcacccttgatccagaggacccagctgccgtaaaacagtatgcaaatgtaatgaagaccatcaggcataaggcagacatgttctcaagatcttagcgcattaaacatgacatcgatactgagactcaagacattccagatgcttgtgcatacttggtgaagttgca

SEQ ID NO: 164711 - DNA, 374 bp, Arabidopsis thaliana columbia
ctttcctcttctctctctctctctctctgcctaacctcgatttctctcgatcgctcttcaccatggatctacgatcatgtggtccttcttgaagttttttgatctcttcttcttacgggtttttacttcgtttgattttcctgttgtttgttgttcaaggatcgagatttcgtggagctctctattcgcagtttggagattggacttgtttgaattggctcttttgtgatggaggatactcggtcagttgcttcactcatggactctacatcatccaagtattagcagcttcagaaggcgtttgctgaacttgaaagttagtgtgctgtaacaccttaattttgagcggtagggaaccgtatggtgcctttttt

SEQ ID NO: 164712 - DNA, 270 bp, Arabidopsis thaliana columbia
gtaagtcacagagaaagagaagatgtctgagaaaaagggaaggaaagaggaagtgattaccagagagtacaccattaacctgcacagacgccttcacaaatgcacctttaagaagaaggcaccgaaagccatcaaggaaatcaggaagttcgcagagaaagctatggggactaaggacgttagggtagacgtgaaatttgacacagcaactttggggcaagggaatcagaggttcaccaaggaggatcagggtttcggggttgcatcgta

SEQ ID NO: 164713 - DNA, 282 bp, Arabidopsis thaliana columbia
gtgaagggattcttccgagtagcagagagtctcgatgaccttgctctagatatcccatctgccaaaaagctgtttgattcgatagttccaaaggctatttctggaggctggctcgatgattcatttaagataacctctgatcaagatggagaaaaatcgagtcaagacggaaagctaagacagtacaagaaggatacagtgaacataattcaggaatatttcttatcagatgacattcctgagctaatccgcagtcttcaagacctaggttccccctgtata

SEQ ID NO: 164714 - DNA, 291 bp, Arabidopsis thaliana columbia
ctctctctttctctattactctgtctcctctgttccggcgatgttccaacacgcgccttcttccatttccctcatcatcatcttcctcttcaccattctatcacccgtttcacctgaaccggtcacagtccagccattccgggtcaaatcatccccacccgcaaccatacccgctttcccggagcaatccgatttcttcggctgcccactcgatttaccagaagacctcttccacggcatcaagtcagcttgcagcgggcaaaaagctccacaaaggaatatgttgccccc

SEQ ID NO: 164715 - DNA, 72 bp, Arabidopsis thaliana columbia
cgagaatttcgcgaactataccggcgatcagggataccccggtgggagattcttcggggcgttttttaaaag

SEQ ID NO: 164716 - DNA, 139 bp, Arabidopsis thaliana columbia
cacacacacaatttctcttcctctctatcattatcatcgatcagaaagaccgagagagagagggttaagctgattgattatggctcctgcttccatttctgcaataggatgcaaccaaactctgctaggcccttccccc

SEQ ID NO: 164717 - DNA, 229 bp, Arabidopsis thaliana columbia
gctaacttcctcgctaccggcaaactcgtcagcctcagcgaacaacagctcgtcgactgtgatcacgagtgtgatcccgaggaggcagattcctgcgactctggttgcaatggtgggctaatgaacagcgcttttgaatacaccctcaaaaccggagggctcatgaaagaagaagactatccttacaccggaaaggacggcaagacctgcaagctagacaagtccaaga

SEQ ID NO: 164718 - DNA, 59 bp, Arabidopsis thaliana columbia
cggaaggtgtggtggaggctacagtgagccttgtagaaagtttggccgcttagaaatgg

SEQ ID NO: 164719 - DNA, 227 bp, Arabidopsis thaliana columbia
atccgattcaagcttgtgaaagactctctgcatttcttgctgctctgatgctacaacaagggtgcagaaacaacagaccctggaccaacaacgaccattctcttcttctactcgatcttattcttcaatctcaaaccgcgccatctttctacttagccgcatcggtctcctccttgtccttctcgatctcttccttctcctcggtgtacttctacctcgtgccggat

SEQ ID NO: 164720 - DNA, 272 bp, Arabidopsis thaliana columbia
caaatctttttctcattcttcaaaagaaaaaaccaaagcaaaaaaaactcaaaacgtttttgaagataatgatgatgatgacgaagatgtttgttcagatcgctgtggtttgtctattggcgacgatggccgttgtgtccgcccacgagggtcaccaccaccatgctccggctccagcaccaggacccgcatctagctcaaccgttgtttcggccaccattatgttcaccgtcttggctattgctgccgtggctcttgttgttggttccaac

SEQ ID NO: 164721 - DNA, 293 bp, Arabidopsis thaliana columbia
ctcaaacaaacatattgacatctgagtcttgtcatcatggcaacttctctccaagccgccgcaacttttcttcaaccggcgaagattgccgcttctccttctcgtaatgtccatctccgatcaaaccaaaccgtgggcaagtcctttgggttagactcttcacacgctaggctcacgtgctctctccactctgacctcaaagacttcgctggaaaatgctccgacgccgccaagatcgccggcttttgtcctaaccacctctcattttcgtcgcctttaccttctcccactcc

SEQ ID NO: 164722 - DNA, 89 bp, Arabidopsis thaliana columbia
ataaccttcctgatggttattcagtagctggaaatggagaatattccaaatctgcggtttcagagatagttgagatagatgtctgcttt

SEQ ID NO: 164723 - DNA, 160 bp, Arabidopsis thaliana columbia
tcttgaataaaatcagaattacaaacaaaaatggttttgcaaaagcttcctctcattgggctgcttttgctcctgaccatcgtcgcctctccagcaaatgcagatggacctgtttgcccgccgtcgaacaaactaagccgggcaagttttcctgaaggat

SEQ ID NO: 164724 - DNA, 143 bp, Arabidopsis thaliana columbia
gagataatggcgtacagtgcgtgtttcctacaccttgattgcattggcttcatcagccgcacgatcatcattttcctcctcattccagccgtacgtgtcgttctccaaacctgttcagatcatctgttaagctctacagcctc

SEQ ID NO: 164725 - DNA, 164 bp, Arabidopsis thaliana columbia
ttgggatcatgctttctgttacattggtcaaactgcttctggatctttactgcagatccttcactaacgagatcgttaaagcttatgctcacgatcatttcttcgacgccattacaaacatcattggactcattgcacgtatacctgcccaattaccttgatta

SEQ ID NO: 164726 - DNA, 191 bp, Arabidopsis thaliana columbia
ggatgcttggatctttgacattgatgacactcttctctcaaccattccttaccacaagagcaacggttgtttcggtggtgagcaactgaacacgaccaagttcgaggaatggcaaaattcgggcaaggcaccagcggttccacacatggtgaagttgtaccatgagatcagagagagaggtttcaagatct

SEQ ID NO: 164727 - DNA, 293 bp, Arabidopsis thaliana columbia
  unsure (1)..(293): unsure at all n locations
aatcttatcactactctaaaagaatcttcatcatggcctcagtaacctcagccaccgttgcaatcccatctttcaccggccttaaagcctcaaccatcaaatcatccgccaccgtcagaatccaaactgctgctgttgcatcaccgaagcttacagtgaagtcatctctaaagaacttcggagtcgcggccgtagcggctgcagcttcaattgctttggccggaaacgccatggcaatagaagttctcttgggaggaggggatgggtcgntngctnttatttccaacgacttc

SEQ ID NO: 164728 - DNA, 195 bp, Arabidopsis thaliana columbia
cagcaatccctttgcaaaagccagcttatcaactaacaggatatcagatccctgcctcagctctctatgatactcctgtggaacctggagcttcttctagatctgctcaggcatcaattacaagacccagcgacagtgactcctttagtgggccgaggggtgcagaccctctatcaatgatggagttttacatga

SEQ ID NO: 164729 - DNA, 135 bp, Arabidopsis thaliana columbia
gaagctgatcatcagattgaatcaaagacagactttgacttttctttgtgatcgaagatatggcggatgctttcacagatgaacagatccaagagttttacgaagccttctgactcatagacaaagattccgatg

SEQ ID NO: 164730 - DNA, 237 bp, Arabidopsis thaliana columbia
aagacctctcagcagccaacgacagttatcaaagcttaagccgttttagggttttatccttttgctgagatccaatcatggcggatgttgaaccagaggttgctgctgctggagttcccaagaagaggacgtttaagaagtttgtctttaaaggagttgaactcgatgctcttctcgatatgtctactgatgatctcgtcaagctcttttcttttcgtatttgtagaatgtttttta

SEQ ID NO: 164731 - DNA, 286 bp, Arabidopsis thaliana columbia
ctttggtgagcagttgtctggttttgccttcactgcaaacggatgggtccaatcttatggatctcgctgtgtgaagccaccagttatctatggtgatgtgagccgtcccaaggcaatgaccgtcttctggtccgcaatggctcagagcatgacctctcgcccaatgaagggtatgcttactggtcccgtcaccattctcaactggtcctttgtcaggaacgaccagcccaggcacgaaacctgttaccagatcgctttggccatcaaggaccaagttcgtggatct

SEQ ID NO: 164732 - DNA, 303 bp, Arabidopsis thaliana columbia
aaaaatctttttaaagagctttgaagatccatggcgatgtctcatgtccagcctatgctactcctcctcgtatcactcttcttcttaccggctttgcgtggcgccatagatttcgaatactgcgccaaaaatggaaacgattacggaaccgtcactagcattgtggtctctccatctgttgggcctcacgaaaacccaaccatcactataaatttattcggttttgcaagcaaaaacatccccgtgggaacccttgtgtacgtagcctttagagatggggaatttaccggccttttaaaaact

SEQ ID NO: 164733 - DNA, 160 bp, Arabidopsis thaliana columbia
caaaaaactcttgaatttttcaagaacaaaagaaaaagacatctttaatggcggccatgaactcgagtgttctcacttgcagctacgcaattgctggctctggctcggtagagcttaaccagaaagttggtttggcgaattcatcagtcgggtctggtca

SEQ ID NO: 164734 - DNA, 147 bp, Arabidopsis thaliana columbia
ctcactggtcactctcacttcgttgaggatgttgttctctcctccgatggacaattcgcgctgtccggcagttgggacggggagctccgtctttgggatcttgctgctggagtctccacttgaagatgctgtggacacaccaaggac

SEQ ID NO: 164735 - DNA, 356 bp, Arabidopsis thaliana columbia
gcggccgtgaaaacacagcaggcaatctcaagtttgctctatccgtagaaccaaagaatgaaactcttcagtcctatgcaactcgagtcgcccatcttcgcagccaggggctcccatcgattccaacgactgtcaaggttgagaaagcgtgtaacccattcctcagaatatcgagcaaagatatccgaaaatctttaagcattccagactcagcaaccgaagctgaagcattgcgtcgtatacagagagccagagatcgtttctgaaaacttgggtatattttcttatttgtatagaaaaatttgcaaggcaatcatcagctgcacagatcctaattttatatgttttgggctttc

SEQ ID NO: 164736 - DNA, 270 bp, Arabidopsis thaliana columbia
agaaactttaaaacgagagatagagaaagaaatggcgacatcgggaacgtacgtgacggaggttccgttgaaaggatcggcggagaaacactacaagagctggaagagcgagaaccatgtcttcgctgacgccattggccaccacatccaaaatgtcgttgttcacgaaggcgaacatgactctcacgggtctatcaggagttgggactacacatatgatggaaagaaggagatgttcaaagagatgagagagattgatgatgagaatta

SEQ ID NO: 164737 - DNA, 248 bp, Arabidopsis thaliana columbia
aagagttcaatgctgctgcagccactcagtttgttgctggctgggcctggcttgcttattcaaatgaaaaactcaaagtagtgaaaactcccaatgctgtgaatccccttgtgctcggctctttcccattgcttaccattgatgtttgggagcatgcttactaccttgacttccagaaccgaataccagattacataaagacattcatgaccaatcttgtgtcttgggaagttgttagtgccaaactt

SEQ ID NO: 164738 - DNA, 391 bp, Arabidopsis thaliana columbia
aacctagctagctagtaaacagtattttctatataccaaaaatggcttcaagttccatagctcttttcttggctctcaatcttctctttttcacaacaatctccgcctgtggtagctgtactccgtgcggcggaggttgcccctctcccaagccaaagccaactcctaaaccaaccccaagccctagctctggctcgagcaagtgccctaaagacaccctcaagctcggtgtctgcgctaatgtgctcaacggcctcctggacttgacccttggcaagccaccggtcgagccatgctgcagcctcatccaaggacttcgcttgtgttgaggcagtccgtttgtctctgcacccggtctaaggcttacattcttgggaatcaacctggaacc

SEQ ID NO: 164739 - DNA, 420 bp, Arabidopsis thaliana columbia
aaaatagtgaagcagagccgcaaaaacacttttcccaaaatcaacgaagatagattcagatcggaagcgaaagaacgattcggtctcctccacagatcgaacatcgaaggagaagaaagaccatcatcacaacaagcatcgaaagaagagcaagatggcgtcgagagaccaagttaaggcatcgcacattttgattaagcatcaaggttctcggaggaaagcgtcgtggaaggatccagaagggaagattattctgactaccactagagaagccgccgttgagcagcttaaatcgatccgtgaagatattgtctccggcaaggcgaatttcgaaagaagggcgactcgtgtttctgactgtagctctgctaaacgcggcggtgatcttggttcctttggtagaggtcaaatgcagaaacc

SEQ ID NO: 164740 - DNA, 225 bp, Arabidopsis thaliana columbia
cagaattacaaacaaaaatggttttgcaaaagcttcctctcattgggctgcttttgctcctgaccatcgtcgcctctccagcaaatgcagatggacctgtttgcccgccgtcgaacaaactaagccgggcaagtttccctgaaggttttttatttggcacggctactgcggcataccaggtcgaaggtgcgattaatgaaacttgtcgtggaccagccttatggg

SEQ ID NO: 164741 - DNA, 213 bp, Arabidopsis thaliana columbia
caacactaagcaaaaaagaaaagctcaagccgagagagacaatggcatcaacattcacgagctcaagcagtgttcttaccccaacaacattccttggccagactaaagcctcaagctttaacccccttcgcgatgttgcctctctcggatctcccaagtacactatgggaaatgatctttggcttggacctgacagagtgaacttcttatgac

SEQ ID NO: 164742 - DNA, 435 bp, Arabidopsis thaliana columbia
cttacaacatctatagagagagagagagagagtttagttagagagaaaaaaatggcgagattcacggtgctgattacggcggttgtgctagcttttctaatggcggcgccgatgccaggagtgacggccaagaagtatacagtcggcgagaacaagttttggaaccccaacattaactacaccatctgggctcagggcaagcatttctacctcggagactggctctatttcgtgttcgacagaaaccagcacaatattcttgaagtgaacaagactgactatgaaggatgtatcgccgaccacccaatacgcaactggacacgtggagctgggagagacattgtcactctcaaccagaccaagcattactaccttttcgacggaaagggtggatgttacggtgggaatgaagctatctgttaaaggagagaagct

SEQ ID NO: 164743 - DNA, 199 bp, Arabidopsis thaliana columbia
acaaattgttgaagacgggtttggttatagtggcgacacttgttatagccaaactcatcttctctttcttcacttctgattctaagaagaagcgtcttcctcctactcttaaagcttggcctccattggttggaagtcttatcaaattcttgaaaggacctattattatgcttagagaggaataccctaagctcggaag

SEQ ID NO: 164744 - DNA, 339 bp, Arabidopsis thaliana columbia
cttctatcttaaaacttcttacctaaaatagaaatttgattttttgagaaatggcttcaaaaatttcagcctctcttgtcattttcctcacattcaacattctttttttcactttaaccaccgcatgtggcggtggctgcagttccacccctaaacccaaacctaagcccaagtccaccggaagctgccctaaagacactctcaagctcggcgtttgcgccaatgttctcaaggatcttctcaaaattcagttgggaacaccaccagtgaagccttgttgttcgctcctcaatggtttagttgatcttgaggctgccgtttgtctcttgcaccgcccta

SEQ ID NO: 164745 - DNA, 227 bp, Arabidopsis thaliana columbia
aactaaaacaagctatggctggtatgcttcccggtagttgagtgtgcaaggaggcggcgcttccacggtggtgctcctgcgattgaatcctcgaacacagcttctgtggcggctgcggcgggacacgtctggacacggtgaccatcgctctctctttacactaccaatcatgagagccaccaggcccatgtcttcttctcggagagaagtgtcaggaattcatctta

SEQ ID NO: 164746 - DNA, 415 bp, Arabidopsis thaliana columbia
cacaagttagtcaccaaaaaaaaaaaaaaacacaaaaagtttcaatggccgcctccacaatggctctctcctcccctgccttcgccggaaaggctgtgaacctttcccccgcggcatctgaagtcctcggaagcggccgtgtgacaatgaggaagactgttgccaagccaaagggtccatcaggcagcccatggtacggatccgaccgagtcaagtacttgggtccattctctggcgagtcaccgagctaccttaccggagagttccccggagactacggatgggacaccgctggactttcagctgatcccgagacattcgcaaggaaccgtgagctagaagttatccacagcaggtgggctatgctcggagccctaagctgggtcttccctgagcttttggctaggaacggagt

SEQ ID NO: 164747 - DNA, 399 bp, Arabidopsis thaliana columbia
cttcagcagtcagtgcgcatccgtaggagaaaagtgtgagaatctgccaccatgggtcgtatgcacagtcgaggaaagggtatttcagcctctgcgttgccttacaagagatcgtctccgagctggctcaagaccacctctcaggatgttgatgaatcaatctgcaaatttgccaaaaagggattgaccccttcccagattggtgtgattctccgtgactctcacggtatccctcaggtcaagagtgttactggaagcaagatcttgaggatactcaaagctcatggccttgctcctgagatccctgaggatctgtaccatctaattaagaaggctgttgccatccgtaaacatctcgtgaggaacaggaaggacaaggattccaagttcaggctcatc

SEQ ID NO: 164748 - DNA, 329 bp, Arabidopsis thaliana columbia
acttaaaacccaaatcttatcactactctaaaagaatcttcatcatggcctcagtaacctcagccaccgttgcaatcccatctttcaccggccttaaagcctcaaccatcaaatcatccgccaccgtcagaatccaaactgctgctgttgcatcaccgaagcttacagtgaagtcatctctaaagaacttcggagtcgcggccgtagcggctgcagcttcaattgctttggccggaaacgccatggcaatagaagttctcttgggaggaggggatgggtcgttagcttttatttccaacgacttttctatagctaaaggagtgaagatt

SEQ ID NO: 164749 - DNA, 366 bp, Arabidopsis thaliana columbia
ctctctgtgtgagtgagtgagactcaaccatggcgtctttggctcagcaattctcgggattgagatgttccccactctcttcttcttctaggttatcgaggagagcttcgaagaactttccccagaacaaatctgcctctgtttctccgactattgtcgccgcggttgcaatgtctagcggtcaaacaaaggagcgtcttgagctgaagaagatgttcgaagatgcttatgaacgatgtagaacttctcctatggaaggtgttgctttcaccgtcgacgatttcgttgctgctattgaacaatacgactctcattccgaaatcggcactagggtaaaaggaacagcggtcaagattgttgcaaatg

SEQ ID NO: 164750 - DNA, 244 bp, Arabidopsis thaliana columbia
agaagaactaggggcctcagattctgttgctttggtaccgctgatcataacaggaaatattatcttcagaggcatcttttgagtatgcaagaagctgtttgcatcgacaaagtgaatgttacaggatactttgtatggtcattgttggataacttcgagtggcaagaagggttcaaatacagaattgcactctacttattcgaccctaataattacttaactccattcttgttagaatcctcca

SEQ ID NO: 164751 - DNA, 283 bp, Arabidopsis thaliana columbia
cccaaaatctcttcacaactgtaaaaccccaatcacctctttacatgtgacttccttattactctcttcttcttattttcctcctcttcttcttcgctctagtttcccccaacaatcgccatggcagcttcgtctctcaatctcctcctcattctctctcttctcactttcatttctctccagagatctgtatctctttccgataatccatccttcactcttttacccgacgggattcgtctggccgatctctcactccgatgaattcgatatcatcgacggc

SEQ ID NO: 164752 - DNA, 145 bp, Arabidopsis thaliana columbia
ctcgatagtgcattggatgatcttaacgacgttttttatttttcaaaaacgccaccaaaggttcggatgcacaggtcgtagaaagggtattggaacctcttcgttgccttacaagagaacgtctccgagctggcttaacttggtt

SEQ ID NO: 164753 - DNA, 63 bp, Arabidopsis thaliana columbia
tcgataatgatgaccaaaaactctatcgaattcgattctttcatcgagcgtaacgctttcgat

SEQ ID NO: 164754 - DNA, 172 bp, Arabidopsis thaliana columbia
tcggatagaacaatggcttcctctatgctctcttccgctactatggttgcctctccggctcaggccactatggtcgctcctttcaacggacttaagtccttcgctgtcttcccagtcacccgtaaggctaacaacgacacttacttccatcacatgcaacggcggaagagtt

SEQ ID NO: 164755 - DNA, 120 bp, Arabidopsis thaliana columbia
ctcttcaatcctttcctttcattggagctaaactttgattacgattatggtcacatcaggtatccatcaatcctggtggtgcggccaaacggttcttaagcccttcagcgaccttatcca

SEQ ID NO: 164756 - DNA, 132 bp, Arabidopsis thaliana columbia
gacagctaaaactaaatacaaagaaacagagatgtgtttggttacagaggaggtgagagctaaggcagagatgtacaccgtagatgagatatttcgtgagaatttatacgttttttttttttttttttttat

SEQ ID NO: 164757 - DNA, 275 bp, Arabidopsis thaliana columbia
attaaatctgaatttggctcttcttataaactaatgtctgcagttcgtagagtcatggcgttagcatcaaccacgttgccgacgaagtccggattatctctttggtgtccgtcttctccgtctctcgctcgccgatttcccgctcgtttttctccgatcggttctagaatcgcttccagaagcctcgtcactgcttcgttcgctaacgagaatcgcgagtttgtgattgttggtggaggaaatgctgctggttatgctgctagaacttttgctga

SEQ ID NO: 164758 - DNA, 402 bp, Arabidopsis thaliana columbia
ctgatgcagggagagtcatgttatgaacccgactatgtggttgcacattctacttatgcgtttaatgcttattaccagaagatgggaaaagcttcaggaagctgtgatttcaaaggagttgctacagtcaccaccactgatccaagtcgaggaacatgcgtgttccctggaagagcaaaaagcaatcagacacttggaaacaacacctcggcgttggcccccttagcgaactctacaacctctggatgtatcccaaagtactatcatcacccttacgcatctttcggtgacttaacattactctcccttctactgttcattcgcttagcattcttgtagaaactttgtaaagaacaacaactctccaatatttggttctcttaaacttaacttcttcttttg

SEQ ID NO: 164759 - DNA, 356 bp, Arabidopsis thaliana columbia
gaagcgtcgagttcctcctctccctcaggttgtcaatggccgctaggttacttgctttgagacgcgctttgtctcttttcagcaaccaacaacatcgttttcctttgtctcaagtctcaacagagcagttgtcgctatcaaactcactcttcagcagaagtcatgtttatggaagattatttcagagacagctatctgtaatccgtgaggcaaatgaagcttctgtaaccaatgtctgcaactcgtcaaactctgctactgaatcggccaaagttccctcccctgcgacgccctctgaggaaatgatggtgaagttctagccccagttaataaataaccccaggcatgacttcatg

SEQ ID NO: 164760 - DNA, 315 bp, Arabidopsis thaliana columbia
agcaaaagaagaagagaaacaacaagaagtagtaatggcttcctctatgctctcctccgccgctgtggttacatccccggctcaggccaccatggtcgctccattcaccggcttgaagtcatccgctgcattcccggtcacccgcaagaccaacaaggacatcacttccatcgcaagcaacgggggaagagttagctgcatgaaggtgtggccaccaattggaaagaagaagtttgagactctatcttacctccctgaccttagtgacgtcgaattggctaaggaagttgactaccttctccgaacaagtggatt

SEQ ID NO: 164761 - DNA, 410 bp, Arabidopsis thaliana columbia
  unsure (1)..(410): unsure at all n locations
aagagacggaaaaatgcagcgaagaatggtcaggatatgtcaaaccctactggtaatcctccaagactcgctgaaggaaaaaagtttgtggaaaagtctgcgtgcagtatatcacagaagggccgtaagtcgtcccaatcctcaattctaaaaagaaagcaccagttggatgaaaaaatctccaatgtaccttcacgtcggaggttatctctctcttccacggattctgaggatgctgttattaaggaagactatgatgttcgaaatgaagagaagctttcctgtcatacatcagattagctgcaaaaaggcaatttcctgcaatntttcataggtccaaatatattgatacgtagaaagaagcccttagcaaaacatacaacagaacgttctccaatttaggatttgtc

SEQ ID NO: 164762 - DNA, 167 bp, Arabidopsis thaliana columbia
ctcttcacccaaatccatgcaagagacagttacttttttggaaaattccacagagaatcccccaaagatcaaaaccctaacaggttcatgcctattgagactagcgagaaaaccacagtagtagactccgtcctcaacatgatagagcatgaacatgatcctacctt

SEQ ID NO: 164763 - DNA, 253 bp, Arabidopsis thaliana columbia
gacttggactagtgcggctttgactgacgagaacacttgctccgatgggttctcgggtcgggttatggatgggaggatcaagaactcggttcgggctagaatcatgaacgtgggacatgaaaccagcaacgctttgtccttgattaatgcctttgctaaaacttactaatttaaaactatattttgtcctgtaaaatatatatatagataaatgtaatgtcttgctaagagtttgatgtgatatattttttcg

SEQ ID NO: 164764 - DNA, 219 bp, Arabidopsis thaliana columbia
cggagatggccgcaacatccgccgctgctgcagctgcttcttccatcatgggtactcgggtggctcccggtatccatcccggttcaggtcggttcacagccgtgttcggtttcggaaagaagaaggcagctcccaaaaagagtgccaaaaagacggtgactacggaccggcctctttgttacccaggtgccatttctcctgactggcttgatggttcct

SEQ ID NO: 164765 - DNA, 467 bp, Arabidopsis thaliana columbia
cactcccaaacgccgggaatgttggtcgtatcagaatggctgctcactggatgcctggcgagccacgaccagcttaccttgacggttctgctcctggtgactttgggtttgacccacttggacttggagaagttccagcgaaccttgagagatacaaagagtcagagctcatccactgtagatgggctatgctcgctgttcctgggattttggtaccagaagcattaggatatggaaactgggttaaggctcaggaatgggcagcactaccagggggtcaagccacttacttgggaaacccagtcccgtggggtactttgcccacaatcttggccattgagttcttagccattgcatttgttgagcaccagagaagtatggagaaagaccctgagaagaagaagtacccggtaggcgcatttgaccctcttggatactctaaggaccccagaagctcgaggatttga

SEQ ID NO: 164766 - DNA, 457 bp, Arabidopsis thaliana columbia
gtcgaagcggctcgagctcgtcgatcttggctgatcagatggctggacaatggtatgcgagagcttgtggactgaagccgatagcgaaagaagaatggataaagaaagcgttggagacggtctacgacttcaatgtgatgagagtgagagatggaacacgtggtgctgtgaacgggatgttacctgatggacgagtagacacaagcacgatggtgtcgagggaggtttgggctgggacaacatactcggtcgcggcttgtatgattcaagaagggcttgcggataaaggttttaggacagcaagtggaatctatgaggccgcttggtccgaccgtggtctaggctgcgcatttcagacaccagaggcatggaccaccaacgatgaatataagtcactttgttacatgaggcctttagctatttgggtatacaatgtgcacactcaatggcataacct

SEQ ID NO: 164767 - DNA, 341 bp, Arabidopsis thaliana columbia
actcatttctactatacagtataatggcaaaccaaatctacataatctccttgatcttcttgtctgtgttactttatcaatccactaccgtcttatctttccgacaaccattcaacctagcgaaaccatgcaagcgtttcgtcttctacctccataatgttgcctacgacggtgataacacggataatgctacatcagcagcaattgttaaccctttaggtctaggagacttcagttttgggaagtttgtgatcatggacaaccctgtgacaatggaccagaacatgctctcggaacaggtggctcgtgttcaaggcttttttctctatcacgggtagacg

SEQ ID NO: 164768 - DNA, 365 bp, Arabidopsis thaliana columbia
gcaaaagaagaagagaaacaacaagaagtagtaatggcttcctctatgctctcctccgccgctgtggttacatccccggctcaggccaccatggtcgctccattcaccggcttgaagtcatccgctgcattcccggtcacccgcaagaccaacaaggacatcacttccatcgcaagcaacgggggaagagttagctgcatgaaggtgtggccaccaattggaaagaagaagtttgagactctatcttacctccctgaccttagtgacgtcgaattggctaaggaagttgactaccttttccgcaacaagtggattcctttgtgttgtattcgagttagagcacggatttgtgtaccgtgagcacg

SEQ ID NO: 164769 - DNA, 122 bp, Arabidopsis thaliana columbia
aagatcgtttactctttcctcaatttcgaacaaagttttcgaattttccaactctctctagtgaatttagggttctgatttcgacattagtgtaaagatttgtttctcatccgaggggcgcg

SEQ ID NO: 164770 - DNA, 146 bp, Arabidopsis thaliana columbia
ttcacattctcttctctctcgatatcatctaaatctctctcgatctcaatttcgcaaaatggctgacaagaagatcagaatcggaatcaacgggttcggaagaatcggtcggctgggtgctcgagctagtcttcagagggatgatg

SEQ ID NO: 164771 - DNA, 259 bp, Arabidopsis thaliana columbia
cggacgcgtgggtgaaaataacagtcaactctttgtgcatgtggccttctttgccatttctcacatccctccaatgactgagttaacttacgactatggagtatctagaccaagtgggactcaaaatggcaatcctttatatggcaaaaggaaatgcttctgtggatcagcgtattgccgtggctcatttggatgatgatggagagaaaggcgatctctggtgaacaactggagtcggatgattttggttgcaaaaagc

SEQ ID NO: 164772 - DNA, 113 bp, Arabidopsis thaliana columbia
ggcgaatatgtaccggaagttggcactctgcggtggtgagggaggacaagaatgatacgtcgagttttatgagggggggggtttatttttttattttattttatttctatttt

SEQ ID NO: 164773 - DNA, 245 bp, Arabidopsis thaliana columbia
aaatgaattaattcaacagcgagtatatcttcatctctctctctctcgccagattttcatcgactcgatttcagatttaagatctcagatacaaaactccgacatgtctacgttcagcggcgatgaaacagctcccttcttcggcttcctcggcgctgcagccgcactcgttttctcctgtatgggagctgcttatggaaccgcaaagagtggtgttggtgtggcttctatgggagttatgagac

SEQ ID NO: 164774 - DNA, 461 bp, Arabidopsis thaliana columbia
cgtaactgtacaatttccctagcattagtttgtttttcttctttcttttatagaaaatgtgataagtgatagtgataggttgaagctaaaacgagtgaaggaaaaagacaagagaggcaaaacaagtaaactcagctttgtgttgtcatcttctgtagagtgggattccactcttcttgttcatgtcacctctctctcaatctaagtaaaattaattacaactttagcctctctatatattccacacctctctgtatttctcactactccaaaagtactcacaacaacacagaggtagggaaagaagatgaagatgtcggagagacgagttgtgtcctatcgtaaatcgacactcaagtgttgggattggtgtaaggagcagagaacgcgtgcttatatcatctggaggtgtttgattttcttgttacagtgggatgacttttgatcatacaagaatagtg

SEQ ID NO: 164775 - DNA, 346 bp, Arabidopsis thaliana columbia
aggaagaggagatgcttggatcactacgtgctgttacccattggactcctagtgcttttgcaactgctcaaaaggaatgcgtagactcttctttttcacagaattcctacatctcctatgagagcatgcagaagcttgggatttctcaagctgtgcagttcttacagtctagatacccagatggcacacctttagctgctgtatttattcattcctcaatgattgagatgctggattctgcaactgaggatgctattgaacaaaacaagtggatcgattccctctctgtattaccctcatcggtcacgtcacaggatgcaaacaagatgttgcttctttgtccctt

SEQ ID NO: 164776 - DNA, 454 bp, Arabidopsis thaliana columbia
cattagtttggccttctcaccaaccgctttcatttttttgaactatgaccttaaggtcccaaagtttgagttcatgtcacatgcaaaaccgtctttatttgagtacccaaaacccaccacggttcctacagccaataccgccgttaaacttccaaccgctgttctctcaacttcagttaaagccaaagctagggctaagaaagaagcagagcaaaaagctattgctgagaaaacatctggccctgaaaagcctgtcaatgaaagtggatctggaaaaggaaaagcatcaactgagaaggaaggagactctatgcaggtcgatagcccagcagcggtcgagaagaaagcacctgagcctgagccagcgtttgagattttagtgaacccagctcgagtagtcccagctcaagagaaatacataaagttacttgatgacagcagatatgtaccagtg

SEQ ID NO: 164777 - DNA, 410 bp, Arabidopsis thaliana columbia
ggctgaagtgagagctttcttcgacgtgcacgagcaagatggtagccaccccggaggaattcacctagaaatgactggtcagaacgtgaccgagtgcatcggtggttcacgcacagtcacattcgacgacttgggttcacgttaccacacgcactgtgatcctcgccttaatgcttcacagtctcttgagctctccttcatcatcgccgaacgtcttagaaagagacgcatcaagtctcaaaaggcttttgccctctaatcaaataaacattgcttataataatatctatctatataaatgtgtgtgtgtgtgaacttaatacaatctcatttatctttgattcaaatcttgagtcaaaagaacgcttaaggtttctgtctttatgttggcagggagtattattttcttt

SEQ ID NO: 164778 - DNA, 213 bp, Arabidopsis thaliana columbia
aaagtaaaaacaaagactcgagttaatatgtctagtactgaagaaatgtcatcagtcaaaaacacaactcaggttattggcgttgacccatctccaccgtacgagttaccatcgttcaatcttccaccgtctataatgataccccggccactttagacaaggcggagaagtttattgtggaggcggcgagcaaaggagcgaagttggtgttgt

SEQ ID NO: 164779 - DNA, 397 bp, Arabidopsis thaliana columbia
gtttgtgatatgataatccagcaactgcacgatcagcgtgttgtacttattaacctggactcgttctatcataatctgactgaagaagaacttgctagagttcatgaatacaactttgatcatccagacgcatttgacacagagcatttattgtcttgtatggagaaattgaggcaagggcaagctgtagatattccaaaatatgattttaaaacttacaggagcagtgttttcagaagggtaaatcctacagatgtaataattcttgaagggatacttttgttccatgatccacgcgtccgaaagttgatgaacatgaagatttttgtttgcacagatgctgacgttcgtttggcaagaaggataaaaagagatactgtcgagaatggtagagata

SEQ ID NO: 164780 - DNA, 416 bp, Arabidopsis thaliana columbia
agagacagagattcatcgatatggcggtttcttgcaaccactctgcgattctcttctctccatcatccaccgctggttcctcctccgttacttcttcctcgtcgctcatcggctttcctcgtttccaaacgctgcgtttcaaatcaagaagcgtttattcgaaatctagagtttcttctcctgtctcggcattgcctttacgttctctagaagctctgattttcgattgcgacggcgtgattctcgaatccgagaatctacaccgtcaagcttacaacgatgctttctcgcatttcgatgttcgatgtcctccttcttcctctgagtctctcgattggagcctcgagttctacgataagtttcagaatctagtcggaggtgggaaaccgaaaatgcgttggtatttcaaagaaaat

SEQ ID NO: 164781 - DNA, 391 bp, Arabidopsis thaliana columbia
atcagacacaaaaagtatctctctccggtcttgtgtcaaggttatgcaagaagcggcactaggtatgatgggagccaccgtaggcggagacggagacaccgcggtcgtggcggagcagaatagacagttgaaaggtgagatagcgacacatccgatgtatgagcaattattagccgcacacgtggcgtgtttaagagtagctactccaatagatcaacttccgatcattgaagctcagctttctcaatctcatcatcttctccgttcttacgcttccacggccgttggataccatcatgatcgtcacgagctcgataatttcttggcacaatatgtaatggtggtgtgtagcttcaaagaacagctgcaacaggacgggaggggtcatgcc

SEQ ID NO: 164782 - DNA, 406 bp, Arabidopsis thaliana columbia
  unsure (1)..(406): unsure at all n locations
aaaaaaaaacacaaaaagtttcaatggccgcctccacaatggctctctcctcccctgccttcgccggaaaggctgtgaacctttcccccgcggcatctgaagtcctcggaagcggccgtgtgacaatgaggaagactgttgccaagccaaagggtccatcaggcagcccatggtacggatccgaccgagtcaagtacttgggtccattctctggcgagtcaccgagctaccttaccggagagttccccggagactacggatgggacaccgctggactttcagctgatcccgagacattcgcanggaaccgtgagctagaagttatccacagcaggtgggctatgctcggagccctaagctgcgtctttcctgagcttttggctaggaacggagtcaagttcggaga

SEQ ID NO: 164783 - DNA, 276 bp, Arabidopsis thaliana columbia
gctgtcattgacagaatgtgagacacagtcacgttcctgcatcatgtgccatcgccaattggtcgtgaaaaacgttttcaactgcagcatttttcttatatgagcagatccatacagatgatgcatttgggcatcaaatgattagaaatttggagagtcggagatgtgcactctcaagcattgacgcatcaccaactttacttgcacaggagagagtgagacttgataatggatggcagagagctagtgcctgtgacatgctcaaagtgtatgggt

SEQ ID NO: 164784 - DNA, 307 bp, Arabidopsis thaliana columbia
atcatttctctctatctctttctaaaacacaaccatgactgtttcttcatctccatgggctctcatggctctctttctaatggtttcttcaacaatggtaatggctattcctccacgcaaggccattgatgtaccatttggtcgtaactacgtcccaacttgggcttttgaccaccagaaacagttcaatggcggttccgaacttcagcttatcctcgacaaatacactggcacaggatttcaatcaaaggggtcatattttgttggacattttagtatgcacattaaagtttccagctggtgacac

SEQ ID NO: 164785 - DNA, 312 bp, Arabidopsis thaliana columbia
atcttgagagaaaaaaacagagcaagtatattagagatctcatggcgatggcggtctccggagctgtcctcagtgggcttggttcttcgttcctcaccggaggcaagagaggtgccaccgcattggcaagcggcgtaggcactggagctcagagagttggcaggaaaactcttattgtcgctgctgcggctgctcagcctaagaaatcttggatccctgccgttaaaggtggtggcaactttcttgaccctgaatggctcgatggctcgctaccaggagatttcgggttcgacccattgggtttggggaaag

SEQ ID NO: 164786 - DNA, 227 bp, Arabidopsis thaliana columbia
gagaaaaccaaacgcaggttcgacaactacgggaagtacggattgttatgcgggtcagacggtttaccgcacttgatagtgaacggagaccagcggcattggggagagttcattactccagggattcttttcctctacattgctggatggatcgggtgggttgttagtaccttctttcttatctaacccgattcatatgatactctcctcttatctcttttttttct

SEQ ID NO: 164787 - DNA, 396 bp, Arabidopsis thaliana columbia
ccttgtatagctgccattggattcagtggtacacaagtttggagaaccgaaggatttatcactgctgaagaccttgcatccagtttagagaaagcgtggttaggacttcatatccaggaaacaactgcaagtatcttttcagcagcacttgcatcacagaactcagagacacctgtttctagtgcttcgagtgttgtcttgcctcccggaagtgttcctttagatgcagcggttgcatcttcatcgacggcttctagtgttcaaccctcagagacaaagtcaacggtaacatctgcatcaacaacagaaaacaatgatggcacagctgcagttaagggcaaagaatctgttgaacccagtaatttgtgtgatactactaaaaaccagccagcaccc

SEQ ID NO: 164788 - DNA, 242 bp, Arabidopsis thaliana columbia
cgcgcaagagttttgaagatctgatacagaaattttttctcgggaaaattcagagggaagatcgatactttccacaacggagaaggtgtttcgtttctgctgatcagcagattacttcttctttttctcggattgatccttttggatttttcgtaagatggaccctaatcatcagattctggcaccaggtgaaatttatgcaatcccaagggcatgtcttttacatgttctcttcaagggtg

SEQ ID NO: 164789 - DNA, 182 bp, Arabidopsis thaliana columbia
acttcgcaactaaaactcaagaacagggataccgatttacgaagcagagccattgcttctcttcttcatcttgttcactctgttgggagccattggagctctcggagacagaggaaaattcgtcgacgatcctcccaccgggctcgagaaagccgccattcctcccggcaaaaaacgtccga

SEQ ID NO: 164790 - DNA, 84 bp, Arabidopsis thaliana columbia
cgccggagatggccgtcactttattcgccgctgctgcttcttcaatcatgggtacccgggtgagttgcgtcattacgctccaat

SEQ ID NO: 164791 - DNA, 354 bp, Arabidopsis thaliana columbia
agcaaccatgagagcttgcaagctatggaaaatcccatcattagacattcttggaccaatcacagagtcaatctcctctcacttaggcactaatccttccggtctttcacgtggcataacaaactcatctctcaacgaagactacttcaaaagaatcgaagctatcgaattcactatcaaacacgacgacggtgccttgcccgagaatcttgaaaaagctgacattgttcttgtaggtgtctctaggacagggaagacaccactctcgacttacttagctcaaaagggctacaaagtctctaacgtaccgaatgtgaacggtgttgatcttcccaagactttgtttgagatcga

SEQ ID NO: 164792 - DNA, 355 bp, Arabidopsis thaliana columbia
caaggctaggccgcagagagtctgatatcaagaacagattcactttgcctccaaacctgacattgaagaactttgaaggacttgacctcggaaagatggacgaggccaatgactctggcttggcttcatatgttgctggtcaaattgaccgtaccttaagctggaaggatgtccagtggctccagacaatcaccaagttgcccattcttgtcaaaggtgttcttacaggagaggatgcaaggatagcgattcaagctggtgcagccggaatcattgtatcaaaccatggagctcgtcagcttgactatgttccagcaaccatcttggtccttgaagaggttgttaaagcgacaca

SEQ ID NO: 164793 - DNA, 354 bp, Arabidopsis thaliana columbia
atcatcagatcaataaaaaccagaagaagtcatggctcagaacgatacagtgaagctgataggttcttggtctagcccttattcccttagggcacgtgtggctctacacttgaaatctgtcaagtacgagtacttagacgaacctgatgttcttaaagaaaagagtgaactccttctcaaatctaaccccatccacaagaaagtccctgtcctcctccatggtgacctctccatctctgagtccctcaacgttgttcaatacgtcgacgaggcttggccctccgttccttcaatccttccttctgatgcctatgatcgcgcatctgctcggttttgggctcagtacatcgatga

SEQ ID NO: 164794 - DNA, 456 bp, Arabidopsis thaliana columbia
tccagtcgaaacatatcgaagttggcatcaaaggcaaccctccctatctcaatcacgatcttagtgctcctgtgaagactgattgctcgttctggactctagaggatgatataatgcacattaccctgcagaagagggagaaagggcaaacatgggcatcaccgattctgggacagggtcagttagatccttacgccactgatcttgagcagaagcggctcatgctccagaggtttcaagaagagaacccgggattcgacttctcgcaagctcagttctcgggtaattgtccagatccaaggagcttcatgggcggtattcgttctgactaaataaataatagtcccactcttgttgctataatagtatgtccattataacaaactcaaaagtcaccatgacttaaacaaaatgtctcatgtctcataaataaaccccctgactctctgttttatt

SEQ ID NO: 164795 - DNA, 276 bp, Arabidopsis thaliana columbia
cgtccacatctttctcctttggtggcaaacacatcgacagatagagagaaacgatggcgtcgaactcgcttatgagctgtggcatagccgccgtgtacccttcgcttctctcttcttccaagtctaaattcgtatccgccggagttccactcccaaacgccgggaatgttggtcgcatcagaatggctgctcactggatgcctggcgagccacgaccagcttaccttgacggttctgctcctggcgactttgggtttgacccacttggacttgcag

SEQ ID NO: 164796 - DNA, 213 bp, Arabidopsis thaliana columbia
gaagaagcctctcagttctcacagcgaagatgcctacagtaagcgtgaagtggcaaaagaaagtgttggatggtatcgagattgacgttagtctgcctccttatgttttcaaggctcagttgtatgatttgactggagttccaccagaacgccaaaagatcatggtcaaaggtggtctcttaaaggatgatggagattgggctgctattggtg

SEQ ID NO: 164797 - DNA, 279 bp, Arabidopsis thaliana columbia
gtcgtttggctccaatgctctccttgcaaagcctgttacaaccagaccgacgccatttttgacccgaagaaatccaaaactttcgccaccgtaccatgtggatctcgcctttgccggagactagacgactcgtcggaatgtgtcactcgtcgaagcaagacttgtctctaccaagtatcgtacggtgacggatcattcaccgaaggagatttcttaactgaaacgctgacgtttcatggagcgcgtgctgatcacgcgccgttaggatgccggaacgtt

SEQ ID NO: 164798 - DNA, 335 bp, Arabidopsis thaliana columbia
atcaaaaagcttttaacctcagccgttaaatctttctccgatcatgccgaccagaaacatcgccattggtggagtccaagaagagggctatcaccccaacgcacttagggcggcgctcgctgagcttatctcgactttgaccttcgtcttcgccggctcaggctccgtcattgctttctatccgatcactgactttggtgccatcaattcttcccggtctctctcgcgctgcctcagcttcatgcttcttcgtctcttcccccttcctccttctcttatccttcccccttttctctctccctcctctttccctcatcttccttccttatcctctt

SEQ ID NO: 164799 - DNA, 445 bp, Arabidopsis thaliana columbia
caaccaaaaaaaagaaaacacaaaaacaaagattataatggcttcctcaaccatggctttgtcctcccctgccttcgccggaaaggctgtgaagcctgccgcatcagatgtcctcggaagcggccgtgtgaccatgaggaagactgtcgccaagccaaagggtccatcaggcagcccatggtacggatctgaccgagtcaagtacttgggtccattctccggcgagcccccgagctaccttaccggtgagttccccggtgactacggatgggacaccgctggtctatccgccgacccagagaccttcgccaggaaccgtgagctagaagttatccacagcagatgggccatgctcggagccctaggctgcgttttccctgagctattggctaggaacggagtgaagtttcgaagagcggtttggttcaaggcccgttcacagatc

SEQ ID NO: 164800 - DNA, 192 bp, Arabidopsis thaliana columbia
ctcacttatccgctcggccgattccacatcgcttggacgtagtcgtcgacgatcgccgtggctatccatgaccagatcttaaaggctgggcggacggtcacattcaatacccaatatctggtatcagttggccgtgacgaagactgttgccatgccaatggtcccatcatgctgcccatggtactgatctga

SEQ ID NO: 164801 - DNA, 227 bp, Arabidopsis thaliana columbia
ggaattggcaggcctaagcgcatagagaatgcaaatatcttagtagctaatactgctatggataccgataaagtgaagatttacggtgcacgtggtccgtgtggattccatgaccaaggttgctgagattgaaggcgctgagaaggaaaaaatgaaagacaaggtgaagaagatcataggccacggaatcaactgctttgttaacaggcagttgatctacaattttc

SEQ ID NO: 164802 - DNA, 81 bp, Arabidopsis thaliana columbia
gaaatttttgtttaggttcacatggaatatttgtgagctggtgcagacattgtgggtacttcatgcttatcagagctacga

SEQ ID NO: 164803 - DNA, 333 bp, Arabidopsis thaliana columbia
attataagaaaattggcgctaagctcaaggagttagttccttgtgtgcttctgtctttcgatgatgagcaaatactcatgtggagaggacgagaatggaagtcgcggtttgtagacaatcctctaattccaagcctttctgagaccaacacaacgaacgaacttgatccctcagacaaacctagtgaagaacaaactgtggctaatccaagtacaacgatctcaagccccaaaatgatctcgctctggcaacgagcgttggaatcgtcgaaggctgtgattcttgaagagcttgacctcggtccagacgatctattgaagaaggtggaagagt

SEQ ID NO: 164804 - DNA, 328 bp, Arabidopsis thaliana columbia
cattttctgaatcaaaattttctggaaacaatggggagcttggggacgatgctgagatatccggatgacatatatccgctcctgaagatgaaacgagcgattgagaaagcggagaagcagatccctcctgagccacactggggtttctgctattcgatgctccacaagggttctcgaagcttttctctcgttattcagcaactcaacaccgagctccgtaacgccgtgtgtgtgttctacttggttctccgagctcttgatactgttgaggatgatactagcatacccacttgatgaaaaggttcccatcctgatagctttttaccgg

SEQ ID NO: 164805 - DNA, 335 bp, Arabidopsis thaliana columbia
gaatttcaaaccttcacataaaaaaaatacttttgaatccgtgtttcattcatcgaatctttttccgataactatggctgaggaaatcaagaatgttcctgaacaggaggtgccaaaggtagcaacagaggaatcatcggcagaggttacagatcgtggattgttcgatttcttgggaaagaagaaagacgaaacataaccagaggagactccgatcgcttcagaggttgagcagaaggttcatatttcagagccggagccagaggttaaacacgaaagtctttcttgataagctctaccgaagcgacagttcctcttagctacttcaagtgcgg

SEQ ID NO: 164806 - DNA, 280 bp, Arabidopsis thaliana columbia
gaaaaacaaaatggcttcgatgggtggattacacggtgcatctccggcggttcttgaaggaagcttaaagatcaatggctccagccgtctgaatggctctggaagagtggcggtggctcaaaggtctagacttgtcgtcagagctcagcagagtgaggagacttctcgccggtccgtgattgggcttgttgctgctggtttagctggtggctcgtttgttcaggctgttctcgccgatgctattttgatcaaagctggcccttctccagcttctttcggt

SEQ ID NO: 164807 - DNA, 225 bp, Arabidopsis thaliana columbia
tcatcgtccattactcacctttcagtttcagatgcccaagcaaaaagctccaaggaagcagctcaagtcctataaactcaaacacatcaacaagagtattcaagagggagatgctgtgttgatgcggtcgtcggagcctggaaaaccgtcgtacgtagcgagggtagaggcgatcgagacggacgcgcgtggatcgcacgcgaaagttcgtgtgaggtgggatta

SEQ ID NO: 164808 - DNA, 185 bp, Arabidopsis thaliana columbia
cgatttcaatggagtcacgcgtgctgttacgcgccaccgcgaatgtcgttggaattccgaaattgagacgaccaatcggagcgatccaccgtcaattcagcactgcatcgtcttcctcgttctcggttaaaccaatcggaggaatcggagagggagcgaatctgatctccggtcgtcagctttgt

SEQ ID NO: 164809 - DNA, 270 bp, Arabidopsis thaliana columbia
gtcaaaggtacttaaggctgaagatgtcgatttaatgatcatcgctagaggaacgcctggattttctggcgctgatttggctaatctggtcaatgttgctgctttaaaagctgcaatggacggttctaaagatgtgacaatgtctgatcttgagtttgccaaagacagaatcatgatgggaagtgagaggaaatctgcagttatatctgacgagtcaagatagctaactgcttttcatgaaggtggtcatgcccttgttgccattcacac

SEQ ID NO: 164810 - DNA, 111 bp, Arabidopsis thaliana columbia
  unsure (1)..(111): unsure at all n locations
tttcaccaggaaaaaagggtttttttttttttttttngggattcgtggttcagccttcttttcgaaagatttgggaaagatccaaagattcacatttttttttcgtttttt

SEQ ID NO: 164811 - DNA, 454 bp, Arabidopsis thaliana columbia
caaatgtcgaccgctcctctctccggcttctttctcacttcactttctccttctcaatcttctctccagaaactctctcttcgtacttcttccaccgtcgcttgcctcccacccgcctcttcttcttcctcatcttcctcctcctcgtcttcccgttccgttccaacgcttatccgtaacgagccagtttttgccgctcctgctcctatcattgccccttattggagtgaagagatgggaaccgaagcatacgacgaggctattgaagctctcaagaagcttctcatcgagaaggaagagctaaagacggttgcagcggcaaaggtggagcagatcacagcggctcttcagaccgggacttcatccgacaagaaagctttcgaccccgccgaaaccactaagcagggcttcattaaattcaagtaggcgctattcccatacccacccctgcttt

SEQ ID NO: 164812 - DNA, 446 bp, Arabidopsis thaliana columbia
tagccatggcctcttctttctcttcacaagccttcttcttgctcacattgtctatggttttaattcctttctctttagctcaagctcccatgatggctccttctggctcaatgtccatgccgcctatgtctagcggcggtggaagctcggttcctcctccagtgatgtctccgatgccaatgatgactccaccacctatgcctatgactccaccacccatgcccatgactccaccacctatgcctatggctccaccaccaatgcccatggcttcaccaccaatgatgccaatgactccatctacaagcccaagcccattaacagttccggatatgccttcgccgccgatgccatccggaatggaatcttcaccttctccaggacccatgccaccggcaatggcggcttcgccggattcaggagctttcaatggtagaaacaacgtc

SEQ ID NO: 164813 - DNA, 402 bp, Arabidopsis thaliana columbia
  unsure (1)..(402): unsure at all n locations
cctttctaaaaatgaaaagcctttctttcttcttcaccatcctcctctctctctcgaccctcttcaccatctccaacgcacggaagtttaatgtcggaggcagtggcgcgtgggttacaaacccacctgaaaactacgaatcttggtctggcaaaaaccgtttccttgttcacgacactctctattttagctacgctaagggagctgactcggtgctagaggtgaacaaggctgattacgacgcttgtaatacaaagaatccgatcaaaagagtggacgatggagattctgagatctctcttgatcgntatggtcccgtttacttcatcagtggcaatgaagataactgtaagaagggtcaaaagcttaatgtcgntgtcatatctgctaggattccatcaa

SEQ ID NO: 164814 - DNA, 345 bp, Arabidopsis thaliana columbia
gctgtccttatcattgactccaccactggtggttttgaggctggtatctccaaggatggtcagacccgtgagcacgctctacttgctttcacccttggtgtcaagcagatgatctgctgttgtaacaagatggatgccactacccccaagtactccaaggccaggcacgatgaaatcatcaaggaggtgtcttcctacttgaagaaggttgatacaaccccgacaaaatgccatttgcgcccatctctggaattgagggtgacaccatgattgagagggccaccaaactttgactgggacatgggaccaacttctcttgaggcttttgaccagatcaacgagccc

SEQ ID NO: 164815 - DNA, 415 bp, Arabidopsis thaliana columbia
ctttctcctttggtggcaaacacaacgacagatagagagaaacgatggcgtcgaactcgcttatgagctgtggcatagccgccgtgtacccttcgcttctctcttcttccaagtctaaattcgtatccgccggagttccactcccaaacgccgggaatgttggtcgtatcagaatggctgctcactggatgcctggcgagccacgaccagcttaccttgacggttctgctcctggtgactttgggtttgacccacttggacttggagaagttccagcgaaccttgagagatacaaagagtcagagctcatccactgtagatgggctatgctcgctgttcctgggattttggtaccagaagcattaggatatggtaactgggctaaggctcatgaatgggcagcacttccaggggg

SEQ ID NO: 164816 - DNA, 368 bp, Arabidopsis thaliana columbia
atcctcttccttgcgttctctctttctctctctcgccgacgacgaaaacatgggtgccaaggcgaagaaagctttgaagaagaacatgaagaaagttgctgcttcggcttcttcttctcagctacctcttccccagaacccgaaaccttcagctgattttttgccactagaaggaggtccagctcgaaaagctccagttaccaccccacctcttcagaataaagctactgtgctatacatcggtagaatccctcatggcttctatgagactgagattgaagctttcttctcgcagattggaacagttaagagagttagagtcgccagaaacaaaaagactgggaaatcaaagcattttgggttcatac

SEQ ID NO: 164817 - DNA, 381 bp, Arabidopsis thaliana columbia
tccctcttcaagtcggctcctttattgctacagtgaaaaagtttcgagctttagaaacaatggcggctttccccaacctcaactctggctccggattgaagaagctcgatgagcatcttctcactcgcagttacatcactgggtaccaagcttcaaaggatgatatcactgtgtttacagctctttcaaagcccccaacttcagagtttgtcaatgtatctcgttggttcaaccacatcgatgccctcttgaggatctctggtgtctctgctgaaggaaagggtgtcattgttgaaggggcactacctatcacacgagaggctgttgctatctcccctggaggtgtatctaaggatactgttgttgcagaagaagatgatg

SEQ ID NO: 164818 - DNA, 88 bp, Arabidopsis thaliana columbia
atctggagcaacaggatttacaaaagttattatctttatcgtttactcttcttcctagacccaacagacgaagagaatttgtcgttgg

SEQ ID NO: 164819 - DNA, 448 bp, Arabidopsis thaliana columbia
aaaaaaaaaaacacaaaaagtttcaatggccgcctccacaatggctctctcctcccctgccttcgccggaaaggctgtgaacctttcccccgcggcatctgaagtcctcggaagcggccgtgtgacaatgaggaagactgttgccaagccaaagggtccatcaggcagcccatggtacggatccgaccgagtcaagtacttgggtccattctctggcgagtcaccgagctaccttaccggagagttccccggagactacggatgggacaccgctggactttcagctgatcccgagacattcgcaaggaaccgtgagctagaagttatccacagcaggtgggctatgctcggagccctaggctgcgtcttccctgagcttttggctaggaacggagtcaagttcggagaggcggtttggttcaaggcccgttcacaaatctttagcgat

SEQ ID NO: 164820 - DNA, 241 bp, Arabidopsis thaliana columbia
acggctacaaaacctgcgtgatcacaccgtttgtcgaacaattcaagaagatgaggagagtgatcatgacagagatgtgtttgtccagcgagacaccgttggctacacgacaatagagctgaggaaaccgatcacttgaccgcttggctctacagcatggttaagaactatgctccagttgatctccgctctgatgcacctcacttctgtctatatgtattcacgaggtcttctctacgct

SEQ ID NO: 164821 - DNA, 379 bp, Arabidopsis thaliana columbia
cacagcaggaagctagtccttcccctggtgctgaggttgttggtcgtgcctttgtggagcaatactatcatattcttcaccaatctcccggtttagttcatcggttttatcaagattcgagctttttaacccgacctgatgttaccggtgctgtgactactgtcacaactatgcaagcgatcaacgacaagattctgtcgttgaaatatgaagactacacggctgagatagaaactgctgatgctcaggagtctcatgagagaggtgttattgtgctggttacaggacgcttaaccgggaacgataatgttaggaagaagtttagtcaatcttttttcttggctccacaagacaaaggatactttgtcttaaacgacgt

SEQ ID NO: 164822 - DNA, 341 bp, Arabidopsis thaliana columbia
gcgagatgggctatgttaggagcagctggtttcatcattcctgaagctttaaacaaatatggcgctaactgtggccctgaagctgtctggtttaagactggtgctttgcttcttgatggaaacacattgaactactttggcaagaacatccctatcaaccttgttctcgccgtagttgctgaggttgttctcctcggtggagccgagtactacagaatcaccaacggattggatttcgaggacatgctacacccaggaggtccatttgatcctctaggccttgctaaggacccctggcaaggagctcttctaaaaggcaaagagatcaagaaacgggagat

SEQ ID NO: 164823 - DNA, 475 bp, Arabidopsis thaliana columbia
gtccacatctttctcctttggtggcaaacacaacgacagatagagagaaacgatggcgtcgaactcgcttatgagctgtggcatagccgccgtgtacccttcgcttctctcttcttccaagtctaaattcgtatccgccggagttccactcccaaacgccgggaatgttggtcgtatcagaatggctgctcactggatgcctggcgagccacgaccagcttaccttgacggttctgctcctggtgactttgggtttgacccacttggacttggagaagttccagcgaaccttgagagatacaaagagtcagagctcatccactgtagatgggctatgctcgctgttcctgggattttggtaccagaagcattaggatatggaaactgggttaaggctcaggaatgggcagcactaccaggggggcaagccacttacttgggaaacccagtcccgtggggtactttgcccacaatc

SEQ ID NO: 164824 - DNA, 234 bp, Arabidopsis thaliana columbia
cacacatctcctattgcaaacgaacataaaacactacctaagagatcaatatggctggagtgatgaagctggcatgctcgctcttggcctgcatgattgtggccggtccaatcacatcgaacgctgcgctaagctgaggctcagttaacagcaactcggcagggtgcattggctacgtgctacatggtgctgccattatcccagcggtgtggtacggtgttaaaaaccttcaat

SEQ ID NO: 164825 - DNA, 121 bp, Arabidopsis thaliana columbia
cttgaatttttcaagaacaaaagaaaaagacatctttaatggcggccatgaactcgagtgttctcacttgcagctacgcaattgctggctttggctcggtagagcttaaccagaagttggt

SEQ ID NO: 164826 - DNA, 143 bp, Arabidopsis thaliana columbia
cttctcttctcatcgtctcaaatcttctccgatttactttacttaccactttcctcgttccgggaagagaccacatttcgacttgcgatgctcagtctcaatcgagaaagaagttccggtaacagaacgacccttcactttcc

SEQ ID NO: 164827 - DNA, 105 bp, Arabidopsis thaliana columbia
ctttcgttagtttttccaatttcggatttggtcttgttgagaatatatttacgattttaattgagagattttgtgatagctcaatgtcaatggagtgtgtggtca

SEQ ID NO: 164828 - DNA, 187 bp, Arabidopsis thaliana columbia
atttatcgccggagaccgtcacgatatacggaagctacgaggagcttttaaacgatgcaaacgtggacgccgtttacttgacgatgccggtgacgcaacgagcgagatgggctgtgacggcggcagagaagaaaaagcatgttcttgttgagaaaccaccagcttaagacgcgacggagctggagaa

SEQ ID NO: 164829 - DNA, 375 bp, Arabidopsis thaliana columbia
atcttaaacgttttactttgtgctgcactactctacctcaatggccgcctcaacaatggctctctcctcccctgccttcgccggtaaggccgtcaagctttcccccgcggcatctgaagtccttggaagcggccgtgtgacaatgaggaagactgttgccaagccaaagggcccatcaggcagcccatggtacggatctgaccgtgtcaagtacttgggcccattctctggcgaatcaccgagctaccttaccggagagttccccggagactacggatgggacaccgccggactttcagctgtccccgtgacattcgctaggaaccgggaccttttaagttatccacagcagatgggccactcttcgaaccccta

SEQ ID NO: 164830 - DNA, 224 bp, Arabidopsis thaliana columbia
attatctacgactttgtcttcatcgatgaaaatgcccacgagcaattgcctaccaccgattactgaagacgtcaaattcaacgttgttaatctgatgaatttttcgtgatttgcttttttaatttgcatcgtaatgggtttctggccgttggatcatttttagatgaatctttgtctattgattgatcatttatgtgtctttgggtttgttgttggagttgtta

SEQ ID NO: 164831 - DNA, 242 bp, Arabidopsis thaliana columbia
tggaactggaatcaacccagcaagaagtcttggagctgcaatcatcttcaacaaggacaacgcttgggatgaccactgggtcttttgggttggaccattcattggtgctgcacttgctgctctctaccacgttatagtcatcagagccatcccattcaagtccagaagctaaagctgattgagttctatttaaaatctgggttttgttcttagtctgccttttttttgtgaatatactaacc

SEQ ID NO: 164832 - DNA, 238 bp, Arabidopsis thaliana columbia
gtttttgttaacaatcattttgttcaagtcctgtaataaactaaggagcatgacataatcagaacaaatcaacaaggtaataataacgtatctttcatttcattccttaattagagtgaccaaacttgacactgttctatacagctttaatctgtttggttacccttgcggaatagatcaacgagtatgttccagattttgatcctcaaagcggaagctttttccggtttaaaccact

SEQ ID NO: 164833 - DNA, 59 bp, Arabidopsis thaliana columbia
acggccgaggacttgctttaccccggaggcagtttttacccattgggtcaggctaccga

SEQ ID NO: 164834 - DNA, 57 bp, Arabidopsis thaliana columbia
cttcttttcatacctcaagagactaaatctagtttgaggagacttagaggagtattg

SEQ ID NO: 164835 - DNA, 455 bp, Arabidopsis thaliana columbia
  unsure (1)..(455): unsure at all n locations
aaagagagaaagagagacagagataatggcgtacagtgcgtgtttcctacaccagagcgcattggcttcatcagccgcacgatcatcatcttcctcctcatcccagcgtcacgtgtcgctctccaaacctgttcagatcatctgtaaagctcaacagtctcatgaagacgataactccgccgtctcccgccgtcttgctctcactctcctcgtcggcgccgctgctgttggttccaaagtatctcctgctgatgccgcctacggtgaagctgcaaacgtgtttgggaagccaaagacgaacacagacttcttgccatacaatggagatgggttcaaagtgcaggttccagcataatggaacccaagncaagagattgagtatccaggacangtccttaggttcgaagacaacttcgatgctactagcaatcttcatgtcatggtcactcctaccc

SEQ ID NO: 164836 - DNA, 226 bp, Arabidopsis thaliana columbia
cggacgcgtgggctcacttactttggcaacaaacaaacaacaacaaagagagaaattaacatggcgtcttttgcaaccatcgccgccgtacaaccttctgccgccgtgaaaggacttggaggtagctctcttgccggagctaagctcttcatcaaaccttctcgccaaagcttcaaaaccaaatccaccagagctggtgctgtggtgggtaagtatggtgacaaaa

SEQ ID NO: 164837 - DNA, 126 bp, Arabidopsis thaliana columbia
ctcttctctctcgatatcatctaaatctctctcgatctcaatttcgcaaaatggctgacaagaagatcagaatcggaatcaacggtttcggaagaatcggtcgtttggttgctagtgtctgctctt

SEQ ID NO: 164838 - DNA, 189 bp, Arabidopsis thaliana columbia
ctcagtacacttcttttcatacctcaagagacttaaactagtttgaggagatttagaggagtggttggttcttcggattgcgctttcccctcctgttcttgtttattttttatcgagctttcttcctcttgacccttatctgtctcttcatgcttctaaccattcttacttcctcacgcctatctaatg

SEQ ID NO: 164839 - DNA, 169 bp, Arabidopsis thaliana columbia
ggccgccacttcaaccgccgctgctgcttcttcaatcatgtgtacccgggtggtttccgacattagctccaattcaagccgggtcacagtccggttcggattcggaaccaagaaagcatctcccaaaaaggctaagacggatttcttagaccggcctttatgggttccc

SEQ ID NO: 164840 - DNA, 124 bp, Arabidopsis thaliana columbia
gcacaatgggtcaaggaccttccggcggattgaatcggctatggagatcggaaaccagatggtggagagaagaaggagatgaagttcgaaccagcctcaccacctgcttgtgttgggaggttgc

SEQ ID NO: 164841 - DNA, 296 bp, Arabidopsis thaliana columbia
gaacttcctaatgacccagaaacttttgtgcaccgttctggtcgtactgggcgtgcagggaaagaaggctctgccattctcatgcacaccagcagccaaaagagaacagtgaggtctctggagcgtgacgtaggctgccattttgaattcattagcccaccaactgttggagacttgttggaatcgtcagcagaccaagtggtggccactctaaatggtgttcaccctgactccataaagtttttctcagcaactgctcaaaaactatatgaggagaaaggaacagatgctttagc

SEQ ID NO: 164842 - DNA, 226 bp, Arabidopsis thaliana columbia
agagagaccaaaaagagatcggaagagatggcttttacctccgcgacgtgcattggtcacaccacttaaccagacccgttcgactcctttccttaagccattacctacgaaaccatccaaggctttggttgcaactggaggcagagcacagaggcttcaagctaaggtcctcaagatggtcaaggctttgatcggtatattcgaggatgctctaactggttaaagg

SEQ ID NO: 164843 - DNA, 351 bp, Arabidopsis thaliana columbia
ctctagcaccttcagttccgtacaacaatggctctccaagctgcctattctcttcttccttctaccatttcaatccaaaaagagggcaaattcaatgcttctctaaaggagacgacttttactggttcttcattttcaaaccatcttagagctgaaaagatatccaccctgttgaccatcaaggaacagagaagacagaaaccgcgattttccaccggtattcgtgcacagacagttacagccacgccgccggcaaacgaagcatcgccggagcaaaagaagactgagagaaaaggcactgcagtgatcactggagcttcgtctggtttaaggttagctacggccaaagct

SEQ ID NO: 164844 - DNA, 156 bp, Arabidopsis thaliana columbia
ctggacgttaaggacatcagggcggccgtaaactatgattttcccaatggagtggaagactatggtcatagtatcggaagaacaggatgagttgaagcgactggtcaggcattcacattccttggtgatcaagagtcgaaacacgctatggatctg

SEQ ID NO: 164845 - DNA, 183 bp, Arabidopsis thaliana columbia
gttggagggttattctcaaaagaggttttagattctatgaaaggttcaacctcgacaaggcctgctatatttgcaatgtcaaaccccacaaaaaatgctgaatgcacgcctcaagatgcattttcgatattaggtgaaaatatgatttttgcgagtggaagcccattcaagaatgtcgtattt

SEQ ID NO: 164846 - DNA, 69 bp, Arabidopsis thaliana columbia
cgaagtatcgactgcagatgcattttgtggtcatttttgtctaccggatccttaactaatagagggaac

SEQ ID NO: 164847 - DNA, 242 bp, Arabidopsis thaliana columbia
  unsure (1)..(242): unsure at all n locations
acagtttggatttggatttagatctgatcataaaggttaaagtatcattcatggatcgttattcgaagangaatttaaaaaatcggatgtgccctcactattatnatacattanattcntacccttctcctgatatgtgtaatactgcatttatcatgaactcttcacaaacttcttttaaattttttcattattatactctactacaatacttctaatatttttattcttctcatattata

SEQ ID NO: 164848 - DNA, 304 bp, Arabidopsis thaliana columbia
gagtcaaaattttccggtgaaatcgaaaaaaaaagcgagatcttcttctctaatggcgacgaccttaagcagagatcaatatgtctacatggcgaagctcgccgagcaagccgagcgttacgaagagatggttcaattcatggaacagctcgtaagtggagctacaccggccggtgagctgaccgtagaagagaggaatcttctctcggtcgcgtataagaacgtgattggatctcttcgtgcggcatggagaatcgcgtcttagattgagcaaaaagacgagagcaggatgaacgaagaacac

SEQ ID NO: 164849 - DNA, 127 bp, Arabidopsis thaliana columbia
ctctccttagcaggagagtttcgtttcttagatctagtccgctgttttttctttggtcttcaatcgttggtcaaatctactcaatgaaagtccaagagtgggctgaatctattctctgtcaacggtg

SEQ ID NO: 164850 - DNA, 330 bp, Arabidopsis thaliana columbia
acaggtccggaattgaccgcacccgtccaggcacaacaaccatatcactcatttctccacatgttgagatactaaaacagagcaagtatattagagatctcagcgcgatttcgatctcgcgagctgtcctcactgggcttggttcttcgttcctcaccggaggcaagagaggtgccaccgcattggcaagcggcgtaggcactggagctcagagagttggcaggaaaactcttattgtcgctgctgcggctgctcagcctaagaaatcttggatccctgccgttaaaggtggtggcaacttccttgaccctgaatggctcgatggctcgc

SEQ ID NO: 164851 - DNA, 328 bp, Arabidopsis thaliana columbia
  unsure (1)..(328): unsure at all n locations
gcgcatcgcgtncggcgagagaagaaagatagagaaaaaaaatgggaggcaaaggtgtgatgatggtggcgatactttggctttgggcactctctgcaacatctgaagcagtaacagaggctgagccaggtttgatgatgaacttctacaaggacacgtgtcctcaggccgaagacatcgtccgtgaacaagtcaaactcctctacaaacgccacaagaacaccgctttctcttggctccgtaacatctttcatgactgcgccgctgagtcatgtgatgcgtcgcttttggtggattcgacaagaagagagctaggagagaaagaaca

SEQ ID NO: 164852 - DNA, 290 bp, Arabidopsis thaliana columbia
aaaaaagatggcccaaaagctagaagcatagggtggtgagatgggagaagggtggcgagactgtgcctttgtgcactctgtggaacatctgaagcagtaacagaggctgagccaggtttgatgatgaacttctacaaggacacgtgtcctcaggccgaagacatcgtccgtgaacaagtcaaactcctctacaaacgccacaagaacaccgctttctcttggctccgtaacatcttccatgactgcgccgttgagtcatgtaatgctgcgttttatgctggattcgacat

SEQ ID NO: 164853 - DNA, 325 bp, Arabidopsis thaliana columbia
ttttcgaattcggagctcaagtttgaaattcggagaagctagagagttttctgagatggctcggactaagcaaacagctcgtaagtctactggaggaaaggctcctaggaagcagcttgctacaaaggctgcacgtaagtctgcaccaaccactggaggagtcaagaagccccatcgttaccgtccaggaactgttgcactacgtgaaattcgtaagtaccagaagagtaccgagttgctgatcaggaaagctcctttccagaggcttaagtcgtgagaatgcccaggatttcaagactgtctttgcgatttccagagccatagc

SEQ ID NO: 164854 - DNA, 126 bp, Arabidopsis thaliana columbia
caaaaagacttcttgtttcattggatacgatcgtggtactagatcatttctccaagatcaagacaagaagatcattggctcttatggttcagacgcagacactattaactctctcggagcatactt

SEQ ID NO: 164855 - DNA, 222 bp, Arabidopsis thaliana columbia
cacaaaacaaaaaaaaaatggcttccactgctctctcaagcgccatcgtcggaacttcattcatccgtcgttccccagctgcaatcagtctccgttccctttcatcagccaacacacaatccctcttcggtctcaaatcaggcaccgctcgtggtggacgtgtcacagccatggctacattcaaggtcaagttcatcacaccagaaggtgagctagaggttg

SEQ ID NO: 164856 - DNA, 214 bp, Arabidopsis thaliana columbia
tcatctttcaatctctcttgattccaatccattcttcttcaagtgccgggttctcgggtcggatcttctaagtctagctagggataatggctactgtcactactcatgcctcggcctcgattttccgaccttgtacttcaaagccaagattcctcaccggttcttccggtaggttgaaccgcgacttgtcgtttacatcgttcggttcattggc

SEQ ID NO: 164857 - DNA, 245 bp, Arabidopsis thaliana columbia
catcactgaggaagaataaaacatttggggagtttcttcgctaatccttcaaggtgtgacctgagaatcacaacacaaaacaatctcactcgaaattcctttgactcatcatcatcaccatgtggagaagaatcgactcctctcagttcaaaaccctagtcgtcgattccgtcgctgcttctcctcgttgatcgtcagcctttcaccatcagatcctgcgttttctctcttcgtcctctttcttc

SEQ ID NO: 164858 - DNA, 178 bp, Arabidopsis thaliana columbia
agaacaatggcttcctctatgctctcttccgctatctatggttgcctctccggctcaggccactatggtcgctcctttcaacggacttaagtcctccgctgccttcccagccacccgcaaggctaacaacgacattacttacatcacaagcaatggtggtagagtttactccatgcag

SEQ ID NO: 164859 - DNA, 115 bp, Arabidopsis thaliana columbia
ccgaccggattccgggcgaccacgcgtcgttagaggtccaaaaggtggaagatatggagttaaaggagccaacctatgggacgacggatcgtcacatgacgtcgcgaccaagtat

SEQ ID NO: 164860 - DNA, 65 bp, Arabidopsis thaliana columbia
gcgtaggaattgatgcaggcgatcatgtttggttttctagataccttctcgagagaatcacagaa

SEQ ID NO: 164861 - DNA, 185 bp, Arabidopsis thaliana columbia
catcactgaggaagaataaaacatttggggagtttcttcgctaatccttcaaggtgtgacctgagaattacaacacaaaacaatctcactcgaaattcctttgactcatcatcatcaccatgtggagaagaatcgttttctctcagctcaaaaccctagccgccgatgtcgacgctgtttcttct

SEQ ID NO: 164862 - DNA, 99 bp, Arabidopsis thaliana columbia
agcgtgaagagaagagcggctggaggagatattgctcctaccaccagacattacaggagtgtttcagtggacagttgtttcatggagaagttgtttttt

SEQ ID NO: 164863 - DNA, 348 bp, Arabidopsis thaliana columbia
ataaaatagcataataggtgtaatgagatcctctatgaaccatgggaatagagaactgcatagtttatgttgtggctctaagtgctatcgcctctaccttgtcattatcactcttactcatctccttaaactccaattttcatttctcccaactattaacacacctttccttattaccctccccatctcataccatatctcattacgtatctcttactccaactctactcttcatctccaattttctccttcaaatcttcacctcctccatatcttttcactcccccccctctacctttctactctttcctcccactcccacttctcattttccctccctctccattc

SEQ ID NO: 164864 - DNA, 457 bp, Arabidopsis thaliana columbia
cagatctctcccactccgaaaaaccttcccaatccgaatcaacaacggtggaaacgccgccggagcaagaatgtcagccaccgcagcatcaagctacgcgatggcattagcagacgtcgcgaaaagaaacgacacaatggaattaacagtcacagacatcgagaagctcgaacaagtcttctcagatccacaagtactaaacttcttcgcgaatccaacaatcaccgtcgagaagaaacgttaagtcatcgacgacatagtgaaatcgtcgtctcttcaatctcacacatctaactttctcaacgtcctcgtcgacgcgaatcggatcaatatcgtgacggagatcgttaaggagtttgagtcggctcacaattaagttactccttacacattctttctcagttcatttcttttttataattcatctcttctctttcattattttatcttcattttc

SEQ ID NO: 164865 - DNA, 228 bp, Arabidopsis thaliana columbia
ggcagccacatcaaccaacccaaacatcgaaagagagacacttttctctctctctttctctatctccttccaatctctctagggttttcgttacaacggcgaaaagatgttcggtagaggaccctcgaagaagagcgacaacactaaggtctaccagaacttaggtgttcctaagaagcgctcaccagaagattctaagaaagcttacaaaaaagccgcttataagaa

SEQ ID NO: 164866 - DNA, 450 bp, Arabidopsis thaliana columbia
aaaaaaaaaaaaaacacaaaaagtttcaatggccgcctccacaatggctctctcctcccctgccttcgccggaaaggctgtgaacctttcccccgcggcatctgaagtcctcggaagcggccgtgtgacaatgaggaagactgttgccaagccaaagggtccatcaggcagcccatggtacggatccgaccgagtcaagtacttgggtccattctctggcgagtcaccgagctaccttaccggagagttccccggagactacggatgggacaccgctggactttcagctgatcccgagacattcgcaaggaaccgtgagctagaagttatccacagcaggcgggcctatgcttggagccctaggctgcgttttccctgagcttttggctaggaaccgagtcaagttctggcgaggcggtatggttcaggatctttcacaatacttttccc

SEQ ID NO: 164867 - DNA, 65 bp, Arabidopsis thaliana columbia
caagaagcgagacacagaggagagattttgttttagagatcaatggccgggactggattgtttgc

SEQ ID NO: 164868 - DNA, 179 bp, Arabidopsis thaliana columbia
cgtcttcataaacgcccttcttcttcttcgtcttcttccctgcaaatctagtttctagatcttttctttcttccgcgaaacgaaaatgagagagtgcatttcgatccacattggtcaggccggtattcaggtcggaaatgcttgctgggagctttactgtcttgaacatggcattcagc

SEQ ID NO: 164869 - DNA, 170 bp, Arabidopsis thaliana columbia
ctcaactatatcttccaaaacacaaaacaaaatattttgtttcccactgatctttcaagcgccatcgtcggaacttcatttattcgccggtccccatcttcaatcagattccgttccccttcatcagccaacacacacatcccttttcggcttcaaaacaggaaccgctc

SEQ ID NO: 164870 - DNA, 219 bp, Arabidopsis thaliana columbia
gatgacaagctgactgttgcccgtgtccgtaagatccagagattcttgagtcagccattccatgttgctgaaatcttcactggtgcccctggaaaatatgtcgaccttaaagaaaacatcaacagtttccagggtttgttggatggcaacgtcgactatttttttcaaacaatcttttttcacaggttgttggcttctctctatctcactcctcttctt

SEQ ID NO: 164871 - DNA, 345 bp, Arabidopsis thaliana columbia
cagatctctcccactccgaaaaaccttcccaatccgaatcaacaacggtggaaacgccgccggagcaagaatgtcagccaccgcagcatcaagctacgcgatggcattagcagacgtcgcgaaaagaaacgacacaatggaattaacagtcacagacatcgagaagctcgaacaagtcttctcagatccacaagtactaaacttcttcgcgaatccaacaatcaccgtcgagaagaaacgtcaagtcatcgacgacatagtgaaatcgtcgtctcttcaatcttacacatctaactttcttaacgtcctcgtcgacgcgaatcggatcaatatcgtgacggagat

SEQ ID NO: 164872 - DNA, 254 bp, Arabidopsis thaliana columbia
gaattacaaacaaaaatggttttgcaaaagctttctctcattgggctgcttttgctcctgaccatcgtcgcctctccagcaaatgcagatggacctgtttgcccgccgtcgtacatactaagccgttcatgtttttcttgtacgttttcttattacttttttaattcattcttttttatctatttttctctatttttctattttattctattctatctttcttatacttttttctctttatttctccaactctt

SEQ ID NO: 164873 - DNA, 242 bp, Arabidopsis thaliana columbia
cagacccggactcgactggatcttctcttctcgtcccatctctctctatcgacgatcgaacttacttgagtacttcttcttcttttgaccagagctctcacacatacgagtcactataatggaaggcgatcaagagacgaatgtttatactttggtggtaaggaagccttcctttgatctcccaacagcttgccctaattgactacctgtttatatattcctgaaattagcccagttacctt

SEQ ID NO: 164874 - DNA, 206 bp, Arabidopsis thaliana columbia
agcggttacaacacggtcgagtgggttcgatacataacgaaagcgggatcttacgagatcagatgctgaacattaaacacagttcaggttcagtgacatcagacttaaaagtttcatggcttctagtttttcgttccttatgcaaaacaaaaacaaaagagttaaatatgctttataccttgttttatgcttgttttcttcttctc

SEQ ID NO: 164875 - DNA, 180 bp, Arabidopsis thaliana columbia
tcggatctggaaccgggtttgagttgctagcagaatgtaccaacgaagcaaatgaaaaccaacaccaacatgaattcaacatcttttcttcgccggcttctttttcttttgggtcttgcacgcgacaagagagctcattttgggttccagagacgaaaacccaacccggcgagacacatt

SEQ ID NO: 164876 - DNA, 489 bp, Arabidopsis thaliana columbia
caaccatgactgtttcttcatctccatgggctctcatggctctctttctaatggtttcttcaacaatggtaatggctattcctccacgcaaggccattgatgtaccatttggtcgtaactacgtcccaacttgggcttttgaccaccagaaacagttcaatggcggttccgaacttcagcttatcctcgacaaatacactggcacaggatttcaatcaaaggggtcatatttgtttggacattttagtatgcacataaagcttccagctggtgacacagccggagttgtcacagctttctatctatcatctaccaacaatgagcatgacgagatagactttgagttccttggaaacagaacaggacaaccagctctattacagacaaatgtttttacaggaggaaagggtaacagagaacaacgaatctatctcttggttgattcttctaaggtttatcacaaatacttaaatccttggaacatgtacc

SEQ ID NO: 164877 - DNA, 190 bp, Arabidopsis thaliana columbia
cacgtttgagaattcgaaatcgaatgtctcttcgtcgaacggctgcgcgtggaagtcacctttcaccacgagaggtggtcgcggaaccagatctatttcgacggagtttttcacgccgatcaatctcaacgccgcaacctatttgtcaacccaagcaccgatcgagagagcttttgatcgatttgagaga

SEQ ID NO: 164878 - DNA, 198 bp, Arabidopsis thaliana columbia
gacacatgatgcttatggttgcggctctactaacgtacattcgaggctatgcgagtaccaacggtcttacctattcttcgacggacgtcacaacactgataaggcgcaagagatgtttggtcatcttttttttggagccgatacaaatgttattctctcgtgaacatccgtgagcttgtcgtatccctgtcgatgaac

SEQ ID NO: 164879 - DNA, 115 bp, Arabidopsis thaliana columbia
atcttatcgcaggaggtaagagtaagaagaccattaggactgctcctaagtccgatgatgtctacctaaagcttctcgtcaagctttaccggtttttggtgaggagatctaacat

SEQ ID NO: 164880 - DNA, 354 bp, Arabidopsis thaliana columbia
gatctggaaccgggtttgagttgctagcagaatgaccaacgaagcaaatgaaaaccaacaacaacatgaattcaacatcttcttctccgtcgtcttcttcttcttctggttctcgcacgtcacaagtgatctcatttgggtctccagacacgaaaaccaacccggtcgagacatctttgaacttctccaaccaagtaagcatggatcagaaagtggggtcgaaaagaaaagattgtgttaacaatggaggaagaagagatccacatttattgaacgaacatgttttgtctgaacgaaaacgtttacaaaagctcaccgagcgttcgattgctctctctgctcttcttcctggcc

SEQ ID NO: 164881 - DNA, 332 bp, Arabidopsis thaliana columbia
tattatccttcctcgaaacaagagcttagctaagatgacgaagaactacccaaccgtgagcgaagattacaagaaggctgttgagaagtgcaggaggaagctcagaggtttgatcgctgagaagaactgtgcacccatcatggtccgactcgcatggcactctgctggaactttcgattgtcaatcaaggactggaggtccattcggaacaatgaggtttgacgctgagcaagctcatggagccaacagtggtatccacattgctcttaggttgttggaccccatcagggagcaaatccctaccatctcttttgctgatttccatcagcttg

SEQ ID NO: 164882 - DNA, 88 bp, Arabidopsis thaliana columbia
ggttgagcgtgccagtgtctgatgttattaacgttatcatctggggaaaccactcattctcacagtacctagaatgttaaccatgcta

SEQ ID NO: 164883 - DNA, 236 bp, Arabidopsis thaliana columbia
ggtaatggcattggaccaacatcaccttcttcttcctcttcatcaacagctgaagatttcttctttaattcaatcatctctttgaacttcttcaactcttcttcatcaagttctagctcagtgttcttcaccgtttcgtctacttgcatcttcgaatcttcctcagtaccatcgctgtcactccctgacttcgtcttctctcccttgcttcgttttgaactagaatccgcagattt

SEQ ID NO: 164884 - DNA, 260 bp, Arabidopsis thaliana columbia
cacaagaaaataaaagatttgtagaatcaactaagaaaatggctagcactatgatgactacattgcctcagttcaatggtcttcgagccaccaaaatctctgcagctcctgtacaaggcctggcaagtgttcagcccatgagacgcaagggaaatggagctttgggtgcaaagtgtgacttcatcggttcatcaacaaatctgataatggtaacgccgacgaccctgatgttgatcgcggggagattcggtcttgcgcca

SEQ ID NO: 164885 - DNA, 263 bp, Arabidopsis thaliana columbia
caaacaacaaaaaaatggcttgctctaatctaacaacaatgtgggtttcatcaaaaccatctctttctgctgattcatcttccttatcattccgatctgttctcaagtgcccaactaacacttcctcacctccttcacgagcttcctctgtttcaccactccaagcgtctcttcgtgagctcagagaccgtatcgattcagtcaaaaacacttcaaagatcaccgaagctatgaagcttgtcgctgcaccttaagtcaggaga

SEQ ID NO: 164886 - DNA, 140 bp, Arabidopsis thaliana columbia
attccattttccctaagattaggatcctctttttataggaaaacaattaaaaaaatcttataatttacaatcaattcattcaatatttccctttttagaagacaaattaggacattctaattatgcgttatatgttctaa

SEQ ID NO: 164887 - DNA, 458 bp, Arabidopsis thaliana columbia; identical to SEQ ID NO: 131754

SEQ ID NO: 164888 - DNA, 164 bp, Arabidopsis thaliana columbia
tcttcttcttcgaattcttctctgaatagttacaatgcgagtcttcttcttccccaactcggacatggcgattttctctgttctcctctccctacttatcctatatcttcctcttccattaacttaagaactcaacgtccacagaaccgcctctctctatctcc

SEQ ID NO: 164889 - DNA, 154 bp, Arabidopsis thaliana columbia
atttagcacagaagctgcagttttatcaatgttttccctttcgtttccatcttcttcttctgcccttttaccttctctcgttgctttcgattcttcgcgtccgctttttttgcaaccaaagaagctaaatcgtcttcaaagtccacttattttc

SEQ ID NO: 164890 - DNA, 91 bp, Arabidopsis thaliana columbia
cgctctcagttttgtgggattgtttctttaaaaggggttcttagggtttagtgaagctatagatttcaatttcatacatagtctaccgtat

SEQ ID NO: 164891 - DNA, 86 bp, Arabidopsis thaliana columbia
cttctatatcgatccaggtatccaagagagataccagatgcatatgaaagactgcttctcgatgcaatcgaaggagagaggaggtt

SEQ ID NO: 164892 - DNA, 248 bp, Arabidopsis thaliana columbia
agcgttttaagctctcactagcaagcaagtactatgtctaacaatggcgtcaagcactgcgactatgctcaaagcctcaccggtgaaatctgattgggttaagggacagagtcttctcctccgtcaaccttcctctgtctcagctattcgcagccacgtggtaccttccgttctcaccgtccgagccgcttttgcttacgccgatgagctttgttaaaaccgctaaaccattcgcgtctctcggcaca

SEQ ID NO: 164893 - DNA, 183 bp, Arabidopsis thaliana columbia
gtaagctcttgcttcctcttgtgagcactttcaggtatgaaggagatgatgtgaacatgatgcttgcaagatctgaagctaagatgctttacgagaaggattcaaagaaatcttactgtgacgcttacttaaattgtcaattgtcaacaagaagcatcgtacttcttggtgcatcaacttctt

SEQ ID NO: 164894 - DNA, 224 bp, Arabidopsis thaliana columbia
tcgcattacaaaacgttacaatggcttttaaggctcttgcagttacagctcttcttattacacttaatcttctttttttcacctttgtaaccttcacaaaatgttcaccaactacttctaaaccctcaaaaaccccgaaatcgcctaagaaggctcctgccgtgaaacccacttgttctaccgacacacttaagcttggtgtttgcgcaaacttattgtgtcta

SEQ ID NO: 164895 - DNA, 110 bp, Arabidopsis thaliana columbia
cgctctcagttttgtgggattgtttctttaaaagtgtgttcttagggtttagtgaagctatagattttaatttcatacatagttaacgtatagaaggaattttggcttga

SEQ ID NO: 164896 - DNA, 252 bp, Arabidopsis thaliana columbia
gaaatccgagctgctttttgccacatctattcgcttcgaatctcttttcaccagctcaaaaactgtcgctttcaattccgctcgtttcgtcccaccgctccgtgtattgctgaacttcttcatagcaactcaataccatggatgttactgaagttccatggcgtcgtcttcctcaattttccgtttcttcacgcgcctcgtggctcggttcttttgggttttcgctttcttatatatgctctctcatgttga

SEQ ID NO: 164897 - DNA, 86 bp, Arabidopsis thaliana columbia
cgagaagaaaaaggcgaaaacctcgccatttcgtttacgcgaaaaatcaaaggtttttggatatggtgttaaagccggatcttgac

SEQ ID NO: 164898 - DNA, 228 bp, Arabidopsis thaliana columbia
accacatttatcattacagtctgatttgagctatatttctctcatcataaactctccttggagaatcatggctatttcaaaagctcttatcgcttctcttctcatatctcttcttgttctccaactcgtccaggctgatgtcgaaaactcacagaagaaaaatggttacgcacagaagatcgattgtgggagtgcgcgcgtcgctcccttcttctctctcacccgccc

SEQ ID NO: 164899 - DNA, 335 bp, Arabidopsis thaliana columbia
tatcttcctcttaaaccaaccattcaaaatgttgtgtactatcttcctcttatctcttctctttgctctatccaatgcctctgttcaagatttctgtgtcgcaaacctgaaacgcgctgaaacccctgcgggttacccttgcatttgtcccattcatgtcaaagctacagactttgtcttctctggcttaggcactcctggaaacactacaaacatcatcaacgccgctgtcacacccgattttgcagatcagatcccggtcctgttcggcctaggtctctctacagctagactctgacttagctcctaacggagtgatcccaaagcatactaac

SEQ ID NO: 164900 - DNA, 298 bp, Arabidopsis thaliana columbia
atgaaacatccgatggcacagtagctgtgaatggtaagccatccattcaaaaggacgagactacgaatgggacattcggcattggccatgatacagaacaacagcattctcatgaaacagagaagaggtaaagactcatgttttcatgtcttaaggcgaagccaaacaaacaaagaggaattgagatttgaataagacgaggagaaatcttggtactcaggccttgtagtccctctgcaacagatttcgaagtttatagatcttaagagtgggaaacattagtcttcagggtttagat

SEQ ID NO: 164901 - DNA, 98 bp, Arabidopsis thaliana columbia
atttccgcatctgcttaaacacctacatcgtcgtagatcgtaaaccatggccgtcgctgtagctaagcttctgatctccgccatggcggtttttatgc

SEQ ID NO: 164902 - DNA, 175 bp, Arabidopsis thaliana columbia
agaaaataaaaaaacaatggcgaataagttcacttgacatacagatttcagagtttagggaacagttcagcgtatacgacaagaatggtgatggtcacattaccacagaggagttcggtgccgtgatgcgttccctcggtttaaacctgacccatgctgtgctttaggaggagat

SEQ ID NO: 164903 - DNA, 336 bp, Arabidopsis thaliana columbia
tatcttcctcttaaaccaaccattcaaaatgttgtgtactatcttcctcttatctcttctctttgctctatccaatgcctctgttcaagatttctgtgtcgcaaacctgaaacgcgctgaaacccctgcgggttacccttgcattcgtcccattcatgtcaaagctacagactttgtcttctctggcttaggcactcctggaaacactacaaacatcatcaacgccgctgtcacacccgctttcgcagctcagtttccgggtctgaacggactaggcctctcttcagcttgacttgacttacttcccaaaggtgtgattccaatgcacacttactc

SEQ ID NO: 164904 - DNA, 422 bp, Arabidopsis thaliana columbia
aacgagcaaaagaagaagagaaacaacaagaagtagtaatggcttcctctatgctctcctccgccgctgtggttacatccccggctcaggccaccatggtcgctccattcaccggcttgaagtcatccgctgcattcccggtcacccgcaagaccaacaaggacatcacttccatcgcaagcaacgggggaagagttagctgcatgaaggtgtggccaccaattggaaagaagaagtttgagactctatcttacctccctgaccttagtgacgtcgaattggctaaggaagttgactaccttctccgcaacaagtggattccttgtgttgaattcgagttagagcacggatttgtgtaccgtgagcacggaaacactcccggatactacgatggacggtactggacaatgtggaagctttca

SEQ ID NO: 164905 - DNA, 462 bp, Arabidopsis thaliana columbia
ttcgaaatctccaaagaacccgacaaagcgccatgtcgctcactatcccggcgaatctcgttctcaacccgagatctaacaaatctctcactcaatccgtacctaaatcctccgcaagattcgtctgctccgatgacaaatcctcctcctccacacctcaatccatgaaagctttctccgccgccgtcgccctctcttccatcctcctctctgctcctatgccagctgtcgctgatatctcaggtttgactccttgcaaggactcaaaacagttcgctaaaagagagaagcaacagatcaagaagcttgaatcttctcttaagctctacgctcctgaatctgcccctgctcttgctctcaatgctcagatcgagaaaaccaaacgcaggttcgacaactacgggaagtacggattgttatgcgggtcagaccggttaccgcacttgatagtgaacggagacc

SEQ ID NO: 164906 - DNA, 277 bp, Arabidopsis thaliana columbia
cgtccgtgctgaacacaaagatgatctgatctcgttcgtgtggaatactcgtttaaccattagcttggacctcaataagaagaccacaattcttcaggaagaaaacgatgggcatgtgattgtagtccaagttttcagggctttgcatgctgtgtatgtcagtgtgagctgtattgcacctttgacaccgggagtgggcaggttatcatgtccctttgctaagatacccgttgagaggttactggagcaccgaggtatggttaaagacatacacaca

SEQ ID NO: 164907 - DNA, 439 bp, Arabidopsis thaliana columbia
  unsure (1)..(439): unsure at all n locations
gaatgtgcttcctgaattgatcccaattttcgtcttcgtaaacattctggtctacttcggatgttttgcattcggtataggagggctaccttgggtcattatgtctgagatctttccgataaatataaaagtttcagcaggaacaattgtagcattaacatcatggactagtgggtggttcgtgagttacgctttcaactttatgtttgaatggagcgcacaaggnctttattttctctattacttttttattaatttggataaaacaatttaccaaaaaaagttaagagttatctttataaaaatacacaaatcaaacataaagttatttaaaaatcgtgttcgaattttgacaatttgatcaaacagatttagatgtgcaaaatgtgccggtcggaaaatatcttttagattcccgtttttcttcaaaatacctttt

SEQ ID NO: 164908 - DNA, 360 bp, Arabidopsis thaliana columbia
agcatgtatctcccactaaggcacaaattactaaccatataagtctcagtactctctgttctgcaaacttcatacacaaaaccaacattaagagatggcgagccactacagaaacacaagcgctattgcttatctattgctttgtctcttcattacatctgccactgcacattccttcatacgacaaatcactgatgacctcaaaacaaatctgcagcaggaggtaggagcagaaccaatccaaaacctggacgtaggacattacttacaagaaaataaggagatctcatcacgtgattataaagtatcagcttcaaacgcagtgaaaggtttgagagatcgtcctccatcgtcttactc

SEQ ID NO: 164909 - DNA, 380 bp, Arabidopsis thaliana columbia
tttgaatttcgctaaaggaaaagagagagatttggtaaatatgcagtcgatgaaagaaacagcttcgaatattgcagcttctgcaaaatctggcatggacaaaaccaaagctaccttggaggaaaaggcggagaagatgaagacacgagaccctgttcagaaacagatggctacacaggttaaagaagataagatcaatcaagctgagatgcagaagagagaaacgcgtcagcacaacgcggccatgaaagaagcggttggagccggaaccggtttaggtttggggacggtcactcacttgacccactgtacacgtctgtcactggaactgggacacataaatatgtcggctctgtcttgataccggtacgggtcaactg

SEQ ID NO: 164910 - DNA, 236 bp, Arabidopsis thaliana columbia
aaaataaaaaaaaagaagaagcaagattcgttcgtggatatagcttctggagacttcttttgattttctgtttgaagcgagtgacaacaaaacaccaagtcatatctcaagaatctactaatggacaaagatgatgctgatggagacctagcaacatgaagatgaatatgatatgatttgagtattggatatttttcatgtgggtgcctctcccctttataaacacctttttaatt

SEQ ID NO: 164911 - DNA, 117 bp, Arabidopsis thaliana columbia
cttcttttgcttgagctttaggttttgagagcaatatgaaaaacgaagacgcgtcaaagagcttttgtggagaggttctgcttgctttctactaatattctacctccagttagctat

SEQ ID NO: 164912 - DNA, 463 bp, Arabidopsis thaliana columbia
cgtccgtgctgaacacaaagatgatctgatctcgttcgtgtggaatactcgtttaaccattagcttggacctcaataagaagaccacaattcttcaggaagaaaacgatgggcatgtgattgtagtccaagttttcagggctttgcatgctgtgtatgtcagtgtgagctgtattgcacctttgacaccgggagtgggtaggttatcatgccgtcttgcgaagataaccgttgatagcttactgaagcaaggatttatggtgaagaacatacaaaaagtgacgaatgaacattctgaagatggtttcatgttgatttcttcctatttgatctctggcaatggacaacttgtatcttctgatttggaacgttcattgccggatctttgctattcatgattatgttaagaatataggttaattaaattttgtcatgtactacttttttgatattgaatgtgcttc

SEQ ID NO: 164913 - DNA, 409 bp, Arabidopsis thaliana columbia
caacaacaaatcttaaacgttttactttgtgctgcactactcaacctcaatggccgcctcaacaatggctctctcctcccctgccttcgccggtaaggccgtcaagctttcccccgcggcatctgaagtccttggaagcggccgtgtgacaatgaggaagactgttgccaagccaaagggcccatcaggcagcccatggtacggatctgaccgtgtcaagtacttgggtccattctctggcgaatcaccgagctaccttaccggagagttccccggagactacggatgggacaccgccggactttcagctgaccccgagacattcgcaaggaaccgtgaactagaagttattcacagcaggtgggccatgctcggagccctaggctgcgtctttcctgagcttttggct

SEQ ID NO: 164914 - DNA, 222 bp, Arabidopsis thaliana columbia
gttctttatctctttatgagacaatttctatcgtattgtcaaatgtctgatttatgaagatgtaatttatataagggagagtaagcttcgggaatgcagcggatgacttcaagcccccaagcttcaccgaagcttaatcccttttctaaaacattcttatgaattatctctgctcattccattccctatcgtcttgtgtccttttttctctttatctgacac

SEQ ID NO: 164915 - DNA, 245 bp, Arabidopsis thaliana columbia
agaagaagagaaacaacaagaagtagtaatggcttcctctatgctctcctccgccgctgtggttacatccccggctcaggccaccatggtcgctccattcaccggcttgaagtcatccgctgcattcccggtcacccgcaagaccaacaaggacatcacttccatcgcaagcaacgggggaagagttagctgcatgaaggcgtggcctccaattgtaaagaagaagcttgtgactctatcttacc

SEQ ID NO: 164916 - DNA, 331 bp, Arabidopsis thaliana columbia
cttaagcagcttgcctccggtttgcttcttgtgactggaccattcaagatcaatggtgttcctctgagacgtgttaaccaggcctatgtcattggtacttccacaaaggttgacatttctggagttaccctcgacaaattcgatgataagtacttcggcaaggttgctgagaagaaaaagaagaagactgaaggagagttcttcgaggctgagaaagaggagaagaaagagatttcacagggaaagaaagatgaccagaaagtcgtggacgcagctttgatcaaagctattgaagcagttccagagttgaagacttaccttgtagcaaggt

SEQ ID NO: 164917 - DNA, 270 bp, Arabidopsis thaliana columbia
  unsure (1)..(270): unsure at all n locations
anaaaatggcgtctggtttgatcggaagattgtttggaacgaaaccgtcgaaattagccacggcggcgaggttaattccggcgagatggacctctacaggagcggaggcggaaacaaaagcttcctctggcggcggaagaggatcgaacttgaagacttttcagatctattgatggaatccagataatccagggaagccagagcttcaaaattaccagatcgatctcaaagattgtggtccaatggtattagacgctttgtttaagacca

SEQ ID NO: 164918 - DNA, 482 bp, Arabidopsis thaliana columbia
gcaaattccttgatagaaacaaaatggaagacaataaaagaaaagtattagatgaagaagcgaaagcttctctagacatatggaagtatgtctttgggtttgcagatatagcagctgcaaagtgtgccattgatcttaaaataccagaagccattgaaaaccatccttcttcacagcccgtaacactagccgaactctcctccgccgtctccgcctctccctcgcatctccgccgtataatgaggtttcttgtacaccaaggaatctttaaagaaatccccacaaaagatggtttagctacaggctacgttaatacgccactctctcgccgtttgatgatcacaagacgtgatggaaaatcgctggctccttttgttctcttcgaaacaactcccgagatgctcgctccatggttgagacttagctcagtcgtttcttcgccggtcaacggttcaactccaccaccgtttgatgcagtgcac

SEQ ID NO: 164919 - DNA, 214 bp, Arabidopsis thaliana columbia
gttatcgatttcgatctaccgattacagttaagctaaaagtggttgacgttgatcctggccttcgcggtgatactgtgcagggtggatcaaaaccggctacaatggaaacgggtgcaatagttgctgaaccactctttattaacggcggtgatgagatatttgtggtcacaagagccggtgcatacatgaactcgtgtgtgattcgggtttact

SEQ ID NO: 164920 - DNA, 238 bp, Arabidopsis thaliana columbia
tcctcttctttgcttccaccactaactattgcaattaggtactagaaaggacaaccttttgcggtgtgccttgcaagagtcttcaacttctgctgttgctactgaaaagaaaaacaaagaagaaggagaagagtcaacagtggcgtttccggcaaagaaacctaaacccgtagataaagcggctgcagtggcgaaaccgctgagacaaacgatggtagaagacctttatattccttta

SEQ ID NO: 164921 - DNA, 434 bp, Arabidopsis thaliana columbia
cttaagcagcttgcctccggtttgcttcttgtgactggaccattcaagatcaatggtgttcctctgagacgtgttaaccaggcctatgtcattggtacttccacaaaggttgacatttctggagttaccctcgacaaattcgatgataagtacttcggcaaggttgctgagaagaaaaagaagaagactgaaggagagttcttcgaggctgagaaagaggagaagaaagagattccacagggaaagaaagatgaccagaaagccgtggacgcagctttgatcaaagctattgaagcagttccagagttgaagacttaccttggagcaaggttttcattgtaacaaggaatgaagcccccatgagcttggtttctagatttcattactttttttttgaggtttctagtggaatttgtcttcctgaagttttacac

SEQ ID NO: 164922 - DNA, 361 bp, Arabidopsis thaliana columbia
ccttcgttgcccagacttcggattgggctgaagaaggtggagaaggaagcgtcgctgttgaggagaccgagaacagtttagagtcacaagatgtgagcgaaggagatgagagcgaaggagatgcgagcgaaggagatgtgagcgaaggagatgagagcgaaggagatgtgagcgaaggagctgtgagcgaaagagctgagttcccggagccatcggaagaagccaagcttttcgtcggaaatttggcttatgatgttaatagccaagctttggctatgctctttgagcaagccggtactgttgaaatcgccgaggttatatacaatagggaaactgaccagagtcgtgggtttggatttgt

SEQ ID NO: 164923 - DNA, 127 bp, Arabidopsis thaliana columbia
attgctcctgctttcatggacaagcttgttgttcacatcaccaagaacttcttgactctgcctaacatcaaggttccacttattttgggtatatggggagcgcaacctcatggttaatccttccatg

SEQ ID NO: 164924 - DNA, 151 bp, Arabidopsis thaliana columbia
ggtcaacaacgtcgagaataatggcatcatctctttgtgcttcttctgccatcgctgccatttcttctccaagtttcttgggcggtaagaaactgaggctgaagaagaagttgactgttccagctgcgtccagcccagacgcccttcttcc

SEQ ID NO: 164925 - DNA, 246 bp, Arabidopsis thaliana columbia
ccctcatcttcatcttcctctctctttctctctttctcaacaatctctattagatctttctccattaccattacctctggctttctcttaaatccaccatcatgaggagaggaagaggctcttccgccgtcgccggacctaccgtcgttgccgccatcaacggatctgtaaaagaaatcagattcacaggcgcaaggcagagaccttgcggacgacttccagctggagctccgcgcaccctggaaa

SEQ ID NO: 164926 - DNA, 215 bp, Arabidopsis thaliana columbia
ctcgtgtcttactcgtgccagccactcgcatttttccagattttattatccttcctcgaaacacgagcttagctaagatgacgaagaactacccaaccgtgagcgaagattacaagaaggctgttgagaagtgcaggaggaagctcagaggtttgaacgatgagaagaaccgagcacccatcatgcgccgtcttgtttggtactctgctgtaact

SEQ ID NO: 164927 - DNA, 302 bp, Arabidopsis thaliana columbia
ataaaagacaaggcttgaacgtccggtgaaagatagaattcagctttccgcactaaccacttctgaatcctaaccaacaagcttctccatttcgtttttcgcgtctcgattccaaattccacttaagacggcggattttctcaccgggaaattggttttagatggataggactgaggaaatcgaagaatcccccgccggaccttcttccggatccgcgaaattgaagctcggaaacagagcagatcctttccttgctgtttgaagatgctttagccttgatacctctcttatcgcccttttc

SEQ ID NO: 164928 - DNA, 381 bp, Arabidopsis thaliana columbia
cttcttcttcatatgattcttctgaacaacatttggatttggtttcaagagtgaagaaaacaaaggagagattgcctaatactgtaacagagttagatttgagacatcttgtgcaattggttgagaggaaagatggtggtcaagcttggattcagatgatggatcgttttactcctggtatgagataccaagcttggttgagagaacctaagaatggtcctactgagtatagaagtagaactgtgtttgaagatgcaactcctgtgatgttaagagactttctctgggatgatgagtttagaccaatttgtgatacaacgctttctaattccactactgttgaagagcgtcccactactggaaccatgattgttagatgga

SEQ ID NO: 164929 - DNA, 462 bp, Arabidopsis thaliana columbia
gtaactaattaatattcaaaaagatggctcaaaaagtggaagcagggggtggcgccggaggagcttcatgggatgatggtgtccacgatggcgttagaaaggtgcatgtagggcaaggccaagatggtgtgtcatctatcaacgtcgtgtatgcgaaggactctcaggatgttgaaggaggtgaacacggaaagaaaacgttacttggatttgaaacgtttgaggttgatgcagacgactacatagtagcagtgcaagtgacctacgacaacgtgtttggccaagactctgacatcatcacatctattaccttcaatacattcaagggaaaaacatctccaccctatggattggaaacgcaaaagaagtttgtacttaaggacaaaaacggtggtaaacttgttggctttcatggacgcgctggtgaagatttatatcgctctttgagcctattttgctaca

SEQ ID NO: 164930 - DNA, 249 bp, Arabidopsis thaliana columbia
agaacaacaaccaaacactcatttctccacatcttgagagaaaaaaacagagcacgtatattagagatctcatggcgatggcggtctccggagctgtcctcagtgggcttggttcttcgttcctcaccggaggcaagagaggtgccaccgcattggcaagcggcgtacgcactggagcttagagagttggcaggaaaactcttattgacgctgctgccgctgcttaatctaagaaatcttgcttccctg

SEQ ID NO: 164931 - DNA, 175 bp, Arabidopsis thaliana columbia
caacaacaaatcttaaacgttttactttgcgttgtactattcaacctcaatggtcgcctcaacaatggctctctactacactgccttcgccggtaaggccgacaagctttcccccgcgggatctgaagtccttggaagcggacgcgtgacaatgaggaacacagtgcgcatgcca

SEQ ID NO: 164932 - DNA, 254 bp, Arabidopsis thaliana columbia
ggagaaccatcaaattcatcttcttctctttcacaaatttcagcctaaaactttccgattccatggaaatcgaagtctcttgctcgactcatgatgccgaaaccaaaggaaaccgcatcgatttggatagtattcgtgtaaagcgaaagacgttacagaatctgctcgcggattgccagagagctcttgagcttctagaacttcccggcgatgaaaaccggggcgaacagagtgaatcaccggaggaggaggag

SEQ ID NO: 164933 - DNA, 493 bp, Arabidopsis thaliana columbia
gtaaaaaacaaagactcgagttgatatgtctagtactaaagatatgtcaactgtccaaaacgcaactccttttaacggcgttgccccatccaccaccgtgcgagttacaatcgtccaatcctccaccgtctataacgatactcctgccactatagacaaagcggagaagtatattgtggaggcggcaagcaagggagcagagctagtgttgttcccggaggggtttatcggtggctatccttcgaggttttaggttcggtttagcggttggcgttcataacgaagaagggcgtgatgagtttcggaagtaccatgcttctgctattcatgttcctggccctgaagtagcaagattggctgacgtggctaggaaaaaccatgtgtacttggtaatgggagccatagagaaggaagggtataccctctattgcacaagtcttttctttagtccacaaggtcagttcttgggcaagcaccgtaaactcatgcccac

SEQ ID NO: 164934 - DNA, 129 bp, Arabidopsis thaliana columbia
ggtcaacaacgtcgagaataatggcattatctctttgcgcttcttctgccatcgctgccatttcttctccaagattcttgggtggtaagaaactgaggctgaagaagaagttgactgttccagccgagt

SEQ ID NO: 164935 - DNA, 439 bp, Arabidopsis thaliana columbia
ctcaagttcacagtcttcttgaaaagttggctgcagcaaacccaacaatgagatcttttctagagggaaagaaaaagagcatacaggaaaaacttgaacggtctcacgtgacgctcgcccacaagagaagccatggcgtagcaactgtagccagctatagtcagcacttgaacagagaggtacccgtagagctcaccgagctcatctacaacgacaagatggctgctctaacagcccatgttggatctgtggacggagagaccgtagtctccaagaacgaatggccacatgttacattgtggacagcggaaggcgttactgcgaaagaggccaacacgttacctcagctttacttagaaggaaaggcgagccgcttggtgatagatccttcggtgtcaatctcaggtcctttggagtttttctgaatacttgattaaac

SEQ ID NO: 164936 - DNA, 118 bp, Arabidopsis thaliana columbia
atcattaccaaatcatcaacttaatcgtttctctcaaatttagggctttctcttttctcgcacgtcttgcggttttctgaatcatctctatctggttcgcgggttccgctcgctctcc

SEQ ID NO: 164937 - DNA, 366 bp, Arabidopsis thaliana columbia
gcaagcttacctatatgatggttactgggaagacattggtactatagaggcattttataacgctaatcttggaatcaccaagaaaccagttcctgattttagtttctatgaccgttctgctccgatctacacacagccgcgttatttaccaccgtctaagatgcttgatgctgatgttactgacagtgtcatcggagagggctgtgttatcaagaactgcaaaattcatcactctgtggttggactccgttcctgcatataagatggtgttattattgaagatttgttattaatggcagctgactattccgagactgcttctgaaccgtccctttctagcccgacaggaatttgttctcataggta

SEQ ID NO: 164938 - DNA, 124 bp, Arabidopsis thaliana columbia
accttaatctcccatctgagattgttcctgctactttgaagaagcaacagaagcctcttggtcgaccttttggaggtggtggtgaccgtccccgtagccctcctcgtggtgatggagagaggat

SEQ ID NO: 164939 - DNA, 488 bp, Arabidopsis thaliana columbia
cacatttctttcattctatcctaaatcctcatcactcaacctgagctcacaaagctaaacaaaaaaaaaagagcttaggcggagaagaagaggagaccaaaacaccaaacaaacaacaatggctgtctcaactatctactcaacacaagctctcaattcaactcatttcttaacctcttcttcctcctccaaacaagtcttcctctaccgtcgtcaaccacaaaccaaccgtagattcaacacactcatcacttgcgcacaagaaaccatcgtgatcggactagctgctgactctggctgcggcaaaagtacctttatgcggaggctcaccagcgtctttggtggcgctgctaagccaccaaaaggcgggaaccctgattccaacacactcatcagcgacacgaccactgtgatctggcctgatgattaccattctttggataggtacggtaggaaagagcagaaagtcaccgctttggacccacgcg

SEQ ID NO: 164940 - DNA, 412 bp, Arabidopsis thaliana columbia
ctctctgatttagtgatttttcaaatttcaagttttcttcacctttaattttgtgtctcgttgatctctctttggacattctgctttggattctggaggcttctcattagatctctattagtgggtttaggtcaagttcttgaaatggataaggagaaatctcctgcaccaccacctagtggaggtcttcctccaccatcgggtcgttactctgcgttttcacctaatggaagtagctttgcaatgaaagctgaatcatcttttcctcctttgactccaagtggaagcaatagctcagatgctaaccgattcagccatgatattagccgaatgccggataatccacctaagaacctaggccattgtcgagcttattcagagattcttactcttcctgatgacttaagctttg

SEQ ID NO: 164941 - DNA, 469 bp, Arabidopsis thaliana columbia
catttctttagctcaaccttcattactaatctccttttaaggtttctttcgtgaatcagatcggaaaaatggaatcttttttgttcacatctgaatccgtcaacgagggacatcccgacaagctttgtgatcagatctccgacgctatcctcgatgcttgccttgaacaagaccctgagagcaaagttgcttgtgagacttgtaccaagactaacatggtcatggtttttggagaaatcaccaccaaggctaacgttgattacgagcagattgttcgtaaaacatgccgtgagattggattcgtctctgctgacgttggtctagatgctgacaattgcaaggttctggttaacattgagcaacagagtcctgacattgcacaaggtgttcatggtcatctcaccaagaagccagaggaggttggagctggtgaccaaggtcacatggttgggtatgctactgatgagac

SEQ ID NO: 164942 - DNA, 153 bp, Arabidopsis thaliana columbia
cggacgcgtgggaatcaaaaagcttttaacctctttcgttaaatctttctccgatcatgccggccagaaacatcgccattggtggagtccaagaagaggtctatcaccccaacgcacttagggcggcgctcgctgagttatctcgatttgact

SEQ ID NO: 164943 - DNA, 343 bp, Arabidopsis thaliana columbia
ggagccgcttacggatttgaggttgtggacaattgttgttgtggggtggggaggaacaacggacagaggacatgtttgccgctggagaccccgtgccctgaccgaaccaagtatatcttttgggacgcgtttcatccgactgagactgctaacatactgttggcgaaatctaatttttactcccgagcttacacttacccaatcaacatccaataactagcctatctttgaagaaataatatcttgatctcccatatgaatgcatatatgtcatgtaatatggcctatttataaaatgtttctatttcctatgcgttaacttatgttatcttttaaaaaacta

SEQ ID NO: 164944 - DNA, 276 bp, Arabidopsis thaliana columbia
caacaaccaaacactcatttctccacattttgtgagaaaaaaacagagcaagtatattagagatctcatggcgatggcggtctccggagctgtcctcagtgggcttggttcttcgttcctcaccggaggcaagagaggtgccaccgcattggcaagcggcgttggcactgtagctcaaagagttggcaggaaaactcttattgtcgctgctgcggctgctcattctaagaaattttggtatccctgccgttaaaggtggtggtaacttcctttgac

SEQ ID NO: 164945 - DNA, 319 bp, Arabidopsis thaliana columbia
actccgtcgattgtgtcctcaaaacggaaacggtaccgttctggtcaacttcgatgtcgtgactccagatgctttcgatagtcaatactacaccaaccttcgtaatgggaaaggtcttattcagagtgaccaggaactcttttcgactccaggagccgatacgatccctttagtaaaccaatacagcagcgacatgtccgtgttctttcgagcattcattgacgcaatgattaggatgggaaatcttagacctttgactggaactcaaggagagattagacaaaattgtagcggtgtgaatacacgaattagggttgtg

SEQ ID NO: 164946 - DNA, 347 bp, Arabidopsis thaliana columbia
ggtcctgtttcttgtctgatacaaattaaaactcttaaacagcttcctaacgagaggaaactgaggaacacaacaatggagtttcgtggagatgccaaccagaggattgctaggatttcagctcatctcactcctcagatggaggccaagaactctgtaatcggacgggaaaactgcagagctaaaggtggtaatccaggattcaaagtagcaattcttggagctgcaggtggaattggacaatctttatctttgctgatgaagatgaaccctcttgtctctttacttcatctctacgatgttgtcaatgctcctggcgtcactgctgacgtcagtcatatggacac

SEQ ID NO: 164947 - DNA, 273 bp, Arabidopsis thaliana columbia
acgatctccggcaatggcaattccgatgccttttacctcttgctccccaatctcaacttcttcgtctatttcccgaacctccttcgtccctcttacacttcgcaatcgtactttcttctccaaccagaattacagtaggcgtgtacttatcagctgcttttattctttgtcctcagacaacggttcatcttcagactccatgaacggaaacgggaacgggaacgggagtagcttaaacgggccaccatctttcccacgactgcctttctttga

SEQ ID NO: 164948 - DNA, 384 bp, Arabidopsis thaliana columbia
gaggttgttgatcagctggcaaagcttatctgcaatcgtatggggggtccagttatcatgggggaagatgagttggttcccatgtggaaggagtgcattgatggtctaaaagaaatctttaaagtggtggttcccataggtagcctctctgttggactctgcagacatcgagctttactcttcaaagtactggctgacataattgatttaccctgtcgaattgccaaaggatgtaaatattgtaatagagacgatgccgcttcgtgccttgtcaggtttgggcttgatagggagtacctggttgatttagtacgaaagccaggtcacttatgggagcctgattccttgctaaatggtccttcatctatcttaatttcttctcct

SEQ ID NO: 164949 - DNA, 125 bp, Arabidopsis thaliana columbia
acgcaatcctttcctttcattgtagttaaacaaagtttacgattatggccacatcagctatccaacaatgctgcttagtcggacaaacgggtctcaagccctttagtgacctcatccaaaaggtg

SEQ ID NO: 164950 - DNA, 469 bp, Arabidopsis thaliana columbia
agaaaaacaaaatggcttcgatgggtggattacacggtgcatctccggcggttcttgaaggaagcttaaagatcaatggctccagccgtctgaatggctctggaagagtggcggtggctcaaaggtctagacttgtcgtcagagctcagcagagtgaggagacttctcgccggtccgtgattgggcttgttgctgctggtttagctggtggctcgtttgttcaggctgtcctcgccgatgctatttcgatcaaagttggccctcctccagctccttccggtggccttcctgggacagataactcagaccaagcaagagactttgcattggcattgaaagacaggttttacttacagccattgccaccaacagaagctgcagctagagccaaagaatctgcaaaggatatcataaatgtgaagccattgatcgacaggaaagcttggccatatgttcaaaacgatcttcg

SEQ ID NO: 164951 - DNA, 114 bp, Arabidopsis thaliana columbia
aatctctctctgccaatctcatcttcaacctctctctaactctcgttttcgattctacaatggctgacaagaagattaggatcggaatcaacggattcggaagaattggtcgtt

SEQ ID NO: 164952 - DNA, 362 bp, Arabidopsis thaliana columbia
aatttctcaaaatcttaaaaactttctctcaattctctctaccgtgatcaagatgcagatctttgttaagactctcaccggaaagacaatcaccctcgaggtggaaagctccgacaccatcgacaacgttaaggccaagatccaggataaggagggcattcctccggatcagcagaggcttattttcgccggcaagcagctagaggatggccgtacgttggctgattacaatatccagaaggaatccaccctccacttggtcctcaagctccgtggtggtatgcagattttcgttaaaaccctaacgggaaagacgattactcttgaggtggagaggtctgacaccattgataacgtgaaag

SEQ ID NO: 164953 - DNA, 235 bp, Arabidopsis thaliana columbia
cttaacttggattctttctggtcaccatggcttcggttactttctctgtccccaagggtttcactgaattctcaggattgcgaagctcctctgcttctcttcccttcggcaagaaactttcttccgatgagttcgtttccatcgtctccttccagacttctgcaatgggaagcagtggtggatacaggaaaggtgtgactgaggccaagcttaaggtggccattaatggattcgg

SEQ ID NO: 164954 - DNA, 147 bp, Arabidopsis thaliana columbia
acggatatggcaacagcatccaagcgcatgtttatttttctttttcgtgctaaactccaaaaccaaggcaaagtcaaaccattgatgtgcctaccaaccccaccaaaaccaaatgtctctctcgctcgaacaagcaccggcctagcc

SEQ ID NO: 164955 - DNA, 404 bp, Arabidopsis thaliana columbia
gataattgacaggaagaagaatatctttaaactctcacaaggacgagtatgttgcggtggagaacatagaaaacatatacggtgaagtacaagctgttgattccgtgtgggtgtacggtaacagctttgagtccttcctaatagctatcgccaacccaaaccagcatatccttgaacgctgggctgcagaaaacggtgtgagtggtgactatgacgctctctgtcaaaatgaaaaggcaaaggaattcattctcggagaacttgttaaaatggtcaaagagaaaaagatgaaagggttcgagatcatcaaggcgattcatcttgacccagtgccatttgacatggaacgagatcttcttacgcccgaccttcaaatagaaaaggccttagttgctgaaatacta

SEQ ID NO: 164956 - DNA, 127 bp, Arabidopsis thaliana columbia
tgaaattgggtgaaagatgggtaacgctcttacgttcctctacggaaaatgctgcaaacccacaacaaccgatgactctcttggtcctcacgggcgacttcgcccacaccgtccgtgatccacctct

SEQ ID NO: 164957 - DNA, 237 bp, Arabidopsis thaliana columbia
aaacaagtggaagctttaaaacgagagggagagagcaaaaatggcgacgtcgggaacgtacgtgacggaagttccgctaaaaggatcggccgagaaatactacaagaggtggaagaacgagaaccatgtctttcctgatgctatcggccaccacatccaaaatgttaccgttcacgaaggcgaacatgactctcacgggtctatcaggagttggaactacacatgggatggaaagga

SEQ ID NO: 164958 - DNA, 421 bp, Arabidopsis thaliana columbia
aaaaaaactcagagcagaggagatcgagagagacaaagagagagagagagagagagagagatcttaacaaaaaaatgtctatatccatggcgttattctctccgccgatctcttcctcacttcagaaccctaatctcatccccaagatctcaacctctcttctctccaccaagcgtttctctctaatctccgtccctagagcttcctccgacaatggtacgacttcccccgtcgtggagattccgaagcctgcttctgtggctgtagaggaagttccagttaaatctccagccgaaagctcctccgcttctgaaaacggcgccgttggaggtgaagcgactgattcgagtactgagacggtaatcaaatatcagaatgcgaagtgggttaatggaacttgggatctgaaacagttcgcgaa

SEQ ID NO: 164959 - DNA, 192 bp, Arabidopsis thaliana columbia
ctccgattcatctttatcctctctctcatctcgttcgttgttgcataagtgctatggatctcgcgtcgaatcttggtgggaagatcgataaatccgatgttctcaccgccgtcgaaaagtatgagcaatatcatgccttccatggaggaaacgaggaagagagaaaagtcacttataccttacatcgctaat

SEQ ID NO: 164960 - DNA, 172 bp, Arabidopsis thaliana columbia
catttctccacatcttgagagaaaaaaacagattttgtatattagagatctcatggcgatggcggtctccggagctgtcctcagtgggcttggatcttcgttcctcaccggagcgcaagagaggtgccttcgtattggcatgcggcgtacgcactgtagtttagacagttgc

SEQ ID NO: 164961 - DNA, 314 bp, Arabidopsis thaliana columbia
tgtgactcttggagcactctcttctctttgtctctgtgactcacattcatccaatccaggaggcatgtcgacatctgaggataaaccggaaatcatcagtagagtagttcatcaggagggtgacgtggaaatcgtcgatagaagtcagaaggataaggacgaggaaaaagaagaagggaaaggtggattcctcgataaggtgaaagatttcattcatgacattggtgagaaactcgagggaaccattgtctttgggaagccaactgctgatgtctctgcgattcatatccctaagatcaatcttgagagggcag

SEQ ID NO: 164962 - DNA, 466 bp, Arabidopsis thaliana columbia
gacacgcttctggagcaaaatctgtgtcgtttgatcgagcccttctcaagagttgagatagctcacattgctgagctcattggattgccgctcgaccatgtggaaaagaagctatctcagatgatactcgacaagaaatttgcaggtaccttggatcaaggagctggatgcctcatcatcttcgaagacccaaaggcagatgctatctactcggctaccctcgaaaccattgcaaacatggggaaggtcgtcgacagcctttatgtccggtctgccaaaatcatgtcctgagagagtgagtgagttggtcgtatgaatctcattctatcgttctttctttctggttttagatatcggttggactcaaagaaactgatgtttctcaatggagaaagtaaacttgtctgaattgttcacattactcgttttgcttatgatcttattatgtcatggtttcttaccaaaa

SEQ ID NO: 164963 - DNA, 229 bp, Arabidopsis thaliana columbia
cggtgaagatgttgacatgacagagaattctgttatggctatgcgtaaactcgtgcaattacgagccgtttgccataaacgggccattatgactaatctcttggcttaaatatcacattttattgaccaccattttgaagattaccggtttaagcattttttcgcgtctagactctttccatgttacgcctccataccgtgtcaagtactcggttccattactttggcg

SEQ ID NO: 164964 - DNA, 296 bp, Arabidopsis thaliana columbia
atcttaaacgttttactttgtgctgcactactcaacctcaatggccgcctcaacaatggctctctcctcccctgccttcgccggtaaggacgtcaagctttcccccgcggcatctgaagtccttggaagcggccgtgtgacaatgaggaagactgttgccaagccaaagggcccatcaagcagcccatggtacggatctgaccgtgtcaagtacttgggtccattctctggcgaatcaccgagctaccttaccggagagtttcccggagactacggatgggacaccgccggacttt

SEQ ID NO: 164965 - DNA, 320 bp, Arabidopsis thaliana columbia
  unsure (1)..(320): unsure at all n locations
ctttcctttcattgtagttaacgaaaagattactataatggcaacatcagctatccagcaatcctccttcgccggccaaacggctctcaagccctccaacgaactcctccgcaaggttggtgtatccggtggtggccgtgtgaccatgcgtcgtaccgtcaagtctactcctcaaagcatctggtacggaccagaccgtcccaagtacttaggaccattctcggagaatacaccggcctacctaancggtgaataccccggagactaccgctgggacaccgctggactctcggcttgcccggagacattcgctaagaacc

SEQ ID NO: 164966 - DNA, 63 bp, Arabidopsis thaliana columbia
acggctcaacaatttcaaaacgtcgaatcatccgcttttccttctccagtagagctgcctcct

SEQ ID NO: 164967 - DNA, 390 bp, Arabidopsis thaliana columbia
ggaaaaaaaaaactcagagagacaaatctaaatggcgatgattacgcgcaacaccgccacgcgcctccctctcctcctccaatctcaacgcgccgtcgccgctgcctcggtctctcacctccacacatcccttcccgctctctctccctccacatcaccgacttcctacaccagacctggtcctccttcgacctcccctcctcctcctggtctctctaaagcggccgaatttgtgatctccaaggtcgatgatctcatgaactgggctcgtaccggatcgatctggcctatgacctttggtctcgcttgctgcgccgccgaaatgatgcataccggtgctgctcgctacgaactcgatcgattcggtatcatcttcaggcctaggcctcg

SEQ ID NO: 164968 - DNA, 293 bp, Arabidopsis thaliana columbia
ctcaaaatcactaaaatcaaactcaattttcattaaatatctctaatggcgccgaaagcagcggagaagaaaccggcagagaagaaaccagccgggaaagctccggcggagaaactcccaaaggcggagaagaaaatcagcaaagacgccggaggaagcgagaagaagaagaagaaatcgaagaagagcgtcgagacttacaagatctacatcttcaaggttctgaaacaagttcatccagatggtggaatctctgggaaagctatggggattatggacagtttcatcaatga

SEQ ID NO: 164969 - DNA, 327 bp, Arabidopsis thaliana columbia
caagttagtcataaaaaaaaaaaaaacacaaaaaagtttcaatggccgcctcaacaatggctctctcctcccctgctttcgccggaaaggctgtgaacctttcccctgcggcatcagaagtccttggaagcggccgtgtgacaatgaggaagactgttgccaagccaaagggtccatcaggcagcccatggtacggatccgaccgagtcaagtacttgggtccattctctggcgagtcacccagctaccttaccggagagattcctggagactacggatgggacacagatggtctattcggtgaccccgagacattcgcaaggaacc

SEQ ID NO: 164970 - DNA, 100 bp, Arabidopsis thaliana columbia
gatcgagagaagaatagtttgatcatcttttgttaaaaataatggctgcttcagcgatgctagtttcctttacattgaaaccagctctctccaccgtaca

SEQ ID NO: 164971 - DNA, 454 bp, Arabidopsis thaliana columbia
gaaagagagaaagagagacagagataatggcgtacagtgcgtgtttcctacaccagagcgcattggcttcatcagccgcacgatcatcatcttcctcctcatcccagcgtcacgtgtcgctctccaaacctgttcagatcatctgtaaagctcaacagtctcatgaagacgataactccgccgtctcccgccgtcttgctctcactctcctcgtcggcgccgctgctgttggttccaaagtatctcctgctgatgccgcctacggggaagctgcaaacgtgtttgggaagccgaagacgaacacagacttcttgccatacaatggagatgggttcaaagtgcaggttccagcaaaatggaacccaagcaaagagattgagtatccaggacaagtccttaagttcgaagacaacttcgatgctactagcaatctcaaaggcatggtcactcctac

SEQ ID NO: 164972 - DNA, 271 bp, Arabidopsis thaliana columbia
agaacaatggcttcctctatgctctcttccgctactatggttgcctctccggctcaggccactatggtcgctcctttcaacggacttaagtcctccgctgccttcccagccacccgcaaggctaacaacgacattacttccatcacaagcaacggcggaagagttaactgcatgcaggtgtggcctccgattggaaagaagaagtttgagactctctcttaccttcctgaccttaccgattccgaattggctaaggaaggtgactacctta

SEQ ID NO: 164973 - DNA, 309 bp, Arabidopsis thaliana columbia
ggagattgttgaaccgacgaagcctgctcgtaacagtttgaatggaaggaactgtgagagaatccaaataacgaagcctactattactccacctacgccttttgtgttcttctctccaagaccggtcaccgagcttgatgcagctgcaactacgttacagaaggtgtacaagagttacagaacaagaaggaacttagcggattgcgcggttgttgttgaggagctctggaggaagactctggatgctgcagctttaaatttgagcttcagtcgccttctttgtagaatagacacttgaatccgttgttt

SEQ ID NO: 164974 - DNA, 442 bp, Arabidopsis thaliana columbia
ctctaatggctacaacaaccacatcatgggaagaactcttaggctcaaagaattgggacactatcttagacccattagaccaatcacttagggaactcatcttacgttgtggcgacttttgtcaagccacctacgatgccttcgtcaacgaccaaaactccaagtactgtggagccagccgctacggcaaatcttctttcttcgacaaggtcatgctcgaaaacgcttccgactacgaggttgtaaacttcctctacgccacagctcgtgtttctctccccgaaggtttgcttctccaatcacaatcaagagattcttgggaccgtgagtctaactggtttggctacattgctgtcacgtctgatgaacggtctaaggctttaggacgccgtgagatctatatagctttgagaggaacgagcaggaactatgagtgggtcaa

SEQ ID NO: 164975 - DNA, 359 bp, Arabidopsis thaliana columbia
agcaagtaaggccatatcctctgaagatttggtggtagtttcacctgatgttggtggcgtcgcaagagctcgcgcttttgcgaagaagttatctgatgcacctttagcaatagttgataaaagacgtcatgggcacaatgttgcagaggtgatgaacttaattggggatgttaaagggaaagtagccataatggtggatgacatgattgacacagcaggaaccatatgcaaaggtgcggctctgttacaccaagaaggagcaagagaagtatacgcttgtaccactcatgccgtttttagccctcctgcaatcagtcgactatcgagcggactgtttcaagaggtgatcatatccaaca

SEQ ID NO: 164976 - DNA, 352 bp, Arabidopsis thaliana columbia
cattccagccacgacgccacgcgctctgctcaagcttccctcaccagctgattttcccgccctttcagaaactatactgaaagagggaagaaataacggaaaagagaaagcagagaacatcgtgtggcacgagagttcgatatgcagatgcgaccgacatcaacttcttcaacaaaagggttgtgtcgtttggatcactggtctcagtggttcagagaaaagcactgttgcttgcgcactaagtaaagcattgtttgaaagaggtaaacttacttacacactcgacggcgacaatgtccgtcacggtcttaaccgtgacctcactttcaaatgcttactaccgtacccgaaa

SEQ ID NO: 164977 - DNA, 307 bp, Arabidopsis thaliana columbia
gcgccacatcttattaactaaagagccttttacttgttccacactctcaccgcaatggccgcctcgacaaagggtctctcctctcctggggggaccggaaaggccgttaagctatccccggcggcctccgaagtatttggaaccggccgaatcaccatgcgcaaagcctccaagcccaccggtccatccggcagcccatggtacggatccgaccgagtcaagttcttgggttcattctccggtgagccttcgagctaccttactggagagttccccggtgattacgggtggaacactgtcggtctat

SEQ ID NO: 164978 - DNA, 456 bp, Arabidopsis thaliana columbia
agctcagtgcctctttgcagcgaaagctcaaccaacaagacgatgattatctcagagaacaatcgcagagagatctgcaaataccttttcaaagagggagtatgctttgctaagaaggatttcaatctcccaaagcatccgttgattgatgtaccaaacctgcaagtgattaagctcatgcagagtttcaagtccaaggagtacgttagggagacatttgcgtggatgcattattattggtttctgactaatgaaggaattgagttcttgagaacttatcttaaccttccttccgatgttgtccctgcttctttgtaagaagtctgataagcccttttgtccgttccttttgagttgtcattctgtattattctgttttagtttccttatatttttgtaattttttctattctacttcatttttttctattgttcttacttctgtttcattttatt

SEQ ID NO: 164979 - DNA, 352 bp, Arabidopsis thaliana columbia
ggagtgaagagatgggaaccgaagcatacgacgaggctattgaagctctcaagaagcttctcatcgagaaggaagagctaaagacggttgcagcggcaaaggtggagcagatcacagcggctcttcagacaggtacttcatccgacaagaaagctttcgaccccgtcgaaaccattaagcagggcttcatcaaattcaagaaggagaaatacgaaaccaaccctgctttgtacggtgagctcgcaaagggtcaaagtcctaagtacatggtgtttgcttgttcagactcacgtgtgtgtccatcacacgttctggactttcagccaggagatgccttcgcggtccgtaacat

SEQ ID NO: 164980 - DNA, 383 bp, Arabidopsis thaliana columbia
caatctactctctttaaaagaaattcgtaagtactatcaagaagcagaagatggcccaaaaggtggaagcacaaggagggaaaggagccaacctatgggacgatggatcgacacatgacgccgtgaccaagattcagctcgcagcaggcatagacggaattcaatatgttcagtttgattatgtcaagaacggacaacccgaacaagctcctcttcgtggtaccaaaggccgtgttctcccagctgatccgtttgtgattaaccatccagacgaacatctagtttctgaagaaggttggtatagccctgaaggtattattcaaggaattaaggtcatctccaacaagaagacttttgatgttattggatccgttgaggggact

SEQ ID NO: 164981 - DNA, 400 bp, Arabidopsis thaliana columbia
aaaaaaagatgcagatcttcgtgaaaaccctaacggggaagacgatcactctcgaggtcgagtgctctgacaccatcgacaatgtcaaggccaagatccaagacaaggaaggaatcccaccggaccagcagcgattgattttcgccggaaagcagctcgaagacggacgtaccttagccgattacaacatccagaaggaatcaacgcttcaccttgtccttcgtctccgtggaggtgctaagaagaggaagaagaagacctacaccaagcctaagaagatcaagcacaagcacaagaaggtcaagctcgctgttcttcagttctacaaggttgatggttcaggtaaggttcagcgtttgaggaaggagtgccctaacgcaacctgtggtgctgggacttt

SEQ ID NO: 164982 - DNA, 389 bp, Arabidopsis thaliana columbia
gacgattttaggagctacatctcaagcctaccccgattctttcggcggttattttctaggcacagggacatcctatgccactcccgttgttgcggggctcgtcgtactactcaaagctttacaccctgactggtctcctgctgcgctaaaatctgctattatgactacagcatggaagactgatccatccggggaaccaatctttgcggagggagaaccacggaaactggctgatccatttgactacggtgcaggactcgtgaacgcggaaagagccaaagatccaagactagtttatgacatgaacatcgacgattacattcactatttctgcgccactggttacaacgatacatcaatcactataatcacggggaaaccccacaaat

SEQ ID NO: 164983 - DNA, 262 bp, Arabidopsis thaliana columbia
ctcgagttgatatgtctagtactaaagatatgtcaactgtccaaaacgcaactccttttaacggcgttgccccatccaccaccgtgcgagttacaatcgtccaatcctccaccgtctataacgatactcctgccactatagacaaagcggagaagtatattgtggaggcggcaagcaagggagcagagctagtgttgttcccggaggggtttatcggtggctatcctcgaggttttaggttcggcttagcggctggagttca

SEQ ID NO: 164984 - DNA, 217 bp, Arabidopsis thaliana columbia
ctctctcaatcccggcggcgaagatgaagtacatcccaagagtgacctcttctcgcataaagaacaggggggctcatttcagagctgcctccagcgagaggcgtgtgataatgagctctcctctctccaccgatcttcgtcagaagtacaatgtcagatccatgccgatccgtaaagacgacgaggttcagatcgttcgtggtacttacaagggacg

SEQ ID NO: 164985 - DNA, 345 bp, Arabidopsis thaliana columbia
gatttcgaatactgcgccaaaaatggaaacgattacggaaccgtcactagcattgtggtctctccatctgttgggcctcacgaaaacccaaccatcactataaatttattcggttctgcaagcaaaaacatccccgcgggaacccttgtgtacgtagcctttagagatggggaatttaccggccttttaaaaacttacaacctttgtgatgtgagtgcatgtaacaatgaagctgagattgaagctggcaccaactttgagttaactctttccgacgttctttatgttggttatgatgaggaaatcaagtactcggtatctttgcgccgaaagaccttagaggag

SEQ ID NO: 164986 - DNA, 425 bp, Arabidopsis thaliana columbia
gaacttcgatcgtagaaaccttgaaaatccgagacatccacaatgccgccaaagttggatccgagtcagatcgttgacgtgtacgtccgagtaaccgggggagaagtcggagcagcgagttctctagctcccaaaatcggtccgctaggtctcgcaccaaagaagatcggagaagatatcgcgaaagaaaccgcaaaggaatggaaaggattacgtgtaaccgtcaagctcacagtgcagaatcgtcaggcgaaagtgacggtggttccatcagcagcagcactcgtcatcaaggcgttgaaagagccggagagagataggaagaaggtgaagaacatttagcataacgggaacatttcgttagatgatgtgactgggattgctaggatcatgtgacctatttctatttgctatggatttcagtg

SEQ ID NO: 164987 - DNA, 416 bp, Arabidopsis thaliana columbia
cgcgtccggaagactggaggtggtggtggaaagccttctatgcatctggttcagtcgcattgtacgttttcgcgttacgtccatcaactattgggtgggtgatctacaaagtctgagcggacccgtctcagctatgctttacattggctactctctgcttatggcaattgcaatcatgctcgccactggaaccattggcttcctcacctccttttacttcagccactatctcttttcctctgtcaaaatcgattgataccttgacgacaaaatctcagccgttgatctctgctttctctaaagcaatttcaagtgttgatatttttttgttagaacttatacttttttagaccactttattttacttgatttttttctttttcttggtcctttttttatcctttttatatttctat

SEQ ID NO: 164988 - DNA, 234 bp, Arabidopsis thaliana columbia
cttcaatatatatctttggacacccgagtaaaagaaaaaaaaagacagaaacagataataaatgtatctttgttattgtatttctcttcttcaacgtaataattgggttaaaaggtttggggcaatattttatggggtttgcttctttgtatggatatttggaatttggtggtattggctttggttatatgactattgatattcctataaaaaattaatattctcttttttttt

SEQ ID NO: 164989 - DNA, 440 bp, Arabidopsis thaliana columbia
gaagggttttacacaacacagatccagcaagttgcctagtaacgtagcagggacattttctggggtagctgagaaagttaggcatttgaaaacccttggaaccaacgctgttcttttggagccaatattctcattctccgagcaaaaaggtccttattttccatttcatttcttttcaccaatggacatatatggaccttccaatagccttgaatccgcagttaactcaatgaaagtgatggtgaagaaattgcacagtgagggaatagaggtacttttggaaagagtttttacacatactgctgattctggagctcttcgtggaattgatgacagttcctattactacaagggaagagccaatgatctagattctaaaaggtacttgaactgtaactatccctgtgttcagcaataggttttggagagcttgcgttatt

SEQ ID NO: 164990 - DNA, 434 bp, Arabidopsis thaliana columbia
caactacatttggagattatccacagatcatgaaagacattgttggacatagattgcctaaatgtacaactgagcagaaagcgaaactgaaagcttctaccgatttcgttgggctcaactactatacttcagtgttttcaaaccatttggagaaacctgatccttcaaaaccaagatggatgcaagattctcttattacatgggagtctaagaatgcgcaaaattacgccattggtagcaagcctttgaccgctgcattgaacgtttactcgagaggttttagaagtctgttgaagtacattaaggacaaatacgcaaatccggaaattatgatcatggaaaacggatatggagaagaactaggggcctcagattctgttgctgttgggaccggtgatcataacaggaaatattatcttcagaggcattttttg

SEQ ID NO: 164991 - DNA, 319 bp, Arabidopsis thaliana columbia
cgatcatgaagatcagacttagcataaccatcatacttttatcatacacagtggctacggtggccggacaacaatgcggtcgtcaaggcggtggtcgaacttgtcccggtaacatctgctgcagtcagtacggttactgtggtaccaccgcggactactgttctccgaccaacaactgtcagagcaattgttggggaagtgggcctagcggaccaggggagagcgcgtcgaacgtacgcgccacctaccatttctataatccggcgcagaataattgggatttgagagccgtgagtgcttattgctccacgtgggatgc

SEQ ID NO: 164992 - DNA, 399 bp, Arabidopsis thaliana columbia
cccaaacacaccatcaccaatcttcgccggaagcacaggaggtctcctccgtaaagcacaagtagaggaattttacgtgatcacatggaactcaccgaaagaacaaatctttgagatgccaacaggaggagctgcgataatgagagaaggaccgaatctattgaaactggcgaggaaagaacagtgtttggctttaggtacgaggttgaggtcaaagtacaagatcacttaccagttttacagagtgttccctaacggagagggtcaatatctttacccgaaagatggagtttattcagagaaagcgaatccaggaagagaaagtgttggacttaacatgagtaccattcgtttaaattgttgttcccattggggttaaatttcattgggataacatct

SEQ ID NO: 164993 - DNA, 450 bp, Arabidopsis thaliana columbia
cacacggattccatggagactaaacagagtatccctctcctcatgccctataagatgggacccttcaatctttctcacaggggtggtttggccccattgactaaatcgagatcggatggttacattcctcaacctaatgcccaattatattacactcaaagaacaacacctggtgggcttcttaattcccaatcccgggtagtctcccagaccatatttggccttcccgaattaaccgggtttttgaaccagaaccaagtgggagccttggatccctacttggatgcctgtaatttttaaggaggtagtttttttcctgcatttttttacattttgttgctatttattttaattttttaacttatcttgatggtttttatttctcttctattatgttctagtttattttctattaatattttctgtatttttttgaattttagtttttta

SEQ ID NO: 164994 - DNA, 426 bp, Arabidopsis thaliana columbia
  unsure (1)..(426): unsure at all n locations
agattatctgtatttcaagtttcatgagcgtttgccaccacaacattgtcttttcggggttttagtcatacttaatggcttccaattcggagaaaaatcctcttctttcagatgagaaacccaaatcgacggaggagaataagagttctaagccggaatcagcttctgggagttcaacttcatcagctatgcctggcttgaatttcaatgcttttgatttctctaatatggctagtattctcaacgatcctagcatcagagaaatggctgagcaaatagctaaagatcctgcgtttaaccaattggctgagcagcttcagagatctattcctaacgctggccaggaaggtggnttccctaactttgatcctcaacagtatgtcaattcaatgcaacaggttatgcattaccctgaggttaagacat

SEQ ID NO: 164995 - DNA, 308 bp, Arabidopsis thaliana columbia
aaaaatctgggatttctaaaaaaaggtaagaaggaaaatggcggatcagctcaccgatgaccagatctcagagttcaaggaagcctgtagcctcttcgataaggatggtgatggttgtatcaccaccaaggagctcggaaccgtgatgaggtctctggggcaaaacccaacagaagctgagcttcaagacatgatcaatgaagttgatgcagatgggaacgggaccattgatttcccggagtttctgaacctggtggcaaggaaaatgaaggacactgattcaaaggaagagctcaaggaagcctttt

SEQ ID NO: 164996 - DNA, 338 bp, Arabidopsis thaliana columbia
ttgtagttaaacaaagattacgattatggccacatcagctatccaacaatcctccttcgccgggcaaacggctctcaagccctccagcgacctcatccaaaaggtgggcgtcttgggcggtggccgtgtgaccatgcgtcgtaccgtcaagtctactccccaaagcatctggtatggaccagaccgtcccaagtacttgggaccattctcggagaacacaccgtcttacttaactggagaataccccggagactacgggtgggacaccgttggactcttggctgacccggagactttcgctttaaaccgggagcttgaagttattcacagcagatggg

SEQ ID NO: 164997 - DNA, 113 bp, Arabidopsis thaliana columbia
cgattttccgaccttgtacttcaaagccaagatttctcaccggttcttccggtaggttgagaccgcgacttgtcggggacagggatcgcgtcatcggccaaaacgtcttcgtt

SEQ ID NO: 164998 - DNA, 417 bp, Arabidopsis thaliana columbia
cctcaaggcagctgagaagctcgcagaagagggaataagtgctgaggtaataaatcttcgatcaatccgtccgcttgaccgagccaccatcaatgcttcagtgaggaaaacgagtagattggtaacagttgaagaaggtttcccacaacatggagtctgtgcagaaatttgtgcgtcggttgtagaagagagcttttcgtacttggatgcaccggtcgagaggattgcaggagctgatgttccaatgccgtatgcagctaacctagagagattggctcttcctcagatagaggacatcgttcgtgcatcaaagagagcttgttacagatcgaaataaaatcgtcaacatcaacacatttcttctttgatctttaaaggggaaggaaaattagaaaaaaagagaaaaatgatctctct

SEQ ID NO: 164999 - DNA, 354 bp, Arabidopsis thaliana columbia
tgcaattttcctctcctcccaaccaaaacacaagagccaagaacaaagaaaccatggatcatgatcacatgcatggaatgcctcgaccatcatcatcatcatcatcatcaccatcatccatgatgaacaatggatccatgaacgaaggaggaggacatcaccacatgaagatgatgatgcacatgaccttcttttggggcaagaacacggaggttctcttctccggttggcccggaacaagctccggcatgtatgctctttgtcttatctttgtcttctttctcgccgtcctcaccgaatggcttgctcattcctctctcctccgtggctccaccggagattcggctaatcgtg

SEQ ID NO: 165000 - DNA, 251 bp, Arabidopsis thaliana columbia
gctttatcctctctcagagtttcttctcctctgtgaatctcccacaatggcgatagctatggcgggtggttctttcccatgtgtggtcaacaaaacaaccctattctcttcactcttcactcccacttttcttccggcgaaatcctcttcacttctcatcaaatcatcacccaaaacccgattcgtgggttcatcatccatgggagccggaatcggagttatggggtcaaaactcgggatgatgagtttct

SEQ ID NO: 165001 - DNA, 314 bp, Arabidopsis thaliana columbia
ggcgaatcaccgagctaccttaccggagagttccccggagactacggatgggacaccggcggacgtttcagctgacccggagacattcgcaaggaaccgtgaactagaagttatccacagcaggtgggccatgctcggagccctaggctgcgtcttccctgagcttttggctagaaacggagtcaagttcggagaggcggtttggttcaaggccggttcacagatcttcaacgatggagggctcgattacttgggaaaccctagcttggttcacgctcagagcattttggccatttgggccccacatgtttttt

SEQ ID NO: 165002 - DNA, 388 bp, Arabidopsis thaliana columbia
caaacaaacaacaacaaagagagaaattaacatggcgtcttttgcaaccatcgccgccgtacaaccttctgccgccgtgaaaggacttggaggtagctctcttgccggagctaagctcttcatcaaaccttctcgccaaagcttcaaaaccaaatccaccagagctggtgctgtggtggctaagtatggagacaaaagtgtatactttgatttagaagatttgggtaacacaacaggacaatgggatgtgtatggatctgatgctccttctccttataacccacttcagagcatgttctttgagacatttgctgctccattcacaaagagaggtttagtttttcaaatattttaattcctcggattgaagttttattgtttacatatt

SEQ ID NO: 165003 - DNA, 279 bp, Arabidopsis thaliana columbia
ctaacacttcctcacctccttcacgagcttcctctgtttcaccactccaagcgtctcttcgtgagctcagagaccgtatcgattcaggcaaaaacactcaaaagatcaccgaagctatgaagcttgtcgctgcagctaaagtcaggagagctcaagaagctgttgtcaatggacgaccattctcagaaaccctagttgaagttctttacaacatcaacgaacagcttctaaccgatgatgtcgatgtgcccctaaccaaagtcagacctggttaagaaa

SEQ ID NO: 165004 - DNA, 346 bp, Arabidopsis thaliana columbia
attcaatttgatgcctacacgcgacgtcaatgtcatcgatgaagaaggttctgaggctccgagactggtcgagagagcattcgatttgccggcggcggttgaccgtcgtggctccggtggttctccgtcggttcaagattttggtcaccatgctggttactacaaactccctaactcaaaagcagcaaggatgttctactttttcttcgagtcaaggacgaacaaagccgatccagtggtgatttggctaaccggtggaccaggttgcagtagtgaactggctttgttctacgagaacggaccgttcaccgtctctaacaactcatttctttctttgaaacgaatt

SEQ ID NO: 165005 - DNA, 404 bp, Arabidopsis thaliana columbia
caaatctttttctcattcttcaaaagaaaaaaccaaagcaaaaaaaactcaaaacgtttttgaagataatgatgatgatgacgaagatgtttgttcagatcgctgtggtttgtctattggcgacgatggccgttgtgtccgcccacgagggtcaccaccaccatgctccggctccagcaccaggacccgcatctagctcaaccgttgtttcggccaccaatatgttcaccgtcttggctattgctgccgtggctctcgtcgttggttccaaccactaagttggttattacattcgtcgttttgtttcggtttctatgaaattgttctcttgacttttaaaatattttgaatttttctcatttgtttttaactctctctatggtgatctgatttcttgaataaaa

SEQ ID NO: 165006 - DNA, 180 bp, Arabidopsis thaliana columbia
ctttcatgtctgtctgtgagtgtgtttcatcttagagttcttggtttttgagcttgaattattgttgaaccgttgtagctccatgaacaaatttggaatcttcaatgtacagaggaactaagttaatcaacattgttgtactctttaatatctattattcatgtggcaacagttatatat

SEQ ID NO: 165007 - DNA, 291 bp, Arabidopsis thaliana columbia
catggcggtgctttcatctgcagatcgagctagtaatgagaagaaggtgaagagttcatactttgatttgccacctatggaaatgtctgtagcatttcctcaagcaactccagcctctacatttccaccttgtacttcagactattatcatttcaatgatctactgactccggaagaacaagctatccggaagaaagtgagggaatgcatggagaaagaagttgctccaataatgacagagtactgggagaaagcagaattttcattccatatcactccaaagcttggggc

SEQ ID NO: 165008 - DNA, 434 bp, Arabidopsis thaliana columbia
gtgaagaagaaaaaaaagaaggtcattttcattttctccatttgatttttgccgaccggagaaaatatcttcttgccggctgcttcttcatttcaccaggaacttttatttgaaatcggtttgatttagccatggcaaacgcggcatcgggaatggctgtgcatgatgattgcaagctgaaatttatggaactgaaggcgaaaagaacattccgtaccatagtctacaagattgaggataagcaagtgattgtagagaaactcggtgaacctgaacaatcatatgatgactttgcagctagtcttccagctgatgattgccgatattgcatttacgatttcgactttgtcactgcggagaactgccagatgagcaagatacttctttattgcatggtctccggacactgtcaaagtgagagacaaggttgtttt

SEQ ID NO: 165009 - DNA, 347 bp, Arabidopsis thaliana columbia
  unsure (1)..(347): unsure at all n locations
gaaagatgagaagtcactgaaggagttgaaactcaaggaggtcaagaacggtagactggctatgctcgccatcctcggttactttatccaaggactagtgaccggtgtgggaccttatcagaacctgcttgatcacttggctgatcccgtcaacaacaacgtcttgaccagcctcaagttccactgaggtgatcatcatctcatgtgtttttatgtctcttgtatcgnacaatatttccatctttcgctaccattggcttcttcgtattggaacaccctgtgtaaacatattcgtgttttgtaagaaatggcaatgtcaatggccaaacgaaaaaacttttaggatt

SEQ ID NO: 165010 - DNA, 446 bp, Arabidopsis thaliana columbia
aaaaccaaaagaagaagagaaacaacaagaagaagtaatggcttcctctatgttctcctccaccgctgtggttacctccccggctcaagccaccatggtcgctccattcaccggcttgaagtcatccgcttctttcccggtcacccgcaaggccaacaacgacattacttccatcacaagcaacggaggaagagttagctgcatgaaggtgtggccaccaatcggaaagaagaagtttgagactctatcttacctccctgaccttagtgacgttgaattggctaaggaagttgactaccttctccgcaacaagtggattccttgtgttgaattcgagttggagcacggatttgtgtaccgtgagcacggaaacactcccggatactatgatggacgatactggacaatgtggaagctttcattgttcggatgcaccgactccgctc

SEQ ID NO: 165011 - DNA, 57 bp, Arabidopsis thaliana columbia
tgatgtgaacatgatgcttgcaagatctggagcttagatacttcacgagaaggtctc

SEQ ID NO: 165012 - DNA, 255 bp, Arabidopsis thaliana columbia
gctgtttctaagaaaacaacaggtagttcggatcggagctacgcttgcaaaactcaaaacatggcgaggggtttgaagaagcatctgaagaggcttaatgcgcctaagcattggatgcttgacaaacttggtggtgcatttgccccaaagccgtcttctggaccacataagtcaagggagtgcctttcccttgttcttatcatcaggaactggttgaagttttctcttacctaccgtggaagtgatttcaaattc

SEQ ID NO: 165013 - DNA, 460 bp, Arabidopsis thaliana columbia
cgtcaaacaaaaaaaaaaaacctaaagaaacttcgacatgaaaggcggcgaatccaaagctgaagcaacgagcactgatcagagactcaaaaccagaggtagaaaggctgggaagaagacgaagaaggatccaaatcaacctaagagacctccaagtgctttcttcgtcttccttgaggatttccgaaaagagtttaacctagcgaatcctaataacaaatccgtcgctactgttggtaaggctgctggagctagatggaaggcaatgactgatgaagataaagctccttacgtcgctaaggctgagagcagaaagactgaatatattaagaatgtgcaacagtacaacttgaaactggctagtggaaccaatagagaagaggatgactctgacaaatccaagtctgaagttgatgaagcagtaagcgaagaggaggcagaagacgacgattgaagcatc

SEQ ID NO: 165014 - DNA, 257 bp, Arabidopsis thaliana columbia
ctctgatgggattcgctgagcaccggaggttacaggactggtacaacccaggatctatgggaaaacagtacttcttggggttagagaagggtttggccggttcaggtaacccggcttaccccggtggacctttcttcaaccctcttgggtttgggaaagatgagaagtcactgaaggagttgaaactcaaggaggtcaagaacggtagactggctatgctcgccattctcggttactttattcatggacttgtgacc

SEQ ID NO: 165015 - DNA, 422 bp, Arabidopsis thaliana columbia
cactctcagaggagcagatgaaggaactaatctaccgcgaggcgcttgctttcaatccagaatatcagcaatagtttgaagaacagcatttgggagatgaagatgagataagggtttggcgttatttggtttggacaacattcttaaaaggaggaaagatcattgtttgtcttttgtgttttcttgtgtagtttatgtgttattttggattttttttgtttttttatatttattatttttttgtgttatttttgattttgtattttaatatatattatttatgattttttgtatatgtttttttttttttgatttattgttatattggtgtatttttatatttatagatatgtttatttagtgtgtatatttttttttttttttaattagtttttttgtttttagtttgtttttattttatt

SEQ ID NO: 165016 - DNA, 456 bp, Arabidopsis thaliana columbia
atctttccatttccgagccgttgagaattttttctgagagataatttaacaaatttcttcttcttcttctgtttctgaaccaccaaatctgcctttctcaattagctatgggcgtcgctgttctaaatccccaggattgcttgaaagatccattctctcacatgaaacaacatcgtaatcctagcgcatgtcccaacaggcagaagaagacggtctccaacaaccgtacacgccggagtcctcctcgtagtcaatcctccagatcttcttctcctcctgtagcgccgccgcttcctcctcctcgtgcggctgtctctgctttcgttccaaagggaacccttaagaagagtcttagcaataccgttgccgttagccaggtgagaatccttaagcgcggcgaagaaatccccaaggagacttcagatctggttgggggaatgtcagatctgggatcta

SEQ ID NO: 165017 - DNA, 316 bp, Arabidopsis thaliana columbia
gattcctccaaaatcgggactttttctcaggacgtttgagatgcattcgcgctccgccttgctctatagattcctctgtccggcgtcgagatgcttctcctcttcctcggctgtaactccggtcaccgtaacgcaatctcccaagagtctcgaggctcttcgagctcggctggcgaatgagtcgccttccctaaccgatttcatccacggcgatacctattcggtggaagttggaaccaaaaagaaacctctcccgaaacctaaatggatgaaggaatcaattcccggcggcgagagatatgtccagatcaagaag

SEQ ID NO: 165018 - DNA, 457 bp, Arabidopsis thaliana columbia
ggtttcctcccctactcctacaaagctccttccccgccgccgcccgagcaacactaaaccccccatctccgccggtcgcagggtgcccctcgccgccgccgccttccagatctcgccatggcgtcggagaagaagcaggcgaacccgatgcgggagatcaaggtgcagaagcttgtcctcaacatctccgtcggcgagagcggagatcgcctcacccgcgcctcgaaggtgctggagcagctgagtgggcagtcaccggtgttctccaaggcgaggtacactgtgaggtcgttcggcatccggcgtaatgagaagatcgcgtgctacgtgacagtgcgtggtgagaaggcaatgcagctcctggagagtggcctgaaggtgaaggagtacgagctgctgaggaggaacttcagtgagactggatgcttaggttttggtattcaggagcacattgttc

SEQ ID NO: 165019 - DNA, 455 bp, Arabidopsis thaliana columbia
aacaaatttcttcttctcttcttcaagctcatcaatcaatggcgtcgtctctatctccaccggaagaagcttcgtatcaccaccgtcataccaaaaggtacacctcctccgcttcctccgcttcctccaccaccaacggaaccgtcgaatcatcggtttccgatttcgtcaaacgtcccaaaatctctcatccgaattacatatcaagttccgagatcgaatcagagttttctcatcacgatccagatttcgcaagaatcaacaacggtagttttggttgttgtccgtcatcaatcctagctttacaacgagattggcagctccggttccttcgtcaaccggatcgattctatttcgacgaactcaaaccaaaaatctccgattctagatctgtaatcaaacggttaataaacgccgagcatgacgatgaagtctcgatcgtcgataacgcaaca

SEQ ID NO: 165020 - DNA, 458 bp, Arabidopsis thaliana columbia
ctcctcctcctccggttaagcactactctccccctccggtttaccattccccacccccacctaaagagcattacgtggacaaatgtcctccaccaccggtgaagcactactctccttctgcggtttaccattccccaccacccccaaagaaacactacgtgtgcaaatctcctcctcctccggttaagcactactctcctccttcgaggtaccattccccaccaccaccaaagaaacactacgtgtacaaatctcctcctcctccagggaagcactactctcctcctgcggtttaccattccccaccaccaccatagaaacactacgtgtacaaatctactcctccaccggtgatgcactactactctcctccagtttaccatttcccaccaccaccaaagaaacattacgtatactagtcgcctgcttctgcaggttagcactactgttccccttca

SEQ ID NO: 165021 - DNA, 379 bp, Arabidopsis thaliana columbia
gtagcccagtagctctaatcgctacgattgctacacaccacatcccttaagaaaaccctaatcatctctctctcgcattctataggaatcgcttcccgaagcttccaacattctcttggttctcccttgtctctcaatttcaggttcctatattatacgcttgtattaatcaccagtatacattttgtcggttctgggtctgggacccctagaggtattatagcatccatcgctttcttcaatcgccggccatcagaggttcaagggatttgctttaaagatcaatcctttcctaagaaaatagcgacaattcatcagctttttcttttccatcctttatttccttaacttactcgagattcattcttcaactgaaatt

SEQ ID NO: 165022 - DNA, 458 bp, Arabidopsis thaliana columbia
gactcgagcttcgttcgtctctctgcaaatatggcgacagcgtatcaaccaatgaaaccaggaaaggctggtttggaagagccactcgagcagattcacaagatcaggattactctctcctccaagaatgtcaagaaccttgagaaagtgtgcactgatttggttcgtggagctaaggacaagagacttagagtcaagggaccagtgagaatgcccactaaggttctcaagatcactacccgaaaagctccctgtggtgaaggaaccaatacatgggacagatttgaacttagggtgcacaagcgagtgattgatctcttcagctctcctgatgtggtcaagcaaatcacatccatcaccattgaacctggtgttgaggttgaggtcaccatcggcgactcgtagatcgactctcttacttctgtttttgctctttctcttttaagaaacaaatgttt

SEQ ID NO: 165023 - DNA, 230 bp, Arabidopsis thaliana columbia
ccaagaattgaggaagtcgactaataactttctctcttactctcttactctcagtctttatgtggttggatttcaacattttgctggtttgtcccctagttttttttttctttttctttcttggattgactctattttgagggctcgcttgtttcgatgagctccttattttttttaatctataacaggaatgttttgattcaaaaaaaatacccactaaagcaattaat

SEQ ID NO: 165024 - DNA, 447 bp, Arabidopsis thaliana columbia
catcctcagaaagaatggctcaaaccatgctgcttacttcaggcgtcaccgccggccattttttgaggaacaagagccctttggctcagcccaaagttcaccatctcttcctctctggaaactctccggttgcactaccatctaggagacaatcattcgttcctctcgctctcttcaaacccaaaaccaaagctgctcctaaaaaggttgagaagccgaagagcaaggttgaggatggcatctttggaacgtctggtgggattggtttcacaaaggcgaatgagctattcgttggtcgtgttgctatgatcggtttcgctgcatcgttgcttggtgaggcgttgacgggaaaagggatattagctcagctgaatctggagacagggataccgatttacgaagcagagccattgcttctcttcttcatcttgttcactcttgtgggag

SEQ ID NO: 165025 - DNA, 476 bp, Arabidopsis thaliana columbia
agagagatttactctggggtatagttgcatgggaggagtacagtgttatcactccaatgactcacgcgcatttcaagatgcgacatacttgatttccattatcttattacactagacttttaagtattccttttattactacctattcttatatttttgatatttatttatatctcttatatttatttttatcttgatttttctgtaatttaatttttttttattttatttttcaattattttttttctacttttctatattttattttatttcatttttttctaatattttataattttatatttttctttttattatatattttatatattatatttctatttatattattatatttttaaattttttatattattctattttattttttaattttaatttattcaatttcttaaatttcattacttttataaccatttaatttttttcatactttaataatattttttataat

SEQ ID NO: 165026 - DNA, 447 bp, Arabidopsis thaliana columbia
gatcttgtttgcttgccttctaaagttgctagcggcttggggaaccttggtccacttgtggtttgcacaaaagtctctgataatatcactctacttgatccgagaactctaaggtgtgccttcttggatgcgagacagtactggaggtctgggttccgatctgcgctcaccagtagacaacttgtcaagtactttgtgtttgatgttgagccacctgttggtgaagcgactgttggtgggcaaaagtacgctctttcctatgtccagattgcccgtgaatcagacattggtaagatgttttatgtccaaactcatcttggacacattctgaaacctggggatcaagctttgggttatgacatctacggagctaatgtgaacggacatgaaatggagaaataccggctgagtgtgaaaaatgggctttctgaagcaattctgatcaag

SEQ ID NO: 165027 - DNA, 415 bp, Arabidopsis thaliana columbia
agaacaatggcttcctctatgctctcttccgctactatggttgcctctccggctcaagccactatggtcgctcctttcaacggacttaagtcctccgctgccttcccagccacccgcaaggctaacaacgacattacttccatcacaagcaacggcggaagagttaactgcatgcaggtgtggcctccgattggaaagaagaagtttgagactctctcttaccttcctgaccttaccgattccgaattggctaaggaagttgactaccttatccgcaacaagtggattccttgtgttgaattcgagttggagcacggatttgtgtaccgtgagcacggtaactcacccggatactatgatggacggtactggacaatgtggaagctttccttgttcggttgcaccgactccgctc

SEQ ID NO: 165028 - DNA, 455 bp, Arabidopsis thaliana columbia
agaaaataaaagatttgtagaatcaactaagaaaatggctagcactatgatgactacattgcctcagttcaatggtcttcgagccaccaaaatctctgcagctcctgtacaaggcctggcaagtgttcagcccatgagacgcaagggaaatggagctttgggtgcaaagtgtgacttcatcggttcatcaacaaatctgataatggtaacgtcgacgaccctgatgttgttcgcggggagattcggacttgcgccatcagccaataggaaggcgacagctggacttaggttggaggcacgtgactcaggtctacaaacgggtgacccggccgggttcacgcttgcggacactttggcttgtggcaccgttggtcatatcatcggtgtaggagttgtccttggccttaaaaacattggtgctatttgaagatcctaaagctcttttatttggtatt

SEQ ID NO: 165029 - DNA, 453 bp, Arabidopsis thaliana columbia
gtaaagagttcgacactccagactcagcacgaaagatggttaagctaaaagcttttgagaagtttgacaatacatctgaagctctcgaagctgtggctaaattgctggagggagctccaagcaaaggtctgcgcaagtttttgaaagctaattgtcaaggtgaaaccttggctgtggctgattcaaagcttgggaatgttatcaaggagaaactgaaaattgattgcattcacaacaatgctgttatggagcttctacgtggtgttagaagtcagtttactgaactcatatctgggttgggtgatcaagacttggctcctatgagcttgggtctgtctcacagtctcgccagatataagctaaagtttagttctgacaaggtggataccatgattatccaagctattggtctgcttgatgatcttgacatagagctgaacacatacgccatga

SEQ ID NO: 165030 - DNA, 378 bp, Arabidopsis thaliana columbia
agaacaatggcttcctctatgctctcttccgctactatggttgcctctccggctcaggccactatggtcgctcctttcaacggacttaagtcctccgctgccttcccagccacccgcaaggctaacaacgacattacttccatcacaagcaacggcggaagagttaactgcatgcaggtgtggcctccgattggaaagaagaagtttgagactctctcttaccttcctgaccttaccgattccgaattggctaaggaagttgactaccttatccgcaacaagtggattccttgagttgaattcgagttggagcacggatttgtgtaccgtgagcacggtaactcacccggatactatgatggacggtactggacaatg

SEQ ID NO: 165031 - DNA, 456 bp, Arabidopsis thaliana columbia
ctctcgcgtcgtttcgtttccaaatgttagttttcttctattcattttttctttaaagttgttacacagatctcaaaactagatcgaattgtaagaaatcgaaatttattgtaatgtttaggtaggagaaaacccagttattgaatcgttgaattgagtccatttacgttttctgattacagcttgaagatgggagatgaaactgttgacggtatcgaagccaagtatatatctggtctcagtactataatggttgctacaattcaagaagccaaggatagaatttctcagatcgagtatattttttgtagccagttatttccaaattttcaatccaaatccaaagcttttgaaaaagtttattcagaagctcgtcttgctgcttgtgatacttggaaagatagagagaaaagtttgttagatcagattgaagagcttatggtagagaatcaacag

SEQ ID NO: 165032 - DNA, 461 bp, Arabidopsis thaliana columbia
ggagattttactctgaccttgagcttacggaaaaggaaatagagcggtcggtaatggaagcttctcgtgctgagtatcttatggaatggtctaagccacgaattggtccaaaggaatcatccacctcgaatgctgagacatcatcttctggagctagaccttcaggcagcgattcgaaaccagcagaggcagtaaaagaaaagacggtgctgagcagcagtatcgagatggtattgtcgatgggatttagctacgcacaggccatggaagcttatagcatttttggggatgacgttgactctatggtctgttatgtactggagacgagctgtggcggcaacaaccgacgcaaaggcaaagccacggaatagagaatgtaacatgaattgctctgtattaatagtatatgatataccaattcgtattcctatcaatggtgggcgattacccttatcagaata

SEQ ID NO: 165033 - DNA, 439 bp, Arabidopsis thaliana columbia
tgcttttctccgtcactgagtaccttgcctctcgagctcccaatcttaagtagaggattgagcttaaggcaagatggtaagaatcagtgttcttaacgatgctctcaagagcatgtacaatgctgagaaacgaggcaagaggcaggtcatgatcaggccttcctccaaagtgattatcaagtttctgattggcatgcagaagcacggttacattggtgagtttgagtatgtcgatgaccacagatctggcaagatcgtcgttgaattgaacggaaggttgaacaagtgtggtgttatcagcccacgttttgatgttggtgtcaaggaaattgaaggttggactgcccgtttgctcccttctagacagtttgggtacatcgtgctgactacatctgctggcattatggaccatgaagaagctagaaggaagaatgttgga

SEQ ID NO: 165034 - DNA, 415 bp, Arabidopsis thaliana columbia
gaagaaaaaaaatctttttaaagagctttgaagatccatggcgatgtctcatgtccagcctatgctactcctcctcgtatcactcttcttcttaccggctttgcgtggcgccatagatttcgaatactgcgccaaaaatggaaacgattacggaaccgtcactagcattgtggtctctccatctgttgggcctcacgaaaacccaaccatcactataaatttattcggttctgcaagcaaaaacatccccgcgggaacccttgtgtacgtagcctttagagatggggaatttaccggccttttaaaaacttacaacctttgtgatgtgagtgcatgtaacaatgaagctgagattgaagctggcaccaactttgagttaactctttccgacgttctttatgttggttatgatgag

SEQ ID NO: 165035 - DNA, 373 bp, Arabidopsis thaliana columbia
caacgtttgagattataataacatggaaggaatcattgtgagaagagttataccatctgataacagttgtctcttcaatgcaatcggttatgtcatggacaaggacaaaaacaaagctcctgagctcagacaggtgatagcagcagcagttgcaagcaacaaggagaaatataatgaagcatttctagggaagctcaatgaagaatattgtgcttggattctcaatccaaacaagtggggaggtgcgattgagctttcgatattagcagattattatggtcgagaaattgcagcttacgacattcaaactagtcgatgtgacttgtatggacagacgagaaactacgacgaaagagttatgctgatctatgac

SEQ ID NO: 165036 - DNA, 301 bp, Arabidopsis thaliana columbia
gagaacaacaaccaaacactcatttctccacatcttgagagaaaaaaacagagcaagtatattagagatctcatggcgatggcggtctccggagctgtcctcaatgggcttggttcttcgttcctcaccggaggcaagagaggtgccaccgcattggcaagcggcgtaagcactggagctcaaagaggtggcaggaaaactcttattgtcgctgctgcggctgctcaacctaagaaatcttggatccctgccgttaaaagtggtggcaacttccttgaccctgaatggctcgatggctcgc

SEQ ID NO: 165037 - DNA, 420 bp, Arabidopsis thaliana columbia
catctttcaatctctcttgattccaatccattcttcttcaagtgccgggttctcgggtcggatcttctaagtctagctagggataatggctactgtcactactcatgcctcggcctcgattttccgaccttgtacttcaaagccaagattcctcaccggttcttccggtaggttgaaccgcgacttgtcgtttacatcgatcggttcatcggccaaaacgtcgtcgttcaaggttgaagctaagaaaggagaatggttgcccggtttggcatcgcctgattatctcaccggcagtcttgccggtgacaatgggtttgacccgttgggtctagcagaggatccagagaacttgaaatggttccgccaggcagagcttggcaacggacgatgggctatgctcggtgtcgctgagatgctttt

SEQ ID NO: 165038 - DNA, 381 bp, Arabidopsis thaliana columbia
caaacatttctttcacttaccgaagcatcttctccaagaaagccatgactgatatggacagtacaaatgtctacgcttacatctccatcatcgcactcttcgtctgcattcctcctgccatcatcgttgaaggtcctaaactacttaaccatggtttcgccgacgcgattgctaaagttggaatgactaaattcatctctgatctcttctgggttggaatgttttaccatctctacaatcagctggctaccaataccttggagagggttgcaccgctgactcacgcggttggaaacgttctgaaacgtgtgttcgtgatcggtttctccatcgttatcttcggaaacaagatatcgacacagacaggtataggaacaggaa

SEQ ID NO: 165039 - DNA, 373 bp, Arabidopsis thaliana columbia
gaagaacaatggcttcctctatgctctcttccgctactatggttgcctctccggctcaggccactatggtcgctcctttcaacggacttaaagtcctccgctgccttcccagccacccgcaaggctaacaacgacattacttccatcacaagcaacggcggaagagttaactgcatgcaggtgtggcctccgattggaaagaagaagtttgagactctctcttaccttcctgaccttaccgattccgaattggctaaggaagttgactaccttatccgcaacaagtggattccttgtgttgaattcgagttggagcacggatttgtgtaccgtgagcacggtaactcacccggatactatgatggacggtact

SEQ ID NO: 165040 - DNA, 123 bp, Arabidopsis thaliana columbia
gaaggagacttctcgtttagtgatagaactgctatttcgtctaccattggtggtttaccttttgctggaggagttgcggtgttctgttttgagggttttgtaatgacgttggctttggagagt

SEQ ID NO: 165041 - DNA, 424 bp, Arabidopsis thaliana columbia
gccagcggtaccgaatctcgcagttccgagcccacgcgtccgcggacgcgtgggcggaacgcgtgggctttcaatctctcttgattccaatccattcttcttcaagtgccgggttctcgggtcggatcttctaagtctagctagggataatggctactgtcactactcatgcctcggcctcgattttccgaccttgtacttcaaagccaagattcctcaccggttcttccggtaggttgaaccgcgacttgtcgtttacatcgatcggttcatcggccaaaacgtcgtcgttcaaggttgaagctaagaaaggagaatggttgcccggtttggcatcgcctgattatctcaccggcagtcttgccggtgacaatgggtttgacccgttgggtctagcagaggatccagagaacttgaaatggtt

SEQ ID NO: 165042 - DNA, 291 bp, Arabidopsis thaliana columbia
agacgtccgattaaaccaaggcttatctaagagacttacctcgctgaggacatctccactttactctgtgatttcactagaagtgaggctgtgccattgcctacgcaaagctgacgtcggacgctgctcttgatacaccgggactagtggccatcgcggtttgtcatggttttgctctcttcgaggccgttgcaatcggagccaacatctccggtggccatgtgaacccagccgtcactttaggtcttgctgtcggaggtcaaatcacagacatcaccggagttttctact

SEQ ID NO: 165043 - DNA, 245 bp, Arabidopsis thaliana columbia
cctgagtttgctaagaagcttgcttctctagctgacctttatgtcaatgatgctttcggaactgctcacagagctcatgcttgtaccgaaggagtcactaagttcttgaagccttcaggtgctggtttccttttgcaaaaggaactggactacctagttggtgctgttttaaacccaaagagaccatttgcagccatagtgggtggttccatagtcttattcaagaatggagttttttgaattcc

SEQ ID NO: 165044 - DNA, 443 bp, Arabidopsis thaliana columbia
gtttgtggcagagaggttacacatcgatggcaacatctttgcttctcagacattcctcagctgtcttcttctctcagtcttccttcttcaccaagaacaaatcttttcgctcctttacttccatcaaaatggaaaaaggtgaagcagagaatgcagtgaagacaaagaaggtgtttgtcgcaggagcaactggacaaaccgggaagaggattgtggagcagttgttgtcccgtggctttgccgtcaaagctggtgttcgtgatgtagagaaagcaaaaacatctttcaaagacgacccgtctcttcagatagttagagcagacgtgacagaaggtcctgataagctagctgaagttataggtgatgattctcaagctgtgatttgtgctactgggtttcgttccggatttgatatattcacttcttggaaagtcgataatttc

SEQ ID NO: 165045 - DNA, 458 bp, Arabidopsis thaliana columbia
aaagcactcccctaaagcccctaagctaccagttcctccggtgaccgtccctaagctaccaggtcctccggtgaccgtccctaagctaccagtccctccggtgaccgtccctaagctacccgttcctcctgtgaccatccctaagctacccgttccaccagtgactgtacctaagctacccgttcctcctgtgaccgtccccaagctacccgttcctccagtgaccgtccccaagctacccgttcctccagtgacagtccctaagctacccgttcccccggtaactgtacctaagctacccgttcctccagtgaccgtccctaagctaccccttcctccgatttcagggctacccatacctccagtggtaggtcccaatctgccattgccgcctttgccaattgtaggtcctattcttccaccgggaacaacctcaccagccacaagagggaaggact

SEQ ID NO: 165046 - DNA, 382 bp, Arabidopsis thaliana columbia
ggaaccaaaaagaaacctctcccgaaacctaaatggatgaaggaatcaattcccggcggcgagagatatgtccagatcaagaagaaattgagagaccttaagcttcacaccgtctgcgaggaagcgaaatgtcccaatctcggtgagtgctggtctggtggtgaaactggaaccgccaccgctacgattatgatccttggggatacatgtacacgcggctgcaggttttgtaatgtgaagacatcgcgtacacctccaccgcctgatccaaatgaacctaacaatgtggctgaagcaattgcttcctggggggttgattatgttgtgatcaccagtgtagatcgagatgatttacctgatcaagggagtggtcattttgctg

SEQ ID NO: 165047 - DNA, 430 bp, Arabidopsis thaliana columbia
cgctgctcacgagattgacagaattgctcgtgttgcattcgagactgctaggaaaaggcgtggcaagctgtgttctgttgacaaagccaatgtcttggatgtatgttttgaattgtttttccactccactcttgtgtgtttttcgttatacaattatttttttgttttgtttcgtataggcatcaatattgtggaggaaaagagtaacagctttagcctctgaatatccagatgttgaactatcacatatgtatgtcgataatgctgcgatgcagcttgtccgtgacccgaaacagtttgacacaatcgtcaccaataacatttttggtgatatattgtctgatgaagcttcaatgatcactggtagcattgggatgcttccatctgcaagtcttggtgaatcgggacctggactctttgaacctataca

SEQ ID NO: 165048 - DNA, 452 bp, Arabidopsis thaliana columbia
ggggtgacttgtgacgaaaggatcaattccgctaacagaatcttcaacagtaagcttgtgtctctggttgatcacttcaaccaaaacacaccaggggccaagttcacttacattaatgcttatggtatcttccaagacatggtagctaatccttctcgctatgggtttagggtgacaaacgcgggatgttgtggagttgggaggaacaatggacagataacttgtcttccgggtcaagctccatgtcttaacagggacgagtatgtgttctgggacgcgtttcatccaggagaagctgcgaatgttgtcatcggtagtcgatcttttcagagagaatctgcttctgatgctcatccttatgatatccagcagcttgctcggctctagttcatgaaatttcctccaagcaaacacagagtgaaaaagagagggagacagaattaatctttttc

SEQ ID NO: 165049 - DNA, 464 bp, Arabidopsis thaliana columbia
ggcgagagagctcatgcagcagtggactgctcatcgttgatactaaacatggctgattgtttgtcgtttgtgactagtggtagtacagttgtcaagccggaaggaacatgttgttcagggcttaagactgtggttaggacaggaccagaatgtctatgtgaggctttcaagaacagtggttctcttggtttaactcttgatctttctaaagctgcttctcttccttctgtttgtaaagttgctgctcctccttctgctcgttgtggcctttctgtctctggagatcctcctgctactgcccctggtttatctcctacggccggagcaggagcacccgcgttgtccagtggtgcaaatgcggcaactccagtttcgtccccgaggagttccgatgcgtccttgctctctgtatcttttgcatttgtcatcttcatggcactcatttcttctttctattgagtctt

SEQ ID NO: 165050 - DNA, 376 bp, Arabidopsis thaliana columbia
ggaatgtgtatggttcgtccaaaagtacatgacctcatctcaatacgaagatgacgtggagagagccgtcgatgaagccatcctgtacctcggaaaaacttgttgcgagaagaagacatgcgatggcatggatgcttggatctttgacattgatgacactcttctctcaaccattccttaccacaagagcaacggttgtttcggtggtgagcaactgaacacgaccaagttcgaggaatggcaaaattcgggcaaggcaccagcggttccacacatggtgaagttggaccatgagatcagagagagaggtttcaagatctttttgatctcttttcggaaagagtatctcagatctgccaccgtcgaaaatcttatt

SEQ ID NO: 165051 - DNA, 334 bp, Arabidopsis thaliana columbia
tttacttgtataagatatttatacaaaagaaagacaaactccaaattcctgatgatggtccatctaaccacaagaaggaaagaaaaacagtaactgtaacacaaaaagaaatccgaaagcattctttctaacctagtttttgtttttgtctaattcagtatgtgacaggggaagtcaaattcccgaacctcgtaaaaccatctacatattcactttcaagtaaaaagtttttcactgcttagtttcatcaaataagcagaccaaaacttaacactaacaaacactcaatggtattctcttgtgaggttgctcttgactgttgctgtttagatta

SEQ ID NO: 165052 - DNA, 467 bp, Arabidopsis thaliana columbia
ctaaactcgaaccctaaagaaaaacaaaaatggctgccatagcttctactctctctctttcttcaaccaaacctcagagacttttcgattcttccttccatggctcagccatctccgcagctcctatctccatcggtctcaaaccacgatctttctccgttcgcgccacaaccgctggttacgacttgaacgctttcacgttcgacccgatcaaggaatcgatcgtgtcacgtgagatgacgagaaggtacatgacggatatgatcacttatgctgagactgatgtcgtcgtcgttggtgctggatctgctggtttatctgctgcttatgagatcagtaagaaccctaatgttcaagttgccattattgagcaatctgttagtcccggtggtggtgcttggctcggtggtcagcttttctccgccatgattgttcgcaaaccagctcacttgtcccttgacgagatt

SEQ ID NO: 165053 - DNA, 444 bp, Arabidopsis thaliana columbia
gactcgttggattcgtgaagccgaaaaaaaaaaaaaaaatggtaattctcagcaacgtctcgttgttctcctgctgcaacatctctcagaaaccatctctcttttctccgtcttctcgtagttctcattgtcccattcgttgctcacagtcacaggaagggaaagaagtggttaccagtcctttgagaagtgtggtttggtcattaggagaagaggtttcaaagagaagtctatttgcacttgtctctgcttctctcttctttgttgatcctgctcttgcttttaagggtggaggtccctatggtcaaggagtcaccaggggacaggacttatctggcaaagatttcagtggccagactcttatcaggcaggacttcaaaacgtccatccttaggcacgccaccttcaagggtgctaaggtggtaggtgcctgcttctttgatg

SEQ ID NO: 165054 - DNA, 429 bp, Arabidopsis thaliana columbia
gttatacaggaagatgggatggttcacaaggtggtgcatccttctgtcaagctaccacggaccaacggatgttctatgtcggtactagttggtacaggggataacatatggtctggactctatctaattatatccaccattggatttatttcaatgatcacattgttggacatcttttacataaaaagatacaacataacaacgtggtggtacaagggacttctatttgttggttgtatggttgcaagtgtcttgatttttggaggtcttgtggttgttttctggcatcgctgggaacacaaaaccggtgaagtggatgctaatgagagcgacacggttgattcgaatggagaagaaacccataatccatgtgcagcatagcttaagggcttggcattagaagaagatgttcaggattacaccagtatt

SEQ ID NO: 165055 - DNA, 438 bp, Arabidopsis thaliana columbia
cacttttaaggttcaatatttcttcaactctatctgccctcttttgccactttattacatgtatatatattagttcaatacttcaatctttttctcttacagattaactatttacatgtaaaaaaaatgatttgtctcttaacttttttgttgggatatactgtattcttgaattaagttgttgagataatgtttatctccgactccaaagtgggatctaattagttttcttcttcttcagttcttctacatatattagatggtggggaggatgagactaggaaagattgtggaaggcttgaagtccaagataaagactggtctaaggatgccgaagagatcatcattatcatcatcatcatattcatcttcatcatcatcgtcatcatcatcatcatcatcgtatgagaagatagagaagagtgagagtatgagaat

SEQ ID NO: 165056 - DNA, 476 bp, Arabidopsis thaliana columbia
aaaaaacatcgcacaagaaaataaaagatttgtagaatcaactaagaaaatggctagcactatgatgactacattgcctcagttcaatggtcttcgagccaccaaaatctctgcagctcctgtacaaggcctggcaagtgttcagcccatgagacgcaagggaaatggagctttgggtgcaaagtgtgacttcatcggttcatcaacaaatctgataatggtaacgtcgacgaccctgatgttgttcgcggggagattcggacttgcgccatcagccaataggaaggcgacagctggacttaggttggaggcacgtgactcaggtctacaaacgggtgacccggccgggttcacgcttgcggacactttggcttgtggcaccgttggtcatatcatcggtgtaggagttgtccttggccttaaaaacattggtgctatttgaagttcctaaagctcttttatttgtatttgtaaaa

SEQ ID NO: 165057 - DNA, 447 bp, Arabidopsis thaliana columbia
caaaagaagaagagaaacaacaagaagaagtaatggcttcctctatgttctcctccaccgctgtggttacctccccggctcaagccaccatggtcgctccattcaccggcttgaagtcatccgcttctttcccggtcacccgcaaggccaacaacgacattacttccatcacaagcaacggaggaagagttagctgcatgaaggtgtggccaccaatcggaaagaagaagtttgagactctatcttacctccctgaccttagtgacgttgaattggctaaggaagttgactaccttctccgcaacaagtggattccttgtgttgaattcgagttggagcacggatttgtgtaccgtgagcacggaaacactcccggatactatgatggacgatactggacaatgtggaagcttccattgttcggatgcaccgacttcgctcaagtgt

SEQ ID NO: 165058 - DNA, 294 bp, Arabidopsis thaliana columbia
atttcgaattcggttcacttccacggcaatctcatcgagagcttcgagaatcaggactcttcatacgctggaaccattaaaggagcaagcttgattgaggagcttgagaatcctgtcgaaaggaatggactttctggtcggagaagactgtttatgcaagacccaccatggatctctgctttgtttctcaagggtttgagtaaaatggttgatcagactttgaaaatcgagcggaaagatatcgataagaggaaatttgattccttgaggagacgacaagtgaaggaagagact

SEQ ID NO: 165059 - DNA, 453 bp, Arabidopsis thaliana columbia
gtgacattgtaaaagaacaattggctttagctgctgatgttccgctcactgctgaatccaagttctctgctcttggtgccgattctctcgacaccgtggagatagtgatggcgttggaggaaaagtttaacataagtgtggaggaatctgatgctcaaaacattacgaccatccaagaggcggctgatttgatagaggaccttgttcaaaagaaacccgcggcggaaacttcctgaaccggctgtcttttctttcctgacctattcttgccttcagagcgttttattacggtatattagaccgtttgttatttttatttatttcggaagctaagattgggtgttgacaatgagacaactttggtacgttgagattaaaaaaaaaaaaatattttaaacatttatcactgtaatttgcattaaacacaatattgctttataataattactaaag

SEQ ID NO: 165060 - DNA, 475 bp, Arabidopsis thaliana columbia
gacagctaaaactaaatacaaagaaacagagatgggtttggttacagaggaggtgagagctaaggcagagatgtacaccggagatgagatatgtagagagaagacaaagtgtttcctcaaggaaatatctatgcccaatggtttattaccattgaaggatatagaagaggttgggtatgacagagagtcaggtgttgtatggctgaagcagaagaagagcatcactcacaagttcacagagatagataagcttgtctcctatggaaccgaagtcacagccattgttgagaccgggaaaatcaagaagctcactggagtcaaagccaaggaacttcttatttgggtcactatcaatgagatctataccgaggaaccccctaccaagatcacgttcaagacaccgaccacactgtccaggactttcccggtcacagcttttatagtcccagaagaacctgccaaggaggaacctgcc

SEQ ID NO: 165061 - DNA, 158 bp, Arabidopsis thaliana columbia
atcaagaggcagttcgccactcgatttctgagttgattcgagaacaaacaaagagataattggtttgatgttgttaaaaactatgtgttgttgtacaaaatgggctttaactcttaaaaaccaacattcagatttgcagagccttcttttatttggaa

SEQ ID NO: 165062 - DNA, 475 bp, Arabidopsis thaliana columbia
cattcaagtccagaagctaaagctgattgagttctatttaaaatctggcttttgttcttagtttgctttcttttgtgaatctactacctgtgtgtaacgtgtgtatctgttgtcctcttctttgcctaatggagacttatgtaaaacaaagacatgccccagaaacatctgttatctttcttctccattttatcagaggatttctattaaaaaaaaaaaaaaaaaaaaaaaaaaaaaaaaaaaaaaaaaaaaaaaaaaaaaaaaaaaaaaaaaaaaaaaaaaaaaaaaaaaaaaaaaaaaaaaaaaaaaaaaaaaaaaaaaaaaaaaggggggggccgttgggaattaaaaacaaaaaattttggtaaaggaagattttaacccttttgaaaaaaccccaaggggtttttaaatttttaaattttttttttggggtaaacaaaggcccccggttaaacccggggctttttttttt

SEQ ID NO: 165063 - DNA, 408 bp, Arabidopsis thaliana columbia
acactcgccaccgcactcttaatctctctctccaccgcttacttcaccacccgtccccgccgtgtctgtgctcctcgacttctcgtgttacaaaccagacccttcactgatctgcactcgtgaaacattcatggacagatctcaacgtgtaggcatcttcacagaagacaacttagctttccaacaaaagatcctcgaaagatccggtctaggtcagaaaacttacttccctgaagctcttcttcgtgttcctcctaatccttgtatggaagaagcgagaaaagaggcagaaacagttatgttcggagctattgacgcggttcttgagaagaccggtgtgaaacctaaagatattggaatccttgtggtgaaattgagcttggttaattcaacaccgtcactttttgg

SEQ ID NO: 165064 - DNA, 408 bp, Arabidopsis thaliana columbia
gctggagtgatgaagttggcatgcttgctcttggcctgcatgattgtggccggtccaatcacagcgaacgctgcgctaagctgtggctcaattaacagcaacttggcagcgtgcattggctacgtgctccaaggtggtgtcattcccccagcgtgttgctccggcgttaaaaacctcaacagcatagccaagacgaccccagaccgtcagcaagcttgcaattgcattcaaggtgccgctagagccttaggctctggtctcaacgctggccgtgcagctggaattcctaaggcatgtggagtcaatattccttacaaaatcatcaccagcaccaactgctaaaccgtgaggtgatgagctatcaacggtgtgatgatgctactaccggaagtgtagaatccttattat

SEQ ID NO: 165065 - DNA, 293 bp, Arabidopsis thaliana columbia
gctgattggattctcttacaaagagagacaagaagtttgaagcaggacatggtataggtaggcgtcgatgctagtacagacgtgcaacattgtggttttgcccgcagtggataagaaccgagaagaccaactcaaagatcgctgccgtattctatcaacaatctgattgaagagatctctcttctttctaccaaacatcttagatgcctttttatatttcgtgagaatgcacaagaaagtgttactacttttttgatcttagccgctttataatttttttttttttcgtataa

SEQ ID NO: 165066 - DNA, 456 bp, Arabidopsis thaliana columbia
ctcgttttgataaaaatctctgaatctctccaagctctcttctcatcaaaccatggatccttacaagtatcgtccagctaggtcttacaactctcccttcttcaccaccaactctggtgctcctgtatggaacaacaactcctccatgaccgttggacccagaggtcctatccttcttgaggattaccatctcgttgagaagcttgccaatttcgacagggaacggattccagagcgtgtggttcatgccagaggagccagtgctaaaggtttctttgaggtcactcatgatatctctaacctcacttgtgctgactttctccgagctcccggtgttcagactcctgtcattgtccggttctccaccgttatccatgagccgtgaagtcccgagaccttgagagacccctcgggttttgcagtcaagttctacaccagagaggggaactttgatct

SEQ ID NO: 165067 - DNA, 451 bp, Arabidopsis thaliana columbia
caaactgtcttgtaaactacgacgagaaatcttactattcacaagctgacacgaaaaatcggcggggtttaactgaacgtcggggggtatctaccaaacacatttaagtcgaacatccctaagagaatatggacttttatctaaagatcaaacagatgatgctacggaattattccaagaacaatcactagacaatggagcaaccaaatacattctgactattaaccaatatcttaaatgattctataatgatgtgtgagtgtgacattcgctgcgctaacatatcactatggccacgttaacactgccgatacctgctgtgtcttactgcatggtaacactaatcttctacgtggaatttattactgaaatgctgaacttatatgctccatactcgcttgtttcctccttaactttgccaccggtggcgagccaatttcagcgttcggtc

SEQ ID NO: 165068 - DNA, 342 bp, Arabidopsis thaliana columbia
  unsure (1)..(342): unsure at all n locations
acacaaggagagaagagagaaagagagaatgagagacagagataatggcgtacagtgcgggttggctacaccagagcgcgatgggcttcatcanccgcacgatcatcatcttcctcctcatcccagcgtcacgtgtcgctctccaaacctgttcagatcatctgtaaagctcaacagtctcatgaagacgataactccgccgtctcccgccgtcttgctctcactctcctcgtcggcgccgctgctgttggttccaaagtatcttctgctgatgccgcctaccgtgaagctgcaaacgtgtttgggaagccaaagaccaacacaaacttcttgccatacaat

SEQ ID NO: 165069 - DNA, 462 bp, Arabidopsis thaliana columbia
ctccttataaatacttctctctccgccgtatataatcttaagtcatctctgatctccgagtgcaactcaaatttgaatctgtggcttcttaattctttctgatatttcgttttattggttaatctgttttcgatttcatatcattagtctagtatttgttcttctttttgtgtttgattatcttagaaaaaagggtttctcagtgatgaatacacagatgacgagtccgatgaaatccattcattaaatcatggggacaaacgaggcatttgtctgagaggaatccttttatacttttttcaatcttattagttttttctgctaaatgtttttcaaagttgtttgattcgtgattctcgaaaattgaagaaaaaaaggcatgatgaggattgttttattgtcatctgattctcatgatgaatatatacctcctactcattctgagtgccttttcttaatttc

SEQ ID NO: 165070 - DNA, 465 bp, Arabidopsis thaliana columbia
gaaaacaagtagaaactttaaaacgagagagagagaaagaaatggcgacatcgggaacgtacgtgacggaggttccgttgaaaggagcggcggagaaacactacaagagctggaagagcgagaaccatgtcttcgctgacgccattggccaccacatccaaaatgtcgttgttcacgaaggcgaacatgactctcacgggtctatcaggagttgggactacacatatgatggaaagaaggagatgttcaaagagaagagagagatagatgatgagaataaaacattgacgaaaagaggactggatggtcacgtgatggagcatctcaaagtatttgatatcatctacgaatttattcccaaatctgaggatagctgcgtctgcaaaatcactatgataatgggagaagcgcaacgatgactttcccgaaccaagcggctacatgaaattcgtcaagcaaaatggt

SEQ ID NO: 165071 - DNA, 449 bp, Arabidopsis thaliana columbia
gttaaaccagagtaaagcttgaaactttggactaaaagaatggcgtctttgggtgtgtcggaaaggcgtggtactccccttgacggcagggcagtttcaagatcgtctgctccgttggcatcaagcccatccacgttcaagactgttgctctcttctctaagaaaaagccagctcctgctaagtccaaggctgtctctgagactagcgatgagctcgccaagtggtatggtcctgacaggagaattttcttgcctgatggtcttttggatagatcagagatcccagagtacttaaacggtgaagttgctggagattatggttatgacccatttggtcttggaaagaagcctgagaactttgctaaataccaagcttttgaattgatccatgcgagatgggctatgttaggagcagctggtttcatcattccttgagctttaaacaaata

SEQ ID NO: 165072 - DNA, 324 bp, Arabidopsis thaliana columbia
aaaatcaagatttgttgtgttggcgaagccacagagactgagtaatcgattcgattttgtttgcgtaatgatgatgacgatgccatgtgcatcgtgctcatcttagctttctcctctttctgggtttatctgtgcttaaggcaaaaaaagagtgctccttttttcatatcttcttcaaagtttcgtttttttttggtgtttattagaatctagaagttaacaattggagaatttggaattgggaaaataggggttagatatatctgtaagtgggttggttcttcttagcaagtgtttaactttgggaggaggagatgagaatta

SEQ ID NO: 165073 - DNA, 431 bp, Arabidopsis thaliana columbia
gcctgagcaggaggaagaagacgaagaagaagaggagcagctactaccatggttctcaagacggggctttgtcgtttcaggggacagaagatttacccaggaagaggaattaggtttatccgatctgattctcaggttttcttgtttcttaactcaaaatgtaagaggtacttccataacaagttgaagccatccaagcttgcatggactgccatgtacagaaagcaacacaagaaggatgcagcacaagaggctgtgaagagaaggagacgtgccaccaagaagccatactcaaggtccattgttggtgctaccttggaagtaattcagaagaagagagctgagaagcctgaagttcgtgatgcagccagggaagctgctctgcgtgagatcaaagaaagaatcaaaaagaccaaagatgaaaagaaagc

SEQ ID NO: 165074 - DNA, 469 bp, Arabidopsis thaliana columbia
atacaaatctcctccaccaccatactacgcacctactcctaaggtacattacaagtctcctccacgaccatatttctacagggctccaccacctccatattactcaccttctcctaaggttcactacaaatctcctccaccaccatacgtctacagctccccaccaccaccatactattcaccctctcctaaggtagaatacaagtctcccccaccaccgtatgtttacagttctcctccaccaccatactactcaccttcccctaaagttgactacaaatctcctccaccaccatatgtctacagttcaccaccaccaccatattattcaccttcccctaaagtagactacaagtctcctccaccaccgtatgtctacagttctccaccacctccatattactcaccttctcctgtggtagactacaagtctcctccaccaccatatgtctacagttccccaccacca

SEQ ID NO: 165075 - DNA, 433 bp, Arabidopsis thaliana columbia
ctcatttctccacatcttgagagaaaaaaacagagcaagtatattagagatctcatggcgatggcggtctccggagctggcgtcagtgggcttggttcttcgttcctcaccggaggcaagagaggtgccaccgcattggcaagcggcgtaggcactggagctcagagagttggcaggaaaactcttattgtcgctgctgcggctgctcagcctaagaaatcttggatccctgccgttaaaggtggtggcaacttccttgaccctgaatggctcgatggctcgctaccaggagatttcgggttcgacccattgggtttggggaaagacccggcttttctgaaatggtacagagaggctgagctgatccatggccgatgggcgatggcagcggttcttgggatcttcgtcggccaagcctggaacggtgtggcat

SEQ ID NO: 165076 - DNA, 456 bp, Arabidopsis thaliana columbia
  unsure (1)..(456): unsure at all n locations
gtgctaagagaatcagagtccatattcttactgatggtcgtgatgttttggatggttctagtgttggagttgtggaaacccttggagccgacctcgttgcattacgtgagaatggtgtggatgctcagattgcatctggtggaggacgtatgtatgtgactttggaccgatatgagaatgattgggaagttgttaaaagaggttgggatgctcaagttcttggagaagctcctcacaaattcaaaaacgctgttgaagctgtgaagactttgaggaaagagcctggtgctaatgaccagtatttgcccccgtttgtgattgttgatgaatcanggaaagcagttggtccgattgtggacggtgatgctgttgttaccttcaacttcagggctgatcgtatggttatgcatgctaaggcacttgagtacgaaagatttgacaaatttgaccgtgtga

SEQ ID NO: 165077 - DNA, 361 bp, Arabidopsis thaliana columbia
ctgggtttgagaattggtgtaagagaaacgattgaggttttctcttattatctaaacccaccaagtctttcaggattgtagccagagaagcttgagtctttgattagggacatgtcaacctccgccgcttccttgtgttgttcatcaacccaggtcaatgggtttggtcttaggcctgaaaggtcgcttctttaccaacccacttccttttctttctccagaaggagaactcatggaattgtcaaggcctcatctcgggttgataggttttcgaaaagtgatatcattgtttctccctctattctctcggcgtaatttcgccatattaggcgtgctggttaaagcaatgcagctggctggt

SEQ ID NO: 165078 - DNA, 479 bp, Arabidopsis thaliana columbia
ggacatcacttccatcgcaagcaacgggggaagagttagctgcatgaaggtgtggccaccaattggaaagaagaagtttgagactctatcttacctccctgaccttagtgacgtcgaattggctaaggaagttgactaccttctccgcaacaagtggattccttgtgttgaattcgagttagagcacggatttgtgtaccgtgagcacggaaacactcccggatactacgatggacggtactggacaatgtggaagcttccattgttcggatgcaccgactccgctcaagtgttgaaggaagttgaagaatgcaagaaggagtacccgggcgccttcattaggatcatcggattcgacaacacccgtcaagtccaatgcatcagtttcattgcctacaagcccccaagcttcaccgaagcttaatttcttttctaaaacattcttatgaattatctctgctcatttcatttcctattgg

SEQ ID NO: 165079 - DNA, 377 bp, Arabidopsis thaliana columbia
ccgttgggttcttccatggatcctcatcgtcatcgcctccatctccgtctttcttcttcttcttctgctcgattctaattccgtaagagagaaataataaaggattcatgttcacatcttctacctgatgagcataccatgattctctcgctatgcgttggcttccgcaaatctcgttctcgtctccttcttcttctccatcttcttctctaaaacccgtggcttcttactctgaatctccggatccagatcgtaatcaggatcgggatcggtttcatcgccgcttgtttcgttttaaccgtggcaggctcacccgtcagcggaagcttcgtcacttgacggatgacgatgttttgttgggagaacgtcgtgcttct

SEQ ID NO: 165080 - DNA, 373 bp, Arabidopsis thaliana columbia
cgagagcattttatatcttcaatcatcttacgcaggctgttgtagcagcagtgtctatcggagacgatgaagttcaacgtgggcaatccgaccaccgggtgtcaaaagaaactcgagatcgatgacgatcaaaaactccgcgcctttttcgacaagaggctctctcaggaagttagcggagatgctctaggcgaggaattcaagggatacgtattcaagatcatgggaggatgtgacaagcaaggtttcccaatgaaacaaggagttctcactccagggcgtgtccgtcttttgcttcaccgaggtactccttgttttagaggacacggaatgaggactggagagaggagacgaaagtctggccgggctgcat

SEQ ID NO: 165081 - DNA, 473 bp, Arabidopsis thaliana columbia
acactctctctctcactgcaagagcgcgaaacagagtaaggctcactttgttttagctttctcctctacttcgataatgccggttgctccttccttgttgtcatcgtcttcctcagtctctcaatttcttcccagattccccaacgcgactagattcaatgtaactccacggagcagagccgccaccgtcgtcgcggcatccgtcaccgacctagccggggtcgacagtacaacaatcgccgtactcggtggaggatccgtagcagcactcgcggcgatggtttccttaacggatccggagaggaggcggaaattgcaggcggaggaagttggcggaggcgataaggaggttgtgagggagtatttcaatagcacggggtttgagaggtggaggaagatctacggtgagactgatgaagtgaatcgagtacagaaggatattcgactcggtcatgctaagacggtggagaaca

SEQ ID NO: 165082 - DNA, 479 bp, Arabidopsis thaliana columbia
gtgagggaatgcatggagaaagaagttgctccaataatgacagagtactgggagaaagcagaatttccattccatatcactccaaagcttggggctatgggtgttgctggtggctcgatcaagggttatggatgtcctggtctctccatcaccgccaatgcaattgccacagcagaaatagctagagttgatgcaagttgttcgactttcattttggtgcattcttctttgggcatgctcactattgcactctgtggatcagaagcacagaaggagaagtatttgccttctttggctcaattgaatactgtggcttgttgggctttgacagagcccgacaatggaagcgatgcaagtggtctaggaacgactgcaacaaaggttgaaggaggttggaaaattaatggacaaaagcgttggattggaaacagcacctttgcagatctgttgatcatctttgcgaggaatacaacaactaa

SEQ ID NO: 165083 - DNA, 468 bp, Arabidopsis thaliana columbia
  unsure (1)..(468): unsure at all n locations
gtcttctttcttcttcggtaaacttcaaatcagaagcgaagaagagatcaaatcaatctgatcgtagatgggttgtttcagttgcttcgacggaacccaaaaggaacagcgtaaggaagaagagagacaagcctccgccgaagctcgtgccaaagccgccgaagctgcccagcgacggaaagagcagtttgataagtctgcagctggaagagctgcacaagctcaattacaacaaatggctaaacaatctgcaaatactaacaaaggagagcctgttcttaagtggcaaatgacgtagtgatgagtcctggtttcaaaaggaatcaatttgtgcgatttggttctttgtaaattgtgtgttcttcaatgtttgcaatactttggttatgtgaattgaagcctattttcttccttattcatctgattatcttttgacttttggtaaaacanaaaagaaataacagagtt

SEQ ID NO: 165084 - DNA, 442 bp, Arabidopsis thaliana columbia
aaaagctgttgtcaagagaagaaggaagagaggagataaaaagccaaacaaatggcgttcaatatcataacacctggtcgtgtttattcagccacgtctctcactttcgtttccaccattaaagctgctttcgttaaacctcctttggcctctccgtctcgtcgtaacctccttcgtttctcatcatctcctttgtcatttccgtcgctccgtcgaggtttccacggtggtcgtattgtggcaatgggttcttctgctcctgaatcggtcaataagccggaagaagagtggcgtgcgattctttctcctgaacaatttaggattctcagacagaaaggcactgaatatccaggaactggagaatacaacaaagtattcgacgatggcatctaatgttgtgcaggatgtggaacttctctctacaaatccaccaccaaattcg

SEQ ID NO: 165085 - DNA, 382 bp, Arabidopsis thaliana columbia
ctcatttctccacatcttgagagaaaaaaacagagcaagtatattagagatctcatggcgatggcggggtccggagctgtcctcagtgggcttggttcttcgttcctcaccggaggcaagagaggtgccaccgcattggcaagcggcgtaggcactggagctcagagagttggcaggaaaactcttattgtcgctgctgcggctgctcagcctaagaaatcttggatccctgccgttaaaggtggtggcaacttccttgaccctgaatggctcgatggctcgctaccaggagatttcgggttcgacccattgggtttggggaaagacccggcttttctgaaatggtacagaaaggctgagctgatccatggccgatgggcga

SEQ ID NO: 165086 - DNA, 468 bp, Arabidopsis thaliana columbia
caacaacgtcgagaataatggcatcatctctttgtgcttcttctgccatcgctgccatttcttctccaagtttcttgggtggtaagaaactgaggctgaagaagaagttgactgttccagctgtgtccaggccagatgcgtcggtgcgcgccgtcgcagctgatccagatagaccaatctggttcccgggaagcactcctccagagtggctagacggtagcctccctggtgacttcggatttgatcctcttggtctttcatcggacccggacagtctaaaatggaacgtacaagccgagatagtccactgccgatgggctatgctaggagccgccgggatattcatcccagagttcctaacgaagatcggaattctcaacactccgtcatggtacacggcgggagagcaagagtattttacggacaaaaccacactcttttgtcgtgagctcattttgatcggatggg

SEQ ID NO: 165087 - DNA, 409 bp, Arabidopsis thaliana columbia
cttgaatttttcaagaacaaaagaaaaagacatctttaatggcggccatgaactcgagtgttctcacttgcagctacgcaattgctggctctggctcggtagagcttaaccagaaagttggtttggtgaattcatcagttgggtttggtcagaagaaacagatgattatgcctgtgatcaaagctcaacgcgttgttggtgatgatgttgatggatctaatggaagacgatcagccatggttttcttagcagctacactctttttcactgctgctgtttctggttcggtaattgctggcgttattgacgaattcctcgagaggagcaaaacccacaaagtatctaatgctaagaagagtatgctactagtggggcaattcttgcgagagccattactgtttaattcgga

SEQ ID NO: 165088 - DNA, 257 bp, Arabidopsis thaliana columbia
cgatgttttcttttatatggtggatcattggattctactgggtatctgctggtggccaaaagttgccgcaagaatcccctgccgttgactggctttctattgtctttcttggtttcgatgtgttctttgttgtcttctgtgttgcgttggcctccgttattgaaattgcggtttgtttttccctatcttgcctcattgcactgatcaacctttgtaatcttctatccctgccgtttaaagttgtcctttcttccttt

SEQ ID NO: 165089 - DNA, 300 bp, Arabidopsis thaliana columbia
gtgatgcaatgtctcggagccatctgcggcgccggagttgtcaaaggcttccagccaaatcctgaccaaactctcggcggaggagcgcaacacagtcgctcacggctacactaagggctctggtttgggtgctgagataatcggaaccttcgtccttgtctacacggtcttctccgccactgacgccaagagaagcgctcgtgactcccacgttccgattttggcaccactcccaatcggattcgctgtgttcttggttcactagccgacgatctcaatcactggatcaggaattatacc

SEQ ID NO: 165090 - DNA, 462 bp, Arabidopsis thaliana columbia
gaggaagaagaataagagaaatcgattcgtggttttgggaaaattcaatggcggtttctactggatcggcgtttctattgccatggttcggcattccaagctcttcgccttcttctaccagactcaaagtctctctgctgccttcatcttctacccatggcggccttagttcctgcgtccttacgaaaccatccgtctcgcttacgaaggtcttcgctgttcccgataccctagatccaactccagaaattctcgatgaacccgcctctgaggttccgagctcttcatccatcagtgtagacgcggataagatggcgccaaagcaaaagattaggatcaagcttagatcatactgggtgccttttattgaggactcatgcaagcagatacttgatgctgcgagaaacaccaatgcaaagacgatggggcctgttccattgccaaccaagaagcgtatctact

SEQ ID NO: 165091 - DNA, 426 bp, Arabidopsis thaliana columbia
ctcgtccacatctttctcctttggtggcaaacacaacgacagatagagagaaacgatggcgtcgaactcgcttatgagctgtggcatagccgccgtgtacccttcgcttctctcttcttccaagtctaaattcgtatccgccggagttccactcccaaacgccgggaatgttggtcgtatcagaatggctgctcactggatgcctggcgagccacgaccagcttaccttgacggttctgctcctggtgactttgggtttgacccacttggacttggagaagttccagcgaaccttgagagatacaaagagtcagagctcatccactgtagatgggctatgctcgctgttcctgggattttggtaccagaagcattaggatatggaaactgggttaaggctcaagaatgggccgcactaccaggggg

SEQ ID NO: 165092 - DNA, 406 bp, Arabidopsis thaliana columbia
aaaaaatctcattcaggtgaagaaagaatcaggctttatcgccgtcatcacaatcaaccgtcccggatctcttaatacactcaggagagcgattatagttgatctcgccaaggcattcaaggatatggactccgacgaatcggtccaggtcgtgattttcaccggatcaggtctatctttcttctctggcgttgattttactgtcgctgattttctttttttaatatacatctacttttcctatattcctatcttttcgttctattttcctttatattttcatttatcatttttatttttttatctctttttttttttggggtgggcgtgtctcttttttactttttacatttctcttgatttttcatcttttcaatatcaattttattattctatctctctatat

SEQ ID NO: 165093 - DNA, 522 bp, Arabidopsis thaliana columbia
  unsure (1)..(522): unsure at all n locations
gagaacctaaaaagaagagaagagaaagagagattcgaaatgtcggtgacatcaacggtgggaggaaaccatcagaaagatggatgaacgccggcggcggtggaggagaagaagaagaggagatgggtgttttgggatataaggtgtagttttttttngtttttttttattttatttttttttttggtattgtttttttgtttatttgtttttttttgtttgtgttattttttgttatttattatttgtttttttaaaatatgatttaaattgttttttttttgtttttcttttgtttttttattatttttgttttttttttttttatattttttatatttttttttttggttttggagtttttttttttaatatttttgttgtttttttatattttattttttttttttttttttttttttttttgtattttttttattttgttttgtttatttttgattttttattgttgtttttttttttttttgttttttggtttatttttttttttttttgtttttt

SEQ ID NO: 165094 - DNA, 365 bp, Arabidopsis thaliana columbia
ctctccctctctataacaaacattaatacacacaccaaaaaaaaacctgtttatgtctcaaagatctctgattcctcattcttcttctatagcttttggtctccattctcatctcttaatctccagtgagatcagctccaattctaactggtctctctaaataaaaaacagaaataaaaatccaacctttttcaattttcgttcaattttcccggaaaaaaaagcgatccttttgatttttcgatttctccaagtaacaattcaaaatgggtctaaagggttttgctgaaggaggaatagcttcgattgttgcgggttgttcgacccacccgcttgatctaatcaaggtccgaatgcaacttcaa

SEQ ID NO: 165095 - DNA, 378 bp, Arabidopsis thaliana columbia
atgaagaacaacaacactgagcatgagagaataagctcaagccgagagagacaatggcattaacattgacgagctcaagcagtgttcttacctcaacaacattccttggtcagactaaagcctgaagcttgaacccccttcgggacggtggctctctaggatctcccaagtgcactatgggaaatgatacttggtatggacctgacacagtggaggacttaagacccttttgcaggtaaactctcggttaccttaccggagaatttcctggcgattattgatgggacaccgccgggttattcgcagaccctgaagcctttggcaaaaacagagcttttgaggtgatccattggagatgggccatgatgggagcttttg

SEQ ID NO: 165096 - DNA, 331 bp, Arabidopsis thaliana columbia
ccgatctgagttttttttagcaatggcgaaaatgattcctagcctcgtctctctaattcttatcggtcttgttgcgatcgcctgcgccgcagttattttcgaggagcgctttgatgatggctgggagaacagatgggttaaatctgagtggaagaaggatgataacactgctggggagtggaagcacactgcgggaaattggtctggtgacgctaacgataaaggtatccagaccagtgaagactacagattctacgccatttcaactgaagtccctgaattcaggaacaaggacaagaccttagtcttcaatatctcagtcaagcacgag

SEQ ID NO: 165097 - DNA, 472 bp, Arabidopsis thaliana columbia
aaaacaaagactcgagttgatatgtctagtactaaagatatgtcaactgtccaaaacgcaactccttttaacggcgttgccccatccaccaccgtgcgagttacaatcgtccaatcctccaccgtctataacgatactcctgccactatagacaaagcggagaagtatattggggaggccgcaagcaagggagccgagctaggggtggtcccggagggggttatcggtggctattcccgagggtttaagttccggttaaccggtggcggtcataaccaaaaaaggcgtgatgaggttcggaaggaccatgcttctgctattcatgttcctggccctgaagtagcaagattggctgacgtggctaggaaaaaccatgtgtacttggtaatgggagccataaagaaagaagggtataccctttattgcacaggtcttttctttagtccacaagggcagtttttgggcaagcacc

SEQ ID NO: 165098 - DNA, 399 bp, Arabidopsis thaliana columbia
  unsure (1)..(399): unsure at all n locations
gaagactgttgccaagccaaagggcccatcaggcagcccatggtacggatctgaccgtgtcaagtacttgggtccattctctggcgaatcaccgagctaccttaccggagagttccccggagactacggatgggacaccgccggactttcagctgaccccgagacattcgcaaggaaccgtgaactagaagttatccacagcaggtgggccatgctcggagccctaggctgcgtcttccctgagcttttggctagaaacggagtcaagttcggagaggcgngttggttcaaggccggttcacagatcttcagcgatggagggctcgattacttgggaaaccctagcttggttcacgctcagagcattttggccatttgggccacacaagttattttgat

SEQ ID NO: 165099 - DNA, 381 bp, Arabidopsis thaliana columbia
aaacaagaagaacaacaacactaagcaaaaaagaaaagctcaagccgagagagacaatggcatcaacattcacgagctcaagcagtgttcttaccccaacaacattccttggccagactaaagcctcaagctttaacccccttcgtgatgttgtctctctcggatctcccaagtacactatgggaaatgatctttggtatggacctgacagagtgaagtacttaagacccttttccgttcaaactccgtcttacctcaccggagaattccctggcgattatggttgggacaccgccggtttatccgcagacccttgagcctttgccaaaaacagagctcttgaggggatccatgggagatgggcaatgttgggagcttttg

SEQ ID NO: 165100 - DNA, 492 bp, Arabidopsis thaliana columbia
  unsure (1)..(492): unsure at all n locations
aggcgatccctttccagatcgatttcaaaatctagatcgccatcgcccgacaagaagaagagtccccccagggcaatgtcgagatcaaagtccaggtccaggtccagatcgaggtctccgtccaaatctcctcccaaggttcgcgaaggcagtgtgtgattttgttaagcggtgaaaatggccaaaagaaagagtgcgaaaaattctcaagtcaagatccattctctgtgttttttttttttttgctgttttcggataattgacattttctgctgttctctgcttctttactcacaaatgatcatctttatactattatgacctgttatgttatggatgtttccgtgaccattacaatacccttgagttttgtattacttctcttcntcttcactctatattttttaaaagggcggccgttctagaggattcaagctttcttacgcgtgcttgcgacgttttaactttttttagtggctccttaattcaatc

SEQ ID NO: 165101 - DNA, 478 bp, Arabidopsis thaliana columbia
cttgattggaactggttctgagctagagattgctgcacaggctgcggaggtgctcaggaaagacggcaaaaccgttagagttggttctttcgtgtgctgggaactatttgacgagcaatcagatgaatacaaggagagtgtgttgccatcggatgtatcagctagagttagcattgaagcagcttcgactttcggatggggaaagattgttggaggcaaaggaaagtccattggtattaattcattcggagccagcgcaccagcacccttactctacaaggagtttggtatcaccgttgaagctggtgttgatgcggccaagtcattcttctaagagatttaagatcggaccattctctctgagggggttttgtctgaaacttgatttggaaacaaggctatttacaacattgtctcatatcttgaaattaagtgcaccacgacacaaagactttgacttttttttttgttttgtttt

SEQ ID NO: 165102 - DNA, 393 bp, Arabidopsis thaliana columbia
ggaactgttgcactacgtgaaattcgtaagtaccagaagagtaccgagttgctgatcaggaagctccctttccagaggctagttcgtgagattgcccaggatttcaagactgacttgcgtttccagagccatgctgtgcttgcactccaggaggctgctgaagcataccttgtgggtctctttgaggacactaacctctgcgccatccatgccaagcgtgtgaccataatgcccaaagacattcagctcgctcgcaggatcagaggagaacgtgcttaattgtgattgggaagtagttggattatgtgaatgtgggtggttttctaaatagatagttggaattagatattggcttataaagcttttgggtgtaggagacttggtaacaatggt

SEQ ID NO: 165103 - DNA, 454 bp, Arabidopsis thaliana columbia
gagaagcagaaatggcgaaatcactcctttgttcatcaaccttaaaccctttcttctccaccactctctcctcttcgaagaagaaccaaattgcatactcgggaaacagcaagaaccagacatcgtcgtctctgttatggaaaagaagggaactgtcgcttggatttatgagcagcttagttgcgattggtctcgtgagtaatgacagaagaagacacgacgcgaatgcagcgattcttgaagctgatgacgatgaagagcttctcgagaaagtgaagcaagatcggaaaaagaggattgagagacaagctgttcttaattctgctgtcaaggaaaaggggtatttgcaggatcttgtttacaagttgagcaaggtaggacaagccattgagaacaatgatctaccagctgcagggttggttttggggaaaggcattgataccgaatgggtcaa

SEQ ID NO: 165104 - DNA, 357 bp, Arabidopsis thaliana columbia
gagacaatggcggaggagcaaaagacgagtaaggttgacgtagaatctccggctgttttagctgcggcgaaggaaccgactcctgctccggtggaagtcgcggatgagaaaattcataatccacctcccgtcgagtccaaagctcttgccgttgtagaaaaacccatcgaggagcatacacctaagaaagcttcatctggttcggccgatagagatgtgatacttgccgacttggaaaaagagaagaaaacgtcattcatcaaagcatgggaagagagtgagaagtcaaaggctgagaacagggcacaaaagaagatctctgatgtgcatgcttgggaaaatagcaagaaagcagcc

SEQ ID NO: 165105 - DNA, 445 bp, Arabidopsis thaliana columbia
cttcaattctcctccctttataaaccataattcattaattctcttctctctcaacaactacttgtttagagagagtcccaccaccaccactaccacaatcccaatggcttcaccaactcttactctcctcctcctcctcaccaccgtctgcttcttcatctcctcctccgcagatcctgacatgcttcaagatctctgcgtcgctgatcttccctctggaatcaaaatcaatggcttcccttgcaaagacgcagctacagtcacatcagccgatttcttctcacaaggattagctaaaccaggtcttaccaacaacacattcggtgccttagtcacaggagctaacgttatgacaatcccaggactcaacacacttggtgtctccctctctcgtatcgactacgcaccaggaggcttaaacccaccttacacccacccacgtgcc

SEQ ID NO: 165106 - DNA, 397 bp, Arabidopsis thaliana columbia
ggactagattcaaggcctttgttgttgttggtgatggaaatggtcatgttggtttgggtgtcaagtgttctaaggaagtggctactgccattagaggagctattattcttgctaagctatcagtggttccggtgaggagaggttattgggggaataagattgggaagccacacactgtgccttgtaaggttactggtaaatgtggttctgttactgtgagaatggttcctgctccgagaggttctggtattgttgctgcttgggcttctaagaaggttcttcagttcgctggtattgatgatgtctttacttcttcaagaggatctaccaaaacccttggaaactttgtcaaggcttcatttcattgcttacagaagacatatgggttccttactcc

SEQ ID NO: 165107 - DNA, 497 bp, Arabidopsis thaliana columbia
ctaacaaagcaatatcatttccaatttataaaagttaaagccatggctgcatctttctctgtcccctctatgataatggaagaagaagggagattcgaagcggaggttgcggaagtgcagacttggtggagctcagagaggttcaagctaacaaggcgcccttacactgcccgtgacgtggtggctctacgtggccatctcaagcaaggctatgcttcgaacgagatggctaagaagctgtggagaacgctcaaaagccatcaagccaacggtacggcctctcgcaccttcggagcgttggaccctgttcaggtgaccatgatggctaaacatttggacaccatctatgtctctggttggcagtgctcgtccactcacacatccactaatgagcctggtcctgatcttgctgattatccgtacgacaccgttcctaacaaggttgaacacctcttcttcgctcagcagtaccatgacagaaagcagagggaggcaag

SEQ ID NO: 165108 - DNA, 333 bp, Arabidopsis thaliana columbia
ctcttcgatttcttcaaactctcatcaaatcgtttatctgttctaaatttcgaagaagacgatgagtacaggcgcaggaagcggaacaaccaaaggtggcagaggaaagccaaaggccaccaaatccgtctctcgatcatctaaagccggtcttcaattccccgtcggaagaatcgctagattcctcaaatccggtaaatacgccgagcgtgtcggtgccggagctccggtctatctctccgctgttctcgagtacctcgccgccgaggtgttggagctggcgggaaacgcagcaagggataacaagaagacacgtatagtaccaagacacat

SEQ ID NO: 165109 - DNA, 440 bp, Arabidopsis thaliana columbia
  unsure (1)..(440): unsure at all n locations
aacgagcaaaagaagaagagaaacaacaagaagtagtaatggcttcctctatgctctcctccgccgctgtggttacatccccggctcaggccaccatggtcgctccattcaccggcttgaagtcatccgctgcattcccggtcacccgcaagaccaacaaggacatcacttccatcgcaagcaacgggggaagagttagctgcatgaaggtgtggccaccaattggaaagaagaagtttgagactctatcttacctccctgaccttagtgacgtcgaattggctaaggaagttgactaccttctccgcaacaagtggattccttgtgttgaattcgagttagagcacggatttgtgtaccgtgagcacggaaacactcccggatactacgatggacggtactggacaatgtggaagcttncattgttcggatgcaccgac

SEQ ID NO: 165110 - DNA, 428 bp, Arabidopsis thaliana columbia
gtggcttggatgtcaagataatttacagttggggaaagaatgtcgatgttataccgcgtggtgcaggaaaaggagaagcgcttgagtatcttctcaagaagctgcaggctgaaggaatattcccggtcaatactcttgcttgtggtgactctgaacatgatgctgaactatttagcattcctgatgttcacggtgttatggtgagcaattcccaagaagagctattgaagtggcgttctgaaaatgcgttgaacaaccttaaggttatacattcaaccgagaggtgtgctgatgggattattcaagccatcggacattttaatcttggtcccgatctatctccaagagatgtttcggaattcttggatcgtaagatggacaatgtgaattctggtcacgaggttgtgagattctacttgttctacgag

SEQ ID NO: 165111 - DNA, 367 bp, Arabidopsis thaliana columbia
gaatgggtgagggtaaaaatggaaaggatggtaaaaagggtaaaggaggagagaagggtaagaaagaagggaaagagaataaaggtgggggcaaaaccggaaaaacagatgccaaaagtggtggtggcagcacaggcgcgatagtgcggaagaagaaactaaagtctcatcactttgatgctaaaggaaaaggaaagagatgatgaacatagctgcctattgtatgtatcgtcttctgtaaccaaccatttcatgtttcagaaaaaccatctccttttgtaatgctttatgagtcaatttgaaaataatatcagggatcttgttgtttaaaaaaaaaaaaaaataaaaaaaattatttttaatttat

SEQ ID NO: 165112 - DNA, 407 bp, Arabidopsis thaliana columbia
atacattgaacctttcctcttcttcttcttccttctaccttcttctctctgttcaattttgggggaaaatgggtcgtggaaaaatcgagataaagaggatcgagaatgcgaatagcagacaagtcactttttccaagaggcgttctgggttacttaagaaagctcgtgagctctctgttctttgtgatgctgaagttgctgtcatcgacttctctaagtctggcaagctcttcgagtactccagtactggaatgaagcaaacactttccagatacggtaatcaccagagttcttcagcttttaaagcagagaacctccaggaggattgtgcaaaggtggatattttaagggatcaactttcaaagcttcaagagaaacatttacaactgcagggcaagggcttgaat

SEQ ID NO: 165113 - DNA, 484 bp, Arabidopsis thaliana columbia
gaattcggaaaaatgagtggggaggagctcctgaaacacaggatggctaagtaccgaaagattggagtgttcatagagggcgaaccaatagagccaagtaggaaaatcaacatgaagaaaagggaagccgtgttctcagatagccggaagctgcagggtgaggttgacaagctgaaggagcagattctgaaagccaaggagacgtctacggaagccgagccttcgagtgaagttcttaatgagatgattgagaaactcaaatccgagatagatgacgagtacactgaagctgcaatagcagtaggtttggaggagagactaacggcaatgcgcgaagagttctcgaaagcgagttcagaagagcaccttatgcacccggttctgatcgagaaaattgagaagctcaaggaagaattcaatacccgtttgactgacgcacctaactacgagagcctaaaatctaagcttaacatgcttagggact

SEQ ID NO: 165114 - DNA, 435 bp, Arabidopsis thaliana columbia
gccatgaggtacaagtcatctggtgaagacacaattattctggctggagctgagtatggaagtggtagctcacgtgattgggctgccaagggacccatgctacagggtgttaaagcggtgattgcaaagagttttgagaggattcaccgaagcaacttggtgggaatgggaatcatcccattgtgctttaagtccggtgaagacgcagatactcttggattgactggtcacgaacgctacacgatccatctcccaaccgatatctcagagataagacctggccaagatgttaccgtcactaccgacaacggaaaatctttcacttgcacagtccgcttcgacacagaggtggaattggcatactttaaccatggaggcatacttccatatgttatcagaaacttgagcaagcaatagtgaaggaagcaatacaca

SEQ ID NO: 165115 - DNA, 416 bp, Arabidopsis thaliana columbia
  unsure (1)..(416): unsure at all n locations
ctcgtccacatctttctcctttggtggcaaacacaacgacagatagagagaaacgatggcgtcgaactcgcttatgagctgtggcatagccgccgtgtacccttcgcttctctcttcttccaagtctaaattcgtatccgccggagttccactcccaaacgccgggaatgttggtcgtatcagaatggctgctcactggatgcctggcgagccacgaccagcttaccttgacggttctgctcctggtgactttgggtttgacccacttggacttggagaagttccagcgaaccttgagagatacaaagagtcagagctcatccactgtagatgggctatgctcgctgttcctgggattntggtaccagaagcattaggatatggaaactgggttaaggctcaggaatgggcagcac

SEQ ID NO: 165116 - DNA, 445 bp, Arabidopsis thaliana columbia
gagaaaaaaaaaacaatggcaactcaagccgccgggatcttcaactccgccataacaaccgccgcaacctccggcgtcaagaaactccactttttctcaacaacccaccgtcccaaatccctctccttcaccaaaaccgcaatccgcgccgagaaaacagattcctccgccgccgctgctgcagcccccgccacgaaagaagctcccgtgggattcacgccaccgcagctagacccaaacacaccgtctccgatcttcgctggaagcaccggtggtcttctacgtaaagcgcaagtggaagagttctacgttatcacgtggaactcaccgaaagaacagatctttgagatgccgacaggaggagcagcgatcatgagagaaggtccgaatcttctgaagctagcgaggaaaaggcagtgtttagctttggggacaaggcttagat

SEQ ID NO: 165117 - DNA, 453 bp, Arabidopsis thaliana columbia
ccatttcttaaatttctctccctaaatattccgagttcttgatttttgataacttcaggtcaaaatgggagtatactcgagagcggttgcgttttcggtctttgtgtcgtttctgctgtttttcactgcttattctaagagaaatgatggaacattcagagttggcctgaaaaaactgaagttggatcctaacaaccgactcgcaacacgctttggttccaagcaagaagaggccttgagatcttctttgcgttcgtacaacaacaatcttggtggtgattctggagatgctgatattgtcccgctcaagaattacttggatgctcagtactatggtgagattgctattggtactccaccgcagaagttcactgtcatttttgataccggaagctctaacctttgggtgccatcaggaaaatgttttttctcgctgtcttgttactttcatgc

SEQ ID NO: 165118 - DNA, 332 bp, Arabidopsis thaliana columbia
agaaaagctcaagccgagagagacaatggcatcaacattcacgagctcaagcagtgttcttaccccaacaacattccttggccagactaaagcctcaagctttaacccccttcgtgatgttgtctctctcggatctcccaagtacactatgggaaatgatctttggtatggacctgacagagtgaagtacttaggacccttttccgttcaaactccgtcttacctcaccggagaattccctggcgattatggttgggacaccgccggtttatccgcagaccctgaagcctttgccaaaaacagagctcttgaggtgatccatgggaagatgg

SEQ ID NO: 165119 - DNA, 295 bp, Arabidopsis thaliana columbia
aaagaagatactattgactttattggtcatgcagtggcacttcactgtaatgacaatcatctccatcaacctgcctatgatactgtaatgagaatgaagctctacgcagagtcccttgcacgttttcaaggaggttcaccatatatctatcctctctatgggttgggagaattgcctcaggcatttgcacgacttagtgctgtctatggtgggacgtatatgttgaacaaacctgagtgccaaggtagagtttgacgaggagggtaaggtttctggtgttacatctgagggagag

SEQ ID NO: 165120 - DNA, 406 bp, Arabidopsis thaliana columbia
  unsure (1)..(406): unsure at all n locations
tctctatctctttctaaaacacaaccatgactgtttcttcatctccatgggctctcatggctctctttctaatggtttcttcaacaatggtaatggctattcctccacgcaaggccattgatgtaccatttggtcgtaactacgtcccaacttgggcttttgaccaccagaaacagttcaatggcggttccgaacttcagcttatcctcgacaaatacactggcacaggatttcaatcaaaggggtcatatttgtttggacattttagtatgcacataaagcttccagctggtgacacagccggagttgtcacagctttctatctatcatctaccaacaatgagcatgacgagatagactntgagttccttggaaacagaacaggacaaccagctatattacagac

SEQ ID NO: 165121 - DNA, 377 bp, Arabidopsis thaliana columbia
actgagcttcgctttctgggtttctatctaaaaatttcacagatttcgtgtgtgaagaatcatttcaagccatgtctccggctaaagttgatactaccaagaaggctgatcctaaggccaaggccttgaaggcggcaaaggctgtgaagtctggtcaagccttcaagaagaaggacaaaaagattaggaccaaggtcaccttccacaggccaaagactcttaccaagcctagaactggtaagtacccaaaaatcagcgctactccaaggaacaagttggatcactaccaaatccttaagtacccactcaccactgaatctgcgatgaagaagattgaagacaaccacccttctggttttcattgtgacattcgtgct

SEQ ID NO: 165122 - DNA, 395 bp, Arabidopsis thaliana columbia
cttaaacgttttactttgtgctgcactactcaacctcaatggccgcctcaacaatggctctctcctgccctgccttcgccggtaaggccgtcaagctttcccccgcggcatctgaagtccttggaagcggccgtgtgacaatgaggaagactgttgccaagccaaagggcccatcaggcagcccatggtacggatctgaccgtgtcaagtacttgggtccattctctggcgaatcaccgagctaccttaccggagagttccccggagactacggatgggacaccgccggactttcagctgaccccgagacattcgcaaggaaccgtgaactagaagttatccacagcaggtgggccatgctcggagccctaggctgcgtcttccctgagcttttg

SEQ ID NO: 165123 - DNA, 390 bp, Arabidopsis thaliana columbia
  unsure (1)..(390): unsure at all n locations
tgataacgtcgtccctaacctcatctctgcaagctctcaagctttcgtctccgttcgcccatggctccactcctctctcatctctctctaagcccaattccttcccgaaccacagaatgcccgctttagttccggtcatcagagccatgaaaacgatgcaggggcgcgtggtgtgcgcaaccagtgacaagactgtggcggtggagtggtgaggctgnctctctaccccaggtccatgaggcgcgtgtggttgttgctgctgttccgtgctcgcggccccgcttttcagttcatggttggccactggggcagactggtgaagtgcagacccatcaggacgactaaactgtttgtggcggttattgcctttgtgcgggccggcaggaaagc

SEQ ID NO: 165124 - DNA, 475 bp, Arabidopsis thaliana columbia
aaaatggcttgcaaaacgattttgcgttccgttttcgtatcggaatcacgacggacttccggcgcacgtagatgcttctttctccctccttctccagcatcagttccagtccatggtttgttcccggcgccaaagagtctatgtttcaatggttttgcatctgttcccgagcgggctactcggcttaattgcagccataacgatcaatccgatcaaggtccgcctcaagaagctgttctcaaggcaatctcagaagtgtcaaagactgatgggagggttgggaaaactactaacatgattattggaggcactgtggctgatgattctgctaaagattggctcgaacttgaccaaaagggtaatacatacccaacagaaagagggtttactgcaattgggactggtggcaatgactttgtgcatgctaatgttggtgctggtgaatctggtattgaccgacaaattccagaggact

SEQ ID NO: 165125 - DNA, 434 bp, Arabidopsis thaliana columbia
tccattcatcggaagtttggaaactccggtgacatcaagcccattgatcgcgtggtacctttccaacctccctggataccggaccgccgtcaaccctctcctccgcggtgtggaagtgggcctggcccatggtttcttcttagtgggcccattcgtcaaagctggcccattaaggaacactgcttacgccgggtcagccgggtctttagccgcggctgggctggtagtcatcctcagcatgtgcctcaccatctacggtatctcttctttcaaggaaggagagccatcgatcgcaccgagtttgactttgactgggcggaagaagcaacctgaccagcttcaaacggctgatggatgggctaagttcactggaggattcttttttggagggatctttggggtgacctgggcttacttccttttctaggttttga

SEQ ID NO: 165126 - DNA, 461 bp, Arabidopsis thaliana columbia
aaaaccatttttccatcttcctcatcaccttcccaagaagaagaacaccaaagaagaagaaaggttaataatgatgggcagtgtcgagctgaatctgagggagactgagctgtgtcttggtcttcccggtggagatacagtggctccggtaaccggaaacaagagagggttctcagagacggttgatctgaagctaaatctgaataatgagcctgcaaacaaggaaggatctacgactcatgacgtcgtgacttttgattccaaggagaagagtgcttgtcctaaagatccagccaaaccttcggccaaggcacaagttgtgggatggccaccggtgagatcataccggaagaacgtgatggttttctgccaaaaatcaagcggtggcccggaggcggcggcgttcgtgaaggtattaatggacggagcaccgtactttgggaaaatcgatttgaggatgt

SEQ ID NO: 165127 - DNA, 371 bp, Arabidopsis thaliana columbia
atcagaaccacgaaagcctttctcgctccctaacctctttccaccaaaatcacagagaccaatgtcccaagaaagcttcttgaagagattcaatggtggattggctcttctaacttctgttctaagcagtgcaacagctcctgctaaatccctgacgtacgaggaagctctgcaacaatctatgaccacttcttcatcttttgattcggatggtctgattgaagggatatccaattttgtcacagacaatcctttggttattgccggtggagttgctgcattggctgttccatttgttctgtctcaggttctgaacaagaagcccaaatcatggggaggtgagtctgcttagaatgcctataccaagttgg

SEQ ID NO: 165128 - DNA, 332 bp, Arabidopsis thaliana columbia
ggctcttcgaaaagttcctcagtgcaatagttcatggacagatgaatacatccgccaatttaagaatgtgaacatcaatgtcgctgtacaaacagaaaatgggctctacgttcctgtggtcaaggacgcggacaagaaaggactgtctacaattggagaagaggttcgattcttggctcaaaaagcaaaagaaaacagcttgaagccggaagattatgagggaggaacattcacagtctccaacctggggggaccttttggcatcaaacaagtctgtgccgtcatcaatccacctcaagcagccattctagcaatcggatctgctgaaaaga

SEQ ID NO: 165129 - DNA, 349 bp, Arabidopsis thaliana columbia
ctttaaatcatttagaggttgtgaaatattatggagagtgaaggaaagattgtgttcacagaagagcaagaggctcttgtagtgaagtcttggagtgtcatgaagaaaaactcagctgaattaggtctcaaactcttcatcaagatctttgagattgcaccaacaacgaagaagatgttctctttcttgagagactcaccaattcctgctgagcaaaatccaaagctcaagcctcacgcaatgtcttgttttgtcatgtgttgtgaatccacattcaactgatgtaaacagggtaagttactgctggggtgacttcttttaatatactttgaacccgcccattctttat

SEQ ID NO: 165130 - DNA, 304 bp, Arabidopsis thaliana columbia
  unsure (1)..(304): unsure at all n locations
aaaagagtcacttccgtgtcacaagaaaccatgaaactttctcttcatcaaccacttctcttcttcttcttagccagcgtcctcccattaatcctgaccgtccattctcaatcagacgactcagatttcatccgtactagctgcaacaccacattataccctgacctatgcttctcttctctttcctccttctctagctctgttcacaacgatccagccctcttggctcgagccgncatctncgtcactctcaccaagactctcgacttagcctcatacctggccaatatcaccactctccagc

SEQ ID NO: 165131 - DNA, 390 bp, Arabidopsis thaliana columbia
cctcagtgtacgatacaaggtagcattggtcgacctggagacgatactgttctaaagcgtcttagtgctacatggagggaaaagtttggcgaagaagttaaggaagacagtttatatgttgttgcagttgaccgtgttctccaaatggaagatttcatggaggacggaatctgggtggcgtcatcagattacaaaaatgcaagtcctgaccctcttcgagatattgcagaagatattgtcaaccagattaacgctaacaacatggaagacatcttccgtttctgcaatgtatacgtggatctagactttgtggtttcagaaacaaagatgatatggatggataggcttggattcgaccttcgggtatgggcttcacgaggtgtatatgat

SEQ ID NO: 165132 - DNA, 414 bp, Arabidopsis thaliana columbia
atttcttgttctttggacgaccatcggcgacagtgttaagtctagagtcttcttcttcttcggcgtagttttttccccggcttgaaaaatgggtctatccttcggaaagttgttcagcaagctctttgcaaagaaagagatgcgtatcctcatggtgggtctcgatgcagctggtaagactacgatcttgtacaagctcaagcttggagagatcgtgactacgattccaaccattggtttcaatgtggagactgtggaatacaagaacattagctttaccgtgtggaatgtcgggggtcaagacaagattcgtccattgtggaggcactacttccagaacactcagggacttatctttgtggtggacagcaatgatcgtgaccgtgttgtgggagccagagatgagcttcacag

SEQ ID NO: 165133 - DNA, 396 bp, Arabidopsis thaliana columbia
gaaaaaaaagctattgtttgaaagaagaagaagttaactatggcaaaggatgtggaagccgttcccggagaaggatttcagacaagagactatcaagatccgccaccagctccgtttattgatggagcggagctaaagaagtggtctttctacagagcagttatcgcagagttcgtagccactctcctcttcttatacatcaccgttttgacaggcatcggttaccagattcagtccgatactgatgccggtggcgtaaattgcggcggagttggaatcctcggtatcgcttgggcctttggtgggatgatcttcatcctcgtctactgcaccgccggtatctctggtggtcacattaacccagcggtgacatttgggctattcttggcacgtaaa

SEQ ID NO: 165134 - DNA, 227 bp, Arabidopsis thaliana columbia
gtccgactcagttcccggcgagttcgactcggtgattgattttttcctagaaaaataaaatttcttcttaacgattgatcgagtttgggtttctatctttcgattctagatctagaattcaatttgtgaggtttggagatggcgagcgagctgatccatctgcgacacgagacggatcaaccaaccgccgatgcttattacccgaaacccatcaaaccatgggtcac

SEQ ID NO: 165135 - DNA, 341 bp, Arabidopsis thaliana columbia
gtgttttgggggcaaacccaagtcagattctatctctgaaactcaactcaaacccttaaaacgagaaaccaacagcaatgtgcgagaccccttgttgtggttagccaaacggcggctacgtcgtcggcagttgtagctccggagagattccgtttggataatcttggaccacagccaggttcgaggaagaagcagaagagaaaaggtagaggtatctctgcaggacaaggagcaagttgtggttttggtatgagaggtcagaaatcaagatcgggtcctgggattatgagaggctttgaaggtggtcaaactgctctttatcgtcgtcttcccaaacttag

SEQ ID NO: 165136 - DNA, 292 bp, Arabidopsis thaliana columbia
agttttaagtcttcttcaagtcccagggatcatcaatccaatggctcagatcttagcagcttctccaacatgtcagatgagagtgcctaaacactcatcagtcattgcatcatcatccaagttatggagctctgttgtgttgaaacagaagaagcagagcaacaacaaagtcagaggctttagagttcttgctctccaatctgataacagtactgtcaatagagttgagactcttctcaatttagacaccaaaccttactctgacaggatcattgctgaatacatttggatc

SEQ ID NO: 165137 - DNA, 400 bp, Arabidopsis thaliana columbia
ctcggctcgaggatttccagtgatcgatagaatgaaagcagcagtagagacagcatgtccaaggactgtttcatgcgcagatatacttaccatcgcagctcaacaagctgtaaaattggcagggaggtccttcttggagggttcctttggggagaagagatagcttacaagcattctttgctctcgctaatacaaattttcccgctccattcttaactctcccacaactaaaggccagttttcaaaatgttggactggaccgtccttttgatctcgttgcactctctggtggtcacacatttggtaaaaaccagtgccaatttattatggatagactatacaactttagcaacactggtttacccgaccctaactttaatactacatacctccagacact

SEQ ID NO: 165138 - DNA, 427 bp, Arabidopsis thaliana columbia
aatctactctctttaaaagaaattcgtaagtactatcaagaagcagaagatggcccaaaaggtggaagcacaaggagggaaaggagccaacctatgggacgatggatcgacacatgacgccgtgaccaagattcagctcgcagcaggcatagacggaattcaatatgttcagtttgattatgtcaagaacggacaacccgaacaagctcctcttcgtggtaccaaaggccgtgttctcccagctgatccgtttgtgattaaccatccagacgaacatctagtttctgtagaaggttggtatagccctgaaggtatcattcaaggaattaagttcatctccaacaagaagacttctgatgtcattggatccgatgagggtactcacttcactctacaagttaaagacaagaagatcattggctttcat

SEQ ID NO: 165139 - DNA, 259 bp, Arabidopsis thaliana columbia
agagtgaatattagagcagtgaagcaatggtgcaagcagattttaaaagggcttctttatttacatagtcgttctccaccaagtatacatagagatctcaaatgtgataacattttcatcaatggaaaccaaggtgaagtcaagatcggtgaccttggactcgctgcgattcttcgtaaatcacatgccggtcgttgcgttggaacccctgagtttatggctccagaagtgtatgatgaggaatataatgagttggttg

SEQ ID NO: 165140 - DNA, 460 bp, Arabidopsis thaliana columbia
  unsure (1)..(460): unsure at all n locations
aaacacataaaagagagatttaatacaaaagaaagagaaaaaagaaagatatggcaggactcatcaacaagatcggagacgcactccacattggaggaggcaacaaggaaggtgagcacaagaaggaagaggaacacaagaaacacgttgacgagcacaagagtggtgagcacaaagaaggtattgttgacaagatcaaagacaagatccacggtggtgaaggtaaaagccacgacggagaaggcaaaagccacgacggtgagaagaaaaagaagaaggacaagaaggagaagaaacatcatgatgatggtcaccacagcagcagcagtgacagcgacagcgattaaggtgnagaagtgnagaggatcgcttgaataaaacagatctggttctggctattattaattaatggtgctgtatgttcttatcatcttagaaagggttaaagacaggagaaccg

SEQ ID NO: 165141 - DNA, 359 bp, Arabidopsis thaliana columbia
aagaacaatggcttcctctatgctctcttccgctactatggttgcctctccggctcaggccactatggtcgctcctttcaacggacttaagtcctccgctgccttcccagccacccgcaaggctaacaacgacattacttccatcacaagcaacggcggaagagttaactgcatgcaggtgtggcctccgattggaaagaagaagtttgagactctctcttaccttcctgaccttaccgattccgaattggctaaggaagttgactaccttatccgcaacaagtggattccttgtgttgaattcgagttggagcacggatttgtgtaccgtgagcacggtaactcacccggatactatg

SEQ ID NO: 165142 - DNA, 438 bp, Arabidopsis thaliana columbia
ctcctccactgtcttaaatttcactatcttcttcttcattttccttccttctcacttcaaatccataatcgctctacttctctctctctctctagattcgaaaaaatggcgaaactggtgatgttgttggttctctgtatcttaccggcgatagccatggcggcaaggaggggaaatattggaaagaatacaatggtggttcaaggtagcacctactgtgacatttgcaaattcggcttcgagactcctgaatcctcctacttcatccccggtgcaacggtgaagctatcatgcaaagacaggaagacaatggaagaggtttacacagacaaagctgtatcagacaaagaaggaaagtataagttcattgtccacgacgatcacagagaccagatgtgcgatgttttgcttgtgaaaagctcggataaaacctgctct

SEQ ID NO: 165143 - DNA, 427 bp, Arabidopsis thaliana columbia
cggaccattaggcatttctcgccacatttagctgcaaagatgaggcctccccacatgcctgtcattcgtgggcgatctgcgactagaaagacagtctacatttgtggccaaccacgtttggtattcgtcttacttggcttaaccgctttgtcctgtggtttacttcatgtggcttggtatgggaactgtatgcacttaccactggccttctcatgatactttttcatgcatgcctgagaacttcaaacctcaagggccgcttgaacacattccgtgaagaattcatggctgtctggcgtaactacagggaactttaaagacaacataaagcattggttcgatcttattgcaaaccaacccgggacatcacaggtgtttcgaggaatgacatgaactccaatttcttcataatgtgcacaaacaatcg

SEQ ID NO: 165144 - DNA, 444 bp, Arabidopsis thaliana columbia
ctatgatgccagacaccaaacactcaccatccttcgtatgggataagctaagaaaagaaacttcacgagaggaatggttagacaccgtgtttacgagcgagaaacctgattttcctagcgagttttggatttttggaccagaattcatggccaagaacttgtatcagttgtctccagtccaagatcttgaattggcgaaaatgttggtgagggcaaacccattgattaagaaagatatggcagagagaagaagcttcagtgaggaaggatacggatccgttacacgtatatttattgtatgcggaaaggatcttgtgtcacccgaagattaccagcgatcgatgatcagcaactttcccccaaaagaagtaatggagatcaaagacgcagatcatatgccaatgttctccaagcctcaacaactatgtgctcttctcttggaga

SEQ ID NO: 165145 - DNA, 419 bp, Arabidopsis thaliana columbia
ccagatctgaacctcttccctttcctcgaaaatccttctaacatcatcatccatggcttcctctgatttcgatggaatccttttgggaatgggaaacccactcctcgacgtctctgccgtcgtcgaccaacagtttctcgacaaatacgacatcaaattgaacaatgcgattctcgcagaggacaaacatttgcccatgtacgatgaaatgagccagaagttcaatgttgaatacattgctggaggtgctacccagaactcaatcaaagtggcccagtggatgcttcaagttcctggggcaaccagttacatgggatccattggaaaggacaaatacggagaggcaatgaagaaggatgctacagcagctggtgtctatgtccactattacgaagatgaggcaacacctaccggaactt

SEQ ID NO: 165146 - DNA, 440 bp, Arabidopsis thaliana columbia
catctactcttgcaaaccaacgtaaaacactaactaatagatcaatatggctggagtgatgaagttggcatgcatggtcttggcttgcatgattgtggccggtccaatcacagcgaacgcgcttatgagtcgtggcaccgtccacggcaccctgacagggagcattgcctacttgacccgaggagctccacttacacaaggctgctgcaaccgcgttactaaccttaaaacacatgtccagtacaaccccagaccgtcagaacgcttggcgttgccttcaatctggcggtaacgccgtcggtcccggtcttaacactgcccgagcagctggacttcctagcgcatgcaaagtcaatattccttacaaaatgagcgccagcaccaactgcaacaccgcgaggcgatgagcgacggtcaaatgaagctactagcggatgttt

SEQ ID NO: 165147 - DNA, 431 bp, Arabidopsis thaliana columbia
  unsure (1)..(431): unsure at all n locations
gagaaaacttcgtctctcttctctgcttcgccctctcatttcctgtgagataaaggcggagtctctctccagttattttgctcatccatcgattcttagagttcaaaatggttgatcaagttcagcaccccactattgcgcagaaagctgccgggcagttcatgcgttcaagtgtttccaaggacgttcaagtgggttaccagaggccttctatgtatcaaagacatgcaacctacggaaactactccaatgctgcatttcaatttcctccgacatncccggatgttggcaacaactgcttctcccgtgtttgtccaaaccccaggagagaaggggttcactaactttgcccttgactttctgatggntgggtttctgctgccgtctccaagactgctgctgcttctattgaacgtgttaagcttttgatc

SEQ ID NO: 165148 - DNA, 387 bp, Arabidopsis thaliana columbia
cccaaattctcttctctctatctctctcgcgtacgccgcaccgtagcgaccaattgaatccacgaggaaatctcagtaaatactatggcgaccaacgaacccgagcacgagcacagagacgaggaagaggccggagctaacgaggatgaggacaccggagctcaggtcgctccgatcgttaggcttggagaggttgccgtcactaccggcgaggaagacgaagatgccgtccttgatctgaaatcgaagctttatcgattcgataaggatgcgaatcagtggaaggagagaggagctggtacttggaagttcttaaagcataagaacactgggaagattcgtctcgttatgaggcaatctaaaactttgaagatctgtgctaatcac

SEQ ID NO: 165149 - DNA, 443 bp, Arabidopsis thaliana columbia
  unsure (1)..(443): unsure at all n locations
ctcggctcaccacatcattgaacaatcttgttgatactcatagaaaagaaacgtcctcaaaggtaggctcagtccttggctcatcttcatcagttacttctaccacaagcgaatcagcggctacatcagagagcatagagagcttaaagcaaacactaaggaagctacgcggtctaagcgcacgtgatctcgtaaccacccgaatttcgatgcgattatagcagccggtacacgttacgaggtactcagctcagcttctattggttacatctctttgctagccaaatacaaaaccgtcattaaagaaggactcgaggcttctcagagagtccagattgctcaaacccgagccaaactgctaaaagaaaccgcaatggagaagcagagaaccgtaaaactcgttttcgcagcagcaaagaccactgctcanagaggagacgcgt

SEQ ID NO: 165150 - DNA, 438 bp, Arabidopsis thaliana columbia
ccaattcaaaaaaagaaataacctaaacgtgttcacacagagatctcgagatgaaagataaccaaacggaagttgaatcgaggagcactgatgatagattgaaagttagagggaacaaagttggaaagaaaacaaaggatccaaacaggcctaagaaaccaccaagtcctttcttcgtcttcctggacgatttccgaaaggagtttaatctggctaaccctgacaacaaatccgtcggtaatgttggtagagcagctggaaagaaatggaaaaccatgactgaagaagaaagagcaccttttgtagcaaaatcacagagcaaaaagactgagtatgctgtgactatgcaacagtataacatggaactggctaatggaaacaagacaactggagatgatgagaaacaagagaaagctgctgatgattatgaagttggat

SEQ ID NO: 165151 - DNA, 429 bp, Arabidopsis thaliana columbia
cagctgtggcgagtcgggacatttcgccagggattgcaccagcggtggacgttaaaaccaacgccggttacgcggtggagaagagtgagttggttatctcacaagtgatcggttctttctcccgccgccttctatctctctattatccactttttgcttattatgatggatctctatctttgttagttggttttttcttgatggtttcggattaggactcttcttttggttttgctacttatggttggttttatttatggtacttgtgatatgggtgaaatgctctacttgttgctttgtttcaagtgttcatattatgccatcaaatattttgggtttttgtttagttatttgtatgaattggtagtatctgatatttttattattctattttattttttattttcttttaattcttttatttttttt

SEQ ID NO: 165152 - DNA, 259 bp, Arabidopsis thaliana columbia
atcaaaaagcttttaacctcagccgttaaatctttctccgatcatgccgaccagaaacatcgccattggtggagtccaagaagaggtctatcaccccaacgcacttagggcggcgctcgctgagtttatctcgactttgatcttcgtattcgccggctcaggctccggaattgctttcaacaggatcactgacaatggagcaaccactccttccggccttgtcgccggtgccttagctcatgctatcggtctctttggc

SEQ ID NO: 165153 - DNA, 370 bp, Arabidopsis thaliana columbia
ggcgaagatgaagtacaacccaagagtgacctcttctcgcagaaagaacaggaaggctcatttcacagcttcctccagcgagaggcgtgtgataatgagctctcctctctccaccgatcttcgtcagaagtacaatgtcagatccatgccgatccgtaaagacgacgaggttcagatcgttcgtggtacttacaagggacgtgaaggcaaagttgttcaggtttaccgtcgcaaatgggtgattcacatcgagagaatcacgagggagaaggtgaatggaacaaccgtgaacgttgggattcagccgtcgaaagttgtgataacgaagcttcgtcttgataaagataggaaatcgcttttggagaggaag

SEQ ID NO: 165154 - DNA, 278 bp, Arabidopsis thaliana columbia
acaaaacccaattagccggagatggccgcaacatccgccgctgctgcagctgcttcttgcatcatgggtactcgggtggcgtcccggtatccatcccggttcaggtcggttcacagccgtgttcggtttcggaaagaagaaggcagctcccaaaaagagtgccaaaaagacggtgactacggaccggcctctttggtacccaagcgccatttctcctgactggcttgatggttccttggttggagaatacggttttgatcccttcggtttaagcaaac

SEQ ID NO: 165155 - DNA, 152 bp, Arabidopsis thaliana columbia
ctttaagacagctaaaactaaatacaaagaaacagagatgggtttggttacagaggaggtgagagctaaagcagaaatgtacaccggagatgagatatttagagagaagacaaagtgttttctcaaggaaatatctatgcccaaaggtttat

SEQ ID NO: 165156 - DNA, 385 bp, Arabidopsis thaliana columbia
aaaaaaaaaaaaaacacaaaaagtttcaatggccgcctccacaatggctctctcctcccctgccttcgccggaaaggctgtgaacctttcccccgcggcatctgaagtcctcggaagcggccgtgtgacaatgaggaagactgttgccaagccaaagggtccatcaggcagcccatggtacggatccgaccgagtcaagtacttgggtccattctctggcgagtcaccgagctaccttaccggagagttccccggagactacggatgggacaccgctggactttcagctgatcccgagacattcgcaaggaaccgtgagctagaagttatccacagcaggtgggctatgctcggagccctaggctgcgtcttccctgagcttttg

SEQ ID NO: 165157 - DNA, 396 bp, Arabidopsis thaliana columbia
caatcctttcctttcattgtagttaaacaaagattacgattatggccacatcagctatccaacaatcctccttcgccggccaaacggctctcaagccctccagcgacctcatccaaaaggtgggcgtcttgggcggtggccgtgtgaccatgcgtcgtaccgtcaagtctactccccaaagcatctggtatggaccagaccgtcccaagtacttgggaccattctcggagaacacaccgtcttacttaactggagaataccccggagactacggctgggacaccgctggactctcggctgacccggagacattcgctaagaacccgtgagcttgaagtaatccacagcagatgggctatgttgggtgctctcggatgcacattccctgaaattctc

SEQ ID NO: 165158 - DNA, 392 bp, Arabidopsis thaliana columbia
tccttattgtctatatatttttcctctttagctttttcatttcgaaatggccaccgttgaggttgaacaagtcactccagtagcagtagagaacgttgaggtaccaacaaagacagtggaggagacagtggtggagacagaggtgacccaacagccggaagaatccgtccccgccgtgacagaacaaaaatccgaagcaccaattgtagaaacaaacgaagaagtggttgtggaagaggcagagaagaaagatgaagaaaccgagaagaaaacagaggagaaagacgagaagacagaagtgatcacggaaactccggtagttgaggaggaggagaagaaagctgaggaagtgaccgaaactttcggcggttgtggaggaggggaagaagaca

SEQ ID NO: 165159 - DNA, 439 bp, Arabidopsis thaliana columbia
cttcttctcttttcacagttctgtttctccctctctctaaatgatggcaaacaactgtaatttagtcagtgttctatgtgtaattgtggtattgaccctctttcacaaccccatcactgtcgccggacagaatagtccggtggtcgccttgttcacctttggtgactccaacttcgacgccggaaacaaacagactctcaccaaaaccttagtcgctcaaggtttctggccgtacggaaaatctcgagatgatcccaacggcaaattctccgacggccttataacttcggacttcctcgcttaattcatgaagattccgcttgcgatcgcgccggcgcttcaaccgaacgtcaatgtctcacgtggagctagtttcgccgtcgaaagtgctactctactcggagctccggtggaatctatgactctgaatcaacaagtg

SEQ ID NO: 165160 - DNA, 381 bp, Arabidopsis thaliana columbia
cacaacacaaaacaatctcactcgaaattcctttgactcatcatcatcaccatgtggagaagaatcgtctcctctcagctcaaaaccctagccgccgatgtcgtcgctgcttctcctcgtcgatcgatagccgccaccaccagacctgtcggtttctatctcgccgccaatcgatcagccatttccgcatcttctttcgttatccctcgtcgtttcagctccgattcagtagagactcctgcgacgaagaaggtggaggatgtaatgcccattgcgactggacacgagaaggaagagcttgaagctgaacttgagggaaggaggctggatgatattgacttccctgaaggtccttttggaactaaggaagctcctgctatt

SEQ ID NO: 165161 - DNA, 369 bp, Arabidopsis thaliana columbia
gaagacttgagcaagctttactttggcaatttccagattctggacattaatggttccacatgtttccttaccaggactgggtataccggggaagatgggtttgagatttcggttccagatgagcatgctgtggatctagcaaaagcaatcttggagaagtccgagggtaaggtaagggcttacgggtctaggagcaagagacagtctcaggttagaagcaggactttgtctatatggaaacgacatggagcaacacatttctcctgttgaagctgggctcacatgggccataaggaagcgtagaagagccgaaggtggatttcttggcgcggatgtgaatttccagcagcttaaagatggacctacaat

SEQ ID NO: 165162 - DNA, 440 bp, Arabidopsis thaliana columbia
ccgccggccattttttgaggaacaagagccctttggctcagcccaaagttcaccatctcttcctctctggaaactctccgggtgcactaccatctaggagacaatcattcgttcctctcgctctcttcaaacccaaaaccaaagctgctcctaaaaaggttgagaagccgaagagcaaggttgaggatggcatctttggaacgtctggtggggatggtttcacaaaggcgaatgagctaattcgttggtcgtgttgctatgatcggtttcgctgcatcgttgcttggtgaggcgttgacgggaaaagggatattagctcagctgaatctggagacagggataccgatttacgaagcagagccattgcttctcttcttcatcttgttcactctgttgggagccattggagctcttggagacagaggaaaattcgtcgacga

SEQ ID NO: 165163 - DNA, 385 bp, Arabidopsis thaliana columbia
gaaaacacaaaaacaaagattataatggcttcctcaaccatggctttgtcctcccctgccttcgccggaaaggctgtgaagcctgccgcatcagatgtcctcggaagcggccgtgtgaccatgaggaagactgtcgccaagccaaagggtccatcaggcagcccatggtacggatctgaccgagtcaagtacttgggtccattctccggcgaggcccgcgagctaccttaccggtgagttccccggtgactacggatgggacaccgatggtctatccgccgacccagagaccttcgccaggaaccgtgagctaggaagtatccacagcagatgggccatgctcggagccctaggctgcgtttatcctgagctattggctaggaac

SEQ ID NO: 165164 - DNA, 381 bp, Arabidopsis thaliana columbia
ccgggctctgattactccggaatcgtcgacgcgattggtcccgccgtcaccaaattccgcgttggagatcgtgtctgttctttcgccgatctcggttccttcgctcagtttatcgtcgctgatcaatctcgtttgttccttgtaccggaaagatgtgacatggttgctgcagctgcgcttcctgttgcgtttgggacttctcatgtagcacttgttcatagagctcgtttaacatctggtcaggtcttattggttctaggtgctgctgggggcgttggccttgcagctgttcaaatcggtaaggtttgtggagccattgtcattgcagttgctagaggaactgagaagattcaactggtgaagtcaatgggagtggatcat

SEQ ID NO: 165165 - DNA, 225 bp, Arabidopsis thaliana columbia
gaagacttgagcaagctttactttggcaatttccagattctggacattaatggttccacatgtttccttaccaggactgggtataccggggaagatgggtttgagatttcggttccagatgagcatgctgtggatctagcaaaagcaatcttggagaagtccgagggtaaggtaaggcttacggttctaggagcatgagacagttttaggttagatgctggactt

SEQ ID NO: 165166 - DNA, 321 bp, Arabidopsis thaliana columbia
ctttgatagcaatctacttcgggatgggatcattgctttcaatttatggatgtttacaatacaggaagcaagggaacactggacttatcgctgatcaagtaggaatcgatgcagagaacgggtttcggtcgcctcttatagatggtgacaacatggtttcgttcgagaagagaaaaacttgtggttcggaagcactaaagtcatatgttcatctcttccagattatatatcagatgggtgctggagcagctgtgcttacagacagtatatattgtaccgtgattttactgattatgtatatacaggcctattggacgagga

SEQ ID NO: 165167 - DNA, 297 bp, Arabidopsis thaliana columbia
gaaaaacaaaaatggcggttctttgctcgtcttcgacggtgatactctcttcttcttccgtgaaatcctccggaagtgagagaaagtctccgtttttagggttctctttaacggctatctcgaagccgtcggtacgagtcggcatttatgcgaattcgaaaagaggattgcaagtgaagtgtgaagcttagccgacgacgacgacttctcttgttccggcgaatcaacgatggatgttcgacgaagaaaaagctaatggccctgacatctggaacaccgcatggtttccaaaagctt

SEQ ID NO: 165168 - DNA, 405 bp, Arabidopsis thaliana columbia
gagagctaaagctacagtgtacaaaaaaaaatgggggggcctttcagaaacttccgcgccgcggggatattcgcgaatctactcattctcgccgctcataactggtccgtcgccgtatcttctcaatccaccgaatttgccggagatttcctccattcgaaacagagaggccgggcaccagccgcgtgctctgtttccgccgccctcggagacggcggagatctattctacggcggaggagaaatgggagaggagttcgagatggactcatagatcaaccggcgcatattatctacgaggaggtacatcagctatggtgcgctgaggagaaacacaattccgtgctcacgtcgcggcgcatcttactacaattggtcgccgggcgctcaagccaatccttacttt

SEQ ID NO: 165169 - DNA, 327 bp, Arabidopsis thaliana columbia
gcattggctacgtgctccaaggtggtgtcattcccccagcgtgttgctccggcgttaaaaacctcagcagcatagccaagacgacgcgccagaccgtcagcaagcttgcaattgcattcaaggtgccgctagagccttaggctctggtctcaacgctggccgtgcagctggaattcctaaggcatgtggagtcaatattccttacaaaatcagcaccagcaccaactgcaaaaccgtgaggtgatgagctagcaacggtgagatgatgctactaccggaagaggatgatccttattatataatggatgagattaatattttataaga

SEQ ID NO: 165170 - DNA, 338 bp, Arabidopsis thaliana columbia
  unsure (1)..(338): unsure at all n locations
gtacaggttcgtgatcgacgtggctaactccttgagccctccatgaatgatccggatctaagaattgagcattgaggaggctttaaatctatgtcataatcttggtgtttgtttgtgtctctcgagttatcttcgttttctgctttcggtttgagaatcggnttcttctcagacaagttaccttatttcgctgttttcttcctatgttctgtttcctgagagtaactttttctgattttctttaagatttttcattcatttattattttgcttatttatgaattttttgggtttttttctcaatcttaaactatttatagatttttttaatttttttc

SEQ ID NO: 165171 - DNA, 237 bp, Arabidopsis thaliana columbia
ttctgatttcactaacgaaaaggaatcagtttttggtggaagtaattgatccgatctaggaaaaatgggacgaggtgctcatgggcatagagcatatccaggcacttttttcgccaaagactgtagtatgactggtgggccctactattcgtccatgcattggcagcagaacaccttctttgctatgaacggtactttgcttgggtgctttcccatcgtccttttttcttgtaagct

SEQ ID NO: 165172 - DNA, 420 bp, Arabidopsis thaliana columbia
cgaagatctctatatattttcccttctcttgtttccttattagttttctccgacactcccattcaaaagtagaaagatactgaagagctcgctcattcacaaaataaccaaaatggttctcactcacaacgtattggcagttacatttggagtcctgggtaacatcatatcgttcatcgttttcttggcaccagtgccaacttttgtaagaatctgcaagaaaaaatcgatagaaggttttgaatcacttccctacgtgtcagccctctttagcgcgatgctatggatttactatgctctgcaaaaagatggagcaggcttccttctcattaccataaacgctgtgggatgcttcatcgaaaccatctacatcatcctcttcatcacctatgctaacaagaaagctagaatatcaacttt

SEQ ID NO: 165173 - DNA, 373 bp, Arabidopsis thaliana columbia
gcggcggaggaagctctaatcaccaggagtaaaaatggcggttccgttgcttacgaagaaggtggtgaagaagaggtctgccaaattcatcagaccccagagtgatcgcagaatcaccgtcaaggaaagctggaggaggcctaagggtattgactcccgggtgagaagaaagttcaagggtgtcaccttgatgcccaatgttggttacggatctgataagaagacccgccactacctcccaaatggattcaagaaggttcattgttcacaacacctctgagctcgagctactcatgatgcacaacaggacttactgtgcagagattgctcacaatatctcaacaaagaagagaaaggccatagtggagagagc

SEQ ID NO: 165174 - DNA, 438 bp, Arabidopsis thaliana columbia
aaaatccgctttgttgcagaggatcacaatctaatggcgattccaatgtccatggcaatggcgactcctacagattccgtgagcagagtctggagtatgtcttctctcaaatcagctcttccctccaccgcatcactccgattaccttcctcgtcttctcgccgtccggttactcttcgtctcccaatctcttctccttcactcccatctttctccggtctctctccggtcaatcctctcctctcaatcggacttccagattggcaaagctttgagaatggattcaaaattgttgacggtggtggtcgtatctacgcgatgagacacggacgacgtgttccgaagctgaacagaccaccggaccagcgcaaagctcttctgcgaggactcacgactcagcttcttaagcatgggagaatcaagacgactcgagctaga

SEQ ID NO: 165175 - DNA, 433 bp, Arabidopsis thaliana columbia
caacaacccctaaaatctcggaagccataatgagcagagcattgttcaggaacgtagccgtcgacaccgctcggctcatacggcggaacgcggcggcgtcaacagaccaatatggtaagaccggagttgctcaatcgagaccttatttccggtcacgtcagcttctcgaaagagcaaaagaaacaggagtctcaccttctccttctttgggtttctcttcttcttcatctccgtcgaggattgggttcgttggatggtatcttggtatggttaaatcacacccagttgtgaccaaaagtgtcacttcctctcttatttacattgccgccgacttgtcttctcagacgattgcgaaaacttcttctgagtcttatgacttggtgagaacagcaaggatgggaggatatgggttatttgtcttgggtccaacact

SEQ ID NO: 165176 - DNA, 438 bp, Arabidopsis thaliana columbia
ggcgaaatctccagaaacagagcatccgaacaaagtctttggttggggtgctagagacaaatccggtgttctctctcctttggacttctctagaagagacaatggtgaaaatgatgtgacagtgaagatcttgttctgtggagtttgccacactgatttacacaccatcaaaaacgactggggatactcgtattacccagtagttccagggcatgaaatcgttgggatcgctacaaaagttggtaagaacgtgactaaattcaaagaaggagatcgtgtcggagtaggagtgatcagtggcttgtgccaatcttgcgaatcttgtgaccaagatcttgaaaactactgtcctcaaatgtcttttacatacaatgcgattggatccgatggaaccaagaattacggtggctattcggagaacaatgggggttgatcaac

SEQ ID NO: 165177 - DNA, 157 bp, Arabidopsis thaliana columbia
cgtaccgaagaaaaatgccaaatggatgaaccaccgccgggaaggcccaagcccagagtacccattccacattgtcgctcagatgaggggcttaaaacctaaacctctattttttggtggagaaagaacttcgggaaaccttttaacctgagaggtt

SEQ ID NO: 165178 - DNA, 382 bp, Arabidopsis thaliana columbia
gcagagatgacggtgaagataaggctcgcgcgtcttggttgtaaacaccgacccttctatcgtgtagttgtcgccgatgaaaaatcgcgcaaggaccgtaaacaaatcgaggtgttaggcttttatgatccactccaaggcaaagaagatgcggatagagtgagccttaaattcgacagaatcaagtactggttatctgttggagcttaaccaacagacacagtggaaagcatgcttttcagggccggtttgataccaccaaagcctatggtagtggtcgggtcgaaaaatgggcagaagtttacgagccaacatgtttcacccattacaggtgaaatcttgaactaagagtgttgatgccgtcagcaagaaagagcctttt

SEQ ID NO: 165179 - DNA, 442 bp, Arabidopsis thaliana columbia
ggcagcactaccagggggtcaagccacttacttgggaaacccagtcccgtggggtactttgcccacaatcttggccattgagttcttagccattgcatttgttgagcaccagagaagtatggagaaagaccctgagaagaagaagtacccgggaggcgcatttgaccctcttggatactcgaaggaccccaagaagctcgaggaattgaaagttaaagagatcaagaacgggcggcttgcgctgttggcgtttgtaggattctgtgtgcaacaagtcggcttacccggggacaggaccattggagaacttggcaacttacttggcggatccatggcacaacaacattggcgatattggtatccctttcaactaatgaaatgtaaaatagaaatatgtgtaccttatgagccttatgtgtatcaaaaacactgtgtaatgaaa

SEQ ID NO: 165180 - DNA, 437 bp, Arabidopsis thaliana columbia
acgatcactttcaccagcttcctgttgccccccagtatcatcaccattccccatcgttttcactacccgctgctcatgtgggtgatggtgaagttgactcttcagcagcacgaggcctaccttatgcgcatccatttctttttagtcaccggtctaatcaaaggtcctcaccagcaattaacagttaccaaggaagcagcacccaaatgcgtgaacagcatcatgcttataatcatcagaggcaacaacatcatgccaatggtcccactctcgcattaccttttatttccatgacaagaaggggattaccggcggcgtcaccttccccaacaatgccagatcagaacgttggattcttcatttatccaagtggacaccatgaaccagaaaccgatcaaattcatgcatgggagagagaatgggttccaccatttcct

SEQ ID NO: 165181 - DNA, 442 bp, Arabidopsis thaliana columbia
ctcctctgtgtgtgtcgtcttgcctctgctctatctctctccctgctctttcacatttcatatctttcttaaatgctcatatacactcaaaaaccgatcataagcagagtttgtaaccaatatggagcagtgggcgattacaaatcttcttgcccaacaacctcgagagttaaatcaggtactcatatccatattaaatcgaattcttaattagcataataaggtaaacataatctgcaagaggaattctggatttaaataaaccataatccggttgccctaattgttaacttgtatcaacgcttatgcgaatcatgaaattttaattttattgggtttgttatttatcttattgatcaattattggtttacaagttgtcatttaatctattgaaaatgatggtattaagaaatgctgttaaacaattttgcgggttctttg

SEQ ID NO: 165182 - DNA, 436 bp, Arabidopsis thaliana columbia
ggggatatatctccacacactagttctgatgatgataatggggaccatgatagtcttgagaaaaaatctagtaggagtaagaatattgcttatggaaaatgtgatgtcaagccacccaggcttcagagtggcgttcttaggaccaattgcattgattgccttgaccgtacaaatgtagcacaatatgcatacggttgggctgctcttgggcagcagcttcatgtattagggattagagatgttcccgccatagaacttgatgatcccttggctatttcgttaatggggttgtatgagagaatgggtgacacactagctcatcagtatggcggatccgcagcccacaacaaggtattcagtgagagaagaagcctgtggagagcagcaactcagtcacaggagttcttgagaactctactacgatattataacaacg

SEQ ID NO: 165183 - DNA, 372 bp, Arabidopsis thaliana columbia
ccaacagcagcagcagcaacagcaacagtatcagtttcaacagcaacagatgcaacagcttatgcagcagcggcttcaacagcaagaacaacaaaatggagtaagactcaagccttcacaagcccagaaagagaactgaggaatatgaatatgtcccacggtattggcgttttggtacgtagaagaaaccttttggtaaggtcattgaagataaacatttgggtaagcccaaagaaacagagttccgtgcattgcaaatattgcatgcactgtaattattaattgtttggatttgatatagagtctgttttctttatccatattatgtatattattttttctttttcaatatcttttttatttgtttatttt

SEQ ID NO: 165184 - DNA, 436 bp, Arabidopsis thaliana columbia
gttgactgtaccggacgagaccggtcgacctcatttcgcggctaaagacattgtgccgttttaccttgaacattgtcccaggatatttccccagcccacaggcgtgcttgctctgttaccgaagcttccaaagcttctgtctggtccaaagtacagcggaaagtatctgcgaaatcttctgagtaagcttcttggagagacaagacttcaccagaccctcacaaacattgttatacctaccttcgatatcaagaaacttcaacccactattttctcctcttaccagctgttggttgaccctagcttggatgtcaaggtatcagacatatgcatcggcacttcagctgctcccactttctttcctccccattacttttccaacgaagacagtcaaggcaataagacggagtttaatcttcgtgatggcgccggtact

SEQ ID NO: 165185 - DNA, 311 bp, Arabidopsis thaliana columbia
gggtatcatgcttggtgctgaccaacctgttatcctccacatgttggatattcctccagctgctgaagctttgaacggttgtgagatggagttgatcgatgctgctttccctcttcttaaaggtgttgttgctacaactgatgccgttgagggatgtactggagtcaatgttgctgttattgttggtggattttcatgttttgttatttttttgtttttcttatttttttttttttgttattattttgtttaatatttaatatttatttttgatatatttttttttaattattatttttgatttttttgtt

SEQ ID NO: 165186 - DNA, 429 bp, Arabidopsis thaliana columbia
ttgtagttaaacaaagattacgattatggccacatcagctatccaacaatcctccttcgccggccaaacggctctcaagccctccagcgacctcatccaaaaggtgggcgtcttgggcggtggccgtgtgaccatgcgtcgtaccgtcaagtctactccccaaagcatctggtatggaccagaccgtcccaagtacttgggaccattctcggagaacacaccgtcttacttaactggagaataccccggagactacggctgggacaccgctggactctcggctgacccggagacattcgctaagaaccgtgagcttgaagtaatccacagcagatgggctatgttgggtgctctcggatgcacattccctgaaattctctccaagaacggtgttaaattcggagaagccgtgtggttcaaggcaggctc

SEQ ID NO: 165187 - DNA, 442 bp, Arabidopsis thaliana columbia
cgacattgggtgaagtactttggtgagcagttgtctggttttgccttcactgcaaacggatgggtccaatcttatggatctcgctgtgtgaagccaccagttatctatggtgatgtgagccgtcccaaagcaatgaccgtcttctggtccgcaatggctcagaacatgacctctcgcccaatgaaaggtatgcttactggtcccgtcaccattctcaactggtcctttgtcaagaacgaccagcccaggcacgaaacctgttaccagatcgctttggccatcaaggacgaagtcgaggatcttgagaaaggtggaaatggtgtcattcagaatgatgaggctgcacttagagaaggactaccactcaggaaatccgagcatgctttctacttggactgggccgtccactccttcagaatcaccaactgtggagtccaagaca

SEQ ID NO: 165188 - DNA, 305 bp, Arabidopsis thaliana columbia
gaaagagcaatctctctatactacaaacaccaaagtttaaaattaaacaaaatcttcaagaaacactttacgaatttctgcaagggcttcacttcaattttcttctcaggttctgggctcaaacactaaaacacacagctctatcatttccatctctcggaggtactctccaactccattcactagattctcccgcaaggaggatgagtcatgttcgatggctatgaatggttgggatggagatttcaagacgccacttggtacaagggagacaaggactatgactggtgttttatcttcggcag

SEQ ID NO: 165189 - DNA, 290 bp, Arabidopsis thaliana columbia
cctctctctttctagtgtttgtttgatcctctgcgtactctgttcttcttctctcttcagataaaacaagtcctgcatattgaagatctgatgtcttatcgattgctaagtgtggataaggatgaactggttacgtcaccttgtttgaaagaacgtaactacttgggtctctctgattgttcctctgttgatagctcaactattcccaatgttgttgggaagagcaatcttaatttcaaagctactgaactgaggctaggtcttcctgagactcaatcttcttggagaga

SEQ ID NO: 165190 - DNA, 348 bp, Arabidopsis thaliana columbia
aactttatctcccaaaacacaaaacaaaaaaaaatggctttcactgctctctcaagcgccatcggcggagacttcattcatccggcggtccccagctccaatcagtctccggtcccttccatcagccaacacacaatccctcttcggtctcaaatcaggcaccgctcgtggtggacgtgtcacagccatggctacatacaaggtcaaggtcatcacaccagaaagtgagctagagggtgagtgtgacgaccacctctacgttcttgatgctgctgaggaagctggaatcgaattgccttactcttgccgggctgggtcttggtcgagccttgctgggaaaggtgtgtt

SEQ ID NO: 165191 - DNA, 318 bp, Arabidopsis thaliana columbia
aacaaccaatatggatgcacgatactcttattacatgggagcgtaagaatgcgcaaaaatacaccatcggtagcaagccttagaccggtgcattgaacgattactagagaggttttagaagaatgttggagtacaataagggcaaatacgcagattcggaaattatgatcatgggaaacggatatggagaagaactaggggcctcacattctagggctgatggtaccgccgatcataacaggaaatattatctttagaggcatcttttgagtatgcaagaaggtgttcgcattgacaaagttgatgtactggatactt

SEQ ID NO: 165192 - DNA, 358 bp, Arabidopsis thaliana columbia
gatagagcagcttggttacaagcattagcatctacaaaatgtatctttcctctgcggtcacttaatggggatttctccttgagaccaccaaaggatttgtccatatcaactgagagactaaagaaacggttgcacgaagagggtatgaatgagaatctcgtcaaagagtgcgaacagatcatgctctcagaattttctgaaatgcacggacaagttaaacttttacacgaagaacggactaatttgcttgatgcattgaggcagcttgaggcagctaatctcgaagttggtgcatcagggaagcatgagttttcaagcctaggacgtggaaagtttagtgtattgcttacatctgttt

SEQ ID NO: 165193 - DNA, 399 bp, Arabidopsis thaliana columbia
tttttgacggaccaaaaataacttatggatttagtttgcatcataattctcctaccaatctcaacttccgacgtctattcatcatgggtttgaaggaggaatttgaggagcacgctgagaaagtgaatacgctcacggagttgccatccaacgaggatttgctcattctctacggactctacaagcaagccaagtttgggcctgtggacaccagtcgtcctggaatgttcagcatgaaggagagagccaagtgggatgcttggaaggctgttgaagggaaatcatcggaagaagccatgaatgactatatcactaaggtcaagcaactctttgaagttgctgcttccaaggcttcaacctgatgaatcaaatcctcatctgcagtaactttatcttaag

SEQ ID NO: 165194 - DNA, 288 bp, Arabidopsis thaliana columbia
accgtttgttcgtggactcgagatattgtggtttcttagcaaagaagatgagtggagtgggagagaaagcttctggaacagcgtaagacacctgctgatttcttgaaatctatccgtggtaaaccagttgttgtcaagctcaactctggtgttgattatcgaggcattcttacttgtcttgatggatatatgaacatcgcaatggagcaaaccgaagagtatgttaatggccagctgaagaacacatatggcgacgcttttgtccgaggcttacaaagccctttacat

SEQ ID NO: 165195 - DNA, 449 bp, Arabidopsis thaliana columbia
tagacccacgcgtccgattcttcttcaacccgaccaaatacacatccgacggggaaaaagagttccgacaagaatcgagaactgaaagatttgtcatttgtctctcaaatatctgtggagagaagagaaattggaataaagaagacagtgttgtgagagagagagagagagagagagatgagttcgtctctacctctgaggctacttcttcctcttacaacttctctgatttctcctcctcctcctcctccagattctttccatgctccttcgtcgttcagatcgaaaaaccctaatttcaaacgccgattgtcttcttcttcctgttgttcttcccagtcgcagcttttctctgggagatgcagatcctattcgcggtgtgttaccatgtgcttaccagaacacatgagaaatcaagagaacacagaaatcttgacagataaagatga

SEQ ID NO: 165196 - DNA, 182 bp, Arabidopsis thaliana columbia
cgttggtttctctaaatttttcaaaaaacccttagaattttcatttttttacgaatccgatggtaactggttctcccgctccaggactcatcggaaacaactcaaagggtacttacatggggggagatttcgcagaatttacgacgggagacttggccggctttaccacgggcggggatttt

SEQ ID NO: 165197 - DNA, 413 bp, Arabidopsis thaliana columbia
cttaaacgttttactttgtgctgcactactcaacctcaatggccgcctcaacaatggctctctcctcccctgccttcgccggtaaggccgtcaagctttcccccgcggcatctgaagtccttggaagcggccgtgtgacaatgaggaagactgttgccaagccaaaagggcccatcaggcagcccatggtacggatctgaccgtgtcaagtacttgggtccattctctggcgaatcaccgagctaccttaccggagagttccccggagactacggatgggacaccgccggactttcagctgaccccgagacattcgcaaggaaccgtgaacctaaagttatccacagcaggtgggccatgctcggagccctaggctgcgtcttccctgagcttttggctagaaacggagtcaa

SEQ ID NO: 165198 - DNA, 423 bp, Arabidopsis thaliana columbia
tgaagctcaatagctatggcttctctttcagtctcttcctcttcaaccatcatcgattcaagagctcctccttctcgactagcctccgcctccgcctcttctccgtcgtgcatttcacttcccacacttccgattcagtctcatacccgtgccgctaaagccactgcttactgtcggaagattgtgaggaacgttgtgacgagagctactactgaagttggtgaagctcctgccactactaccgaagctgagactactgagttacctgaaatcgtcaagactgctcaagaagcttgggagaaagtggatgacaagtacgctattggttctcttgcctttgctggtgtagtggctctttggggttctgctggaatgatttcggcaatcgataggctttcattggttcctggtgttcttgaactt

SEQ ID NO: 165199 - DNA, 407 bp, Arabidopsis thaliana columbia
ttagaatcggaacggacgaagaaggaagacaaggaagaagatcggagatggcatcgaatgcggcggttccgttctggagagcggcggggatgacatatatatcgtattcaaacatctgtgcgaatatcgtgaggaactgtctcaaggagccacacaaagctgaagctcttactcgcgagaaggttcacttctctctctccaaatgggctgatggaaagccccagaaacctgttttgcggtcagacacacctgaagtttgaagtcaactttgagcttatgttcttaagggattcaaaagtaactgagttaccaagatttgtcttctttttatttgtaacaatgtagcttgaatgaaaaacttattttcgatataataattgcacactgagtcttgtgtaaattttttc

SEQ ID NO: 165200 - DNA, 439 bp, Arabidopsis thaliana columbia
cactttcacttcacgtttgcgactgtgtcgtcgtcaagctccggatctcatcggcgtttcatcataattatctgtccatctattcaccgtacgactccgttttagaaatctgtagatgtcaatttgagagaaaagactgtcttcattacaacacatttgggacaacaaggatcactcatggcagtggtggatgttcatcgtttcgctgagtcaatcacttgccatgcttggagtcctgatctctccatggttgctctctgtcctaacaacactgaagttcatatctataaatcattgtctcaagaccactgggagaggttacatgtcctccaaaagcatgaccaaattgtttctggaatagattggagctcaaagtccaacaaaatcggcactgtttctcatgacaggaactcgtacgtctggagcctggaaggagctg

SEQ ID NO: 165201 - DNA, 431 bp, Arabidopsis thaliana columbia
gtgtacctacaggcgaaagcagagacggtgcagaaagtgagtgacattgtaaaagaacaattggctttagctgctgatgttccgctcactgctgaatccaagttctctgctcttggtgccgattctctcgacaccgtggagatagtgatggcgttggaggaaaagtttaacataagtgtggaggaatctgatgctcaaaacattacgaccatccaagaggcggctgatttgatagaggaccttgttcaaaagaaacccgcggcggaaacttcctgaaccggctgtcttttctttcctgacctattcttgccttcagagcgttttattacggtatattagaccgtttgttatttttatttatttcggaagctaagattgggtgttgacaatgagacaactttggtacgttgagattgattctttgtggtgat

SEQ ID NO: 165202 - DNA, 199 bp, Arabidopsis thaliana columbia
ttcataagcttttgagaagaagtgtaaactgtttaggagttgctgaatctggtaaagcagctcaagctactacacaagatgatcttctcacctgggttaagaatgataagagaagaatgcttcatgttgtttatcgtgttggcgatatggaccggacgataaagttttatactgaatgtcttgggatgaagcttctacg

SEQ ID NO: 165203 - DNA, 297 bp, Arabidopsis thaliana columbia
cctcgactcctcccagcgcttcaatatctcccaagacccaaccatcggagggagggggcgagatgatgggattgagttccttggtctttaccgagtttcacagcctcggcttctctgaccttatagtttttgttgcgccactctggattgctgtggctgccggtgttttggttggttgggtttggaggcccaagtgggcttatctcgattctaaactcttgtccaattcacctaaattcctcaatcttcagcttcccacttccatccttaaaacttttttttaccacgttaacccca

SEQ ID NO: 165204 - DNA, 335 bp, Arabidopsis thaliana columbia
ctcttcctcttcgatctctcctgaatcctcaaaccctggagagagagagagagagtgacgggggaagaagatgacttctgctttgtatgcttccgatttgtttaagcagctcaagtcaattatggggacagattcgttatccgacgatgttgtacttgtgattgcaacgacgtctttggcactagtagctggatttgtggtgttgttatggaagaaaacgacggcggatcggagcggggagctgaagcctttgatgatccctaagtctcttatggctaaagacgaggatgaagatttggatttgggatccgggaagactagagtctctatcttct

SEQ ID NO: 165205 - DNA, 374 bp, Arabidopsis thaliana columbia
gcgcggattgctgctcacgacacatattgatgatcactttaaacggaacttatagaccctccgctgccttgccagccacccgcaaggctaacaacgacattacttccatcacaagcaacggcggaagagttaactgcatgcaggtgtggcctccgattggaaagaagaagtttgagactctctcttaccttcctgaccttaccgattccgaattggctaaagaagttgactaccttatccgcaacaagtggattccttgtgttgaattcgagttggagcacggatttgtgtaccgtgagcacggtaactcacccggatactatgatggacggtactggacaatgtggaagctttccttgttcggttgcaccgac

SEQ ID NO: 165206 - DNA, 156 bp, Arabidopsis thaliana columbia
tcgtgctcaaaagccctaaaatcccaattgagaaaatttagacgctcaaggttttgtttacatcttgtccggtggcttgaaacaaattcaacttctgcgtactgtttctctgatgaatcatggatacagcgcccgaacccgttacttacgtctgcg

SEQ ID NO: 165207 - DNA, 316 bp, Arabidopsis thaliana columbia
tcttcctttaaacatctggggagggacattgcggcatagcaagatcctcagggtcatctcgcagaaccttgtgaagaagtgccttgagctcttctttgagaccgctgagaacaaggatgactacaacaagttctactaggctttctctaagaacctgaagctcggtatgcatgaggactcccaaaacagaaccaagattgctgagttgctccgttaccactcaaccaagagcggtgatgaatcgactagtctcaaggactacgtgacaaggatgaaggaaggtcagaacgatatcttctacatcactggtgagagc

SEQ ID NO: 165208 - DNA, 366 bp, Arabidopsis thaliana columbia
gaagaagagaaacgtgttgaggtggcggattatgattggacagaggaatggtatccattgtacttaactaaaaacgtccctgaagatgcgcctcttggcctcaccgtctacgatcgtcaaattgttttgtataaagacggtgaaggaacacttcgttgttacgaagatcggtgtcctcatcggttggctaagttgtctgaaggacaattgattgatgggagattggaatgtttgtatcatggttggcaatttgaaggagagggcaaatgggtcaagatttctttagctttctgcaagtgctaaaattccaaaggctgattgtgtgaagacgtttgttgtgaatggatcatcttggtgtttgtgtta

SEQ ID NO: 165209 - DNA, 453 bp, Arabidopsis thaliana columbia
  unsure (1)..(453): unsure at all n locations
gcgcggattgctgctcaccaccacaatcatcatcattcatcttcaatccttaccaaatccagacccagatcttgtcctataactcttactaaacccatctcctttcgatcaaaacgcaccgtttcatcatcttcttcaatcgtttcttcttccgttgttacaaaagaagacaatctacgccaatctgaaccatcctctttcgatttcatgtcgtacatcatcaccaaagccgaattagtcaacaaagctttagattcagctgttcctctccgtgagccactcaagatccacgaagcgatgcgttactctcttctcgccggtggcaaaagagttagaccagttctctgcatcgctgcttgtgaactcgtcggaggtgaagaatcaaccgctatgccagcagcttgcgccgtcgagatgattcacaccatgtncgtgatccacgacgatctccct

SEQ ID NO: 165210 - DNA, 291 bp, Arabidopsis thaliana columbia
ggaacagaagaaaacagatgtgagctcttcttcttcgtcttcttctctctattttattgtcatcctctcctcacagttactataagctcgtctatggccagagacggtggtgtttcttgtttacgaaggtcggagatgatgagcgtcggcggtatcggaggaattgaatctgcgccgctggatttagatgaagttcatgtcttaggcgttgctgacagtctcgatgatcgtattgtcatagagagatagcttcgtattactctctgcaaagttccgccggagatagtggat

SEQ ID NO: 165211 - DNA, 411 bp, Arabidopsis thaliana columbia
cttggtgaatgcgtcattgaaacgccattatccgccgtgctaatctgaatctcctcccccgtcggaaaaaatggccactggtggaaaagtctccttcaaagtcactctgacttcggatcctaagcttcctttcaaagttttcagcgtaccagaaggagctccgttcacggcggttctgaaattcgcagcagaagagttcaaggttcctccacaaaccagcgccatcatcactaatgatgggatcgggatcaatcctcaacagagtgcaggaaacgtttttctgaagcacggatctgaactaagattgatcccgcgtgatagagttggagctgtgtttgtgatggatccataaatgatgtgtaagcaatgattaaaaactcagttccaaaaaaaacataataatatactgaa

SEQ ID NO: 165212 - DNA, 190 bp, Arabidopsis thaliana columbia
cggacgcgtgggtgcaggagtgaatcgcaaaaccaaatttggaggattctttctgaggggttgctcagtgagaaaatggctgcgaaacggatcttgaaagagccgaaggatctccagaaagaccctccaacctcctgcaatacacgtccagttgctgaagacatgttaaattggcaagctacaataatgg

SEQ ID NO: 165213 - DNA, 437 bp, Arabidopsis thaliana columbia
gctaaaactaaatacaaagaaacagagatgggtttggttacagaggaggtgagagctaaggcagagatgtacaccggagatgagatatgtagagagaagacaaagtgtttcctcaaggaaatatctatgcccaatggtttattaccattgaaggatatagaagaggttgggtatgacagagagtcaggtgttgtatggctgaagcagaagaagagcatcactcacaagttcacagagatagataagcttgtctcctatggaaccgaagtcacagccattgttgagaccgggaaaatcaagaagctcactggagtcaaagccaaggaacttcttatttgggtcactatcaatgagatctataccgaggaacctcttaccaagatcacgttcaagacaccgaccacacctgtccaggactttcctcgtcacaagttttt

SEQ ID NO: 165214 - DNA, 423 bp, Arabidopsis thaliana columbia
  unsure (1)..(423): unsure at all n locations
gcaaaagaagaagagaaacaacaagaagtagtaatggcttcctctatgctctcctccgccgctgtggttacatccccggctcaggccaccatggtcgctccattcaccggcttgaagtcatccgctgcattcccggtcacccgcaagaccaacaaggacatcacttccatcgcaagcaacgggggaagagttagctgcatgaaggtgtggccaccaattggaaagaagaagtttgagactctatcttacctccctgaccttagtgacgtcgaattggctaaggaagttgactaccttctccgcaacaagtggattccttgtgttgaattcgagttagagcacggatttgtgtaccgtgagcacggaaacactcccggatactacgatggacggtactggacaatgtggaagcttncattgttc

SEQ ID NO: 165215 - DNA, 432 bp, Arabidopsis thaliana columbia
cggacgcgtgggaaggaattgaagttgatggaaagactgtgatcaccagtgaccatgctttgaaattagagtctgtccctgagtggattgcaattgtaggaagtggttatattggtcttgagttcagtgatgtttacacagctcttggaagtgaggtaacttttatagaagcactggatcagctaatgcctggatttgatcctgagatcagtaagctagctcagagggttttgataaatccaagaaagattgactatcatactggagtctttgcaagcaaaattactccggcaagggatgggaaaccagttctgattgagcttattgatgccaaaaccaaagaacctaaggattctttggaggtagatgctgctcttattgctactgtgaaagctccattcatcaatggacttgctttgaaaatgttattgt

SEQ ID NO: 165216 - DNA, 364 bp, Arabidopsis thaliana columbia
gtcacttatggcggatatctcgggaaacggctatggcaacgccagagaagaagtagtaatggtgaatctcaaggatgaagtcgaacatcaacaagaaatggaagacattcataacccaagacccttgaagaaacaagactctctactctcagtctctgtccctttcttacaaaagttgatcgcggagtttcttggaacctactttttggtattcaccggttgtgcatcggtggttgtaaacatgcaaaacgacaatgtcgtgactcttccagggatcgctatcgtttggggactcaccattatggtcctcatttactctcttggtcacatctctggtgctcatatcaatccggccgttaccatt

SEQ ID NO: 165217 - DNA, 265 bp, Arabidopsis thaliana columbia
cttggattctttctggtcaccatggcttcggttactttctctgtccccaagggtttcactgaattctcaggattgcgaagctcctctgcttctcttcccttcggcaagaaactttcttccgatgagttcgtttccatcgtctccttccagacttctgcaatgggaagcagtggtggatacaggaaaggtgtgactgaggccaagcttaaggtggccattaatggattcggtaggatcgggaggaacttcctgagatgttggcatg

SEQ ID NO: 165218 - DNA, 375 bp, Arabidopsis thaliana columbia
agaaagcatcactcttttcgtcttctctcgaaaatggcggacaatgattctctagatcagtttttggctgccgccattgatgccgctaaaaaagctggacagatcattcgtaaagggttttacgagactaaacatgttgaacacaaaggccaggtttttgtttctttcctccgctcagataatgtttcaatcactcaataagtgggaatggctacttaagagtgtcaattttttttttgaaattatcttctatggctccttaaattgttgcttttaagtggatttggtgacagagactgataaaggatgtgaagaacttgtgtttaatcatctcaagcagctctttcccaatcacaagttcataggagaagaaac

SEQ ID NO: 165219 - DNA, 376 bp, Arabidopsis thaliana columbia
ataaccaaaccatcatcatcatcatctcttggtgacagaagaaaagagttgaggaacagagaaaatggcagcacaagcacttgtgtcttcttcacttacctactctgttcagacagctagacagatatttggctcaaaaccagttgcgtctgcctcacagaagaagagttcctttgttgttaaagctgctgcaactccacctgtcaagcaaggagccaacagaccattgtggtttgcttcatcgcagagtctctcttacttggatggcagcttacctggtgactatggattcgaccctcttggtctttcagacccagaaagtactggaggattcattgagccaagatggctagcatacggagagatcatcaacgga

SEQ ID NO: 165220 - DNA, 470 bp, Arabidopsis thaliana columbia
agaaacactacgtgtacaaatctcctcctccttcggtcaagcactactctcccccaccggtttatcactccccaccgccaccaaagaagcactacgtttacaaatctccccctcctccggttaagcactactctcctcctccggtttaccactctccaccaccacccaagaagcactacgtgtacaaatctccccctcctccagtcaagcactactctaccccaccggtttaccactcaccaccaccaccaaagaaacattacgtatacaagtctcctcctccttcgggtaagcactactctccccctccggtttaccactcaccaccaccaccaaaaaaacattacgtttacaagtctcctcctcctccggttaagcactactctccctcttcggtttaccattccccacccccacctaaaaagcattacgtttacaaatctccaccatcaccggtgaagcactactca

SEQ ID NO: 165221 - DNA, 432 bp, Arabidopsis thaliana columbia
cccggcggcgaagatgaagtacaacccaagagtgacctcttctcgcagaaagaacaggaaggctcatttcacagcttcctccagcgagaggcgtgtgataatgagctctcctctctccaccgatcttcgtcagaagtacaatgtcagatccatgccgatccgtaaagacgacgaggttcagatcgttcgtggtacttacaagggacgtgaaggcaaagttgttcaggtttaccgtcgcaaatgggtgattcacatcgagagaatcacgagggagaaggtgaatggaacaaccgtgaacgttgggattcagccgtcgaaagttgtgataacgaagcttcgtcttgataaagataggaaatcgcttttggagaggaaggctaagggacgtgctgctgctgataaggagaagggtactaagtttacgtctgagga

SEQ ID NO: 165222 - DNA, 356 bp, Arabidopsis thaliana columbia
gtaaatgagccctatgagggttctgacggggagggggacatgttcgatcaacccgagcaagaaatgccacatgccattaacgttaccccagcagaacaagaagcgattcaacggctcgaggcaatgggatttgatagagccttagtaatagaagcgttcctcgcatgtgaccgaaatgaagaattggcagctaactatctattggagaactcaagtgactttgaagactgagttcacaaaacgttatctcttcttcgaaaaagttttggctcttttcttacgttgaattacatatcttccgtgaattaatgtgtgggatttgatctctctttctctgcgacttaatttgtcctttt

SEQ ID NO: 165223 - DNA, 390 bp, Arabidopsis thaliana columbia
gagagagtgagcggaatcatgacttctccgggaaaatctccgagatccgaccggaaatcaccgacggttgtcaccgtccagccgtcttctcccagattcccgatcagcacacctactgctggagctcaacgtaagatcgggatcgctgtcgatctaagcgacgagagtgcgtacgcagttcaatgggctgttcagaactatctccgatcaggtgacgccgttgttctccttcatgttcaaccgacgagtgtactttacggcgccgattgtggcgctatggatttgtcgccgcagtgggatccaaataacgaagagtcgcagaggaagcttgaggacgatttcgacattggcactaatatgaaagcgagcgacgttgctcagcctttggtt

SEQ ID NO: 165224 - DNA, 75 bp, Arabidopsis thaliana columbia
tggatggcgagacatagacaatggcggacagtgtgtgtttcctacaccacagcgcattgacgggatagcctcacg

SEQ ID NO: 165225 - DNA, 431 bp, Arabidopsis thaliana columbia
ctgagaatgtgggcttcctctacagcaaatgctctcaagctctcttcttctgcctccaaatctcatctcttgccagctttctccatctccagatgcttctcctcagtgttggaaggacttaagtatgcaaattcacatgagtgggtgaaacatgaaggctcagttgctacaattggtatcactgaccatgcgcaggaccatttaggagaagttgtgtttgtggagctgcctgaagcaaacagttcagtgagcaaagaaaaaagctttggagctgttgagagtgttaaggccacaagtgagattctatctccaatctctggtgaagtcattgaggttaacacaaagctcaccgagtcacctggaagctctgatgggtccaaaggaatacaccaagttctgcgaagaagaagacgctgctcactagggtttct

SEQ ID NO: 165226 - DNA, 305 bp, Arabidopsis thaliana columbia
gcattgccaagctttagagatgttcctacctcggagaaacctaatctgtttatcaagaagttgagtatgtgttgcgttgtgttcgacttcaatgatccgtcgaagaatctgagagagaaagagataaagagacagactttgcttgagcttgttgattatattgcaacggtttctacaaagttgagtgatgctgcaatgcaagagattgcgaaagtggctgttgttaatcttttcaggacgtttccttctgcgaatcacgagagtaagattctcgaaacgcttgatgtggatgatgaggaacctgc

SEQ ID NO: 165227 - DNA, 313 bp, Arabidopsis thaliana columbia
agactaggctacgagaaagagggaggcgagattaagtaagacaaatggcagattctaactgtggatgtggctcctcctgcaaatgtggcgactcttgcagttgcgagaagaactacaacaaggagtgcgacaactgtagctgtggatcaaactgcaactgtgggtcaaactgtaactgttgatgaaattattatggtctaaaatcatatatatggcagaaaaattggggaaaatatgtgttttatgctaagagatgtgtgtgtgttgttggaataaagacgtgaaccgtgtgctgcgtttaaactctttttaa

SEQ ID NO: 165228 - DNA, 360 bp, Arabidopsis thaliana columbia
cggacgcgtgggtttttgatgaagatgataaaagaggctttgatggtcctgaaagagaagaacggatcaagcccttatgctatagctaagaagatagaggagaaacacaagtctttacttccagagagtttccgtaaaacactttctctacagcttaaaaactctgttgctaaaggtaagctcgtgaagatcagagcctcttacaagctctcagataccaccaagatgataacgaggcagcaggacaagaagaataagaagaatatgaagcaagaagataaagagatcacaaagaggactaggtcttcttcgacaagggcctaagaagactgtgtctgtgaacaaaccaagaaaagaaga

SEQ ID NO: 165229 - DNA, 357 bp, Arabidopsis thaliana columbia
gagagcaagagcattgttgaggatttgaaggttgatctcaaggctgaggctgaaaaggctgacaacagtggtcctgctgccaccaagaggaaggttatttactgcacaagccttaactggagcgctgatggaagcaccctcttcagtggttacaccgatggagtcattagagtttggggtattggtcgttactagtaatctcatcacttgtgctgtcgttgctctctgctatctgcttgttggttttatctatcacttatgtttttatcgacaactcatgaagtaccttgaggtttttggaaggatgtttgttttcttgtcaatctagggttttgcttctttatcttaatcgtcgag

SEQ ID NO: 165230 - DNA, 443 bp, Arabidopsis thaliana columbia
ctcaaaaggttttacttcactcaaaaatggctttgtctcttatctttctagctctcttagtgttgtgccctagtagtggtcacagccaacgttctccttcaccgggatactacccgagttcccgagtaccgacttcaccttttgatcgtgaattccgtactttatggggctctcaacaccaacgtagagagcaagacgttgtcactctttggctcgacaaatccactgggagtgggttcaagtctcttcgtccataccggtcgggctactttggtgcttccattaagctccaaccaggcttcactgctggagtggatacatccctctatctctcaaacaaccaagagcattctggagaccacgatgaggtcgatatcgagtttctagggacaacgccagggaagccttattcccttcaaacgaatgtctttgttaggggaagg

SEQ ID NO: 165231 - DNA, 394 bp, Arabidopsis thaliana columbia
tcttgttgctgtagaacacaaacagaacaaacaaaaaatcaattgaagagtctctcagtcggtaggggaagcaaatagagaaatggctagctttactgcctccgcttccaccgtctccgccgctcgtccggctctccttctcaagcctaccgtcgccatctctgctcctgttcttggtttgcctccaatgggtaagaagaagggaggagtgagatgttcaatggagacaaagcaaggaaacgtctcagtcatgggggctggagtttcagctgcagcaacagctgctttgacggcggtgatgagcaatcccgcgatggctctggttgatgagaggatgtcaacagaaggaacaggattaccctttggtctaagcaacaacctcttgggttggatt

SEQ ID NO: 165232 - DNA, 409 bp, Arabidopsis thaliana columbia
gttcctcctaatctcaccttcactgttcactctctactctccacttctctcgcttttgtcccaaagtagctatcttcaacaagattcatgtctcttatgatcagatcctcttacgtttctcacatcactctcttccaacctagaaactcaaaaccatcctctttcaccaaccaaatctccttcctttcctcttctaataacaacccttttctcaatttggtctataaacgaaacctaacaatgcaatctgtttcgaaaatgactgttaagagctcgttgattgatcccgacggtggtgaattggtggaattgattgtaccggaaactgagattggagtgaagaaagctgaatcagagacgatgcctaaagtgaagctgaatcagattgatcttgagtgggttcatgtga

SEQ ID NO: 165233 - DNA, 416 bp, Arabidopsis thaliana columbia
atcttattaactaaagagccttttacttgcgccacactctcaccgcaatggccgcctcgacaatggctctctcctctcctgctttgaccggaaaggccgttaagctatccccggcggcctccgaagtatttggaaccggccgaatcaccatgcgcaaagcctccaagcccaccggtccatccggcagcccatggtacggatccgaccgagtcaagtacttgggtccattctccggtgagcctccgagctacctcactggagagttccccggtgattacgggtgggacactgccggtctatccgccgatcccgagaccttcgctaggaaccgtgagctagaagttatccacagcagatgggccatgctcggagccctaggctgcgttttccctgagctattggctaggaacggagtg

SEQ ID NO: 165234 - DNA, 261 bp, Arabidopsis thaliana columbia
ctctatagtttgtttttgttcttcttataatctttatattttcagcaaacgaaagggaagtgtgtcagaaatctcagagggtgagaatcccaatgaggatcttacccgaacctcgaggttcggttccgtgtcttctccttcttgtgtcggttctcttatcagcgactctctcactcgctcgcgtccgccaagttgtcggttacgccgagtgcaagatcaaaacccatcatgcattttgaggacttccagtgacgatcgact

SEQ ID NO: 165235 - DNA, 306 bp, Arabidopsis thaliana columbia
cggacgcgtgggggcaaggaagaagacgttagagttggagctaacaagttcccggagagacagaccaatcggaacatcaggtcagagtgacaaggactacaaggaaccaccaccagctccgtttttcgaacctggtgagctttcttcatggtctttttggagagctgggatcgctgagttcatcgctacttttctctttctctacatcactgtcttgactgttatgggagtgaaaaggtcaccgaacatgtgtgctttcgtcggaatccaaggaattgtttgggctttcggtggtatttatttttg

SEQ ID NO: 165236 - DNA, 435 bp, Arabidopsis thaliana columbia
attttcttccgatcaatacagagagatcagtttctgagagagaagaagatgtctatagaggaagaaaacgttccaacgactgttgactcaggagctgccgatacaacggtgaaatctccggagaagaaaccggcggcgaaaggtggtaaatctaagaagacgacgacggctaaagcaacgaagaagcctgtgaaagctgctgctccaacgaagaagaaaacaacttcctctcaccctacctatgaagagatgattaaagatgcgattgtaacgttgaaggagagaactggatctagtcaatacgcgattcagaaattcatagaggagaaacataaatcactgcctcctacttttaggaagcttttgcttgtgaatctcaagagacttgttgcttctgagaaaattgttaaagtcaaagcttcttttaagattcct

SEQ ID NO: 165237 - DNA, 373 bp, Arabidopsis thaliana columbia
gcgaccgatgatttcgaggatgtgggacatagttcgactgcgaaagccatgctagatgagtactatgtgggtgatattgacacagctactgtgccggttaaagctaagtttgtgcctcctacgtcgacgaaagccgtggctactcaggataagagctcggattttgttattaagctccttcagttccttggtccacttctaatcttacgcttggctttcggcattcggtactacactaagaccaaggctgcttcttcatgaaagattgaattgtggcctaagagaattgctagtgtacgacgtgagtaaactctgactctagctctgcatgtcttagaagacattactataaggctgtatttcgatcaactga

SEQ ID NO: 165238 - DNA, 199 bp, Arabidopsis thaliana columbia
gagaaagagagacagagataatggcgtacagtgcgtgtttcctacaccagagcgcattggctgcatcagccgcacgatcatcatgttcctcctcatcccagcgtcacgtgtcgctctccaaacctgttcagatcatctgtaaagctcaacagtctcatgaagacgataactccgccgtctcccgccgtcttgctctcac

SEQ ID NO: 165239 - DNA, 442 bp, Arabidopsis thaliana columbia; identical to SEQ ID NO: 124538

SEQ ID NO: 165240 - DNA, 460 bp, Arabidopsis thaliana columbia
gtacttgttaaacttgaatcccgtgttcgcgactttgcgatagattctctcaaatccaattccaatggcggatccatcttctcaaaaccctaacctcgccactccccctcctccttcttctccttcaccaacccatcaaattcaatctggaacctcggaattatcgccaccgtctcgaccgccttgctctaccttgtcctttctcaagactgctaaccgaccaaaactccgtgtgacatctgaattcgacagcgatagtctccttttcttaaacaaagtgtcttgtaagctcttcgataaccttgccaagcttaaactctcgtttcagaacaattcccagcgcgagatttcacagcctcaggtctcttttacttccaaacacgtttctgttctctatgatgtcgaagagaagaatactttcattaagagcactctcgatgttcacccgcgtcttcagctc

SEQ ID NO: 165241 - DNA, 462 bp, Arabidopsis thaliana columbia
aaaaaaagaaaacacaaaaacaaagattataatggcttcctcaaccatggctttgtcctcccctgccttcgccggaaaggctgtgaagcctgccgcatcagatgtcctcggaagcggccgtgtgaccatgaggaagactgtcgccaagccaaagggtccatcaggcagcccatggtacggatctgaccgagtcaagtacttgggtccattctgcggcgagcccccgagctaccttaccggtgagttccccggtgactacggatgggacaccgctggtctatccgccgacccagagaccttcgccaggaaccgtgagctagaagttatccacagcagatgggccatgctcggagccctaggctgcgttttccctgagctattggctaggaacggagtgaaattcggagaaagcggttgtttcaaggccggtcacaagacttaacgacggagattggctacttg

SEQ ID NO: 165242 - DNA, 471 bp, Arabidopsis thaliana columbia
atgatgatagtctccaagctatcctggatctgacagctgactggactccagcagagagagagatgctaaggaacaaagtcccagttactggcttaaagactccttttagggatggtttgttaaagcatgtcgctgaagatgtcctgaaactcgcaaaggatggtttagagcgcagaggctacaaggaagccggtttcttgaacgcagtcgatgaagtggtcagaacaggagttacgcctgcggagaagctcttggagatgtacaatggagaatggggacaaagcgtagatcccgtgttcgaagagctgctgtactaagaaaatgggacgtgaacaaaaggtgtctataaacctttgggtgtgagtttatgctatctgaagaattcgagtctccggaataaggatttttttttttgttgtatacggattttaaaaactgattttggtttagaaattcgaagctttgaaaact

SEQ ID NO: 165243 - DNA, 450 bp, Arabidopsis thaliana columbia
  unsure (1)..(450): unsure at all n locations
gtcataaccatcggagctgagagattccgttgtcctgaggttctgttccagccatcgctcatcggaatggaagctcctggaatccatgaaacaacttacaactccatcatgaaatgtgatgtcgatatcaggaaggatctctatggaaacatcgttctcagtggtggttccaccatgttcccaggaattgctgaccgtatgagcaaagagatcaccgctcttgcacctagcagcatgaagatcaaggtggttgcaccgccagagagaaaatacagtgtctggatcggaggatcaatccttgcatccctcagcaccttccaacagatgtggatttcaaagagtgagtacgatgagtcaggtccatcgattgttcacaggaaatgcttctaagtgtgtcttgtcttatctggttcgtggtggggagtttgtacaaanaaatctattttccct

SEQ ID NO: 165244 - DNA, 309 bp, Arabidopsis thaliana columbia
gaaaaaggaaattcaaccacaaccttcgtcttctcttgaaactctcctcatctctctcaagaaagattcaagttcgagtcttagctatgtctggaaactcagaaggactgttagagagctcaggcggcggcgtgggaggttccgtcgaggaggaaaaagatatgaagatggaggaaaccggtgaaggagccggcagcggaggaaaccggtggccaagaccagagactttagctctattgagaatacgttcagagatggataaagcttttcgtgactctactctcaaagctcccttatgggaagaaattt

SEQ ID NO: 165245 - DNA, 397 bp, Arabidopsis thaliana columbia
caagttagtcataaaaaaaaaaaaaacacaaaaaagtttcaatggccgcctcaacaatggctctctcctcccctgctttcgccggaaaggctgtgaacctttcccctgcggcatcagaagtccttggaagcggccgtgtgacaatgaggaagactgttgccaagccaaagggtccatcaggcagcccatggtacggatccgaccgagtcaagtacttgggtccattctctggcgagtcacccagctaccttaccggagagttccctggagactacggatgggacacagctggtctatccgctgaccccgagacattcgcaaggaaccgtgagctagaagttatccacagcaggtgggccatgctcggagccctaggctgcgtcttccctgagctttt

SEQ ID NO: 165246 - DNA, 296 bp, Arabidopsis thaliana columbia
  unsure (1)..(296): unsure at all n locations
gacatgctccaatgctactcagtatgtgttctgggacagtgtgcatccttctgaagctgccaatgagattcttgccactgccctaattggacagggcttttctctcctcggttgatctcacgtatttttcttatattctcttttcaaatcgctgtttctatcacacattgagtcatacatttgtttttctttgaattatgtatcaaagcatcactgttttactaaaaatgtattgaaacttattacaagttaaaaaaaaaaaataaaaaaaattaaataaaaaaanaaaattaaaa

SEQ ID NO: 165247 - DNA, 354 bp, Arabidopsis thaliana columbia
aacgagcaaaagaagaagagaaacaacaagaagtagtaatggcttcctctatgctctcctccgccgctgtggttacatccccggctcaggccaccatggtcgctccattcaccggcttgaagtcatccgctgcattcccggtcacccgcaagaccaacaaggacatcacttccatcgcaagcaacgggggaagagttagctgcatgaaggtgtggccaccaattggaaagaagaagtttgagactctatcttacctccctgaccttagtgacgtcgaattggctaaagaaagtgactaccttctccggaacaagtggaatccttgtgttgaaatctagttagagcacggatttg

SEQ ID NO: 165248 - DNA, 157 bp, Arabidopsis thaliana columbia
agctctcttggttttttgctaaaaacagagcattttctctctagctctcactgtttctttaccataagtttcgtcatattagtgcatgcaagtgtaagggatggtgatggaggaaggaagaagcataaaagaatggctttacgtgcataagaacaaa

SEQ ID NO: 165249 - DNA, 289 bp, Arabidopsis thaliana columbia
gaagaaaaccctcaaatggagaaagcaaaacaagattgattcgatccttggagaggagtttggggaggatcttgccactgcagcttacatgaacggtgtggaccgcgagtcccacccagtttgttacaatgtccacagcgaggagctttaccagacgattgggtcggagaagaacagagagaagttcttgagatggaggtttcagctgatggagaagggaatccagaagcttaatcttaaaccaggaggtgttacttttcttttccagatccactatcttaataaacgc

SEQ ID NO: 165250 - DNA, 63 bp, Arabidopsis thaliana columbia
gaaagagagaagagagacagagataatggcgtacagtgcgtgtttcctacaccagaacgcatt

SEQ ID NO: 165251 - DNA, 442 bp, Arabidopsis thaliana columbia
gtccgagtcaacaatggacgtctacggcatgtcttcaccggacttgcttcgtatcgacgaccgtctcgatttctccaacgacgaaatcttctcttcctcttccaccgtcacttcctccgccgcttcctccgccgcttcttccgaaaaccctttcagctttccttcttccacctacacttctcctactctcctcaccgacttcactcacgatctctgcgttcccagtgacgacgcagctcatctcgaatggttatcgcgattcgttgacgattcattctccgatttcccagcaaatcctttaaccatgaccgttagacccgagatttcattcaccggaaaacctagaagtcgccgatcaagagcaccagcaccttccgtagctggaacttgggctccgatgtctgaatcaggagcttgtcactccgtcggtaaacctaaaccg

SEQ ID NO: 165252 - DNA, 439 bp, Arabidopsis thaliana columbia
ctgcttttgaatttcaaaccttcacataaaaaaaatacttttgaatccgtgtttcattcatcgaatggttttccgataactatggctgaggaaatcaagaatgttcctgaacaggaggtgccaaaggtagcaacagaggaatcatcggcagaggttacagatcgtggattgttcgatttcttgggaaagaagaaagacgaaacaaaaccagaggagactccgatcgcttcagagtttgagcagaaggttcatatttcagagccggagccagaggttaaacacgaaagtcttcttgaaaagcttcaccgaagcgacagttcttctagctcctcaagtgaggaagaaggttcagatggtgagaagaggaagaagaagaaggagaagaagaagccaactactgaaagtgaggtaaagggaggaagagaagaaagggtttatg

SEQ ID NO: 165253 - DNA, 246 bp, Arabidopsis thaliana columbia
  unsure (1)..(246): unsure at all n locations
aacacttactgcacaccacgacgagcttgctgaagattcaccacctgtcacgtccacgccggtggttgtaacggagcatgcggtggancctaccacccagcttccagtggaacatccgcaggagaagaaggggattttgtcaaagatcaaagagaagcttccaggttatcatgccaagaccactgaagaggaagtgaagaaagaaaaagagtctgatgattaatcaatatagttaaagaatgaata

SEQ ID NO: 165254 - DNA, 434 bp, Arabidopsis thaliana columbia
  unsure (1)..(434): unsure at all n locations
cttcatctctctctctctcgccagattttcatcgactcgatttcagatttaagatctgagatacaaaactccgacgtgtctacgttcagcggcgatgaaacagctcccttcttcggcttcctcggcgctgcagccgcactcgttttctcctgtatgggagctgcttatggaaccgcaaagagtggtgttggtgtggcttctatgggagttatgagacctgagttggtgatgaaatctattgtccctgttgttatggctggagtgttgggtatctatggattgatcattgctgttatcatcagtaccgggattaaccccaaggctaagtcttactacctctntgatggatacgcacatctctcgtctggtctggctggtggtcttgctggtctctcagctggaatggccattgggatggtggtgatgccgtgtca

SEQ ID NO: 165255 - DNA, 485 bp, Arabidopsis thaliana columbia
  unsure (1)..(485): unsure at all n locations
ccgaagccgaaaaaatgccggcggcgaagaggactcccaaggttaaccgtaaccctgacctagtcaggggagttggaaaatattcgaggtctcagatgtaccacaagagaggtttgtgggctatcaaggccaagaacggtggcgttttccctcgtcacgatgctcagccaaaggtcgacgctccggttgagaagcctgccaagttttatccggcggaagacgtcaagaagccgcttgttaacagacgcaagcctaagcctaccaagctaaaagccagcatcactccaggaactgtgttgatcattcttgctggtagattcaagggtaagagagttgtcttcctcaagcaactntcttctggtttgcttcttgtaacaggaccattcaagattaatggtgttccatngagacgtgttaaccaagcctatgtgattggaacctccacanagattgacatttctggagtcaacactgagaaattcgat

SEQ ID NO: 165256 - DNA, 350 bp, Arabidopsis thaliana columbia
cttttggtcttgctgtcggtggtcaaatcacagtcatcaccggagttttctactggatcgctgagcttctcggctccaccgccgcttgtttcctccttaaatacgtcaccggtggattggcggttccaacccacagcgttgcggctggactaggatcgatagaaggagtagtgatggagatcatcatcaccttcgctttggtctacactgtctacgccaccgccgctgatcccaagaagggttctctcggaaccatcgctcctctcgccattggtcttatcgttggtgccaacatcctcgccgcccgtccattcttcggtggatccatgaacccagcacgttccttttga

SEQ ID NO: 165257 - DNA, 391 bp, Arabidopsis thaliana columbia
gttcgagttagctacgcgcttcatttgatgctcgtgttcccgattgttttctaccctcttcggattaacattgacgggctcttgttcccttccgctcgatcattatctacctcaaatgtgaggttcggttgcctcactgccggtctcatctctgtaatcttcttgggtgcaaacttcatcccaagcatttgggatgctttccaattcactggagcaaccgccgctgtttgtctcggcttcatcttcccagcttctatcatactaaaggatcgtcatgacaaagcaacaaacagggacacaaccttagctattttcatgattgttcttgcggtattgtccaatgcaatcgccatttacagcgatgcttatgcgctattcaagaagaacgctc

SEQ ID NO: 165258 - DNA, 235 bp, Arabidopsis thaliana columbia
  unsure (1)..(235): unsure at all n locations
agatttcatattttccgattcaccttcgcaatccaattttttttgttgcttggattttgtttgtgtgtaatcgtgtggtaagatgtctcggtgttttccgttcccgccacctggttatgtactaaacggaatccgcgatgaggctgtgatcgtatcatcgatcaagggggtggaggagaaagctaagaaagaacaaaggaggaaggatagaagaagtgataagaaggattnanna

SEQ ID NO: 165259 - DNA, 426 bp, Arabidopsis thaliana columbia
  unsure (1)..(426): unsure at all n locations
gatgaagtacagatgaatgctccataaaccctactcttcttcttttacctccagcttcgattgtaccattccttgtttgtgaaggcattttagttggtaaggatgataactggatacagcacgccaagtgcacatgttctaatgagctctcgggcattcaagtcatcatcatatagagctgcagcaggacagactcaacattatcttgctcgaagttcattgcctgtcgtaaagaactcgtggggatcaccaccttcacctttcaatgagcttccgagagtgtcaagaggtgtgcctctgtcatatctctcagcctcgtcttctctgcttctgaatggagaacaaggtagtctatctggtacattacctgtgttacctgtccgcagaaaaactcttttgactncacgagcgtcaaaagatgtacct

SEQ ID NO: 165260 - DNA, 381 bp, Arabidopsis thaliana columbia
  unsure (1)..(381): unsure at all n locations
caacaacaaatcttaaacgttttactttgtgctgcactactcaacctcaatggccgcctcaggagatggctctctgctccggtgccttcgccggtaaggccgtcaagctttcccccgcggcatctgaagtccttggaagcggccgtgtgacaatgaggaagactgttgccaagccaaagggcccatcaggcagcccatggtacggatctgaccgtgtcaagtacttgggtccattctctggcgaatcaccgagctaccttaccggagagttccccggagactacggatgggacaccgccggactttcagctgaccccgagacattcgcanggaaccgtgaactagaagttatccacagcaggtgggccatgctcggagccc

SEQ ID NO: 165261 - DNA, 320 bp, Arabidopsis thaliana columbia
  unsure (1)..(320): unsure at all n locations
caatcccgtcgtccaaggaggaggagcaagatcgatgatgaacatggaggaaacttcggagcgaaggcccttctgtagcggccctgaggatctctacgacgatgacttttacgacgaccagttgcctgaaaagaagcgtcgcctcactaccgaacaagtgcatctgctggagaaaagcttcgagacagagaacaagctagagcctgaacgcaagactcagcttgccaagaagcttggtctacagccaaagcaagtggctgtctggtttcagaatcgccgagctcgttggaaaacaaaacagctngagagagactacgatc

SEQ ID NO: 165262 - DNA, 375 bp, Arabidopsis thaliana columbia
ggcgacggaaacggaagttgtagctccggtaacggtaagcaacggcggaagcaaaggatgttgcaaggacggtggtcctggttgcgcgagtcctctcgccgctatgtctggtccatcggagaaacttatctacgtaaccgccgtctacaccggaactggaatagataaaccggattatttggcgacggtggatgtagatccaagctcgccttcgtattcaagtgttattcatagattaccaatgccttttgttggtgatgagcttcatcattctggttggaactcttgtagttcttgccatggtgatgcttcttgtgatagacgttatctcgtgttaccgtctcttatatctggtcgcatttatgcgattgatac

SEQ ID NO: 165263 - DNA, 307 bp, Arabidopsis thaliana columbia
gtgctacggcacgactcaatacactagactcttacaacatcgttgataagaagtggtttcattgttcgactccaggagattcccttaccgcaagaggaggagcagggctcgaagtggtgcaagggaaggtatgggttgtgtatgggtttaacggatgtgaagtagatgatgttcattactacgatcctgttcaagacaagtggacacaagtggaaacattcggtgtgaggccttccgaaagaagtgtattcgctagtgcggctattgtgaaacacattgtgatttttggaggtgaaattgcgatgga

SEQ ID NO: 165264 - DNA, 378 bp, Arabidopsis thaliana columbia
ccgcaacatccgccgctgctgcagctgcttcttccatcatgggtactcgggtggctcccggtatccatcccggttcaggtcggttcacagccgtgttcggtttcggaaagaagaaggcagctcccaaaaagagtgccaaaaagacggtgactacggaccggcctctttggtacccaggcgccatttctcctgactggcttgatggttccttggttggagattacggttttgatcccttcggtttaggcaaaccggccgagtatcttcaattcgatatcgattcactagaccagaatctggctaagaacttggccggagacgtgatcggaacccgtacggaagctgccgacgccaaatcgacgccgtttcaggcgtaca

SEQ ID NO: 165265 - DNA, 456 bp, Arabidopsis thaliana columbia
gcttcttcctcaattccgccgtcaaccgccgtaacctccgtcgttcgcaaatctctcctcctctcaaccaccttctccttccccgcttcttcattgtctccctccacgaaactaccacaaagacacattcaaagattgctcctagcttcctcctccgcatccgcatccaccgttccttccgattccaaaccggcgaagaaagaaacagtctacttcgacggcggagctcattacggagatctattagccaatctcattctaggtctaaccatcctttggctcccactaaccttagctgcagtgtctcgagcttttaaccttcgttacaggttcactaacctccgcgtgacggttatttcgggactcaccggagatgatcggagcgatttctcgtacaaagtgataaaagacgttcaagttgtgccgaggttcatcggagaatggggagatatcatc

SEQ ID NO: 165266 - DNA, 409 bp, Arabidopsis thaliana columbia
caaccttcctctttgatatatcttcgccatttctcgtcgaaattagggattttgttcattaaatcttcctgatttggaaggtattttcattgtctgcttgaaaaaaattaaatctttgtcggttcattatgagtaattggagaagacaaaaacccagaaacaacaacagcaataattatagtcgtcaacgagggacgacgatgacgcaatcatcatcaaagccacctcttgctaattgcaagatctctgttccagcgtgggagaaggatttttgtgctgtgattggttcagttccatggtggaaagttgtagaggccaagcggtttatgcacatatacgatagagtggtccaatgggacgactcaactggtgaagactcattcaagaacgcttaatctcgtttctgggc

SEQ ID NO: 165267 - DNA, 287 bp, Arabidopsis thaliana columbia
cccggtcgaccacgcgtccgcggacgcgtgggagaaggctaagatcttacgtgagaagtgtcaaatggtgttaccgcgtcgaaggcgtggaccattaccagaagtgtcggcatcttgttcagcagtatctcgatgccactcgcggcgttggttggggcaaagaccaccgtcctatctctcttcacggtcctaagccagtagctgttgaagaagctgaatgatgttgtgtgcgtgattgatctttggtgagtgagagctttgattaccatacatgaatggagtctttg

SEQ ID NO: 165268 - DNA, 283 bp, Arabidopsis thaliana columbia
ctcctctctctctctctcacacaacacaaacaactcttgagagagagaaacaaatctttcacttgacacttctctccaaatcctcatctcattcttcatcctaaacatttgctcattctcacgatgagccataaccaaaaccaacctcaccggccagtcccggtccatgtcacaaacgccgagccaaaccctaacccaaacaacctcccaaactttctattatccgtccgtctcaaatacgtaaaactcggttaccactacctaatctccaacgctctctaca

SEQ ID NO: 165269 - DNA, 397 bp, Arabidopsis thaliana columbia
cttcatcattccctaccaccggattcaatggcggcgaaaattcccggagtgatcgctttgttcgacgtcgacggtactctcacagctccaaggaaggaagctactccagaattgctcgattttatccgagaattgcgaaaggtcgtcactattggagtcgtcggtggatctgatctaagtaagatatctgagcagcttggcaaaacagtcacaaacgactatgattattgtttctctgagaatggtcttgtcgcccataaagatgggaaatccattggaattcagagcctgaagctgcaccttggagacgataaactcaaggagttgataaattcacgctgcactacattgcagacctggatattccaataaagaggggaacatttattgaattccg

SEQ ID NO: 165270 - DNA, 384 bp, Arabidopsis thaliana columbia
aagaagagaaacaacaagaagtagtaatggcttcctctatgctctcctccgccgctgtggttacatccccggctcaggccaccatggtcgctccattcaccggcttgaagtcatccgctgcattcccggtcacccgcaagaccaacaaggacatcacttccatcgcaagcaacgggggaagagttagctgcatgaaggtgtggccaccaattggaaagaagaagtttgagactctatcttacctccctgaccttagtgacgtcgaattggctaaggaagttgactaccttctccgcaacaagtggattccttgtgttgaattcgagttagagcacggatttgtgtaccgtgagcacggaaacactcccggatactacgatggac

SEQ ID NO: 165271 - DNA, 352 bp, Arabidopsis thaliana columbia
caaacacataaaagagagatttaatacaaaagaaagagaaaaaagaaagatatggcaggactcatcaacaagatcggagacgcactccacattggaggaggcaacaaggaaggtgagcacaagaaggaagaggaacacaagaaacacgttgacgagcacaagagtggtgagcacaaagaaggtattgttgacaagatcaaagacaagatccacggtggtgaaggtaaaagccacgacggagaaggcaaaagccacgacggtgagaagaaaaagaagaaggacaagaaggagaagaaacatcatgatgatggtcaccacagcagcagcagtgacagcgacagcgattaaggtg

SEQ ID NO: 165272 - DNA, 486 bp, Arabidopsis thaliana columbia
  unsure (1)..(486): unsure at all n locations
gaaaaaacaaaaaagaagagaaaaatggagaattctcagagtcagggtaaaaacaagaagaagaggctaacacaagatcaagttagacaactggagaagtgcttcactatgaacaagaagcttgagccagatctgaaacttcaactgtcgaaccagcttggtctacctcaaagacaagtcgctgtctggttccaaaacaagcgagccaggttcaagactcagtctcttgaggtccaacactgcactcttcagtccaagcacgaagcagctctctccgacaaggcaaagttagagcatcaagtgcagtttctccaagatgagctgaagagagcaaggaatcagcttgctctgttcacanatcaagattctcctgttgataattctaatcttggttcttgtgatgaagatcatgatgatcaagtggtggtattcgacgagctttacgcttgctttgtagcaatggacattgatcttcatcaacctaat

SEQ ID NO: 165273 - DNA, 386 bp, Arabidopsis thaliana columbia
aaacgaaatcgtggtcttactctctcttctgagttctgacctgagcacacacacagagattttgattgtgtcactcatggaacccaatatttaccaacttgccctcgcggctctattcggagcttccttcgttgctgtttctgggtttttcatgcatttcaaggcactgaatctagtccttgagcgtggtaaggagcgtaaagagaaccctgatggagacgagcctcaaaatccgaccttggtgaggcggcggagccaagttagaaggaaggttaatgaccaatatggtcgcagtcctgcttctcttccagatgccactccttttaccgatggtggcggcggcggcggcgtgatacaggacggagcaacgtcacgttatgtcgatg

SEQ ID NO: 165274 - DNA, 458 bp, Arabidopsis thaliana columbia
atttgttattctattgttatcacataataatttaaaataaatatgctattatgattgtatacaatacacatttattaaatagaagataacaaaaaaaaactaaacgacgatgtgggtacgagttgatattatgtgattttagaaagataacttttgtctttacattacgtattatataattgaaccaggtgtggatgcgttagaaacaagtatcgtcattagaagaccataattgtaatagcttattgtaatggccacgtaattaacttttaacacttcttcaaaaccactatggttcgtccatcgtgagtatatttaaagaaactttggtttcattttatttcaaacactatatattttaaaacattgtgagaaaatcacaataaaatttaatgaaagattttggagttcctggtaaatgttttaatgttttaaacttctattttaatttttaattt

SEQ ID NO: 165275 - DNA, 369 bp, Arabidopsis thaliana columbia
ctcaaaagaggttttagaagcaatgaaaggttcaacctcgacaaggcctgctatatttgcaatgtcaaaccccacaaaaaatgctgaatgcacgcctcaagatgcattttcgatattaggcgaaaatatgatttttgcgagtggaagcccattcaagaatgtggaatttggaaatggtcatgtaggacattgcaaccagggaaacaacatgtatctatttccaggtattggacttggcactcttttatctggtgctcccattgtctccgacgggatgcttcaggccgcatccgagtgcctagcagcatacatgagcgaagaagaagtgctagaggggattatataccctccaatattaaggatactaga

SEQ ID NO: 165276 - DNA, 430 bp, Arabidopsis thaliana columbia
  unsure (1)..(430): unsure at all n locations
gaagctcaacgacatcttctccggtggaggagacggcgacggaacaaccgatagtttccttgaagatggatcggagggtctctgtgctctctccaccacccagagaatgtacggattcgccgcgtctttagccactggtctgctacttatgttcctgtctatgattgtatttgggatccccatcaaatttgcactgctcttcacatttggaaatgttctagctattggaagcacagctttcctcatgggacctgagcaacagatgagtatgatgtttgaccctgttcgtttcttagctacatccatttatatcggatgtgtcgntgttgcactcatttgcgctctcctgatccatagcanaatcttaacggtccttgcgatcttatgtgagatttgtgcactgatatggtacagcctcagttatattcca

SEQ ID NO: 165277 - DNA, 293 bp, Arabidopsis thaliana columbia
  unsure (1)..(293): unsure at all n locations
gattgaactggtgccttgccttaaggataactatgcttatatcttgcatgacgaggatcctggtaacagttggggtggttgacccttctgaagctnaacctattatcgattcgttgaagaggagtggtcgtaatctaacatatatattaaatacacatcatcattatgatcacactggtgggaatttggaattaaaagacaggtactgtgcaaaagtgattggctcagctatggataaagaccggattcctggaattgatatggccttgaaggaaggtgacaaaaggatgttt

SEQ ID NO: 165278 - DNA, 275 bp, Arabidopsis thaliana columbia
caaacaatgtcgacattgccaaagtcgcaccagcttatcacctctacactcctcaggaggttgaagccgtcatcagtcgtctatgaagaaataaaccgccattctcttcctgttatcttaccttgtctgttcggtaatttatcaggcttctgtctgcttccggttctctaaaccaaaaattagtttcgtttaatcagataatggattttatcgagttgagttttattgagctttctatctacatttttttgtcgttttcaacaagaagttaaaac

SEQ ID NO: 165279 - DNA, 399 bp, Arabidopsis thaliana columbia
cggacgcgtgggcgagtggttaacccatgcaaggtatgagaactgcctgtcaaatgagcaaggccgagtgttagcagcaaaacttggtgtgacagatcttttctgggactgggacttgccgagaaccagagaaggattctaccggttccaaggctcggtcgcagcggccgtggtccgtggctgggcctttgcacagatcgcagacatcatctggatggaaacggcaagccctgatctcaatgaatgcacccaattcgccgaaggtatcaagtccaagacaccggaggtcatgctcgcctacaatctctcgccgtccttcaactgggacgctttcggtatgacggatcagcaaatggttgagttcattccgcggattgctaggctcggattttgttggca

SEQ ID NO: 165280 - DNA, 392 bp, Arabidopsis thaliana columbia
gcacaacaaaaagcaagaatatataccactttgtgaacttcagagatcctatagcaatggcgaacctaccgattcttttggattactggccaagtatgttcgggatgagggctagagttgcgttgcgagagaaaggtgttgagtttgaatacagagaggaagatttctcgaacaagagccctttactcctccagagtaatcccattcacaagaaaatcccggttctggtccacaacggtaaaccggtatgtgaatctcttaacgttgtccagtacgtcgacgaggcttggcccgagaagaacccgttcttcccttccgatccttacgggagagctcaggctcgattctgggctgatttcgtggacaagaagttcaccgacgcccaattcaag

SEQ ID NO: 165281 - DNA, 441 bp, Arabidopsis thaliana columbia
ccagagtaaagcttgaaactttggactaaaagaatggcgtctttgggtgtgtcggaaatgcttggtactccccttaacttcagggcagtttcaagatcgtctgctccgttggcatcaagcccatccacgttcaagactgttgctctcttctctaagaaaaagccagctcctgctaagtccaaggctgtctctgagactagcgatgagctcgccaagtggtatggtcctgacaggagaattttcttgcctgatggtcttttggatagatcagagatcccagagtacttaaacggtgaagttgctggagattatggttatgacccatttggtcttggaaagaagcctgagaactttgctaaataccaagcttttgaattgatccatgcgagatgggctatgttaggagcaggctggttcatcattcctgaagctttaaacaaa

SEQ ID NO: 165282 - DNA, 260 bp, Arabidopsis thaliana columbia
gcttctcggtggtcttgctgttcgcagggcctgttatggtgttttgagatttgttatggagagtggagctaagggatgtgaggtcatcgtgagtggaaagctccgtgctgcacgtgctaagttcatgaagttcaaggatggctacatggtttcatctggtcaaccaactaacgaatacatcgatgctgcagtgagacatgttttgctcagacagggggtgttgttaatccaggtgaatatcatgctttgctggtacccta

SEQ ID NO: 165283 - DNA, 375 bp, Arabidopsis thaliana columbia
cttgttgctgtagaacacaaacagaacaaacaaaaaatcaattgaagagtctctcagtcgttaggggaagcaaatagagaaatggctagctttactgcctccgcttccaccgtctccgccgctcgtccggctctccttctcaagcctaccgtcgccatctctgctcctgttcttggtttgcctccaatgggtaagaagaagggaggagtgagatgttcaatggagacaaagcaaggaaacgtctcagtcatgggggctggagtttcagctgcagcaacagctgctttgacggcggtgatgagcaatcccgcgatggctttggttgatgagaggatgtcaacagaaagaacaggattaccctttgggctaagcaac

SEQ ID NO: 165284 - DNA, 440 bp, Arabidopsis thaliana columbia
agagacagagataatggcgtacagtgcgtgtttcctactccagagcgcattggcttcatcagccgcacgatcatcatcttcctcctcatcccagcgtcacgtgtcgctctccaaacctgttcagatcatctgtaaagctcaacagtctcatgaagacgataactccgccgtctcccgccgtcttgctctcactctcctcgtcggcgccgctgctgttggttccaaagtatctcctgctgatgccgcctacggtgaagctgcaaacgtgtttgggaagccaaagacgaacacagacttcttgccatacaatggagatgggttcaaagtgcaggttccagcaaaatggaacccaagcaaagagattgagtatccaggacaagtccttaggttcgaagacaacttcgatgctactagcaatctcaatgtcatggtcacttcta

SEQ ID NO: 165285 - DNA, 409 bp, Arabidopsis thaliana columbia
aatctcactctctctcattttcgactttagaaatttcgaccaacgcagatccagctccgacgaagaaaccaaggaacagtagaaaggcgttgaagcagaagaatgagctcgtggagacgccaccatcgcctgtctccgtcaaggggaagtcagcgaagtctttcgagcaagatctgatggagatgcagacaatgttggagaagatgaagatcgagaaggataagacggaggagttacttaaggagaaggatgagattctgagaaagaaggaggaggagctagagaccagagacgctgagcaggagaagctcaaggtggagctgaagaagcttcagaagatgaaggaattcaaacctaacatgacttttgcttgcggtcagttatctctcacacaggcttgttcaggaaa

SEQ ID NO: 165286 - DNA, 369 bp, Arabidopsis thaliana columbia
caacacaacacaaacacatttctgttttcttcattgtttcaaaccataaaaaaaaacacagattaaatggaatcgagtagcgttgatgagagtactacaagtacaggttccatctgtgaaaccccggcgataactccggcgaaaaagtcgtcggtaggtaacttatacaggatgggaagcggatcaagcgttgtgttagattcagagaacggcgtagaagctgaatctaggaagcttccgtcgtcaaaatacaaaggtgtggtgccacaaccaaacggaagatggggagctcagatttacgagaaacaccagcgcgtgtggctcgggacattcaacgaagaagacgaagccgttcgtgcctacgacgtc

SEQ ID NO: 165287 - DNA, 247 bp, Arabidopsis thaliana columbia
acaaaacccaattagccggagatggccgcaacattcgttgttgctgcagctgcttcttccatcatgggtactcgggtggctcccggtatccatcccggttcaggtcggttcacagccgtgttcggtttcggaaagaagaaggcagctcccaaaaagagtgccaaaaagacggtgactacggaccggcctctttggtacccaggcgccatttctcctgactggcttgatggttccttggttggagatt

SEQ ID NO: 165288 - DNA, 371 bp, Arabidopsis thaliana columbia
tactatcttcctcttaaaccaaccattcaaaatgttgcgtactatcttcctcttatctcttctctttgctctatccaatgcctctgttcaagatttctgtgtcgcaaacctgaaacgcgctgaaacccctgcgggttacccttgcattcgtcccattcatgtcaaagctacagactttgtcttctctggcttaggcactcctggaaacactacaaacatcatcaacgccgctgtcacacccgctttcgcagctcagttcccgggtctgaacggtctaggcctctctacagctagacttgacttagctcctaaaggtgtgatcccaatgcacactcaccctggtgcctctgaggttctctttgtccttactg

SEQ ID NO: 165289 - DNA, 360 bp, Arabidopsis thaliana columbia
cgttaaccagttagcagattgacacgaaatgtggttactgtgaattggagctgaggcaagacaagaccctcacttgttcaccacgaacaactttgccggaagacagatctgggagtttgatgccaacgggggctctcctgaggaactcgccgaggtcgaggaggctcgcctcaatttcgcaaacaacaagtcacgtttcaaggctagtcccgatctcttctggcgtaggcagtttctgagggagaaaaagttcgagcagaagatcccgagagtgagaatagaggatgcagagaagataacatatgaagacgcaaagacggcactaagaagaggagtactctattacgcggtatgtcaggc

SEQ ID NO: 165290 - DNA, 375 bp, Arabidopsis thaliana columbia
gtggattttgtatggagccgccgagttcgagaccttagtgtaacctccgtcatgggaggacctttacaaaatcaatcttatgccatcggagctattccttaagttccgcaaagagcttcaaggccttcgcgtcggcgtcaatctcgagttatataacgaacccacgaatgattaccacgcaaagcttgttttgaagcctctatgtccagaaaggaagtggaagtttatatatgagccgctacaccaagaagttcgtgttttatcgaagaagattcctgtcaccagatttctaaacctccaagtttttttgttgtatgccttcttgtgtctctttgtggaaggtggaaatacatgttgtggaatcttatcatatgc

SEQ ID NO: 165291 - DNA, 408 bp, Arabidopsis thaliana columbia
tctttctaaaacacaaccatgactgtttcttcatcttcatgggctctcatggctctctttctaatggtttcttcaacaatggtaatggctattcctccacgcaaggccattgatgtaccatttggtcgtaactacgtcccaacttgggcttttgaccaccagaaacagttcaatggcggttccgaacttcagcttatcctcgacaaatacactggcacaggatttcaatcaaaggggtcatatttgtttggacattttagtatgcacataaagcttccagctggtgacacagccggagttgtcacagctttctatctatcatctaccaacaatgagcatgacgagatagactttgagttccttggaaacagaacaggacaaccagttatattacagacaaaatgtttt

SEQ ID NO: 165292 - DNA, 443 bp, Arabidopsis thaliana columbia
gtcccttacgagtcgaaaggcacaggagggtttatacgagcttctattcgatttgtggcggtttcgacccgatcaagaattatgttctacagcactttctatgccatgaggagcgatgatttctcgtcattgtgtgggcctgtgatcgatgatgtcaagcttataagcgttcgtaaaccatagatgaatcaccaatcctattacaagaaaatgcatcgtgtggtcttcttttattttccttaaactgtctttggtgtgtgttggattttattgaaacgagaaggtgaaaaaaacagagttttatttacgagagttagggttttatataggcagatgggcctttgcttatattgtattttcttgtatgagaaggcaaaagaaacgttggctatatcttatgtatctaggccttttaatttttatggaagagttacataacttac

SEQ ID NO: 165293 - DNA, 430 bp, Arabidopsis thaliana columbia
gagaagcagaaatggcgaaatcactcctttgttcatcaaccttaaaccctttcttctccaccactctctcctcttcgaagaagaaccaaattgcatactcgggaaacagcaagaaccagacatcgtcgtctctgttatggaaaagaagggaactgtcgcttggatttatgagcagcttagttgcgattggtctcgtgagtaatgacagaagaagacacgacgcgaatgcagcgattcttgaagctgatgacgatgaagagcttctcgagaaagtgaagcaagatcggaaaaagaggattgagagacaagctgttcttaattctgctgtcaaggaaaaggggtatttgcaggatcttgtttacaagttgagcaaggtaggacaagccattgagaacaatgatctaccagctgcagtttggttttggggaaa

SEQ ID NO: 165294 - DNA, 334 bp, Arabidopsis thaliana columbia
  unsure (1)..(334): unsure at all n locations
cttgtcttgtgtgctgtttaaattgctctgnttacttctattctgatgtaaaatgcaaattgttacctttatcctatcaaataaagtataattcttttctcaaaaaaaaaaaaaaaaaaaaaaaaaaaaaaaaaaaaaaaaaaaaaaaaaaaaaaaaaaaaaaaaaaaaaaaaaaaaaagggnggacaatataaataatccaaaacttactaacccgttcaagcgatccaataagctttttaaaaatgccacttaatttcaattcatttgccggtctttaacaatttacaacactttaaaaaccctgctttcacccaacttaattctcttgata

SEQ ID NO: 165295 - DNA, 385 bp, Arabidopsis thaliana columbia
aaccaagacaaaaagaacaatggcagcgagtgcatcttcatatggcgagccagctaaggagcagcttctcctccgcttctctttctcagcgtctcgccgtcccgaagggcatctccggtgctcctttcggtgtttctccgaccaaaagagtctcttccttcactgtccgagctgttaaatccgacaagacaacattccaagtagttcaaccaatcaacggtgatccattcatcggaagtttggaaactccggtgacatcaagcccattgatcgcgtggtacctttccaacctccctggataccgtaccgccgtcaaccctctcctccgcggtgtggaagtgggcctggcccatggtttcttcttagtgggcccattcgtcaaagc

SEQ ID NO: 165296 - DNA, 384 bp, Arabidopsis thaliana columbia
gggccatgctcggagccctaggctgcgtttttctttagctattggctaggaacggagtgaagttcggagaagcggtttggttcaaggccggttcacagatcttcagcgacggaggattggactacttgggcaacccgagcttggtccacgctcagagcatcttagccatttgggctactcaagttatcctcatgggagctgttgaaggctacagagtcgccggagatggtccattgggagaagcagaggacttgctttacccaggtggcagcttcgacccattgggcctcgctactgaccccgaggctttcgcagaagtggaggtgaaggagctcaagaacgggagggtggctattgtctctatgtttggattcttcgttcaag

SEQ ID NO: 165297 - DNA, 397 bp, Arabidopsis thaliana columbia
caacaacaaatcttaaacgttttactttgtgttgtactactcaacctcaatggcccgcctcaacaatggctctctcctcccctgccttcgccggtaaggccgtcaagctttcccccgcggcatctgaagtccttggaagcggccgtgtgacaatgaggaagactgttgccaagccaaagggcccatcaggcagcccatggtacggatctgaccgtgtcaagtacttgggtccattctctggcgaatcaccgagctaccttaccggagagttccccggagactacggatgggacaccgccggactttcagctgaccccgagacattcgcaaggaaccgtgaactagaagttatccacagcaggtgggccatgctcggagccctaggctgcgtcttcct

SEQ ID NO: 165298 - DNA, 392 bp, Arabidopsis thaliana columbia
cttctctaagaaaaagccagctcctgctaagtccattgctgtctctgagactagcgatgagctcgccaagtggtatggtcctgacaggagaattttcttgcctgatggtcttttggatagatcagagatcccagagtacttaaacggtgaagttgctggagattatggttatgacccatttggtcttggaaagaagcctgagaactttgctaaataccaagcttttgaattgatccatgcgagatgggctatgttaggagcagctggtttcatcattcctgaagctttaaacaaatatggcgctaactgtggccctgaagctgtctggtttaagactggtgctttgcttcttgatggaaacacattgaactactttggcaagaacatcccta

SEQ ID NO: 165299 - DNA, 433 bp, Arabidopsis thaliana columbia
aatgggagacgctgcgatccgtaccgtcgtcgaagtccatcactcatctccgacgcaggccgtcgtctatctttgcggcggtgcctctctggctttaggttggttgatgtcggttcctggagcgtcgaacacgcttctcgagtccgtggttccttattcgagagtatctatggttcaattactcggcagggttccgagccaacactgtagccaagcattggccaaggagatggccttgttagcctacaattcgggcgcttaagctctctaaaccaggatatccggttctcggtgtcgggtttacgggatcaattgcaacttctcgatctaagcgtggagaacacaggttatgcaattttgtttccttgcttttatagcaatataccttgctgtttgaaatgaaagccaatcacaattatgctatgttctttat

SEQ ID NO: 165300 - DNA, 273 bp, Arabidopsis thaliana columbia
ctcaacatttgtaagatttctacacaacccatttcaggttttatgttttctattcacagattatttcgattgcagacaacatttgttttcttcttctttctgataatacgattttcgattcgatctcattgcgattattaagatttctgattgtttcagatgctatattatgaatcttaatctgatggttgaagattcatagatttaaaactgctatctttttgcctatagagcctctatatgaatctgctttcttcattccatagcttaaga

SEQ ID NO: 165301 - DNA, 336 bp, Arabidopsis thaliana columbia
aatttcgtcggaagaagaaatcgccatggtagccgttacagtaaacctcgcgaacatgacatggacgtcgttaaattcaaatccagcaatctctttctccatgttaagcggaatcagaaacttgggcatgttacctttcaggagatgtctaaagccgacagttatcggaatcgcgtcgtggccaccactccgttgttcttctgttaaggctatgtcttcatcatcgtcttcgtctggatcgacattggaggagactgttaaaacgactgtggcagagaaccctgtcgttgtttactccaaaacctggtgctcatactcgtctcaagtgaagtcctt

SEQ ID NO: 165302 - DNA, 413 bp, Arabidopsis thaliana columbia
aaagaaattgatctgcttattgtcattctgttcgtttataatggatcattatacggtgatttgaaacgcatatgtgagactgaactcggcatagtctctcaatgttgcctgacaaagcatgtctttaagatgagcaaacaatacatggctaatgttgcgctgaagattaatgtgaaggttggaggaagaaacacagtgcttgttgatgctctatctaggcggattcctctagtcagtgatcgacccaccattatatttggtgctgatgttacccaccctcaccctggagaggattcaagcccatctattgctgctgttgtggcatctcaggattggcctgaaatcactaaatatgctggattagtttgcgctcaagcgcataagcaggagctcattcaggatctgttcaaaga

SEQ ID NO: 165303 - DNA, 412 bp, Arabidopsis thaliana columbia
agccgcaagactcctttcagattcttacttgcagttatgggtaaagagaagtttcacattaacattgtggtcattggtcatgttgattctggaaaatcgaccacaactggtcacttgatctataagcttggtggtattgacaagcgtgtcatcgagaggttcgagaaggaggctgctgagatgaacaagaggtccttcaagtacgcatgggtgttggacaaacttaaggccgagcgtgagcgtggtattaccatcgatattgctctatggaagttcgagaccaccaagtactactgcacagtcattgatgccccaggacatcgtgatttcatcaagaacatgattactggtacctcccaggctgattgtgctgttcttatcattgactccaccactggaggttttgaggctg

SEQ ID NO: 165304 - DNA, 271 bp, Arabidopsis thaliana columbia
gcaataataaaaactcactcactctcactttttttatttcttcaacaaaaaaaacctaaagctctcttttctctccagatttcgattcccgaggctcgagagaaaaccgtaaatctcttctccgttctcgatgttgttcgtaaggaagctgagaactgtgactgcctccaagggttccaggtttgtcactcattgggaggaggaactggatctggtatgggaacattgttgatctctaagatccgtgaagagtacccagatcgcatgatgc

SEQ ID NO: 165305 - DNA, 370 bp, Arabidopsis thaliana columbia
aaaatgaagatccaaatactctgtttcaccactctgttcttagctatcttcacctctcaagtcaccactgcttacaaattcaaattcgattactttggtaacggcaccgatccaatatcattccatggagacgctgagtatggtcctgacactgatggcaagagccggtccggagccatcgcattgactcgagacaacattcctttctctcatggtcgagccattttcaccactccaatcactttcaagcctaatgcttcagctctttacccttttaaaacctctttcactttctccattactcctaaaacaaaccctaatcaaggtcatggccttgctttcatcgtcgtcccaagtaaccaaaacgacg

SEQ ID NO: 165306 - DNA, 383 bp, Arabidopsis thaliana columbia
acagaatatgctagatgagatcgaacgggagttttatagctgctacaagtggtcttaaagagctaaagattaatgctcacactgtcaaagatgatgttgatgataaagaacaagatgccaaaagacaaagtatgctagatgcaattgaacgtgagtttgaagccgttaccgagagttttaaacaacttgaagatatcgccgataacaaagctgaaggagacgacgaatctgcaaagaggcaaagtatgttggatgagattgaacgtgaatttgaagctgctacaaatagtcttaagcaactaaaccttgacgatttcagtgaaagagatgacagtgcagaatctgcaaggagaaatagtatgcttgaagctatcgaacgcgag

SEQ ID NO: 165307 - DNA, 454 bp, Arabidopsis thaliana columbia
ttggatccagctggcacaggctcattatacaatgattgttaagcagatattgtggttaatcacgtcatttctttgatatacgcaggtgttagtccaatggctattgctgttcaatccccatatgttgctcaggttcaacttctcagagaaaggctggatgattttccagtggctgatggagttgaggtcgcaaccattgacagctttcaagggcgggaggctgatgcagtgatcatctcaatggtacggtcaaacaacctaggtgcagtgggattcctaggggatagcagacggatgaatgtagccattacaagagcccggaagcacgtggcagtggtatgtgacagctccacaatctgccacaacacgttcctagcaagactgttgcgccacatacgctatttcgggagagttaagcatgcagaccctggtagcttgtgagggtcaggactag

SEQ ID NO: 165308 - DNA, 374 bp, Arabidopsis thaliana columbia
cctcagtctctgttcttagatcccttgttggttccaaatcttccgataaaaatgtcgggtaaaggagaaggaccagctatcggtatcgatcttggtaccacttactcttgcgtcggagtatggcaacacgaccgtgttgagatcattgctaatgatcaaggaaacagaaccacgccatcttacgttgctttcaccgactccgagaggttgatcggtgacgcagctaagaatcaggtcgccatgaaccccgttaacaccgttttcgacgctaagaggttgatcggtcgtcgtttctctgacagctctgttcagagtgacatgaaattgtggccattcaagattcaagccggacctgccgataagccaatgatcta

SEQ ID NO: 165309 - DNA, 357 bp, Arabidopsis thaliana columbia
gtaagtactatcaagaagcagaagatggcccaaattgtttatagcacaaggagggaaaggagccaacctatgggacgatggatcgacacatgacgccgtgaccaagattcagctcgcagcaggcatagacggaattcaatatgttcagtttgattatgtcaagaacggacaacccgaacaagctcctcttcgtggtaccaaaggccgtgttctcccagctgatccgtttgtgattaaccatccagacgaacatctagtttctgtagaaggttggtatagccctgaaggtatcattcaaggaattaagttcatctccaacaagaagacttctgatgtcattggatccgatgagggtac

SEQ ID NO: 165310 - DNA, 373 bp, Arabidopsis thaliana columbia
tctttcgcttttttcacacctcaaaatcaaagattctatcacgatttcggaggaagcttcgattctacctattttcagatctgaaatagttgtgtttgagaagcgggattggtgatcggagctggaatttggttggtaatcggaggtcagagagaagtcaacggatatgccggaggaagaatcgatagatatcaaattcaggttgtacgatggctccgatatcgggccttttcggtattctgcggcttctactgttgactttttgaagcagagggtcgtctctgattggcccaaaggcaaaacagttgttccaagggggataaacgaagtgaagctgataagctcgggtaagatcttgaagaacaacaagact

SEQ ID NO: 165311 - DNA, 348 bp, Arabidopsis thaliana columbia
caatcagaaaacaagtagaaactttaaaacgagagtgatataaagaaatggcgacatcgggaacgtacgtgacggaggttccgttgaaaggatcggcggagaaacactacaagagctggaagagcgagaaccatgtcttcgctgacgccattggccaccacatccaaaatgtcgttgttcacgaaggcgaacatgactctcacgggtctatcaggagttgggactacacatatgatggaaagaaggagatgttcaaagagaagagagagatagatgatgagaataaaacattgacgaaaagaggactggatggtcacgtgatggagcatcttaaagtatttgatatca

SEQ ID NO: 165312 - DNA, 451 bp, Arabidopsis thaliana columbia
cttatacgatctcttcccaaattattgattttttttacccatttctctcatcgcacggtgatattgagaatcgccgacctgaatcgatcggaaaactttctctgattaccggcggtcaacaccgctgaacacatatgtttgtttgacgacctcttctctccgcgatctttacctcaacaacgagatctgtttccacgaaagaaaggaggatgtcgacgccagcaaggaagaggttaatgagggatttcaagaggttgcagcaagacccacctgcgggtattagtggtgctccacaggacaacaacattatgctctggaatgctgtcatatttgggcctgatgacacaccatgggatggaggtactttcaaactctcactgcagttctctgaagattatcccaataaaccaccaacagttcggtttgtgtcacggatgtttcattctaatat

SEQ ID NO: 165313 - DNA, 446 bp, Arabidopsis thaliana columbia
gaaaaaaaaaaatcatttcttctctgaaacgaaattccaaagaaacgagaagaagaagctatggcggatcagctaactgatgaacagatctctgagtttaaggaagcttttagcctcttcgacaaagatggagatggttgcatcaccacaaaggagctgggaacagtgatgcggtcactagggcagaacccaacagaagctgagctacaagacatgatcaacgaggttgacgctgatggaaacggaaccattgacttccctgagttcttaaacctaatggctaaaaagatgaaggacacagactcggaggaagagctgaaagaagctttcagggtgttcgacaaagaccagaacggtttcatatccgctgcagagcttcgccatgtgatgacgaatctaggtgagaaactgactgatgaagaggtcgaggagatgattcgtgaagc

SEQ ID NO: 165314 - DNA, 376 bp, Arabidopsis thaliana columbia
cgttcaagccatcgtcactggtaagggaccgatatgttttccttgctgaccatttggccgatccagttaacaacaacgcatgggccttcgccaccaactttgttcccggaaagtgagccaagttttatctgtattttgcttcagtctttgcttcgtgagtgtgagaggagaaagagagcttgtttagatgtaaaatttgcaagactttgtatttttttcattaatcaaataactcgtttttctctcaaaaaaaaaaaaaaaaaaaaaaaattaaaaaaaaaaaaaaaaaaaaaaaaaaaaaaaaaaaaaaaaaaaaaaaaaaaaaaaaaaaaaaaaaaaaaaaaaaaaaaaaaaaaaaaaaaaggggcggcccttt

SEQ ID NO: 165315 - DNA, 341 bp, Arabidopsis thaliana columbia
ctcagagaagcaggagagacattcacagtaaccatgtccgtctctctgttcactgccttcaccgttctctcactctgtttacacacttcaacatctgagtttcagctgtccaccatatcagctgcaccttcgttcttgcctgaagctccatcgagtttctcagcttctaccccggccatgtctccagatacctctcccctgttccctactccaggttcaagcgaaatgtctccttccccgtcggaatcgtctatcatgccgacaatcccctcaagccttagtccaccaaacccagatgctgtcactcctgatcctctgctcgaagtttctccaagtggatc

SEQ ID NO: 165316 - DNA, 384 bp, Arabidopsis thaliana columbia
ctcttccaaactctcatctctctctctttgcctctcctcatttgcattatctatctcccccaacattctctcgcatgcggctcttgcaacccacggaagggcggaaagcactcccctaaagcccctaagctaccagttcctccggtgaccgtccctaagctaccagttcctccggtgaccgtccctaagctaccagtccctccggtgaccgtccctaagctacccgttcctcctgtgaccatccctaagctacccgttccaccagtgactgtacctaagctacccgttcctcctgtgaccgtccccaagctacccgttcctccagtgaccgtccccaagctacccgttcctccagtgacagtccctaagctacccgttcccccc

SEQ ID NO: 165317 - DNA, 408 bp, Arabidopsis thaliana columbia
caacaacaaatcttaaacgttttactttgtgctgcactactcaacctcaatggccgcctcaacaatggctctctcctcccctgccttcgccggtaaggccgtcaagctttcccccgcggcatctgaagtccttggaagcggccgtgtgacaatgaggaagactgttgccaagccaaagggcccatcaggcagcccatggtacggatctgaccgtgtcaagtacttgggtccattctctggcgaatcaccgagctaccttaccggagagttccccggagactacggatgggacaccgccggactttcagctgaccccgagacattcgcaaggaaccgtgaactagaagttatccacagcaggtgggccatgctcggagccctaggctgcgtcttccctgagctttttgc

SEQ ID NO: 165318 - DNA, 338 bp, Arabidopsis thaliana columbia
attgaaccttatcatttagagggaggagaaggacgtttgatctaaggagacgatgaagatcttccacgttccttgtctgcaagacaactactcttatctgataatcgatgagagcaccggagacgcggcggttgtggatccagttgatccggagaaggtgatcgcatcggctgagaagcaccaagctaagatcaagttcgtactcactacgcatcatcactgggatcatgccggtggaaacgagaagattaagcagttggttcctgatatcaaagtatatggaggttctctggataaggtgaagggttgaactgatgcggttgataatggtgacaagc

SEQ ID NO: 165319 - DNA, 446 bp, Arabidopsis thaliana columbia
ccccaccaaaaaaaaaaaaaacagaagccatgaacttcttgtctcttctaactccttcatcatctccttctccacatcttcaatctcctgcaacattcgaccacgatgatttcctccaccacatcttctcctccactccttggccctcatccgttctcgacgacactcctccaccaacttccgattgtgcccccgtcactggattccaccaccacgacgccgattcaagaaaccagatcactatgattcctttgtcacataaccatcctaatgacgctctcttcaatggcttctccaccggatctctccctttccacctccctcaaggatcgggaggtcaaacgcaaacgcagtcgcaggcgacggcgtcagccaccaccgggggtgcaacggcgcaaccttagacaaagcctatagtccgagctaggagaggtcaagccactgat

SEQ ID NO: 165320 - DNA, 372 bp, Arabidopsis thaliana columbia
gttctgacaccattgataacgtgaaagccaagatctaatacaaagagggtattcctccggaccagcagagattgatcttcgccggaaaacaacttgaagatggcagaactttggccgactacaacattcagaaggagtccacactccacttggtcttgcgtctgcgtggaggtatgcagatcttcgtgaagactctcaccggaaagaccatcactttggaggtggagagttctgacaccattgataacgtgaaagccaagatccaggacaaagagggtatcccaccggaccagcagagattgatcttcgccggaaagcaacttgaagatggaagaactttggctgactacacaattcagaaagagtccacac

SEQ ID NO: 165321 - DNA, 358 bp, Arabidopsis thaliana columbia
gagaagaatagtttgatcatcttgtgagaaaaataatggctgcttcagtgatgctatcttcggtgacattgaaaccagctggtttcacggtggagaagacggcggctagaggattaccgtcgctcacaagagctcgtccctccttcaaaattgtcgccagtggcgtcaagaagatcaagaccgacaagcccttcggaattaacggcagcatggacttgagggacggcgtcgacgcctccggcagaaagggcaagggatacggtgtttacaagtacgtcgacaagtatggagctaacgtcgatggatacagtcctatttacaacgagaacgagtggtcagcgagtggtgacgtgtacaa

SEQ ID NO: 165322 - DNA, 321 bp, Arabidopsis thaliana columbia
tgagctctttgcaatttttagggttttcttcgataatagaaaaaaaaaatccctgatcttcctcttagtgatttctcctttcgagatccctgagattccgagaaaatctgcatttttttctcgtgattctctagctctgttttgtgttttacacagctcttttgaatcaggtttgtgtgtgatagcgttgttgtggtaaaagctttgtacatttgaagatttagagatgataagttttcaggtaacctacttttaatggacagttcaacaacaagcagtgataagaaaacactcaagaggtggttcttcatctgacaactg

SEQ ID NO: 165323 - DNA, 434 bp, Arabidopsis thaliana columbia
gaaaaacaaaacaaatccattttttttattactctgttttttcccctgtttttaagtttatttacttcttactctgttttctgctctgttttagctttaaacagaagactaaagaagatggttgcggttgaaagagttgagagtctagcaaaaagcggaatcatatcgattccaaaagaatatattcgtccaaaagaagagctcgagagcatcaacgatgttttcctagaagagaagaaagaagacggtcctcaagttcccacaatcgatctaaagaacatcgagtcagacgatgaaaagatccgtgagaattgtattgaggagctgaaaaaggcatctttggattggggagtgatgcatttgatcaaccatggaataccagctgatctaatggagcgtgtcaagaaagccggaaagagtttttagtttgtctg

SEQ ID NO: 165324 - DNA, 457 bp, Arabidopsis thaliana columbia
aagaaagagaaaaaagaaagatatggcaggactcattaacaagatcggagacgcactccacattggaggaggcaacaaggaaggtgagcacaagaaggaagaggaacacaagaaacacgttgacgagcacaagagtggtgagcacaaagaaggtattgttgacaagatcaaagacaagatccacggtggtgaaggtaaaagccacgacggagaaggcaaaagccacgacggtgagaagaaaaagaagaaggacaagaaggagaagaaacatcatgatgatggtcaccacagcagcagcagtgacagcgacagcgattaaggtgaggaagtgaggaggatcgcttgaataaaacagatctggttctggctattattaattaatgttgctgtatgttcttatcatcttaaagagaggttaaagacaggagaaccgtgcatctatctttgtttgttatgt

SEQ ID NO: 165325 - DNA, 443 bp, Arabidopsis thaliana columbia
  unsure (1)..(443): unsure at all n locations
aatatatatatattattatattataataatattatattattatgaataatttcttcatcataaaaaaataaaaaattaaaggccataaaaaaaatggatctaaaaagtataaaaagatttgagattaccttaactggaactggcttagttttcattcattgtatgaactaatgaaccaagaggttaagcttttttatttatttattttttctattcttttgactatatgaaaaattcataatcatattgacaacagtgtatggaccaaatataattctctcatagataaatggatctatttatccctgacgcacacacgactgtatttttttctttattctgattgtatctacatatttgcagtacgttcttttttttttgggggggggttgntaactcaacggtagagtacttcgcttttaagtgcgagtagcattctttac

SEQ ID NO: 165326 - DNA, 433 bp, Arabidopsis thaliana columbia
tgttgtctaaagcgaaccaacaaaaagtcttcatctttattcattcaatggcttcttcgtcttctatgcagatggttcacacttcccgctccattgcccagattgggttcggtgttaagtcgcaattagtttctgcaaatcgaacaactcaatcagtttgctttggagctcgttcctctggaattgcattatcttcgagattgcactatgcatcacccattaagcaattttctggggtttatgcgaccaccaagcatcagagaaccgcttgtgttaaatccatggctgctgaggaagaagaagtaatcgaacctcaagctaaagtgacaaacaaggtttactttgatgtggaaattggaggtgaagttgctggcagaattgtgatgggtctctttggagaagttgtgcctataaccgttgaatactttccgtg

SEQ ID NO: 165327 - DNA, 452 bp, Arabidopsis thaliana columbia
  unsure (1)..(452): unsure at all n locations
aaacattacaaaacgttacaatggcttctatggctcntgcagttacagctcttcttattacacttaatcttcttttcttcacctttgtaacctccacaaaatgtccaccaactactcctaaacccccaaaaaccccgaaatcgcctaagaaggctcctgccgtgaaacccacttgtcctaccgacacacttaagcttggtgtttgcgcagacttattgggcctagttaacgttgttgttggttctccaccaaagactccttgttgtacacttcttcaaggtcttgctaatcttgaagctgcggtttgtctctgcaccggtcttaaagccaatgtcttggggattaaactcaatgttcctattgatctaaccctgcttgtgaactattgggggcaagaaagttccctaatgggtccaaagttcttgaagatttgtgacctttaaaagaggaaa

SEQ ID NO: 165328 - DNA, 436 bp, Arabidopsis thaliana columbia
  unsure (1)..(436): unsure at all n locations
gcgaggaagtaccttgacaatcccttgaatattgatctggttggagaccaagatgagaagctcgcagagggtatcaaactttatgcaatcgcaaccacatcgacatcaaaacgcactattctaagcgaccttattacagtgtatgcgaagggtggcaagaccattgtttttacccaaactaaaagagatgcagacgaagtttctcttgcattgtcaaacagtatagctaccgaagcacttcatggagatatatctcagcatcaaagagagagaacactcaatgctttccgtcaagggaaattcaccgtattagttgccactgatgttgcatctcgtggacttgacatcccgaacgtagatctagttatccactatgaacttnctaatgacccagaaaactttgtgcaccgttctggtcgtactgggcgtgcaggga

SEQ ID NO: 165329 - DNA, 458 bp, Arabidopsis thaliana columbia
cggacgcgtgggcgaacaaacaaattataaacccattttccttcataaatttctaaaataaaaccccttaaactttcattcacatcatccaacccccaatgggtcgaatcttgaaccgtaccgtgttaatgactcttctagtcgtaacaatggccggaacagcattctccggtagcttcaacgaagagtttgacttaacttggggtgaacacagaggcaaaatcttcagtggaggaaaaatgttgtcactctcactagaccgggtttccgggtcgggttttaaatccaagaaagaatatttgttcggaagaatcgacatgcagcttaaactcgtcgccggtaactccgctggaaccgtcactgcctactacttgtcatcggaaggaccaacacacgacgagatagactttgagtttcttggtaatgaaacagggaagccctatgttcttcacactaat

SEQ ID NO: 165330 - DNA, 251 bp, Arabidopsis thaliana columbia
  unsure (1)..(251): unsure at all n locations
gtctgtgttcgtggacagttatggaacaggaaaganatcagacaaggagattcttgagattgtgaaggagagttttgatttcaggccaggtatgatctccattaacttggatctgaagagaggaggtaatggtaggttcttgaagactgctgcctatggtcactttggaagggacgatgctgatttcacctgggaggtagtcacgccactcatgtctaacaagggccaagctttgaacctgtgagcctctg

SEQ ID NO: 165331 - DNA, 364 bp, Arabidopsis thaliana columbia
tcgatcatcatcatcatgagagaaatcctcacgttcttgcggccaatgcggtaaccaaatcggttccaaattctgggaagttatctgcgacgaacacggcgttgatcccaccggacgttacaacggtgattccgccgatcttcagctcgaacgtatcaatgtttattacaatgaagcttctggtggtcgttacgttcctcgtgctgttctcatggatctcgagcctggtactatggatagtatcagatctggtccctacggtcagattttccgtcctgataacttcgtctttggtcaatccggtgccggaaataattgggcgaaaggtcattatactgaaagtgcttgacttaattgatgctgt

SEQ ID NO: 165332 - DNA, 521 bp, Arabidopsis thaliana columbia
gagagaacctaaaaagaagagaagagaaagagagactcaatatgtcggtgacatcaacggtggaggagaaccaccagaaaaatccatcaacgccggcggcggtggaggagaagaagaagaggagatgggtgttttggtatttaaggtgtaggaaattttaattttttttaattttttttttttttttttataattttttatttttatttttttttttatattatttttgttttttttatattttgtgttttgtttttttttattattttttattgtttgtattgtgtttttaaagatgttattatatttattagattttattttaaatttttttaatttatttttgttttttatatttaatatatttttggttaaatttttttgttttattttattattgttttttatttattttttgttattatatttttatttggttatatttatttttattttttttattttattttttaatattttttattattatttttttatttattttttttattttttttttt

SEQ ID NO: 165333 - DNA, 385 bp, Arabidopsis thaliana columbia
ctctcttctttcttcttcttcaatacaatacaatttaattaacagagagataaggttagagcaaaacactgtctgaaacaaacaacaaaaaaatggcttgctctaatctaacaacaatgtgggtttcatcaaaaccatctctttctgctgattcatcttccttatcattccgatctgttctcaagtgcccaactaacacttcctcacctccttcacgagcttcctctgtttcaccactccaagcgtctcttcgtgagctcagagaccgtatcgattcagtcaaaaacactcaaaagatcaccgaagctatgaagcttgtcgctgcagctaaagtcaggagagctcaagaagcttgtgtcaatggacgaccattcttagaaaccct

SEQ ID NO: 165334 - DNA, 499 bp, Arabidopsis thaliana columbia
  unsure (1)..(499): unsure at all n locations
ncnngacccacgcgnntccgctcnntctctctanntctctatcnnntctatctacatctttctttctttcttcntctcagtttcgaatcatttcgttgaatcgtgattcttttctcgacgaaannaaagcgtttcaattnntcagaaatttcgactaccgattgggttgctttgttcaattagaagagtgcgaaaaaggatggcgacggttaatgggtacacagggaatactccggcggcgactacaccggcagccaccggatcaaagcaatctgctcctccgactaagaccgtcgatagccactccgttctaaaaaggctgcaatctgaactaatgggattgatgatgggagctgatccggggatatctgcgtttccagaggaagacaacatattttgctggaaaggaacaattacaggaagcaaagatactgtgttcgaaggaactgagtacagactctcactcactttctctaacgattatccttttaagtctccc

SEQ ID NO: 165335 - DNA, 232 bp, Arabidopsis thaliana columbia
ggcgtctcttgcaaccgtcgccgctgtgaatccatccgtcgtcataaaaggactcggcggcagctcactcgccggagctaagctctccatcaagccttcccgcctgagctttaaacccaaatccatccgggctaatggtgtggtggctaagtatggagacaaaagtgtctactcagacttaacagatttgggtaacacaacgggtgtctgggacgtataccactctgatgct

SEQ ID NO: 165336 - DNA, 369 bp, Arabidopsis thaliana columbia
  unsure (1)..(369): unsure at all n locations
cttgccaaggttatcaatgacagatttggaanngttgagggtcttatgactacagtccactcaatcactgctactcagaagactgttgatgggccttcaatgaaggactggagaggtggaagagctgcttcattcaacattattcccagcagcactggagctgccaaggctgtcggaaaggtgcttccagctcttaacggaaagttgactggaatgtctttccgtgtcccaaccgttgatgtctcagttgttgaccttactgtcagactcgagaaagctgctacctacgatgaaatcaaaaaggctatcaaggaggaatccgaaggcaaactcaagggaatccttggatacactgaggatgatggtgtc

SEQ ID NO: 165337 - DNA, 383 bp, Arabidopsis thaliana columbia
aattaaagaggtttcttcttatagaaatgaattttttttattcttccttgtcaacttggacaaccctaatgacattgggttgtcttctgcttcattcatccatttccagtgctcagctaaccccaactttctatgacaatacatgtccaagcgtctttaccatcgtacgggataccatagtaaacgagctaagatcggatcctcgtatcgctgcaagcatccttcgtcttcacttccacgactgtttcgtcaatggctgtgatgcatcgatcctgttagacaacacaacatcctttcgaacagagaaagatgcggctccaaacgcaaactcggctcgaggatttccagtgatcgatagaatgaaagcagcagtagagacagca

SEQ ID NO: 165338 - DNA, 384 bp, Arabidopsis thaliana columbia
  unsure (1)..(384): unsure at all n locations
aaaacacaaatcacagtgcctctcagataaagagttcacagaggctacttgctcgagttgcatggttcctgaggatttggacttacccaggcttgctcctgaccgtactcaagatcttgtacaattcgctaaagaatttttcatcaatcttccaagctcaacaatcatctgcattagtttgcttggaggtgctttaaaccaattgttacaggagctaatgcatattcgttcacctgtttgtgcctgggtgctcatatcacgcctaaacccagaaagtcaaccggttgccacacttttacctgtagattcgattgtagaagatgacagtgcanatcttagctctaccgaagcgactcaagtcaagagtttaaaggggcccctgct

SEQ ID NO: 165339 - DNA, 308 bp, Arabidopsis thaliana columbia
gaccaagatgcagcctcttactgtagtggtttattcattgcttcacttgagttctgccccagtgaaagggttatgctgacaacttctagcgaatggggagagatggtgaccaaactcactgtaccaaaggagtggaaagagtggcagatatatgcactgctgttttgcttgttcatggcatcagtgatagctgcatacgtattcttcgagaactcagattcgttttggaagttaccaatgggaaaagatcaaaaaagaccaaagattagtctatttggaggttccttctacacgccttttgaggatca

SEQ ID NO: 165340 - DNA, 457 bp, Arabidopsis thaliana columbia
cccaaaagttccattctttttcacaaagccattgtgctgttttctccatttggatcaaaatggttgctgagaacaataaaaacaaggacgtaacactctctgcatcaatggacaacaacaacaacaacatcaaaggaactaacattcatcttgaggttcatcaaaaggaaccagctttggtcaaacctgaatccgagacacgaaagggcctttacttcttgtcgaatcttgaccagaacatcgccgtgattgttcgtacaatctactgtttcaaatccgaggagagagggaacgaggaagcagtccaagtgatcaagaaagctctgagtcaagttcttgttcattactatcctctcgctggacgccttaccatcagtcctgaaggtaaactcacagttgactgtaccgaagaaaggagtgtgtttgtggaagcagaagcaaactgtaaaatggatga

SEQ ID NO: 165341 - DNA, 456 bp, Arabidopsis thaliana columbia
aagttagtcataaaaaaaaaaaaaacacaaaaaagttttatatggccgcctcaacaatggctctctcctcccctgctttcgccggaaaggctgtgaacctttcccctgcggcatcagaagtccttggaagcggccgtgtgacaatgaggaagactgttgccaagccaaagggtccatcaggcagcccatggtacggatccgaccgagtcaagtacttgggtccattctctggcgagtcacccagctaccttaccggagagttccctggagactacggatgggacacagctggtctatccgctgaccccgagacattcgcaaggaaccgtgagctagaagttatccacagcaggtgggccatgctcggagccctaggctgcgtcttccctgagcttttgccaggaacggagtcaagtttggagaggcagtttggttcaaggctggttcacagatctt

SEQ ID NO: 165342 - DNA, 426 bp, Arabidopsis thaliana columbia
cttctctcagtcttccttcttcaccaagaacaaattttttcgctcctttacttccatcaaaatggaaaaaggtgaagcagagaatgcagtgaagacaaagaaggtgtttgtcgcaggagcaactggacaaaccgggaagaggattgtggagcagttgttgtcccgtggctttgccgtcaaagctggtgttcgtgatgtagagaaagcaaaaacatctttcaaagacgacccgtctcttcagatagttagagcagacgtgacagaaggtcctgataagctagctgaagttataggtgatgattctcaagctgtgatttgtgctactgggtttcgtcccggaattgatatattcactccttggaaagtcgataatttcgggacagtgaatattgtggttgcttgccgtaaacaaggagtggaaaggtt

SEQ ID NO: 165343 - DNA, 320 bp, Arabidopsis thaliana columbia
caagagccggaaatcaaaaacagtaataaaagatctactcaagaaaatggctcttcctctcgagctcgaaagcctcactgaagccatctcagctgggatgggaatgggagttgatgagaatgcatagataagcacactggggaaaatcgcaaaaggaacatagaaaattgtttaggaaagcaagcaaaagtttctttgttgaagatgaggaaagagcttttgagaaatgtcatgatcacttcgtcagacacctcaagcttgagttctcccgcttcaatactgcggtggtgatgtgggcaatgcatccatgggagagagat

SEQ ID NO: 165344 - DNA, 365 bp, Arabidopsis thaliana columbia
ccttctttgatctcttcaggaactggtaatttttcagcagctaggaacaatatgattggggaaatcgagaaccgatcaacattcctcttagcagtaaaagcggatgtggagacacaaggggactttgtacagtcgttagcaactgaagtccgagcttcttctttcaccgacatagaagatctcttggcgttcgttagctggctagatgaagagctctccttcttggttgatgaaagggcagttcttaaacactttgactggccagaaggtaaagctgatgcgctacgagaagcagcttttgaatatcaagatcttatgaaactggagaagcaagttacgtcctttggtgatgatcctaatctctc

SEQ ID NO: 165345 - DNA, 436 bp, Arabidopsis thaliana columbia
gtaaagaaaatggtcgtcgaggagtcatcatgcgtttacaagaacggagacgcgccagtggaggcgcgtgtgaaggaccttctctctcgcatgactttgccggagaagatcggtcagatgactcaaatcgaacgcagagtcgcttctccctccgcctttacagatttcttcatcggaagtgtactaaacgctggaggtagtgtaccgttcgaggacgctaagtcatcggattgggctgatatgattgatggttttcagcgatcagcgttagcgtcgcgtttgggaattccaattatctatggcactgacgctgtccacggcaacaataatgtctacggcgccactgtcttccctcacaacattggcctcggagccaccagagacgcagatttggtcagaagaatggagcagcaactgcacttgaagtaagagcgag

SEQ ID NO: 165346 - DNA, 416 bp, Arabidopsis thaliana columbia
cacagatagagagaagagacagagacagagagtgttggaaacagctgtatttattatgagacgaaacaagaacctctgggtttctacttaaactcttctctctttcctctctcactttaaaaatccacactttagagcacacaatacaaaaaataagggtttctttatcttttcgtttcttccaaattttgtaatggatttgatgcaaatggataagcgtttggattcaacggagcaagtggttgaagaaatcatgagaattcacagatctctacccgcaagaccaggaattgacgaagttgaagctgccaagggtttgattgacaacgttgagaaagaagatcaagcttggttagaagccattgctagacagaggaaaagctctgaagttcctggtgagcttttcatggtgttgc

SEQ ID NO: 165347 - DNA, 367 bp, Arabidopsis thaliana columbia
ggaataactgacagtggattggttgctattgctgataactgtgtgaatctgagtgatctgacgattgattcttgctctggtgttgggaatgagggtttaagggctattgcaagacgttgtgtcaatctgagatctatctctatcaggagctgcccacgtattggtgatcaaggtgttgccttcctcttggctcaagctggttcttacttgacgaaagtgaaactccagatgctgaacgtatctggtttgtctcttgctgttattggtcactacggagcagctgttactgatcttgtgctttatggacttcaaggggtgaatgagaaaggcttctgggttatgggaaatgcaaaaaggttgaagaaac

SEQ ID NO: 165348 - DNA, 378 bp, Arabidopsis thaliana columbia
gagctctagacctcggtgtcaatgtcaagatgattactgttgatcaacttgctattgcgaaagagacaggacgtagacttggaatgggatcaaacatgtacccatcctcttctttactcggtaaacacaaagacgaagccatggctcacattcctgttgaggatttgattgagaaagctgatggctttgctggagtcttcccagagcacaaatacgaaattgtgaagaagttgcaagaaaggaagcatatctgtggtatgactggagatggagtgaatgacgctccagcattgaagaaagcggatataggtatcgctgtggcggatgcaactgacgctgcacgaggtgcttctgatattggcctcaccgagccaggtc

SEQ ID NO: 165349 - DNA, 431 bp, Arabidopsis thaliana columbia
cagcaatccaccatccatttgcatcgtaccgtcaatcatttaaaaagcttaggggctaaagctggagttgttctaaaccctggaaccccattgagtgcaatagaatatgtcttggatatggtggatctggtcttgatcatgtcggtcaaccctggttttggtggacagagctttattgaaagccaagtaaagaaaatctcggacttgaggaaaatgtgtgcagagaagggagtaaacccatggattgaagttgatggtggtgtcactccagcgaatgcgtacaaggttattgaggctggagcaaatgctctagtggctggatcagctgtatttggagctaaggactacgcagaagctataaaaggaattaaggccagcaaacgaccagcagctgtagctgtgtaatgtgaagcaacagcaagcgaaaagac

SEQ ID NO: 165350 - DNA, 392 bp, Arabidopsis thaliana columbia
  unsure (1)..(392): unsure at all n locations
cagaagttcctataaaaatgggaaatgccctaccttttagtgcggtttgaactatttgatttacgtaattggaagtaaccaattaggtttacgacgaaacctagaaatcgatcactgatccaatttgagtacctctacaggatagacctcaacagaaaactgaagagtaacggcagcaagtgattgagttcagtagttcctcatataaaattattgactctagagatatagtaatatggagaagacaaaattgtttcaagcaccgacagaaccataagcgccccttgtttcaaagagaggaggacgggttattcacatttcatttgatggtcagaggcgaattgaaagctaagcagtggtaattctaaagattcccccggngaaaaatagag

SEQ ID NO: 165351 - DNA, 462 bp, Arabidopsis thaliana columbia
ccacttggatctttcttacttactccattatctttttctctctctttccctcatctcattaatggcgagctctacatctttagcgatagttcttcatcaatcttccaatcatgacgaactcttcatgaagcaaactcttcaattctcagaaaccctcaaggatttaaagaatctgcggaaacagttatactcagcagctgagtacttcgaaacatcttatggcaaagcagaacacaaagaaacagtgatagagacgttgaaagagtatgcagcaaaggcagtagtgaacacagtggatcatcttggttctgtctctgacaaattcaactcttttctctctgataactcaactcatttctccaccactcatcttcgtttatcttctcttgaacaaaggatgagactatgcagagattacatggggaagagtggcactcatcagcatttgcttctatttcaata

SEQ ID NO: 165352 - DNA, 382 bp, Arabidopsis thaliana columbia
gtggtagagattacaaaggagaagaagattgatctttttgttcagttgcaagtaatcacaacaaatattgaaagttcaaggcttcatcatcgttcaagttatctcattgttcctccaccaccattaccaaaagctccttcagattcttggttaaagcgtacattaccaacaataccaccaaaaaacaactcattcgcatggttacagtctcttggcactgatgatgataatcactttaccaagactcaagctaatccaaagtgggaaactatggtcaaaacgtccaatacacagcaagggtttgtgtgcttctccaaggaaacactaaaccctataccagagtcatagcaagaccaaaacaaaattctcactggtggtaatg

SEQ ID NO: 165353 - DNA, 413 bp, Arabidopsis thaliana columbia
  unsure (1)..(413): unsure at all n locations
aaaaaaaacccttcaaaacatttccttattctttcttcttcatctacaacaatggctggagttgcctttggttcctttgatgattcattcagcttggcttctctaagagcttacctcgctgagttcatctccactttactctttgttttcgctggtgttggctctgccattgcctacgcaaagctgacgtcggacgctgctcttgatacaccgggactagtggccatcgcggtttgtcatggttttgctctcttcgtggccgntgcaatcggagccaacatctccggtggccatgtgaacccagccgtcacttttggtcttgctgtcggtggtcaaatcacagtcatcaccggagttttctactggatcgctcagcttctcggctccaccgccgcttgtttcctccttaaata

SEQ ID NO: 165354 - DNA, 384 bp, Arabidopsis thaliana columbia
cactcacagaaaaacctagaaagctctagagttaatgagagagagagatggaaggtaaagaagaagatgttagagtcggagctaacaagtttccggagaggcaaccgatcggaacttcggctcagagtgacaaggactacaaagagccaccacctgcgccgttgttcgagcccggcgagctagcttcatggtccttctggagagctgggattgctgagtttatagctacgtttttgttcctgtacatcactgttttgactgttatgggtgtgaagaggtcaccgaacatgtgtgcttccgtcggaatccaaggtatcgcttgggctttcggtggtatgatcttcgctctcgtctactgcaccgctggtatctccggtggacaca

SEQ ID NO: 165355 - DNA, 439 bp, Arabidopsis thaliana columbia
atggatcgttgcacgtcgtcgtttttgcttctcacattggtctctaccttgtccattctccaaatctcctttgctcaacttgttccagcaatcatgacattcggtgactctgtagttgatgtcggcaacaacaactatcttccgacccttttcagagctgattatcctccttatggccgtgatttcgctaaccacaaagccaccggtcgtttctgcaacggcaaattagccactgatataactgctgagactttaggcttcactaagtacccaccagcttatctaagtcctgaagcttctggtaagaatcttctcattggtgctaatttcgcttctgcagcttcaggttatgatgacaaagctgctcttctcaatcacgcgatcccgttgtatcagcaagtagagtatttcaaggaatacaagagcaagctaataaaaa

SEQ ID NO: 165356 - DNA, 441 bp, Arabidopsis thaliana columbia
cagaacaagaattagaaagaagggagagaatgcatttatggcactaagaatgtgggcttcttctacagcaaacgctctcaagctttcttcttctgtttccaagtctcatctctctcctttctccttctctagatgcttctccacagttttggagggtttgaagtatgcaaattcacatgagtgggttaaacatgaaggctctgttgccaccattggcatcactgcccatgctcaggaccatttaggtgaagtggtgtttgttgaactgccagaggacaatacttcagtgagcaaagagaaaagctttggagcagtggagagtgtgaaggcaacaagtgagatcttatcaccaatctcaggtgaaatcattgaggttaacaagaagcccacagaatcacctggcttgatcaactcaagccccttataaaatggttggatgat

SEQ ID NO: 165357 - DNA, 396 bp, Arabidopsis thaliana columbia
ttgatattgaatctggcgaatggagcaaactgatgtcacctcctcatataatgcgagtgggaagtaaatcggtgtgtgtgaatggatcaatctactggttacaaattagtgtgagttacataatactggccttggatcttcaccaagaaacgttcaatggtgtctaccacctcccggctacgtgggtcacgcaagatacccaattagtgaaccttgaggaccgtctagccatggccatgacgaccaaagttgggcctgaatggatactagagatctggagcatggatatagaagaaaaaggatggagcaagcgttacacatggagcaaggcttactccataagtttagcccataaaagtggtgtattctggccattgcaaaaaaagtggttcacgc

SEQ ID NO: 165358 - DNA, 413 bp, Arabidopsis thaliana columbia
aaaacactatggcggaaaactacgaccgtgtcagttagttaaaagcattcgacgagatgaagattggcgtgaaaggactcgtcgacgccggagtcacaaaagtcccgcgcattttccataacccgcatgttaacgtagcaaaccctaagcctacatcgacggtggtgatgattccaacaatcgatctaggtggcgtgttcgaatccacggtcgtgcgagagagtgtagttgcgaaggttaaagacgcaatggagaagtttggatttttccaggcgattaaccatggggttccacttgatgtgatggagaagatgataaatggtattcgtcggtttcacgaccaagatccagaagtgaggaaaatgttctatacccgagacaaaaccaaaaagcttaaatatcactctaatgct

SEQ ID NO: 165359 - DNA, 314 bp, Arabidopsis thaliana columbia
gaagaagaaaggttaataatgatgggcagtgtcgagtgaatctgagggagactgagctgtgtcttggtcttcccggtggagatacagtggctccggtaaccggaaacaagagagggttctcagagacggttgatctgaagctaaatctgaataatgagcctgcaaacaaggaaggatctacgactcatgacgtcgtgacttttgattccaaggagaagagtgctttgcctaaagatccagccaaaccttcggccaaggcacaagttgtgggatggccaccggtgagaacatacctgaagaacgtgatggttttc

SEQ ID NO: 165360 - DNA, 143 bp, Arabidopsis thaliana columbia
cgagtctcttcgctgtgtttcttgcgtggtcgacgttgaagacttttggaaatggactttattattggagattggaatcggagatggcgaatattaaagaatgcaaaagttttgaaggtggacagaaaaagaatgacgtcaag

SEQ ID NO: 165361 - DNA, 413 bp, Arabidopsis thaliana columbia
gtacttctaaactcaatccgagggaagaagatgactatgatgaagaagaagaagatgatgatggcgatcgattctaaactttcttttttaccattcttattttcgtttaccgtaggtggttaaaaaaccttttttgttgatgaggctcatttaaagaaccaaccaaatgatgtttctttctctcactctctgtctttctgttttctttttgttctgtttagaatttagaaatccaccaagtattcggtcgagacttgttttagccgttactttctgctgcttatatttcctaaattggttgtcttcttcgagacataattggaatttattgttactgttaaaaaaataaataaattaaaataaattaatatatttattatattttataaatattttataatttttaataatat

SEQ ID NO: 165362 - DNA, 387 bp, Arabidopsis thaliana columbia
attcttatacccatagagagacgcacaacacagtgtagatacattgcttgagcttttaggatgttacaggaatctaacacttcaaattctactatctctcttcttaacgttagtcctttcattcgtcaaaatctcaatcatcttcctccacggtctctgtacctatatccaacctgaaaatctcaaccaaaacaacaccggaaatggactccgacctgcgattagacgaccatctagtaccgacgatccaaaatctaatgttgaagtcagaagaagaaacagatccaaagataaatccgaattcgacgaaagcaatgctcagatctttcgaattaagctcgatgaagatcatctcagatctcgaatgtatttcacttgagtcaattc

SEQ ID NO: 165363 - DNA, 260 bp, Arabidopsis thaliana columbia
gaagaaggttgcaatggctgatcccagtgaacataaagaaaaggttgtgaaagaaaagaaagaaaaggttaagaaagaaaaggttgtgaaagaaaaggttgcaaaggcttcttcgagtggacagaagaagaaggacgtcaagaaggaaacgggtctcggactcagtgttaagaaagatgagaacttcggggaatggtattctgaggtttgtaaacaagatatgattgagtactacgatatctctggatgttatattctac

SEQ ID NO: 165364 - DNA, 343 bp, Arabidopsis thaliana columbia
aaaagaagaagagaaacaacaagaagtagtattggtttcctctatgctctcctccgccgctgtggttacatccccggctcaggccaccatggtcgctccattcaccggcttgaagtcatccgctgcattcccggtcacccgcaagaccaacaaggacatcacttccatcgcaagcaacgggggaagagttagctgcatgaaggtgtggccaccaattggaaagaagaagtttgagactctatcttacctccctgaccttagtgacgtcgaattggctaaagaagttgactaccttcttccgaacaagtggattccttgtgttgaatcgagttagagcacggat

SEQ ID NO: 165365 - DNA, 208 bp, Arabidopsis thaliana columbia
tgtgctccacctcgttctctcctccctagccgactccatttcagtgctcctcgagctgttgtttcgtatccaggaatacgtttcggctttacctcgccggaagtcttgcttaatcgatccgtcgttgctttcgctgcatcccacgaggattcgggagaatcaggtgttgaggtggggaaggagaagagtgatatagatgttgaagatg

SEQ ID NO: 165366 - DNA, 210 bp, Arabidopsis thaliana columbia
  unsure (1)..(210): unsure at all n locations
gttgtgtattgagctgattctgattcggtncactcaatagggttagctgctctattagtcaagggtttatctggaagacctgtccctgagattttgaggataacacctgatttcgctggtctttttggggtggaacataatttgttttcttttagaaacaatggattacttaatatgcttaaactgaagcataaaaatggctttttattt

SEQ ID NO: 165367 - DNA, 294 bp, Arabidopsis thaliana columbia
ggatttcgatcctattgtgttggccttcgggtttggagtaatgattaacaggaacttacccgccttcacgttgttccaagccttttggaaactgctcgtgtggcgattcttacatagagccacttgtagccgctcacaacattatcctttcacatttagccgccgtcaacttataccgtacaaaatttcaggaacaacaaagaggacagatcggtattgttatgaacacaatctggtttgaaccgattagtgattctttagcagatagattagctgctgacagagctcaagctt

SEQ ID NO: 165368 - DNA, 292 bp, Arabidopsis thaliana columbia
atgcgacgaaaaggagatagatcgatgatgcaagtacgctcatatgagtaattctacgaagacgatgatgatgatgatgataccgatggcgagagtagcgacgaagacgatgaagaagaagatcggaatctgagtggagatgatagcgaatcaagcgaagatgattacactgattcgaattcggattctgatgacgacgatgaagaagatgatgatgatgaggaggaggaagaagaagaagactcccttgttgataaagtcactcgtttactcaaagggaaacaagattgac

SEQ ID NO: 165369 - DNA, 321 bp, Arabidopsis thaliana columbia
aaaaaaaaaaaaaacacaaaaaagtttcaatggcttctttacaatggctctctcctcccctgctttcgccggaaaggctgtgaacctttcccctgcggcatcagaagtccttggaagcggccgtgtgacaatgaggaagactgttgccaagccaaagggtccatcaggcagcccatggtacggatccgaccgagtcaagtacttgggtccattctctggcgagtcacccagctaccttaccggagagttccctggagactacggatgggacacagctggtctatccgctgaccccgagacattcgcaaggaaccgtgagct

SEQ ID NO: 165370 - DNA, 355 bp, Arabidopsis thaliana columbia
  unsure (1)..(355): unsure at all n locations
caaaaacaaaaatgaaaactactcatttctctttcncttcntcttccgatcgcaggatcggtgctctgctccgtcatctcaattccggctcagattcggacaacctgagctctctttatgcatctccgacatcgggaggcaccggtggttctgttttctctcatcttgttcaagctccagaggatcctattcttggggtgacagttgcatacaacaaagatcctagcccagttaagctgaatttaggagttggtgcttaccgaactgaggagggaaaacctttggttcttaatgttgtgaggaaagctggacagcagcttatcaatgacagaacaagaatcaaggaggatctttc

SEQ ID NO: 165371 - DNA, 359 bp, Arabidopsis thaliana columbia
aaaaaaaagaaaacacaaaaacaaagattataatgtgctctctcaaccatggctttgtcctcccctgccttcgccggaaaggctgtgaagcctgccgcatcagatgtcctcggaagcggccgtgtgaccatgaggaagactgtcgccaagccaaagggtccatcaggcagcccatggtacggatctgaccgagtcaagtacttgggtccattctccggcgagcccccgagctaccttaccggtgagttccccggtgactacggatgggacaccgctggtctatccgccgacccagagaccttcgccaggaaccgtgagcctagagttatccacagcagatgggccatgctcggagccct

SEQ ID NO: 165372 - DNA, 174 bp, Arabidopsis thaliana columbia
  unsure (1)..(174): unsure at all n locations
ctcaaatgtatccttctctcgacgatgatttcggctggatttgttttgcttcgatcaaagggggaaaggttgtgtcttttgatgataatttgacgaaccctaatgtatctgaaagctgttaaattgaataggagaagaagtagctntatggatgttgttgattatatccactcc

SEQ ID NO: 165373 - DNA, 234 bp, Arabidopsis thaliana columbia
aaaacatttcttgttcatctctccgaccttaaaccctccgatccaaaaatctccaccgactctaatccaatcaaatggcctccgtcgcgcttctacggtcttttcgtcgccgtgaagtccaaatggcttccgtatctgcgtttaaatccgtttccgcaaatggaaagaattctatgtttgggaaattaggttacttggcgagacctttctgctcgaggcctgtggggaaatgat

SEQ ID NO: 165374 - DNA, 255 bp, Arabidopsis thaliana columbia
cgagagcgagaccgcgagcagccaaaacatttgttgttcatctccccgacccaaaacccggcgagccaaaaagggacaccgactcgaacccactcaaatggccgccggcgcgcagctacgggcgatgcgacgccgggaagtccaaatggctaccggagctgcgataaaaaccggggccgcaaagggaaagaatgcgatgttggggaaaataggtgacgaggcgagaccaaaccgcacgaggccaggggggaaaga

SEQ ID NO: 165375 - DNA, 225 bp, Arabidopsis thaliana columbia
gagagaacaacaaccaaacactcatttctccacatcttgagagaaaaaaacagagcaagtatattagagatctcatggcgatggcggtctccggagctgtcctcagtgggcttggttcttcgttcctcaccggaggcaagagaggtgccaacgcattgacaagcggcgtaagccctggagctcataacgaaaacattgaagctggtagtgacgatgatgttgatg

SEQ ID NO: 165376 - DNA, 363 bp, Arabidopsis thaliana columbia
gttatctccaatgatccttctcctagcaatgatctgcgtttcatatgccatggacatgtcaatcatctcctacgacgaaaaccaccacatcaccaccgagaccagccgtagcgactcggaggttgagagaatctacgaagcgtggatggtggaacacgggaagaagaagatgaatcaaaacggtcttggtgcagagaaagatcaaagattcgagatctttaaagataatcttcgtttcatcgatgaacataacaccaaaaacctcagttataaacttggtttaacccgggtttgctgatttaaccaatgaggagtaccgatctatgtaccttggggctaaaccgacccagaagggtttggaaa

SEQ ID NO: 165377 - DNA, 360 bp, Arabidopsis thaliana columbia
ctggagtgatgaagttggcatgcatggtcttggcttgcatgattgtggccggtccaatcacagcgaacgcgcttatgagttgtggcaccgtcaacggcaacctggcagggtgcattgcctacttgacccgaggtgctccacttacccaagggtgctgcaacggcgttactaaccttaaaaacatggccagtacaaccccagaccgtcagcaagcttgccgttgccttcaatctgccgctaaagccgttggtcccggtctcaacactgcccgtgcagctggacttcctagcgcatgcaaagtcaatattccttacaaaatcagcggcagcaccaacttgaacaccgtgaggtgatgagcga

SEQ ID NO: 165378 - DNA, 379 bp, Arabidopsis thaliana columbia
  unsure (1)..(379): unsure at all n locations
gcggacgcgtgggcggacgcgtgggaaacgctcatcncttctcttcatcctccttctggagcagagcttagagctccatcatcaaatcttatcaatggcttcctcactcgtctcatcttttcaacccaggtcagcatttttgggagatagaaatgtgttcaaggtctcaagcacaccttttgctcaagtgggttactccagtaagaccattgagtgcaaagaatcaaggataggaaagcaaccgatcgctgtaccttccaatgtaaccattgcattggaaggtcaagacttgaaagtgaagggtccattatgagagctggctttaacttacccacgcgaagttgagcttacaaaggaagaatccggtttcttaagggtc

SEQ ID NO: 165379 - DNA, 456 bp, Arabidopsis thaliana columbia
gtcccattgtcccttttaactacacaggcactttacctacaatactatggttagtaacgggacaaacttgatggttctaccttataacaccagtgtggagttggtgatgcaagacactagcattcttggcgcagaaagccatcctcttcatcttcatgggttcaacttctttgttgttggccaagggtttgggaatttcgacccgaacaaggatcctagaaacttcaaccttgttgacccaatagagaggaacacagtcggtgtgccatctggtggatgggctgctattcgattccttgcagataacccaggagtgtggttcatgcactgtcacttggaagtgcataccagttggggtctgaggatggcttggcttgttcttgatggagataaacctgatccaaaaacttttttcctcctcctggatacttgcccaattcttgaaaatttttcccc

SEQ ID NO: 165380 - DNA, 407 bp, Arabidopsis thaliana columbia
ctgaagcatggggtgttgaaccatatgatattgttgattcagattctcactgcaagagttttgtgagcaaaggtcttgtacgtgttgctgatatcaagtttcctctgccctaccgggcaaaatccttctctcttgtgattgtgtcagatgctctggattatctctcacccaagtacctgaacaagaccgttcctgaactcgcaagggtggcttcagacggtgtggttctttttgcaggtctccctggtcagcagagagctaaagttgctgaactctctaaattcggccgacccgctaaaatgcgtagcgcatcgtggtggaaccgctttttcgtccagacaaacttagaagaaaacgatgcaccaagcaagaagttcgaacaggctgtttccaaaggattatacaaa

SEQ ID NO: 165381 - DNA, 336 bp, Arabidopsis thaliana columbia
aaattgtctggctcttattagatcatttacttgatgttattcaatagggtaaaaggataaaatgttcgactacccaagcaaagcatcgtctctttcttggtaatgtccctagaaataggatggagtcagacattaagaaagcagcatatagaattggtccaggcgttcaaattgtcgaactcccaaaggaaccacaaaatatgggccggaatcgcggatttgctttcatcgagtattacaaccatgcatgtgctgaatactcgaaacaaaaaatgtcaaatccgagttttaagcttgatgataatgccccaactgtaagctgggctgaatcaagga

SEQ ID NO: 165382 - DNA, 414 bp, Arabidopsis thaliana columbia
  unsure (1)..(414): unsure at all n locations
aaaaagccaggctcttaacaagacatttacttgttgtanttttagggacaaggataaaacgtggactacttaagcaaagcatcgtctctctcttgcaaaagcccctagaaattggacggagtcagacattaagaaagcagcaaatagaattggtccaggcgttcaaattgtcgaactcccaaaggaaccacaaaatatgggccggaatcgcggatttgctttcatcgagtattacaaccatgcatgggctgaatactcgaaacaaaaaatgacaaatccgagttttaagcttgatgataatgccccaactgtaagctgggctgaatcaaggagtgtaggaggaggagatactgcggcttcccaggtcaaggcatgtgcacatcaagaacttacctagagatataactcaatgaa

SEQ ID NO: 165383 - DNA, 486 bp, Arabidopsis thaliana columbia
  unsure (1)..(486): unsure at all n locations
gcattcatttgtcacttctacaacatctacttttctcatagtgctggtggacgaatgattggcagaaaggtggcagagcggatactcgataataaagaactcgagttctacaaatgggacggcgaactttctcaattgttgcagaacgttagggagaaactgaacaaggttgcagaggagtggactagagaagaaaagaatcattgtttggaagagactgagaaatcgttcaagtattctggtgagatacttcgtctcatattgtcctgatttggtgcgcagtgtctctagatatctcaatacgtcttgtggcaactaaaatgatgcacattngttatattcctgtattatattaatcatcttctacatgtattaaactcttcttttgcttaaaagctgttactaaagttcaaggttcaaatttaataataaataaattatttttattccttttatatttattatttattttttttatataaaatt

SEQ ID NO: 165384 - DNA, 392 bp, Arabidopsis thaliana columbia
ggcagcctctctccaatccaccgctacattccttcagtcggcgaagatcgccaccgctccttctcgcggaagttctcacctccgatcgactcaagccgtcggcaaatcttttgggctcgaaacttcctcggctcgcctcacttgctccttccagtctgactttaaggacttcaccggtaaatgctccgacgctgtcaaaatcgccggattcgctcttgccacctctgctctcgtcgtctcgggagcaagtgcggagggagctccaaagagattgacctatgatgagattcagagcaagacatacaatgaagtgaaaggaactggaacggctaaccagtgccctactattgacggtggctctgagactttctcgttcaaacccggaaagtatg

SEQ ID NO: 165385 - DNA, 423 bp, Arabidopsis thaliana columbia
ccataaccttcactaagttttctttctctagcctctctcatctttctctctctgtcggcgatgcagaggatatcgttagactcatcagcttcgaagctccatagctatggaggacgaaaggacgatacctacgatattgatgacttgaaaccagcttcctcttctccttcttcgtcgtcatccgcagtagattacgacgatcacgagctcaaagactttaagccgcgacggttatcatcgttgcaatctccttttgttacgacgaatcagaaacaagagaagcttgttcacttcattccgattctcactctcatctgctttatcatcctttacctcacttcttacgctccgtctcaatcagatttgggtcagtttaatggattcatgcgtccttcgaaacatctagaatcatccgacgaaaat

SEQ ID NO: 165386 - DNA, 404 bp, Arabidopsis thaliana columbia
gctcattgcaatgtcaattctcgccgttctagctaatcctctgttctctctctaaaccttcgcttaatttggctaaacctctgactggatttctttctccttccactgcgtcgacgtctcgaaccgcattcaccgtcgctccgaaattcgcggaatcagtcgtcgaagctgaaccggagactaccgatatcgaagctgtggtggtttccgatgtttcggaggttactgaggaaaaagctaaacgagaagagattttcgctgttattatggttggtggacgccaatacatagtgtttccagggagatatctctacactcagaggctaaaagatgcaaatgttgatgaccagattgttctcaacaaagtgttgcttggtggaacaaagacacacacttacattggc

SEQ ID NO: 165387 - DNA, 408 bp, Arabidopsis thaliana columbia
agtgtgttgaaagagtatgaagattataggagatctctttatggtgagatcactcataaggctttgcttgttgatgctgttggtactctccttgttcccgctcaacctactgctcagatatataagaatattggagagaagtacggagtggagtactcggaggctgagatacttactagatacagaagagcttatcagaaaccatggggtggatctcatcttagatatgtaaacgatgcaagacctttctggcagtatatagtgactgcatcaacaggctgctcggattcacagtactttgaagagctttacagctattttactacagaacaggcggtgaagttatgtgatccagatgcaaggaaaggtgttaaggctattaaagaagcgggtgtaaaagttgcaata

SEQ ID NO: 165388 - DNA, 495 bp, Arabidopsis thaliana columbia
  unsure (1)..(495): unsure at all n locations
tcgaaacaaacgccatggctgaatcggaacctgatcttgtccccacaactgaactggaacctgaatcaaaccccagtactgcattggaaactgaatcaatccccaaagctgaactggaatccgaacctgatgctatacctgatccaaaacctgaaaccgaaccagagaccaagggtgagaaagctggtgagtaaggtagcagccggggaaaggtgtccatactgttggggacatgtggaaacagatgaatataaaattgcttagtaagttgtgtggtttgtggctacctgtaacgtgtgaggatttgtgttttttgggtttgtgttgcattcatgcacatgcctatgcctgccttgaggacgacgacgacccttttgacatgtccccgatttttgtctatttcatttaccctattttggttttgttggtgctactcacaccaaanacagcacatttgntctctgtttctcctacttttttctatctttatttaaa

SEQ ID NO: 165389 - DNA, 400 bp, Arabidopsis thaliana columbia
ctgaaaattcagtttaagttatggcgtatttgagtgatgtatttgaaatgaagtcgactcgtgagtatgagagattagggttagggtttgtgaggtttactagaggattagggaggaaaaggattctcatatctaaacgagctccggaaaatgattcgccgccggtgaagagaccaagtcatgaaacgacggaatcttgtaggtctctgcttgaaactctgcatcaagatattttgattcgagtactttgtcatgtggatcacgaggacctagccacactaaaacgtgtatctaaaacaataagaaaagctgtaattgaagcaaagaagtcgcattttgattatagcacacctaaaaagagattgccatttcgagacgcaatactaatccttgattcaaa

SEQ ID NO: 165390 - DNA, 230 bp, Arabidopsis thaliana columbia
  unsure (1)..(230): unsure at all n locations
gtccgagatgatattgatgttagactcaagtggcttggncttttncaccgtagaaagcatcagtatgggaagtttatgatgaggttgaagttaccaaatggtgtgactacaagtgcacagactcggtatttagcgagtgtgattaggaagtatggtgaagatgggtgtgctgatgtgactactagacagaattgtcagatccgggatggttggttgactgatgtgcatat

SEQ ID NO: 165391 - DNA, 406 bp, Arabidopsis thaliana columbia
gagagcaccaaacatgtgtgcttctgttggaattcaaggtatcgcttgggcttttggtggcatgatctttgctcttgtctactgtactgctggaatttcaggtggacacatcaaccctgctgtaacattcggtctgttcttggctcggaagttatctctgaccagagcagtgttctacatgattatgcaatgtcttggagccatctgtggtgccggagtcgtcaaaggtttccagccaacgccgtaccagactctcggtggtggtgctaacaccgttgctcatggctacaccaaaggttctggccttggtgctgaaatcatcggaacattcgttctcgtctacactgtcttctccgccaccgacgccaagagaagcgcccgtgactcacacgtcccgattttggcg

SEQ ID NO: 165392 - DNA, 377 bp, Arabidopsis thaliana columbia
aactgcttcaagtaaaaagcctacgaaatagcatttgaccaaaagacaaactcaccgagtaaacatacgcaacctgtcgtgtaagtaaaaacaatttgatagtgatctctctatgtttggtggaggaagagggcctatgggtggcggcggaggtatgttacgcgccgccggtcgtgcgatgacgaggaccggtgtagccaacggtggtattcaagatccctttgcttcttcatcatcatcgtccacgtcgtctccggctggaaacgcctctgtttcgcatgtccagaaacagagatcttcttcttctgggtcgaataatctgacgtattccgcggcttctgggttgttggtgaatcttccggtggctgcaaccttcg

SEQ ID NO: 165393 - DNA, 366 bp, Arabidopsis thaliana columbia
ctctctttctctttctctgtctctttggcttttttcctcctgttctcatggaagcttcacccaatgatcgacttcattttggcaaaatgggtttcgggtgtaagcattacaagaggagatgccaaatcagagctccatgttgcaacgaagtcttcgattgtcgccattgtcacaacgagagcactagcacattgcgcaatatctacgaccgtcacgatcttgttcgtcaagacgttaaacaagtgatttgttctgtttgcgatacagagcagccggcagctcaagtttgttcgaattgtggtgtcaacatgggagaatatttttgcagcatctgcatattctatgatgatgatactgaaaaacaac

SEQ ID NO: 165394 - DNA, 463 bp, Arabidopsis thaliana columbia
  unsure (1)..(463): unsure at all n locations
gaacctttcccctgcggcatcagaagtccttgtatgctgtcgtgtgacaatgaggaagactgttgccaagccaaagggtccatcaggcagcccatggtacggatccgaccgagtcaagtacttgngtccattctctggcgagtcacccagctaccttaccggagagttccctggagactacggatgggacacagctggtctatccgctgaccccgagacattcgcaaggaaccgtgagctagaagttatccacagcaggtgggccatgctcggagccctaggctgcgtcttccctgagcttttggccaggaacggagtcaagtttggagaggcaggtttggtcaaggctggttcacagatcttcagcgatggagggctcgattacttgggaaaccctagcttggttcacgctcagagcattntggccattgggccacacaagttattttgatgggagccgttg

SEQ ID NO: 165395 - DNA, 338 bp, Arabidopsis thaliana columbia
  unsure (1)..(338): unsure at all n locations
aaaaaacattctcagagcaaatttcaagtttanttcattcaatttcgatccgagtaaccatggagtgtagatcattggatctgacgattatatctgcggaggatctcaaagacgttcaattgatcggtaaacaagacttgtacgccgtcgtttccatcaacggcgacgctaggacgaagcagaagacaaaggttgataaagattgcggcaccaaacctaaatggaagcatcaaatgaagctcaccgtcgatgacgcagcggcgcgtgacaatcgtcttactcttgttttcgagatcgtggcggatcgtcccatcgctggtgataaacctgtcggtgag

SEQ ID NO: 165396 - DNA, 443 bp, Arabidopsis thaliana columbia
  unsure (1)..(443): unsure at all n locations
gagaagaatagtttgatcatcttgtgagaaaanatanggctgcttcagtgatgctatcttcggtgacattgaaaccagctggtttcacggtggagaagacggcggctagaggattaccgtcgctcacaagagctcgtccctccttcaaaattgtcgccagtggcgtcaagaagatcaagaccgacaagcccttcggaattaacggcagcatggacttgagggacggcgtcgacgcctccggcagaaagggcaagggatacggtgtttacaagtacgtcgacaagtatggagctaacgtcgatggatacagtcctatttacaacgagaacgagtggtcagcgagtggtgacgtgtacaagggaggagtcaccggattggcaatttgggcggtaactctcgccggaattcttgccggaggtgctctttttgtgtacaacacaagt

SEQ ID NO: 165397 - DNA, 372 bp, Arabidopsis thaliana columbia
ctgcgactcttgagaaaggaagacgaaggaaggtgattttagaagaagaagaaagggagagtcttgtgatatctacgtagaaggaagatggccttatctcaagtgtctgcgtctctcgccttttctcttcccaattctggtgccctaaagctagccacaatcacaaacccaacttctacatgtcgggttcatgttccgcaacttgctggaatccgatccaccttcgcttctggttctcctctcttgccaatgaagttgagtatgacccgtagaggaggaaacagagcagcatcagtttccataagaagtgagcaaagtacagaagggagcagtggtttggatatatggcttggtcgtggcgccatggttggt

SEQ ID NO: 165398 - DNA, 422 bp, Arabidopsis thaliana columbia
  unsure (1)..(422): unsure at all n locations
caagcagctaacggcatttggtagtgatgacggtactgnatgggatgatggtgcttacgttggggttaagaaggtgtacgttggacaagcccaagatggaatctcagctgttaagtttgtgtacgacaaaagccctgaggaggtcacaggagaagaacatggaaagagtactctactcggattcgaagagttcgtacttgactatccaagtgaatacatcaccgcagtcgatggcacttatgataaaatctttgggagtgatggctcagtcataactatgctcaggttcaagactaataagcaaacgtctcctccctttggacttgaagctggcacagtcttcgaactcaaagaggaaggccacaagatcgttggctttcatggaagaaccgttgttctgctccacaaaattggagtccatg

SEQ ID NO: 165399 - DNA, 443 bp, Arabidopsis thaliana columbia
aaaaaaatataagaatatcctctggtatggagggtatggcacgtattgaaattcaaaaaagaatcgatctcatccagatcataatctatatgggatttcctaaattattaattgaagataaaccccgaagagtcgaagaattacagatgaatgttcaaaaagaactaaattgtgtcaatagaaaactcaacattgctattaccagaatttccaatccgtatggggatcctaatattcttgcagaatttatcgctggacaattaaaaaatcgcgtttcttttcgaaaagcaatgaaaaaagctattgaattaactgaacaggcgaatacaaaaggaattcaagtacaaattgcaggacgtatcgacggaaaagaaattgcacgtgttgaatggatcaaaaaaggcagagttcctttacaaacaattgaagctaaaattgaatat

SEQ ID NO: 165400 - DNA, 375 bp, Arabidopsis thaliana columbia
  unsure (1)..(375): unsure at all n locations
aagaagaacaacaacactaagcaaaaaagaaatgncaagccgagagagacaatggcatcaacattcacgagctcaagcagtgttcttaccccaacaacattccttggccagactaaagcctcaagctttaacccccttcgtgatgttgtctctctcggatctcccaagtacactatgggaaatgatctttggtatggacctgacagagtgaagtacttaggacccttttccgttcaaactccgtcttacctcaccggagaattccctggcgattatggttgggacaccgccggtttatccgcagaccctgaagcctttgccaaaaacagagctcctgaggtgatccatgggagatgggcantgttgggagctttt

SEQ ID NO: 165401 - DNA, 350 bp, Arabidopsis thaliana columbia
actggatctctctatatacacattcatctgatgtttagagtaaaaacgaaacacaagaagcaattatgaagaattgtgagagatttgctaatctcgctctcgcaggtttgacattggcaccactcgttgtgagagtaaatccaaatttgaatgttattctcacagcatgtatcactgtttatgtgggttgctttcggtcggtcaaggatactcctccaacggagacgatgtcaaaagaacatgccatgcgtttcccattggttgggagtgctatgcttctgtcacttctcttattgatcaagtatctctcaaaggacttggctaatgctgtgctaacagctgacttattt

SEQ ID NO: 165402 - DNA, 415 bp, Arabidopsis thaliana columbia
cagaagaagaaagagaaaaaaaagagatggagtgttcacgccggtgagaaaccctcacacttccaccgccgatctgctttcttggtcggaaactcctcctcctcctcaccactcaaccccttccgccgctcgttctcaccagccgtccgatggaatcagcaagattctaggcggtggtcagatcacagatgaagaagcccagtcgcttaataagctaaagaattgttcagggtacaagttaaaagagatgactggtagtggcatatttactgataagggaaaagttggatctgaatccgatgctactactgatccaaagactggactccgttactatcagcagactctgaatggaatgagtcagatatctttcagtgctgacggtaatgtttccccgaagaaaccaaccacttta

SEQ ID NO: 165403 - DNA, 477 bp, Arabidopsis thaliana columbia
  unsure (1)..(477): unsure at all n locations
atcggttccggtgagacatttttgaagactgtngtttcacctcttcttacagttatgtcagctggacatgctcttcatgtgtttgtcaatggtcagctttcaggaactgcttatggaggacttgaccacccaaaactaacctttagccagaagatcaaactacatgcaggtgtcaacaagattgctcttctgagtgttgcagtgggtctcccgaacgttggtacacattttgaacagtggaataaaggagttcttggtccggtcacattgaagggagtaaactcaggaacatgggacatgtcgaaatggaaatggtcctataagattggtgtaaagggtgaggctttgagtcttcataccaacacagagagttccggtgtgagatggactcaaggatcatttgtggcgaaaaagcaaccattaacctggtaccaggctacgtttgctacaccagccaggaaatgaaccattggcttt

SEQ ID NO: 165404 - DNA, 358 bp, Arabidopsis thaliana columbia
gaatatgtacatgtgggtgttcaaggaaatgcctgatatatgcccttggcaagatgcagctgcggagctacatgaacggacactcacgcgagggtgagcgtcctttcccttttagtgtggacaaaggttttgtccgctctcataggatgcagaggaaacattaccgtggtctctctaacccacagtgcctccatggaatcgaagttgtttattcacccaacctttctgtactcagcgaggatgaaaagaagaagtggacagaactcacaggtcgagatgtgaactttgctattccagctgtagctagggattaccgttcatggaggaaactcccaaacaccttatttgaggctgagag

SEQ ID NO: 165405 - DNA, 390 bp, Arabidopsis thaliana columbia
agaacaatggcttcctctatgctctcttccgcttctatggttgcctctccggctcaagccactatggtcgctcctttcaacggacttaagtcctccgctgccttcccagccacccgcaaggctaacaacgacattacttccatcacaagcaacggcggaagagttaactgcatgcaggtgtggcctccgattggaaagaagaagtttgagactctctcttaccttcctgaccttaccgattccgaattggctaaggaagttgactaccttatccgcaacaagtggattccttgtgttgaattcgagttggagcacggatttgtgtaccgtgagcacggtaactcacccggatactatgatggacggtactggacaatgtggaagcttccc

SEQ ID NO: 165406 - DNA, 383 bp, Arabidopsis thaliana columbia
cgtttcttgtgagatcatctaaaaaatggcttctactgtttcgctttctttactcagcggcggcagtggagctcttcaggcgcgttgcgcaagaaccgcgcatgttagcccacgagcggcgcattctaacaaacccgcgctttcttcgttctcgctgaccggcgcctctcgcaggaatctgttattttcgttgacggcagcgacggtagtgacgggacttcagcctgcatcaatggcggagaatattccgttatttggtataagaaagaaactgaagaaagcagaagaagaagcggtggagatcgtgaaagaaggctttgagacggcggataaaggcgttgatgcggcggataaaggattagaagcggcggagagaggtgtat

SEQ ID NO: 165407 - DNA, 426 bp, Arabidopsis thaliana columbia
tttgaataaaatcagaattacaaacaaaaatggttttgtaaaagcttcctctcattgggctgcttttgctcctgaccatcgtcgcctcttcagcaaatgcagatggacctgtttgcccgccgtcgaacaaaactaagcccgggcaagtttccctgaaggttttttatttggcacggctactgcggcataccaggtcgaaggtgcgattaatgaaacttgtcgtggaccagccttatgggacatctacttgagaagatatccagagaggtgcaataacgataacggcgatgtggccgttgatttcttccatcgttataaggaagaaatccaactaatgaagaatctaaacacagacgcctttaaaatgtctatcgcatggccaagaatatttcctattgggagaaaggagaaaggagtgagttaagc

SEQ ID NO: 165408 - DNA, 351 bp, Arabidopsis thaliana columbia
ttctttgattcttcttccttagatcgattctctcatgaaacaacaatggcgtctgggcgtgaagagttcgtatacatggctaagctcgcggagcaaccggagaggtacgaagagatggtagagtttatggagaaagtctccgccgccgttgatggcgatgaactcaccgtagaagagcgaaatcttctctccgtcgcttataagaatgtgattggtgctcgccgtgcctcgtggcgtatcatttcatcgatcgagcagaaggaagagagccgtggtaacgatgaccacgtcacggcgatccgtgaatataggtctaagatcgagacggaactctccggaatctgcgacgga

SEQ ID NO: 165409 - DNA, 166 bp, Arabidopsis thaliana columbia
  unsure (1)..(166): unsure at all n locations
gcaccgtgaagaccgattggcttgatgggtagctcgnggtgtttgggcaggtcgtggaaggcttagacgtggtaaaggccatcgagaaggttggatcatcatctggaaagccgactaagcctgtggttgttgccagttgtggtcagctctcataggatcgtactat

SEQ ID NO: 165410 - DNA, 447 bp, Arabidopsis thaliana columbia
ctccatttcaatggcgacagcatcagctctctcatcactctcttcactctcactccacacccgaacctcttctctcatctcctcttcctccacaaaatccatcgtctctttctcctccttcctcaaccgccgcttctcatctctcactctcgtcaaagcctcatcgaccgataccgaaaccatcttcttcgaagacgaaacaccagaaataaccgcaaatgtcgtcttcgacccaccaattgctcccgaaggattcgtctctcctccgtatttcgacgaaggaagcgacgagacagaggaagagatcgctaccgcttttgaagagctctatggacctgcgtaatagggtgagagtatgcttgggaaagataattatgtgatggactcaaagcataagaagagttcaggtattggtgggaagccaaagaaagataagattagagatgg

SEQ ID NO: 165411 - DNA, 322 bp, Arabidopsis thaliana columbia
ctctcgctttgctttctcgcggcaatggcggtgtctacgggaaatgacgacaacggctgcttcgataaaccagaatctgaaccggcaccggttaacgtttcgcctcccctgtcgaagaatgctcagaagaagcagctgaagcagcaaagatacgaagcgaagaaagctgagaagaaggcacaggagaaggagcataagagaaaagaaggagagagaaagcttaaggaatgggaagaaaccctagcgaacgcgacggaggaagagaggctgaagcttattgagtcgaggaagagtctgcggaaggagagaatggagaagagat

SEQ ID NO: 165412 - DNA, 212 bp, Arabidopsis thaliana columbia
  unsure (1)..(212): unsure at all n locations
ctctaagaacttcggagtcgcggccgtagcggttgctgcttcaattgctttggccggaaacgccatggcaatagaagttctcttgggaggaggggatgggtcgnnagctnntattnccaacgtcttctctatagctaaaggatagactattgagtgcacgaacagcgctattttcccacaccatgttgtactcaacgaatgcacaattcttt

SEQ ID NO: 165413 - DNA, 400 bp, Arabidopsis thaliana columbia
cagatctgccaccgtcgaaaatcttattgaagctggttaccacagctggtctaacctccttctgaggggagaagatgatgaaaagaagagtgtgagccaatacaaagcagatttgaggacatggcttacaagtcttgggtacagagtttggggagtgatgggtgcacaatggaacagcttctctggttgtccagttcccaagagaaccttcaagctccctaactccatctactatgtcgcctgattaaatcttatttactaacaaaacaataagatcagagtttcattctgattcttgagtcttttttttctctctccctcttttcatttctggtttatataaccaattccaaatgctaatgatcaatgcttgacccaggaccatctttgggtttttttt

SEQ ID NO: 165414 - DNA, 162 bp, Arabidopsis thaliana columbia
tttttcgaaattaatgggtggaatgggttaatggttggaatgggcggcctcgaacgcctcggtgtattgggaggcatggctggactggcaggcatgggtggtatgggaggcatggaagagtttgaaaacagtgttgattaaaaacgtacaccaatctactac

SEQ ID NO: 165415 - DNA, 441 bp, Arabidopsis thaliana columbia
gttggctgagttcatttcaactttgatctttgtcgttgtcggttcaggctctggcatggctttcaacaagctcactgaaaacggagccaccactccttctggtctcgtagctgctgcagtggctcatgcctttggactcttcgtcgctgtctcagttggtgccaacatctctggtggacacgttaaccctgccgtcactttcggtgctttcattggtggtaacatcactctcctccgtggtatcctctactggattgctcagcttctcggctccgtcgtcgcttgcctcatccttaaattcgccaccggtggcttggctgtgccggcttttggtctctctgctggagtaggagtggtgaacgctttcgttttcgagatccggatgacatttcgggcttggttacacccgctacgctacaagccattgccccaaaaacggga

SEQ ID NO: 165416 - DNA, 384 bp, Arabidopsis thaliana columbia
  unsure (1)..(384): unsure at all n locations
cctcttcttctccttcatcttaacacctatcctatctccgcctccttccaccgctttctccgtcatcgtacctcgtcggagatgtctcagattggttacttcttgtgtctccaccgttcaaagctccgtcgcaacaaacggttcctctccagctcctgctccggccgctgttgtcgntgagcgtgaccagattcgtcttggtctttctagtaaaggacgtatggctgctgatgcaatcgatcttctcaaggactgtcaactgtttgttaaacaagtcaatcctaggcaatatgttgcacagattccccagttaccaaacactgaagtctgggttcaacggccaaaagatattgccagaaagttactctcaggagatttggatct

SEQ ID NO: 165417 - DNA, 487 bp, Arabidopsis thaliana columbia
  unsure (1)..(487): unsure at all n locations
gtcacacccaaaaaaaagaaaccacaaaaccaatttttatattggcttcctcaaccatggctttgtcctcccctgccttcgccggaaaggctgtgaagcctgccgcatcagatgtcctcggaagcggccgtgtgaccatgaggaagactgtcgccaagccaaagggtccatcaggcagcccatggtacggatctgaccgagtcaagtacttgggtccattctccggcgagcccncgagctaccttaccggtgagttccccggtgactacggatgggacaccgctggtctatccgccgacccagagaccttcgccaggaaccgtgagctagaagttatccacagcagatgggccatgctcggagccctaggctgcgttttccctgagctattggctaggaacggagtgaagttcggaggagcgggttggttcaaggcccgttcacagatcttcagcgacgggaggatggactacttgggcaacccgag

SEQ ID NO: 165418 - DNA, 380 bp, Arabidopsis thaliana columbia
ctttgattgcacaactaatctcaaactaaaagatcttttctttaggcatacccagatctttctctctctaaagtctccacctttcacggttttttgcttctcacctgaatccaatcaatctcgccggagtgaattcaccttcctccggttgactcgtcggacttagtccgacctttcaattcgtagattctgtttacaattcactgatcgtttgattagaaatgggttacttgttcttctaagtctctctttagctgaaagtacgacgctttacgactcttcgatttacccttacttgtacaagctcttcatcaaatccgtaagcatggcgataagaatcactatgactcactccacccatgctgctcggaatctcgtct

SEQ ID NO: 165419 - DNA, 353 bp, Arabidopsis thaliana columbia
cttctcccaccattttcagagctcagagaaaattatagaaagaaaaaaagcttcgtgctccttcaccttcccaaatcggaaaacaatgcacgccaaaaccgattccgaggtaacaagcctcgcagcatcatcaccagccagatctccacgtagaccagtctactacgtccaatcaccatcacgcgactctcacgacggagaaaaaacagcaacatcgtttcactcaactccagtactaagtccgatgggatctccaccgcattctcactcatctatgggtcgtcactcacgtgaatcatcttctagtcgaatctctggctctttaaagcccggatctaaaaaagtcaacccta

SEQ ID NO: 165420 - DNA, 336 bp, Arabidopsis thaliana columbia
  unsure (1)..(336): unsure at all n locations
gaaagagagaaagagagacagagataatggcgnatagtgcgtgtttcctacaccagagcgcattggcttcatcagccgcacgatcatcatcttcctcctcatcccagcgtcacgtgtcgctctccaaacctgttcagatcatctgtaaagctcaacagtctcatgaagacgataactccgccgtctcccgccgtcttgctctcactctcctcgtcggcgccgctgctgttggttccaaagtatctcctgctgatgccgcctactgtgaagctgcaaacgtgtttgggaagccgaaaacgaacacagacttctggcctacaatggggatgggtttaa

SEQ ID NO: 165421 - DNA, 370 bp, Arabidopsis thaliana columbia
aaagagttttgcaagactcgtgccccaaaaatgattcttgatttgcagtctagcggtagtcactgcattgacggtaactggcgagcccttgggaagcttctcatctactgctcaggatgtacacaaggtggtcttttcaatagctctgttcaaatcccaggccactttgtttatagaacccggttctcaagaacattaggaagaagcctccttccgcctcagtgtagaactgatgtactctatgtttgtgatccatgcgagcatcttgaccaaggagaagaaggcgacgtgggtttgttccgtgggattttcaagtcattcccaacatcgaaagttcggaaagtgatcattaacaaagcggttccttttc

SEQ ID NO: 165422 - DNA, 366 bp, Arabidopsis thaliana columbia
gaagaacaatggcttcctctatgctctcttccgctactatggttgcctctccggctcaggccactatggtcgctcctttcaacggacttaagtcctccgctgccttcccagccacccgcaaggctaacaacgacattacttccatcacaagcaacggcggaagagttaactgcatgcaggtgtggcctccgattggaaagaagaagtttgagactctctcttaccttcctgaccttaccgattccgaattggctaaggaagttgactaccttatccgcaacaagtggattccttgtgttgaattcgagttggagcacggatttgtgtaccgtgagcacggtaactcacccggatactatgatggac

SEQ ID NO: 165423 - DNA, 440 bp, Arabidopsis thaliana columbia
atccaatcatggcggatgttgaaccagaggttgctgctgctggagttcccaagaagaggacgtttaagaagtttgccttcaaaggagttgatctcgatgctcttctcgatatgtctactgatgatcttgtcaagctcttctcttctcgtattcgtagaaggttctctagaggtttgacaaggaagccaatggctctgattaagaagctgaggaaagcgaaaagggaggcaccacaaggtgagaagccagaaccagtgagaacccacttgaggaacatgatcatcgtccctgaaatgattggaagcatcattggagtgtacaacggaaagactttcaaccaggttgagatcaagcctgagatgattggtcactacctggctgagttctctatctcatacaagccggtcaagcacggtaggcctggtgttggtgctacccac

SEQ ID NO: 165424 - DNA, 491 bp, Arabidopsis thaliana columbia
cacacacaatcaaaagaagatcaagccaaattcataggcattgcgaattttaattgatcactctctctctctatctctgttcacacatctctcccaaagatattttggaatttgattagtaggtagaagaagatggggacgacgttagatgtatcaagagcagagctagcacttgtggtaatgtatttgaacaaagcagaggcaagagataagttatgcagagctatacagtatggttccaagttcttgagtggtggacaacctggtactgctcaaaatgttgacaaatctactagcttagcaagaaaagtcttccgtcttttcaagtttgtgaatgacttgcatggtcttatcagtcctgtgcctaaaggaactcctcttcctcttgttttacttggaaagtcgaagaacgcacttttatctacattcttgttcctggatcaaattgtctggcttgggagatcaggaatatataagaacaaagaacgagc

SEQ ID NO: 165425 - DNA, 326 bp, Arabidopsis thaliana columbia
  unsure (1)..(326): unsure at all n locations
aaagaagaacaatggcttcctctatgctctcttccgttactatggtggcctctccggctcaggccactatggtcgctcctttcaacggattaaagtcctccgctgccttccaggccacccgcagggctaacaacgacattacttcatcacaggcaacggcggagagtaactgcatgcggtgtggcctccgattgaaaagaagaagttgagactctctcttaccttcctgaccttaccgattccgaattggctaaggaagttgactaccttatccgcaacaagtggattccttgtgttgaanntcgagtggagcacggatttgtgta

SEQ ID NO: 165426 - DNA, 241 bp, Arabidopsis thaliana columbia
attggagctctcggagacagaggaaaattcgtcttctatcctcccaccgggctcgagaaagccgtcattcctcccggcaaaaacgtccgatctgccctcggtctcaaagaacaaggtccattgtttgggttcacgaaggcgaacgagttattcgtaggaagattggcacagttgggaatagcattttcactgataggagagattattaccgggaaaggagcattagctcaactcaacattg

SEQ ID NO: 165427 - DNA, 74 bp, Arabidopsis thaliana columbia
gatgtgttagtgatcatctatgggagaaacatttgaagaccaaatggggcaaaatccttggccctgctgctcac

SEQ ID NO: 165428 - DNA, 140 bp, Arabidopsis thaliana columbia
gcttgaaaagttcaaagagttgttatttcatccgcaagattttacatgtagtgtgatccctttttaaatttgttttgtttgtctagcattattatataaaatacgaataaaatcttacaaatatagatgttccaggaatt

SEQ ID NO: 165429 - DNA, 295 bp, Arabidopsis thaliana columbia
ttttcttagggttcttgtttcgctatctcttaatcacaaacagctctgtccgaataatctctcttcaagtacctcttttttctgattctgtatatcgccatgaattactgatttccctctctataaacccatcaaagtaaaccaatttctcctgtgacttgtacctaactcgatcttaccagactggtgatggcgtctttgaaccctttcgatcttctaggagatgatgctgaggatccaagccagctcgctgtggctttgtctcagaaagtcgagaaagctgctgctgctgttc

SEQ ID NO: 165430 - DNA, 247 bp, Arabidopsis thaliana columbia
  unsure (1)..(247): unsure at all n locations
ttttcttagggttcgagatgcgcaatcttaaaatcacattacagctccgaccgaacaatcgggggggaagtacctgaaatttgtgaggccgcacatcgccatgaattactgatttccctctctataaacccatcaaagtaaaccaatttctcctgagacttgcaccaaactcgatcttaccagactggngatggcgactatgaaccctttcgatcttctaggagatgatgctgaggatccaagcaca

SEQ ID NO: 165431 - DNA, 391 bp, Arabidopsis thaliana columbia
ctcgtccacatctttctcctttggtggcaaacactacgacagatagagagaaacgatggcgtcgaactcgcttatgagctgtggcatagccgccgtgtacccttcgcttctctcttcttccaagtctaaattcgtatccgccggagttccactcccaaacgccgggaatgttggtcgtatcagaatggctgctcactggatgcctggcgagccacgaccagcttaccttgacggttctgctcctggtgactttgggtttgacccacttggacttggagaagttccagcgaaccttgagagatacaaagagtcagagctcatccactgtagatgggctatgctcgctgttcctgggattttggtaccagaagcattaagatatgggaaccgg

SEQ ID NO: 165432 - DNA, 379 bp, Arabidopsis thaliana columbia
cttagaaagaaaagaacttaaatcaaaatacttaatagtatggcgatacatttatacaaaacttctaccccgagcacacgcaatggagccgtagacagtcaagtgaaatccaatccacgaaataatttgatctgtgggcagcatcattgtggtaaaggtcgtaatgccagaggaataattaccgcaaggcatagagggggaggtcataagcgtctataccgtaaaatagattttcgacgaaatgcaaaagacatatatggtagaatcgtaaccatagaatacgaccctaatcgaaatgcatacatttgtctcatacactatggggatggtgagaagagatatattttacatcccagaggggctataattggagatacca

SEQ ID NO: 165433 - DNA, 476 bp, Arabidopsis thaliana columbia
atcatcaatggctctggatgcattcttcttctatttctctctatttcttctgtttccgtcaccatccgcgtcagaatccactactcagttttgtagtgcagggagagagaatggtgtgggatcttgtggggtttcatcgacgaggattttgattaaaggaggtactgttgtcaatgcacaccatcaagaacttgctgatgtttatgtggaaaatggtattattgtcgctgtgcagccaaacattaaggttggggatgaagtcactgtcctcgatgctactggaaagtttgtcatgccaggaggaattgacccccacacgcaccttgccatggaatttatgggtaccgagactattgatgatttcttcagtggtcaggcagtggctttagctgggggaacaactatgcatatagactttgttatacctgtcaatgggaatctgttggttgggtttgaagcctattgaaaacaatcta

SEQ ID NO: 165434 - DNA, 469 bp, Arabidopsis thaliana columbia
cacaaggagagaagagagaaagagagaaagtgagtcagagataatggcgtacagtgcgtgtttcctacaccagagcgcattggcttcatcagccgcacgatcatcatcttcctcctcatcccagcgtcacgtgtcgctctccaaacctgttcagatcatctgtaaagctcaacagtctcatgaagacgataactccgccgtctcccgccgtcttgctctcactctcctcgtcggcgccgctgctgttggttccaaagtatctcctgctgatgccgcctacggtgaagctgcaaacgtgtttgggaagccaaagacgaacacagacttcttgccatacaatggagatgggttcaaagtgcaggttccagcaaaatggaacccaagcaaagagattgagtatccaggacaagtccttaagttcgaagacaacttcgatgctactagcaatctcaatgtcatggtcactcct

SEQ ID NO: 165435 - DNA, 469 bp, Arabidopsis thaliana columbia
aaaaggaagagcctctccagcgattggaaatgttactggtagcaaattcaagctggagagacaaggtgatgctattgttgggttccatggacgggtaggctcttgtattgatggtatcggggtgtattacgctccacttccaccttctcctcctcctccagagaaactccaaggccaaggtggtgacggtggagattcttgggacgatggtgctttcaaaaatgtgaagaagatatatgtaggacaaggcgatgttgggattgctgcagtcaaatttgagtacgagacttacactagtgaggtgattctggcagaaagacatggaaaggaaacattgctcggatacgaagagtttgaactggactatccgagtgagtacattacagctgtggaaggttgtcacgataaagtaattggatctgaaactggagttataaccatgcttaagttcaagaccaacaaacgtaac

SEQ ID NO: 165436 - DNA, 317 bp, Arabidopsis thaliana columbia
aaaccttctccatggctgcaactactcatctaaccattcactcctcagattcaacttttcaaccccaaaacctctcctgatctcctaacggagctgctcacgacgattcaaagtcttgtcagagaccatcaccgtcaaattggaagaggaggagaaggatgatggtgcaagtgctgttcttgatcctcctgccgccgttaacactaagctctacttcggtaacttgccttacaatgttgacagtgcaactctggctcaaatcattcaagatttcgctaaccctgagctcgttgaggttctttacaacagagataccg

SEQ ID NO: 165437 - DNA, 412 bp, Arabidopsis thaliana columbia
  unsure (1)..(412): unsure at all n locations
gttgaagctaagaaaggagaatggttgcccggtttgcttcgcctgattatctcaccggcagtcttgccggtgacaatgggtttgacccgttgggtctagcagaggatccagagaacttgaaatggttcgtccaggcagagctggtcaacggacgatgggctatgctcggtgtcgctgggatgcttttgccggaagttntcaccaagatcggaatcataaatgttcctgagtggtacgatgctgcgaaagagcagtattttgcatcgtcgtcgacattgttcgtgatcgagttcatattgtttcattacgttgagatcagacggtggcaagacatcaagaactccagaagcgtgaaccaagaccctatctttaagccatacagcttacctaaaggtgaaggttgttaccctgg

SEQ ID NO: 165438 - DNA, 483 bp, Arabidopsis thaliana columbia
aaaaaaaaaatggctcaagcagtgacttcgatggctgtcttacgtggagcatctcaggctgtccttgaaggaagtttacagatcaacggctcaaaccgtttgaacatctcaagagtctcggttgggtctcagagaaccggacttgtgatcagggctcagcagaacgtgtcagtaccagaaagtagtcgccggtcagtgattggactcgtggcggctggtttagccggtggttcattcgttaaagctgttttcgccgaagctattccgatcaaagttggtggtcctccacttccttccggtggcctacctggaacagataactcagaccaagcaagagacttttcattggcattgaaagatagattttacatacaaccattgtcaccaacagaagctgcagctagagccaaagattctgctaaagagatcatcaacgttaaatcatttatcgacaaaaaagcttggccctatgttcagaacgat

SEQ ID NO: 165439 - DNA, 261 bp, Arabidopsis thaliana columbia
ccacgcgtccgacaagaagagactagtcagcgcttcggtcaaggtaaattcctcactatccgctctctagaagcgcgcagtctacgagagttttctgtcatacaaaacgctcttgtattgatggtatcggggtgtattacgctccacttccaccttgagacggaccttcagagaaactccaacgccaaggtggagacggaggagattcttgggacgatggtgctttcaaaaatgtgaatccactctactgttctggttctg

SEQ ID NO: 165440 - DNA, 385 bp, Arabidopsis thaliana columbia
acaaaacccaattagccggagatggccgcaacattcgccgctgctgcagctgcttcttccatcatgggtactcgggtggctcccggtatccatcccggttcaggtcggttcacagccgtgttcggtttcggaaagaagaaggcagctcccaaaaagagtgccaaaaagacggtgactacggaccggcctctttggtacccaggcgccatttctcctgactggcttgatggttccttggttggagattacggttttgatcccttcggtttaggcaaaccggccgagtatcttcaattcgatatcgatcactagaccagaatctggctaaaacttggcccggggcgtgatcggacccggacggaagctgccgacgccaaatcgacgc

SEQ ID NO: 165441 - DNA, 376 bp, Arabidopsis thaliana columbia
ctccatcatgggattttgatgaaggtgagggtagtcgtaaatggatgaagccgccacctgcaagtaaaaagtcagtgaatgttttggctcctgaggagaggaaaaatttgaggaaagccataaaggcggcacactcgaataccatgagggcaagacttctgaaagaatttaagtgccagatctgtcagcaagtgttgactcttcctgtgacaacaccctgtgctcataacttctgcaaggcttgcttagaagcgaaatttgctgggaaaactcttgtgagagagagaagcacaggtggacggacactacacttaagaagaatgctctgaactgtccttgttgccaacagacatatttgttttttgcagaacccctc

SEQ ID NO: 165442 - DNA, 405 bp, Arabidopsis thaliana columbia
caactttaacatccttgaaactagctctctagctttggccattatcatcacagccttcactttacaggatggaacttctcattacatgaagggactggttctattgttatgctatgtcatcatcgcggcgtgtttcttcgtcgaccaaattccccaaccaaatgatttggacgtgggacttcaacccatgaacaatttgggagaagttttctcagcttaaagctatcaaatgacttgtcaaaaaagaagaagagaagaaatcagcaaattatgatttgattgattcgtcatccaaaaacggagagactttgtcagagggattcctcaagcatgaatgagggagggagcttgatgaatacagaagttcttggtgtttaagaaaagatcacattaatttctggttgc

SEQ ID NO: 165443 - DNA, 433 bp, Arabidopsis thaliana columbia
cagaagtccttggaagcggccgtgtgacaatgtgtaagactgttgccaagccaaagggtccatcaggcagcccatggtacggatccgaccgagtcaagtacttgggtccattctctggcgagtcacccagctaccttaccggagagttccctggagactacggatgggacacagctggtctatccgctgaccccgagacattcgcaaggaaccgtgagctagaagttatccacagcaggtgggccatgctcggagccctaggctgcgtcttccctgagcttttggccaggaacggagtcaagtttggaagagcaagttggttcaaggctggttcacagatcttcagcgatggagggctcgattacttgggaaaccctaacttggttcacgctcaagagcatttggccatttgggccacacaagttattttgat

SEQ ID NO: 165444 - DNA, 478 bp, Arabidopsis thaliana columbia
  unsure (1)..(478): unsure at all n locations
ctctcccgcaaccttcgattttcgtttattcgctctcatcggagagagaaaacaatcaataagcgaccatgttggtgtaccaagatcttctcaccggtgatgagcttctgtctgactctttcccttacaaggagattgagaatggaatcctctgggaagtagaaggaaagtgggttactgtgggagctgtagatgttaacattggtgccaatccatctgctgaagaaggtggtgaggatgaaggtgttgatgactctactcaaaaggntgttgacattgtcgacaccttcagacttcaggagcttccaacttatgactagatgggattcatcgcttacattaagaaatacattaagcttttgacacccatgctcatctattaatatcaagctgtcttcaagataggttttgagggagctaccaagtttttgctccccagcttcattgctttcatttcattgttggagattctttcatt

SEQ ID NO: 165445 - DNA, 391 bp, Arabidopsis thaliana columbia
gtaccgaaccgcagtttcgacccaggcgcacgcagacgatgtgtgctaactactccgaaacgcgctgtatacctttgcgggttacccttgcattcgtcccattcatgtcaaagctacagactttgtcttctctggcttaggcactcctggaaacactacatacatcatcaacgccgctgtcacacccgctttcgcagctcagttcccgggtctgaacggtctaggcctctctacagctagacttgacttagctcctaaaggtgtgatcccaatgcacactcaccctggtgcctctgaggttctctttgtccttactggctccattaccgctgggtttagctcctcggcaaacgctttctacgtgcagacactcaaaccaagacaggtcatg

SEQ ID NO: 165446 - DNA, 262 bp, Arabidopsis thaliana columbia
acagaaccgcagtttcgacccacgcgtacgcggacgcgtagggcttgagaatcattcctgcctcttatcctgctcaagggtatggattgactgagagttgtgggggaagcttcacgaccttagccggagtattttctatggtggggacagtgggtgtgccaatgcccacggtggaggcacggctagtgtccgtaccatagatggcgtacgacaccttttgcgctgacgtgccgagaggagagattcgtcttagaggaaattc

SEQ ID NO: 165447 - DNA, 448 bp, Arabidopsis thaliana columbia
cgtcaataatgatagcatcaccatcggagagagatcattcagatgacatgtcattggccggagacggattcgacacggtggtgaaggcgaagcaagccgttgatagcaatcccaattgccgcatcaaagtctcatgtgctgacattttggctctcgccactcgtgaagtcgtcgttttgaccggaggaccaagctacccggtggagctagggaggagagatggcagaatctccacgaaggccagcgttcatagccaattgcctcagcccgagtttaacctaaaccagctcaacggcatgtttagccgtcacggcctctctcaaaccgattttgatggccctttcaagagcacacactatatgatttgcacattgtggaaaaatgtcttagagaatatacaattttagccctacaactcgtatcgtcccgtgtatataccgtggatacg

SEQ ID NO: 165448 - DNA, 474 bp, Arabidopsis thaliana columbia
aaacactggaactttctttggtagttcatgttacttcatcttctattgatctcagcttctctcaaatcaaaatcggttccggatccgttaagaaattttatcagggaaggaagagtgagagaacagtgttggtgcatgtgatcggagagaagattccattatatggaagtggttcgactttacttccaccggctcctccagcaccacttcctaaacccaagaagaagaaaggagctccagtccctattcccgacccgcccgcaccaccagcaccggtaccaatgacgctcagctttgtcgtccgatcacgagcatacgtgttggagaagttagtgcagccaaagttctataagaaaatcgagtgtgacatcaacttcgaacacaagaatcttaataagcatatagtcatcaccaagaattgcaccgtcactacagtttgaaggaagggacataagaaaaagtaacatacttttt

SEQ ID NO: 165449 - DNA, 435 bp, Arabidopsis thaliana columbia
aaattgttgatttggaggatgtggagcaagctttttttgatgtaaagatatcgtcgtcgaatgtcgggtttcgtcttcttcagaaaatgggttggaaaggaaaaggtcttggaaagcaagagcaaggtataacggagcctataaagtccggtataagagatcgaagactcggtttagggaaacaagaagaagatgattatttcactgcagaggaaaacatccagcggaagaaacttgatatcgagattgaggagactgaggaaatcgcaaagaaacgggaggtcctagcagaacgtgagcagaagatccagagcgatgttaaagaaatccggaaagtcttctattgtgaactatgcagcatacagtttagaacggggttggagtttgaaggtcacttgagctcatacgatcacatccattagaagcgattcaaag

SEQ ID NO: 165450 - DNA, 321 bp, Arabidopsis thaliana columbia
ccgcagttccggcgccgacccacgcgtacgagtaatcctaactatacaaaacacatatctatatgtctccttcaacaaaagttctctctttacttctcttatatgtcgtcgtgtcattagcctccggtgatgagtccatcatcaacgaccatctccaacttccatcggacggcaagtggagaaccgatgaagaagtgaggtccatctacttacaatggtccgcagaacacgggaaaactaacaacaacaacaacggtatcatcaacgaccaagacaaaagattcaatattttcaaaagacaacctaaggattcatcgatct

SEQ ID NO: 165451 - DNA, 376 bp, Arabidopsis thaliana columbia
aagaaatttgcagaagagagaaaaacaaatatatgtgtggttctttgctcgtcttcgacggtgatactctcttcttcttccgtgaaatcctccggaagtgagagaaagtctccgtttttagggttctctttaacggctatctcgaagccgtcggtacgagtcggcatttatgcgaattcgaaaagaggattgcaagtgaagtgtgaagctgagccgacgacgacgacttctcttgttccggcgaatcaacgatggatgttcgacgaagaagaagctaatggccctgacatctggaacacgacatggtatccaaaagcttcagaccatgtgaacacggacaagccctggtttggggttgatgcaactgacataattc

SEQ ID NO: 165452 - DNA, 484 bp, Arabidopsis thaliana columbia
ccaatctcttcttcaaatttagatcctttctttcttcaatctctgtattcgattagattcatctttcttcactcgaataacgggtttgagattctctctacgttacgcgtttttaaatggtgaccgtttctggagattcattgcagatctgaataagaggatgacatgatcacaaacccagaatctcaaattctgatttttattcctatttgttgttgatcatcatgtcgacgactcatgttggtttaccaacgaaaatggaagctacgaagtcgtcgaaacaaaattgttgcaacccggttaagaaacccggacccgtttcaattgatcatgttctcttagctctccgtgagacaagagaagagcgagatttacgaatcaggagctttatcagtttctttgattctgagaattgttggtacttagattgtgctcaaattgagaagggggtatgtgcgcttcaaatcccaagtgggtataaata

SEQ ID NO: 165453 - DNA, 348 bp, Arabidopsis thaliana columbia
ccagtaccttgttgacattgctgcgcttacaggtgctactgtgattagggaagaagttggacttcagttggagaaagttggaccagaagttttgggtaatgctggtaaagtggttctcacaaaagatactacaacgatagttggtgatggaagtactgaagaagttgtgaagaagagagttgaacagatcaagaatcttatcgaggctgctgaacaagactatgaaaaggaaaagcttaatgagagaattgctaaattatcaagcggtgttgctgtaattcaggttggagcacaaactgtgacatagcttaaggagatgaaattaagagcggaagatgctctttatgc

SEQ ID NO: 165454 - DNA, 400 bp, Arabidopsis thaliana columbia
gatttaaaggccaatactccggggattgttaaagtagtcatctcaacacattgtcagaatgatcttggactctctacggccaacactttatctggggcacatgcaggtgcgaggcagatggaagtgacgatcaatggaattggtgaaagagctggaaacgcttcactggaagaggttgtgatggccataaaatgccgtggagatcatgtattaggaggtctatttaccggaattgatactcggcacattgttatgacaagcaagatggtagaggagtacactgggatgcagacacaacctcataaggctattgtaggagcgaatgcctttgcgcatgatagtggaattcaccaggatggaatgctgtaacacaagggtacatatgaaattatttgtcccg

SEQ ID NO: 165455 - DNA, 393 bp, Arabidopsis thaliana columbia
ctctctctaatcaaaaagcttttaacctcagtcgttaaatctttctccgatcatgccgaccagaaacatcgccattggtggagtccaagaagaggtctatcaccccaacgcacttagggcggcgctcgctgagtttatctcgactttgatcttcgtcttcgccggctcaagctccggaattgctttcaacaagatcactgacaatggagcaaccactccttccggcctcgtcggcgctggcttaactcatgctttcggtctctttgtcgctgtctctgttggcgctaacattttcggtggccacgttaaccctggcggtacctttggtggtttactcggtgggaacaatactcttctccgcgggattctctactgggattggtcaaacttttt

SEQ ID NO: 165456 - DNA, 467 bp, Arabidopsis thaliana columbia
accggctactaatcgctttcattatatcatccaatccctctacttctcagattctctccgtccaatcagaaaataaatcctattctcagccttgcgatgttgcagtctcaatacgagaacagaagttctccgatgactgacacgtaccctggtacatttccttaaggatctctgatgacaggactacatgattctcattcctacttacgtcaagagctcgattcgagactatatatagggctgatcatgacagcgtcggctgatgaagggataccatcgaaagcggtcgctacgatatagacgaagcttaatcgttgccacccggttaagaaacccggacccgtttcaattgatcatgttctcttagctctccgtgagacaagagaagagcgagatttacgaatcaggagcttattcagtttctttgattctgagaatgttggttacttagattgtgctcaaattga

SEQ ID NO: 165457 - DNA, 380 bp, Arabidopsis thaliana columbia
aaaaaaaaaaaaaaaaaaaaatttgaaagaaaaattctcgtacggagtacgaaagaataaaataataaatgtctttgacatccaattataccactgaaattttttttcatttttgaatggcagttccaaaaaaacgtacttctatctcgaaaaagcgtattcgtaaaaaaatttggaaaaggaagggatattggacatcgttgaaagctttttcattagggaaatcactttctacaggtaattcaaaaagtttttttgtacagcaaaataaataaaaaacactataataattagaattagcctaacttaaaaaccaatttgtttaaatacatctaaaaaaaataggaagcaaaagaagaaaaaagacaatatatagataa

SEQ ID NO: 165458 - DNA, 385 bp, Arabidopsis thaliana columbia
ataaaagttaaagccatggctgcatctttctctgtcctctctatgataatggaagaagaagggagattcgaagcggaggttgcggaagtgcagacttggtggagctcagagaggttcaagctaacaaggcgcccttacactgcccgtgacgtggtggctctacgtggccatctcaagcaaggctatgcttcgaacgagatggctaagaagctgtggagaacgctcaaaagccatcaagccaacggtacggcctctcgcaccttcagagcgttggaccctgttcaggtgaccatgatggctaaacatttggacaccatctatgtctctggttggcagtgctcgttcactcacacattcactaatgagcccggtcctgatcttgctg

SEQ ID NO: 165459 - DNA, 263 bp, Arabidopsis thaliana columbia
gaagaagaaagggagagggaagcggagggagcggaagcgcacactcgccggagcccagagaggaacaagcaaacaaggcgcccagacaccgcccgagacgaggaggctcaacgaggccagcgcaagcaaggcgacgccccgaacgagacggctagcaagctgaggagaacactcaaaagccatcaagtcaacagaacggcctctagcaccttcggagcgttggaccctgttcaggagaccatgacggctaaacattagaactc

SEQ ID NO: 165460 - DNA, 469 bp, Arabidopsis thaliana columbia
agccgttgaccccaagaacggtagtctcggaactttctcaccaatcgccataggtttcatcgttggagctaacatcctcgccggtggagctttcagcggagcttccatgaacccagccgttgctttcggaccagccgtcgtaagctggacgtggaccaaccactgggtttactgggctggtcctcttattggtggtggactcgccggaattatctacgactttgtcttcatcgatgaaaatgcccacgagcaattgcctaccaccgattactgaagacgtcaaattcaacgttgttaatctgatgaatttttcgagatttgcttttttaatttgcatcgtaatgggtttctagcccgtggatcatttttagatgaatctttgtctattgattgatcaattatgtgtctttggggttgtggtggagtggaatatctccggaaagctttttgcaattgtatttgacggttt

SEQ ID NO: 165461 - DNA, 402 bp, Arabidopsis thaliana columbia
ctcctctcctagctttgaccggaaaggccgttaatctatccccggcggcctccgaagtatttggaaccggccgaatcaccatgcgcaaagcctccaagcccaccggtccatccggcagcccatggtacggatccgaccgagtcaagtacttgggtccattctccggtgagcctccgagctacctcactggagagttccccggtgattacgggtgggacactgccggtctatccgccgatcccgagaccttcgctaggaaccgtgagctagaagttatccacagcagatgggccatgctcggagccctaggctgcgttttccctgagctattggctaggaacggagtgaagttcggagaagcgggttggtttaaggctgggttacagatcttaatcgactgat

SEQ ID NO: 165462 - DNA, 463 bp, Arabidopsis thaliana columbia
ctcttatctcctttcctttcattgtagttaacgtaaagattacgataatggcaacatcagctatccagcaatcctccttcgccggccaaacggctctcaagccctccaacgaactcctccgcaaggttggtgtatccggtggtggccgtgtgaccatgcgtcgtaccgtcaagtctactcctcaaagcatctggtacggaccagaccgtcccaagtacttaggaccattctcggagaatacaccgtcctacctaaccggagaataccccggagactacggctgggacaccgctggactctcggctgacccggagacattcgctaagaaccgtgagcttgaagtaatccacagcagatgggctatgttgggtgctctcggatgcacattccctgagattctctccaagaacggtgttaaattcggagtagcccggtggttcaaggcaggttctcagattttctc

SEQ ID NO: 165463 - DNA, 341 bp, Arabidopsis thaliana columbia
gttcaaggaagaagatggtatcgattacgcagctgtcactgtccagcttccgggaggagaacgcgtgccgttcctcttcacggttaagcagctcgaggcttcagggaaacccgaaagcttcagtggcaagttcttagttccatcgtaccgtggctcgtcctttttggacccaaagggtcgtggtggatccactgggtacgataatgcagtggctttgcctgccggaggcagaggagacgaggaagagctatccaaggaaaacgtcaagaacacggcggcttccgtcggagagatctctttgaagatcacaaattgcataccggaaacaggttatgtgatcg

SEQ ID NO: 165464 - DNA, 248 bp, Arabidopsis thaliana columbia
ggttacgtctagaatctttcgggccccttttagtctactcgccggcgcaggcttcgccggcggctattttttaccctatttcatctcccctctcctctgatatacccataaaaacacataaggatcgaaacgatcataacttcgactctagctatggtgatttagtcatacgattccatgtctttgtcttctttcaaattctaggagtttgagatttggttttagcttaataacgagaggggagggaa

SEQ ID NO: 165465 - DNA, 477 bp, Arabidopsis thaliana columbia
  unsure (1)..(477): unsure at all n locations
gaaagattcaagcatttgacggtaaaggccacgttgcaaagctatgcatagtcatactccctttgctatttgcagctcttgtcggcatttcccgtgttgatgactattggcatcattggcaagacgtctttgcaggaggcttgctaggtcttgcgatctctacaatctgttatcttcaatttttcccgccaccatatcacaccgaaggttggggaccatatgcttacttccaagtgttggaggctgcgagagtgcaaggagcagcgaatggagcagtgcagcagccgccgccccaagttaacaacggtgaagaagaagacggtgggtttatgggtttacatttggtggataatccgactatgaggagagaagaggatgtagaaactggtagaggctgagatgaagaaactctgaagcttggttaggtacttgttaggacactntctcttagtcttttgattctttgtggacaacttt

SEQ ID NO: 165466 - DNA, 456 bp, Arabidopsis thaliana columbia
atcactcttttcgtcttctctcgaaaatgtgtgttcaatgattctctagatcagtttttggctgccgccattgatgccgctaaaaaagctggacagatcattcgtaaagggttttacgagactaaacatgttgaacacaaaggccaggtggatttggtgacagagactgataaaggatgtgaagaacttgtgtttaatcatctcaagcagctctttcccaatcacaagttcataggagaagaaactacagctgcatttggtgtgacagaactaactgacgaaccaacttggattgttgatcctcttgatggaacaaccaatttcgttcacgggttccctttcgtgtgtgtttccattggacttacgattggaaaagtccctgttgttggaagtgtttataatcctataatggatgagctatttaccgttgtacaagggaaagggagcttcttgaat

SEQ ID NO: 165467 - DNA, 461 bp, Arabidopsis thaliana columbia
  unsure (1)..(461): unsure at all n locations
gcgaacaccgctctttgtcatcaatgccgcttttgattcttggcagatcaagaacgttttggctccaactgctgttgataagggaaaagagtggaagaattgtaagcttgatcttaagaaatgtagtgccgctcagctcaaaaccgtccaagggtttagagatcagatgatgcgagcattgtcaccggttcacagtacaccgtctagaggattgttcttagactcgtgtcacgctcattgccaaggaggaagcgccgcctcttggtccggtgacaaaggtccccaagtcgccaatacgagaattgcgaaagcagtcggaaactggttttatggccggagtgcatttcagaagatagattgtccgtcgccgacttgtaatcctacttgtcctgctatctctactgaagactagaatcatctctaaatgttcaantttttttaattngaaaatgaaagagctc

SEQ ID NO: 165468 - DNA, 475 bp, Arabidopsis thaliana columbia
  unsure (1)..(475): unsure at all n locations
cttgttctttggacgaccatcggcgacagagtttagtctagagtcttcttcttcttcggcgtagttttttccccggcttgaaaaatgggtctatccttcggaaagttgttcagcaagctctttgcaaagaaagagatgcgtatcctcatggtgggtctcgatgcagctggtaagactacgatcttgtacaagctcaagcttggagagatcgtgactacgattccaaccattggtttcaatgtggagactgtggaatacaagaacattagctttaccgtgtgggatgtcgggggtcaagacaagattcgtccattgtggaggcactacttccagaacactcagggacttatcnttgtggtggacagcaatgatcgtgaccgtgttgtggaagccagagatgagcttcacagaatgttgaacgaagatgagttgagaggatgctggcttctcgtttttgctaactagcaagattttt

SEQ ID NO: 165469 - DNA, 389 bp, Arabidopsis thaliana columbia
cggacgcgtgggattcttcttcaagtgccgggttctcgggtcggatcttctaagtctagctagggataatggctactgtcactactcatgcctcggcctcgattttccgaccttgtacttcaaagccaagattcctcaccggttcttccggtaggttgaaccgcgacttgtcgtttacatcgatcggttcatcggccaaaacgtcgtcgttcaaggttgaagctaagaaaggagaatggttgcccggtttggcatcgcctgattatctcaccggcagtcttgccggtgacaatgggtttgacccgttgggtctagcagaggatccagagaacttgaaatggttcgtccaggcaaagctggtcaacggacgatgggctatgctcggtgtc

SEQ ID NO: 165470 - DNA, 469 bp, Arabidopsis thaliana columbia
aatcatgaattacaaacaaaaatggttttgcaaattctttctctcattgggctgcttttgctcctgaccatcgtcgcctctccagcaaatgcagatggacctgtttgcccgccgtcgaacaaactaagccgggcaagtttccctgaaggttttttatttggcacggctactgcggcataccaagtcgaaggtgcgattaaagaaacttgtcgtggaccagccttatgggacatctactgtagaagatattcagagaggtgcaatgacgattacatcgatcgtggccgttgacgtcgtccataagtatcagcgaggaataagatgactgtgggatttatgggcaacatctggtagataatccatctattgggcaagaattttttctcaattctgttagatggcttgagattgagaaactctgtagctgttttgtatacttgattgactactgttttttttatattatttt

SEQ ID NO: 165471 - DNA, 483 bp, Arabidopsis thaliana columbia
ggcgtgcttcaatggcgatatcagtagcagcttcttcctctatggccgtgatggttccacgtgttcccgccgtatccacccgttgctccgccgtcccttatcttcctcctcgctcctttggccgatcctctttcaccgttccgttgaagcttgtttcagggaatggattgcaaaaagttgaattgttgaagacaagagcttcttcagaagagacctcgtccattgataccaacgaactcatcacagatttgaaggaaaagtgggatggtcttgagaacaaatctactgtacttatatatggaggaggagccattgttgctgtttggttatcttccattgttgttggtgccatcaactctgttcctctgcttccgaaagttatggaacttgtcggtctcgggtacactggatggtttgtctacagataccttctcttcaagtcaagcagaaaggaattggctgaggatattgaatccttgaaga

SEQ ID NO: 165472 - DNA, 442 bp, Arabidopsis thaliana columbia
ggttccttcagcgtatggacttggcacgtaaattctcctttggaaagatgcttatttgcgggtcagagggtcctttcaaggtgaagggtttatggcttttccgtggaccagagatccccaagttcataatggatgaggtgtacgacatggagctgtacgagtggactaaggttgatatctccgatgaagcacagaaggagcgtgttagccagatgattgaagacgctgagccatttgaaggcgaggctcttttggacgccaaatgctttaagtgaaaaggctctttgtatctccgtagaggtttactctgttactcgtgttttgataccttctagagagtccttaccaccttttgaatcgtactcgggtttaagaactagttgcttctcaatgttattttgacagaatattggtcttaaatacattacaacttctagttatt

SEQ ID NO: 165473 - DNA, 271 bp, Arabidopsis thaliana columbia
caaatattaccaaaattagatcatatctactaattatgtttctatattaaataatacatatagttagaatatttggtaataatttaaatctatgattctcttttcatctttatttaattttttttaatttttttggataatcgtataatacataaagttaaacaattttttttcatatattttgattcaaattttgaaaacgaacatatattatccaattattgaaaaagtatatgaaaaatataataataaaaataattataaaaaatta

SEQ ID NO: 165474 - DNA, 486 bp, Arabidopsis thaliana columbia
gaagaacaatggcttcctctatgctctcttccgctactatggttgcctctccggctcaggccactatggtcgctcctttcaacggacttaagtcctccgctgccttcccagccacccgcaaggctaacaacgacattacttccatcacaagcaacggcggaagagttaactgcatgcaggtgtggcctccgattggaaagaagaagtttgagactctctcttaccttcctgaccttaccgattccgaattggctaaggaagttgactaccttatccgcaacaagtggattccttgtgttgaattcgagttggagcacggatttgtgtaccgtgagcacggtaactcacccggatactatgatggacggtactggacaatgtggaagcttcccttgttcggttgcaccgactccgctcaagtgttgaaggaagtggaagagtgcaagaaggagtaccccaatgccttcattaggatcatcggattcg

SEQ ID NO: 165475 - DNA, 486 bp, Arabidopsis thaliana columbia
tatcttcctcttaaaccaaccattcaaaatgttgcgtactatcttcctcttatctcttctctttgctctatccaatgcctctgttcaagatttctgtgtcgcaaacctgaaacgcgctgaaacccctgcgggttacccttgcattcgtcccattcatgtcaaagctacagactttgtcttctctggcttaggcactcctggaaacactacaaacatcatcaacgccgctgtcacacccgctttcgcagctcagttcccgggtctgaacggtctaggcctctctacagctagacttgacttagctcctaaaggtgtgatcccaatgcacactcaccctggtgcctctgaggttctctttgtccttactggctccattaccgctgggttgtctcctcggcaaacgctgtctacgtgcagacactcaaaccaggacaggtcatggtttcccacagggcttgcttcatttccagatcaacgcgggaaaat

SEQ ID NO: 165476 - DNA, 416 bp, Arabidopsis thaliana columbia
cttgggtccattctctggcgaatcaccgtgtcttctcttaccggagagttccccggagactacggatgggacaccgccggactttcagctgaccccgagacattcgcaaggaaccgtgaactagaagttatccacagcaggtgggccatgctcggagccctaggctgcgtcttccctgagcttttggctagaaacggagtcaagttcggagaggcggtttggttcaaggccggttcacagatcttcagcgatggagggctcgattacttgggaaaccctagcttggttcacgctcagagcattttggccatttgggccacacaagttattttgatgggagccgttgaaggctacagagtcgcaggaaatgggccattgggagaggccgaggacttgctttaccccggtggcagctt

SEQ ID NO: 165477 - DNA, 456 bp, Arabidopsis thaliana columbia
ctcctttgcttctctcataatcatcctttgatgtcaatgtgatttctcattttcaattattgtatattcagattattgatacgagaagtgggaatttgcgatgcacatttcagtctcaggtttcttgtgggattcagagagatgataatggacgccgtgtttggcggaggagaacattgacgaagaaggacgatatgttgcgttacaaaatgcaaagagttccatttgtggaagaacaagtaaggaagataagagaagttgggaaggtaatgacaatggacatagagcagcttcttttgagggaagacaatcggtttgaatttgtcaatagcgtagcagctgaagcaacagagtacgtggacatgaacagagacgaatttgggaggttcaaaaaagccatctttcatggtctaagcaaccgggtgaaccatctcagctttgatcggccctgggctt

SEQ ID NO: 165478 - DNA, 457 bp, Arabidopsis thaliana columbia
  unsure (1)..(457): unsure at all n locations
ggtggaagaagctcttgtgatggtctatttcatgtctctataactggtgttgagactggaagaagaagcttgtgtgaagacggaatgtttcatggcgttgaaggcaaacggaatcatcttctccagagtgatgacaagcttggtacttactcgcctgacaacctcagaaatggtatggttagattctacttgacgccattaaacagccatatgacaagcaagtccggtaaaagtaggctgatgaattagtctgatctctgattagtcagttcatgatggactatattcaaactgggttgtaattagcaattacccttgtgtgttacttatttctcccactgttctatagatatatgaactaaaatcatatgacccatgtgttctctcttctttttccttttctactttttatgtgtattaatgctcttaaagagttcaatacaatanggnatttgtt

SEQ ID NO: 165479 - DNA, 486 bp, Arabidopsis thaliana columbia
atcctcacgtccgccggatttcgaggaaacgattaagttgaagaacatcaacaacaaaagccttttgagatatggacagcttctggcaattaggtgatgagctacgaggtcagacgagagcatcagaggatcacaaatggtctactgttgcaacgaagctagctgagcaaactagaatgaaaggggagaggatgaacaatcttgatctctccaaagagttacactgagtttagaccaagtgagaaattcagtttccaggagaacaatcttaacttcaacatgttgaatttggatggtaaatttggtgaaagcatcatggggaagacttcgatgcagagcaatgcttataatatgaatactggtttccagaagaatgactttaagagtggaggcaacatgaaagttaacaagcataatggtaacgctgttgctatcacggagatgagcttcaacacacataacagcaactgcaatgataatgggaat

SEQ ID NO: 165480 - DNA, 485 bp, Arabidopsis thaliana columbia
attttcacattctcttctctctcgatatcatctttatctctctcgatctcaatttcgcaaaatggctgacaagaagatcagaatcggaatcaacggtttcggaagaatcggtcgtttggttgctagagttgttcttcagagggatgatgttgagctcgtcgctgttaacgatcctttcatcaccaccgagtacatgacatacatgtttaagtatgacagtgttcacggtcagtggaagcaccatgagcttaaggtgaaggatgacaaaactcttctcttcggtgagaagccagtcactgttttcggcatcaggaaccctgaggacatcccatggggtgaggctggagctgactttgttgttgagtctactggtgtcttcactgacaaagacaaggctgctgctcacttgatgggtggtgctaaaaaggtgtcatctctgccccaagcaaagatgcgcccatgttcgtttgtggtgtcaacgagca

SEQ ID NO: 165481 - DNA, 451 bp, Arabidopsis thaliana columbia
gtcgctttgatcgaaatggcgtcgtcttctccatctcttctagctcacgtcccgattcctccagaaccaggaggaaggtcgccgacacaagaagctaatgagccaccagttccgatttacattgtgacggatccgtttcaacttcctgctgatttcctaaacccttctcctgaaaagaaattggttatcggttttgactgtgagggtgttgacctctgccgacatgggaaactttgtatcatgcagattgcattctctaatgcaatatacttggttgatgtcatcgaaggtggagaggtgattatgaaagcgtgtaagcctgcactcgagtctaattacatcacgaaagttattcacgattgcaagcgtgacagtgaggctctatactttcagtttgggataagattgcacaatgttggggacactcagattgcttattttttgattgaag

SEQ ID NO: 165482 - DNA, 461 bp, Arabidopsis thaliana columbia
agaacaacaaccaaacactcatttctccacatttagagagaaaaaaacagagcaagtatattagagatctcatggcgatggcggtctccggagctgtcctcagtgggcttggttcttcgttcctcaccggaggcaagagaggtgccaccgcattggcaagcggcgtaggcactggagctcagagagttggcaggaaaactcttattgtcgctgctgcggctgctcagcctaagaaatcttggatccctgccgttaaaggtggtggcaacttccttgaccctgaatggctcgatggctcgctaccaggagatttcgggttcgacccattgggtttggggaaagacccggcttttctgaaatggtacagagaggctgagctgatccatggccgatgggcgatggcagcggttcttgggatcttcgtcggccaggcctggagcggtgtggcatggtttgaagct

SEQ ID NO: 165483 - DNA, 473 bp, Arabidopsis thaliana columbia
cagtgaagaagaaaaaaaagaaggtcattttcattttctccatttgatttttgccgaccggagaaaatatcttcttgccgtcttcttcttcatttcaccaggaacttttatttgaaatcggtttgatttagccatggcaaacgcggcatcgggaatggctgtgcatgatgattgcaagctgaaatttatggaactgaaggcgaaaagaacattccgtaccatagtctacaagattgaggataagcaagtgattgtagagaaactcggtgaacctgaacaatcatatgatgactttgcagctagtcttccagctgatgattgccgatattgcatttacgatttcgactttgtcactgcggagaactgccagaagagcaagatcttcttcattgcatggtctccggacactgccaaagtgagagacatgatgatttacgcgagctctaaagataggttcaagagagaactagatg

SEQ ID NO: 165484 - DNA, 453 bp, Arabidopsis thaliana columbia
cccatggcttcttcactgaagaagcttatctcaagctttctacttgtcttatactctaccaccatcattgttgcttcatcagaatctcgatgtcggcgctttacatctatcatcagctttggtgattccatcgcagacaccggaaatattctccatctctccgacgtcaatcatcttcctcaaaccgccttttttccttatggtgaaagcttcttccatcctccctctggtcgtgcctctgatggccgtctcatcatcgacttcatcgctgaattcttgggactaccgtatgttccaccttactttggatcccaaaacgttagctttgaacaagggatcaatttcgcggtgtatggagcaaccgcattggaccgagcgtattttgtggcaaaaggaattgaatctgatttcaccaacgttagtttaggtgttcagcttgacatcttcaagcag

SEQ ID NO: 165485 - DNA, 406 bp, Arabidopsis thaliana columbia
cgataatggcaacatcagctatccagcattccttcttcgccggccaaacggctctcaagccctccaacgaactcctccgcaaggttggtgtatccggcggtggccgcgtgaccatgcgttgctccgcgaaggctactgctgagagcatgtgttgcggaccagaccgggcacaggacctaagaccattctcaggaaatccaccattgtacctaacggggatgctcaccctaagctaccgcggatccatggcgggaaatggtggaggcaccttactcgtccctgaatggctggaaggctcgctaccaggagatttcagggtcgacccattgggtttggggatagacccggcttttctgaaatgggacagagaggctgatctgatccatggccgatgggcgatggcagt

SEQ ID NO: 165486 - DNA, 478 bp, Arabidopsis thaliana columbia
gttagtcaccaaaaaaaaaaaaaaacacataatgtttcaatggccgcctccacaatggctctctcctcccctgccttcgccggaaaggctgtgaacctttcccccgcggcatctgaagtcctcggaagcggccgtgtgacaatgaggaagactgttgccaagccaaagggtccatcaggcagcccatggtacggatccgaccgagtcaagtacttgggtccattctctggcgagtcaccgagctaccttaccggagagttccccggagactacggatgggacaccgctggactttcagctgatcccgagacattcgcaaggaaccgtgagctagaagttatccacagcaggtgggctatgctcggagccctaggctgcgtcttccctgagcttttggctaggaacggagtcaagttcggagaaggcgggtggttcaaggccggttcacagatctttagcgatggaggactcgattact

SEQ ID NO: 165487 - DNA, 452 bp, Arabidopsis thaliana columbia
  unsure (1)..(452): unsure at all n locations
ctcatatcgttttctgtttattttattttatcttcatttcatacactatttttctcctctccttattgtctatatatttttcctctttagctttttcatttcgaaatggccaccgttgaggttgaacaagtcactccagtagcagtagagaacgttgaggtaccaacaaagacagtggaggagacagtggtggagacagaggtgacccaacagccggaagaatccgtccccgccgtgacagaacaaaaatccgaagcaccaattgtagaaacaaacgaagaagtggttgtggaagaggcagagaagaaagatgaagaaaccgagaagaaaacagaggagaaagacgagaagacagaagtgatcacggaaactccggtagttgtaggaggaggaaagaaagcttaggaagtgaccgaaactnncgcggttgtggaggaggagaagaagacaga

SEQ ID NO: 165488 - DNA, 412 bp, Arabidopsis thaliana columbia
ctcaccgtggacggtactaaagtacaaagtggtaaatacccctcgggaagaaaaagacacgagtggtccatgcactctgctgaattgcatgatatacaaaaagcgtattcttggtcactagcgacatagtatcaatattgctgaacccggctgtgatccttatggtgaaagcttcttccatcctgcctctggtcgtgcctgtgatggccgtctcatcatcgacttcatcgctgaattcttgggactaccgtatgttccaccttactttggatcccaaaacgttagctttgaacaagggatcaatttcgcggtgtatggagcaaccgcattggaccgagcgtattttgtggcaaaaggaattgaatctgatttcaccaacgttagtttaggagttcagcttgacatcttcaag

SEQ ID NO: 165489 - DNA, 453 bp, Arabidopsis thaliana columbia
  unsure (1)..(453): unsure at all n locations
aaatacacaacttgtaacttcaaatagattactttcatttaagagagagagaaagaaagatggagaagaacatgaagtttccagtagtagacttgtccaagctcaatggggaagagagagaccaaaccatggctctaatcaatgaagcttgtgagaattggggcttctttgagatagtgaaccatggattaccacatgacttaatggacaagatcgagaagatgacaaaggaccattacaagacatgccaagaacaaaagttcaatgacatgctcaagtccaaaggtttggataatcttgagacagaagtcgaagatgtcgattgggaaagccactgtctacgttcgtcacctncctcaatccaatctgaatgacatttcagatgtgtctgatgaatacaggacggtcattgaaagacttgataagagactggagaatcttgctgaggatttg

SEQ ID NO: 165490 - DNA, 397 bp, Arabidopsis thaliana columbia
  unsure (1)..(397): unsure at all n locations
accccgcgtccgcgagagacagattgaaacagcaaatagancactttcacttttgtgagagagaacgaaagacggagaagaacatgaaggttccagnagtagacttgtccaagctcaatggggaagagagagaccaaaccacggctctaatcaatgaagcttgtgagaattggggcttctttgagatagtgatccatggattaccacatgactcaatggacaagatcgagaagatgacataggaccattacaagacatgccaagaacaaaagttcaatgacatgctcaagtccaaaggtttggataatcctgagacagaagtcgtagatgccgttgggagtaacctcatttttcgatcgtcaccttccttatttccaacctcaatgacatgtcagat

SEQ ID NO: 165491 - DNA, 422 bp, Arabidopsis thaliana columbia
gaagaattgtttagattggtggggatgatttcatgtgtgttcagactaagatgaaatccgttttggttgatttccttgttggagctggcattaagcctacttcgattgtgagctataatcatttgggaaacaacgacgggatgaacctctcagcgccacagactttccgctctaaggagatttcaaagagcaatgttgtagacgacatggtagctagtaatggcatcctctttgagcctggtgaacaccctgaccatgtcgttgtcatcaagtatgtgccatatgttgcggatagtaaaagagcaatggatgagtacacgtctgagatattcatgggagggaggaacactatagtgttgcataacacttgtgaggactctcttttggctgcaccaattattttggatcttgtccttctcgct

SEQ ID NO: 165492 - DNA, 489 bp, Arabidopsis thaliana columbia
gagaattaagagagcaaaatgagcataaataggtttctgttgaatatcataataatcctttgtatatgtctcaatttgggttgtaacgatggagctcaagaaagagagactgattctcatactatccaagtcagctctctcctcccttcatcatcatcatcttgtgttctttctcccagagcgtctactacaaagtcttcactgcacgtgacgcatagacacggcacgtgttcgcgtctaaacaatggcaaggccacgagtccagaccattgtcagatcctaagactcgaccaggctcgcgtaaactcaatccactcaaaactatcgaagaaactcgcaacagatcaacgcagtgaaagcaagtcaacggatctaccggctaaagacggaagcacactcggttcaggtaactaacatcgtgcggtcggcctcgggacaccaaagaacgatctatcactaatcttcgacactggaagcgatttaacgtgg

SEQ ID NO: 165493 - DNA, 402 bp, Arabidopsis thaliana columbia
cggacgcgtgggttacctgctggagatgttctataatctgcattagcgggagggcttgcctctgctctctccacttccttaatgcatccgattgacacaatcaagacgtgtgcaagcatcaaccttgtcatttcctgaagtaatagccaagcttccagagattggtgtccggggagtgtataggggttctattccagcaattcttggacaattttcaagccatggcctgcggacaggaatattcgaagcaagcaaacttgtgttgatcaattttgctcccaatctcccagaaattcaagttcaatcgattgcatcattctgcagcacactattaggcacagctgtgcggattccatgtgaggtgctgaaacaacggttgcaggctggcatgtttaacaatgt

SEQ ID NO: 165494 - DNA, 346 bp, Arabidopsis thaliana columbia
aaagaaatggcgacatcgggaacgtacgtgacttatgttccgttgaaaggatcggcggagaaacactacatgagctggaagagcgagaaccatgtcttcgctgacgccattggccaccacatccaaaatgtcgttgttcacgaatgcgaacatgactctcacgggtctatcaggaggtgggactacacatatgatggaaagaaggagatgttcaaagagaagagagagatagatgatgagaataaaacattgacgaaaagaggactggatggtcacgtgatggaacattctaaaagatttggaatcatctacgaatttattcccaaatcttgaggatagttgcgtt

SEQ ID NO: 165495 - DNA, 418 bp, Arabidopsis thaliana columbia
gaacaacaaccaaacactcatttctccacatctttagagaaaaaaacagagcaaggatattagagatctcatggcgatggcggtctccggagctgtcctcagtgggcttgggtcttccctcctcaccggaggcaacagaggtgccaccgcattggcaagcggcgtaagcactggagctcaaagagttggcaagaaaactcttattggcgctgctgcggctgctcaaactaaaaaatcttggatccctgccgctaaaggggggggcaactttctttaccctgaatggctcgatggctccctaccaggagatttcgggttccacccattgtgtttggggaaagacccggcttttctgtaatggtacagagaggctgagctgatccatggccgataggcgatggcagcgggttttgggatc

SEQ ID NO: 165496 - DNA, 344 bp, Arabidopsis thaliana columbia
aaaatgtttggccgatctgcgattcgtggaggatgattccgtgcagagaatctaggtcaaaacgcacttaccttaatcggtaacataggcttctcactcttcgtcttcggagtactaatcttcaccataatcgccgcaacttacgaaccagaagatcctctcttccacccatctgacaaaatcacaactttcctcacttccacatcaaacgctacacttagatccgatgactccgttgttaaaaccggtgaagatttcatgctcgctaaccaaaccgcatttgcagagtttatcaacataaacgatgttgaagccagcaccaatgagactactacagagggaga

SEQ ID NO: 165497 - DNA, 413 bp, Arabidopsis thaliana columbia
gtagcaatcacaaggtgagtaataagaagagttttctcgctactcttggctgcagatgcgtgtgttcgaactggagttcagtggatgtcgtcgacgacaagagaagaagctctggtctgaagaagatcaagactcaattgagtttctctggagatctaagctcggagatgaagattcatcaacaacaacaagaagcaatgctagagcagaggaagtctctggaaatatttggatctcctcttattgagaagagaatcattcagaagaaatttccatgggaatactcgagctctgcgaaaaaagaagaacatggattctctgggaagtatgaagaagaagaagatgggagtgtgagcgatgtaagtacggatctttttgagattgggagcttaacagggaaggcaaaccctttt

SEQ ID NO: 165498 - DNA, 431 bp, Arabidopsis thaliana columbia
cagcggtagatcctttagattcaacgtctactattctacaacctcgaatcgttggcgaggaacattatgaaactgcgcaacaagtaaaacaaactttacaacgttacaaggagcttcaggacattatagctatcctggggttggatgaattatccgaagaggatcgcttaaccgtagcaagagcacgaaaaattgagcgtttcttatcacaaccctttttcgtagcagaagtatttacaggttctccgggaaaatatgttggtctagcggaaacaattagagggtttaatttgatcctttccggagaatttgattctcttcccgaacaggccttttacttagtgggtaacatcgatgaagctactgcgaaagctacgaacttaaaaatggagaagtaattggagaaatgaccttaaatctttgtgtactga

SEQ ID NO: 165499 - DNA, 434 bp, Arabidopsis thaliana columbia
gagcaaacgatgggtcgatttcttcaacccggtttctttatcggttgagtgggcaacgccatggtcgaagaccgccgagaatttcgcgaactataccggcgatcagggataccccggtgggagattcttcgatccagtgggtctcgccgggaaaaaccgcgacggtgtttatgagccggactttgagaagctggagaggctgaaattggcagagattaagcactcgaggctcgcaatggttgccatgttgatcttttactttgaggccgggcaggggaaaacgcctctcggtgctcttggtttgtgagaaaacggcatgatagttttgattctgtagatacaatttctctttcaaaaacctaatgtttctcttcttcaatgggacatttgggaaaagatcatcaaaccattggtataaatgtaaatggaatcat

SEQ ID NO: 165500 - DNA, 487 bp, Arabidopsis thaliana columbia
taatattcaaaaagatggctcaaaaagtggaagctggtgttggcgccggaggagcttcatgggatgatggtgtccacgatggcgttagaaaggtgcatgtagggcaaggccaagatggtgtgtcatctatcaacgtcgtgtatgcgaaggactctcaggatgttgaaggaggtgaacacggaaagaaaacgttacttggatttgaaacgtttgaggttgatgcagacgactacatagtagcagtgcaagtgacctacgacaacgtgtttggccaagactctgacatcatcacatctattaccttcaatacattcaagggaaaaacatctccaccctatggattggaaacgcaaaagaagtttgtactcaaggacaaaaacggtggtaaacttgttggcttccatggacgcgctggtgaagctttatatgctcttggagcatattttgctacaaccacaactcctgtgactcctgccaaaaaactatc

SEQ ID NO: 165501 - DNA, 470 bp, Arabidopsis thaliana columbia
ctctttcagattcctctctatccatttcattaacaccttaacctttttcttctctctaaccaaacaagaagaggactccattttcgcaagaatggggaggcttaagcaatgttggtcaagtctgctagtattggcagtgttggtgatcggaactggagccgttcccatcacttatctccaaagcgccgtcgctaaaggagccgtgtgtttggatgggagtgcaccagcttaccattttgacaaagggtttggttcgggtgttaacaattggatcgtccacatggagggaggaggatggtgtaccgacgttgcttcatgtaatgaacgtaagggtacaatgaagggttcttccaaattcatgaacaaagactttggattttccggtatcttgggtggcaagcaaagcactaacccagatttctacaattggaacagaatcaaagtacgattttgtgactgttcattcttta

SEQ ID NO: 165502 - DNA, 463 bp, Arabidopsis thaliana columbia
  unsure (1)..(463): unsure at all n locations
tcgacccacgcgccacgcataccgagtgaggttacattaccgacaaaatgtggcttgttgtatcatcctactgtctancagtctctaccaagacagcttgtccgatcagcattctacagatcccgccatctctgcaccgcttctctctaccctcttcatcttcctacttttcctgtctctcttcttattcttcttcttcttcttctctcttgacattctctctgaggacttctcgaaggttatctcctcaaaaatttaccggtaaggccagctccgtcggtgagaagaagaatgtacttatagtcaacaccaacagtggcggtcacgccgtgatcgggttttacttcgccaaagagcttttctccgccggccacgccgtcaccatcttgaccgtcggcgatgaatcttccgaaaagatgaagaaacctcctttcaaccgattctccgaaattgttatcggcgg

SEQ ID NO: 165503 - DNA, 436 bp, Arabidopsis thaliana columbia
ggatggcagcttacctggcgactatagattctttccttttgggctttcagacccagaaaggactgggaggattcattgagccaagatggctagcatccggagagatcatcaacggacggttcgccatgttgggtgcagctggagctatggctcctgaaattttaggaaaggctggtctgattccagcagaaactgctcttccttggttccaaaccggtgtgattccaccagcagggacatacacttactgggcagacaattacacactctttgttctcgagatggctctgatgggattcgctgagcaccggaggttacaggactggtccaacccaggatctatgggaaaacagtacttcttggggttagagaagggttggccggttcaggtaacccggcttaccccgtggacctttcttaaccctcttgggtttgg

SEQ ID NO: 165504 - DNA, 269 bp, Arabidopsis thaliana columbia
ggcaaagagcttttgtggagaggatctgtttgctagctacaatgggttacccccaacttaggtattggtccaacaagcaagggaaaggcaacttattggtcggctttgtatgaacattgggaaaccatcggtcgaaccatgcatggtggtaaccttgatcccgctgcggagatcttcaactatcccggggctatggatatcaaagaacctatttctttggaagatgtgatggaggatcttaagcttggtcctaatgggggccttatgga

SEQ ID NO: 165505 - DNA, 360 bp, Arabidopsis thaliana columbia
ctctcccgccataacccatcatcttttacactttttacgcgccgccttcacgaccaaacaatttcctcgtcacgactccgagacctttacaattttcaatcaccgccgcctttgtcgtcgtcagcctccgaaaatcctgactttaaccagaaaaacaacaattagaagaagccaaagccgcagtaccgtccaccttcttcgctggaaggtgtgaagacggttcactctgatcttccgttcgatttccgagtcagttacacagagagttgctcaaatgtgaggccaattggcttgagagaaccaaagtattcaccttttggtcctgatcgattggaccgggaatgggccggtgtctgtgcg

SEQ ID NO: 165506 - DNA, 400 bp, Arabidopsis thaliana columbia
aatccattcttcttcaagtagccgggttctcgggtcggatcttctaagtctagctagggataatggctactgtcactactcatgcctcggcctcgattttccgaccttgtacttcaaagccaagattcctcaccggttcttccggtaggttgaaccgcgacttgtcgtttacatcgatcggttcatcggccaaaacgtcgtcgttcaaggttgaagctaagaaaggagaatggttgcccggtttggcatcgcctgattatctcaccggcagtcttgccggtgacaatgggtttgacccgttgggtctagcagaggatccagaaaacttgaaatggttcgtccaggcagagctggtcaacggacgatgggctatgctcggtggcgctgggatgcttttggc

SEQ ID NO: 165507 - DNA, 481 bp, Arabidopsis thaliana columbia
agttagtcataaaaaaaaaaaaaacacattaaagtttcaatggccgcctcaacaatggctctctcctcccctgctttcgccggaaaggctgtgaacctttcccctgcggcatcagaagtccttggaagcggccgtgtgacaatgaggaagactgttgccaagccaaagggtccatcaggcagcccatggtacggatccgaccgagtcaagtacttgggtccattctctggcgagtcacccagctaccttaccggagagttccctggagactacggatgggacacagctggtctatccgctgaccccgagacattcgcaaggaaccgtgagctagaagttatccacagcaggtgggccatgctcggagccctaggctgcgtcttccctgagcttttggccaggaacggagtcaagtttggagaggcagtttggttcaaggctggttcacagatcttcagcgatggagggctcgattacttgg

SEQ ID NO: 165508 - DNA, 480 bp, Arabidopsis thaliana columbia
ggtcaaagaagctttaaccatgcttaaattcactttccagtggcgtaaagaaaacaaaatcgacgaactcgttgaatccggagaagaagtgagtgagttcgagaagatggtgtttgctcacggtgttgacaaagaaggacacgtcgtgatctacagttcttacggtgagtttcagaacaaggagcttttctccgacaaggagaagcttaacaagttcctcagctggaggattcagctacaagagaagtgtgtgagagctattgatttcagcaaccctgaagcgaagtcttcgtttgtgttcgtcagcgacttcaggaacgctccaggacttggtaaaagagccttgtggcaattcatcagacgcgctgttaaacaattcgaggacaattatcctgaattcgccgctaaagagctattcatcaatgtcccatggtggtacattccatactacaaaacattcggatctatcatcacatcccc

SEQ ID NO: 165509 - DNA, 440 bp, Arabidopsis thaliana columbia
taaataaacctctcttcatcgaaaatgaggagactctctgtgtcaattttcctcttctcatgtctcttcgtttcttcgtcttcgctgggcgattcggaggcgacgtgttccggtatagttccgttacggtaccggtacgataagatctcgataaccgactttggaggcgttggagatggtcgaacggtgaatactaatgcgtttagggcggcgatctatcggattcagcatctgaagaggagaggaggcacgcttctgtatatacctccgggagtgtatttgacggagagcttcaatcccactagccatatgactctttacttagctaaaggtgctgtgattagagctggtcaggatacctggaattggccattgattgaatccttgccgccctatggaagagggagagagttaccagggggacggtttatgagctttat

SEQ ID NO: 165510 - DNA, 486 bp, Arabidopsis thaliana columbia
actagattgcttgaaccgtgcgctttttcaggctgaatctcgatttcctaaggatggttgagcaagaaatggaagaaagaccggatttagtatccgttggatcttgtgttttggtcactctcctggttgggaaggatctatacgtccttaatcttggtgatagcagagctgttctagcgacctacaatggtaataagaagctgcaagctgttcagctcacagaggatcatacagttgataacgaagtcgaagaagctagactcttaagtgagcatcttgatgatcctaagatcgttattggtgggaaaatcaaaggaaagcttaaagttactcgtgctctcggagttggttacttgaagaaggagaaactaaatgatgcactcatggggatccttcgcgttcgtaaccttttgagcccggcttatgtttcagtggaaccatcgatgagagttcacaagataacggaatcagatcactttgttttta

SEQ ID NO: 165511 - DNA, 243 bp, Arabidopsis thaliana columbia
cttttggagtcacaacattgagtttgaagaggagtgagtagtgagctagggattggttcagagtgaacataaatggctctcaaggcattagactacgatactctgaatgaaaacgtcaagaagtgtcagtatgccgtaagaggtgaactttatcttcgagcttctgagctgcagaaagaaggcaaatagattattttcacaaacggtgggaaccctcatgctttatgacagaagccattgaca

SEQ ID NO: 165512 - DNA, 281 bp, Arabidopsis thaliana columbia
ggtcgcaaggactctcctctagatatcatagccattaatgacactggtggcgtcaagcaagcttcgcatttacttaaatacgactctactctcggaatctttgatgctgctggcacaccttcgggagagaccgcaccgtctgttgctggagagagcacccgagctggccgtttacatagatcggttcatcggccataacgtgggcgttcaaggtggcagctcagaaaggagaatggttgcccgggttggcatcgcctgattatctcaccggcagtcttgcc

SEQ ID NO: 165513 - DNA, 470 bp, Arabidopsis thaliana columbia
agaacctaaacccgatctgaaccaataacaatattaagtcgaatggcgtcttcgtcgttctcagtcacatctccagctgctgctgcttccgtctatgcagtcactcaaacctcctcgcacttcccaatccaaaaccgctctcgcagagtttctttccgtctctctgctaagcccaagcttcgctttctctccaagcctagtcgcagtagctaccctgtggtgaaagcacaatctaacaaggttagtactggtgcatcatcaaatgctgccaaagttgatgggccatcatcagctgaaggaaaggagaaaaactcattgaaggagtcgtctgcttcttctcctgaattagctacagaagagtctatttctgagttccttacccaagtaacaactcttgtcaagcttgtggattcaagagacattagttgagtgcagttgaaacaactcgactgtgaactagtcattcgaaa

SEQ ID NO: 165514 - DNA, 451 bp, Arabidopsis thaliana columbia
agaacctagacccgacctgaaccaatatttgtcttatgacgaatggcgtcttcgtcggtgtcagtcacatctccagctgctgctgcttccgtctatgcagtcactcaaacctcctcgcacttcccaatccaaaaccgctctcgcagagtttctttccgtctctctgctaagcccaagcttcgctttctctccaagcctagtcgcagtagctaccctgtggtgaaagcacaatctaacaaggttagtactggtgcatcatcaaatgctgccaaagttgatgggccatcatcagctgaaggaaaggagaaaaactcattgtatgagtcgactgcttcttctcctgaattagctacagaagagtctatttctgagttacttaccctagtaacatctccttgtctagcttggggtttcttgagacactgctgagtatctgtattaacatcttgac

SEQ ID NO: 165515 - DNA, 487 bp, Arabidopsis thaliana columbia
gtaacatcgagacaaagaagaaaaactaaaaatttgaaccccaaagaatcgaatatttattatttcgccccgaagattctatttctgatcatttacacccctaaaaagagtagagctttcgtgaagccaccatgtgtggaggagctataatctccgatttcatacctccgccgaggtccctccgcgtcactaacgagtttatctggccggatctgaaaaacaaagtgaaagcttcaaagaagagatcgaataagcgatccgatttcttcgatcttgacgatgatttcgaagctgatttccaagggtttaaggatgactcggcttttgactgcgaagacgatgatgatgtcttcgtcaatgttaagcctttcgtcttcaccgcaactactaagcccgtagcttccgctttcgtctccactgtaggttcagcatatgccaaagaaaactgtagagtccgctgagcaagctgagaaatcttctaagagga

SEQ ID NO: 165516 - DNA, 427 bp, Arabidopsis thaliana columbia
aaacccaattagccggagatggccgcaacatccttcgctgctgcagctgcttcttccatcatgggtactcgggtggctcccggtatccatcccggttcaggtcggttcacagccgtgttcggtttcggaaagaagaaggcagctcccaaaaagagtgccaaaaagacggtgactacggaccggcctctttggtaccccaggcgccatttctcctgactggcttgatggttccttggttggagattacggttttgatcccttcggtttaggcaaaccggccgagtatcttcaattcgatatcgattcactagaccagaatctggctaagaacttggccggagacgtgatcggaacccgtacggaagctgccgacgccaaatcgacgccgtttcagccgtacagtgaggtgtcggaatccagagattca

SEQ ID NO: 165517 - DNA, 344 bp, Arabidopsis thaliana columbia
ggagaatacgcttatccacagcagcgcgggaacgctgacgtgtctatccatggccgggatacggcagaacgcaaacgctgttctaaacgtgatcgcgaatctccaacagcagaacttaaggatcttgtttgacgttcctaattctcgcataggaattgctcctgagccctgcaactaagagaggacatatgaatgatctctctctccctctctttttattttacgttcttcgtacgttttgatttgaagaggtgcttaatggcgcttgaccttctacatatactttgtatgaacggctatcttcactacgcataacatggcctgcagtttcatctcttgcttca

SEQ ID NO: 165518 - DNA, 430 bp, Arabidopsis thaliana columbia
ggaaagcgtttttacccgagggagaagatagagtgcatccagcgtgtaatccgtttagcccgagagggaaaagcttagaaggagtgagtttccccaagagtcttgtggttgtcgcgggtttggatttgattagagattggcagttggcatacgcggaagggctcaagaaagcgggtcaagaggttaagcttatgcatttagagaaagcaactgttgggttttacctcttgcctaataacaatcatttccataatgttatggatgagatttcggcgtttgtaaacgcggaatgttaacactgggttagagaaagaaggttgttttaacaaagccaagacatctttcatactaacacacaggtgaatgtattgcctgtggattctctcgtttagttttgttttttgcgttagtatctaagtgtgtggcggtc

SEQ ID NO: 165519 - DNA, 245 bp, Arabidopsis thaliana columbia
ccattacccaatcccgctccttttctcttattgtgaatcgaacccttaatacccagaaatctcacggttccgaggagtgggtttttgggggttagggttttcgagagatgttgaatgtcaggttcattgatgaatctgttttctctctgcttcaagccattcgggcacgtctgtgataattccgaagctggatcgggtggtggtggtaactgtttttatttttatcccttgtattaaatgcattt

SEQ ID NO: 165520 - DNA, 347 bp, Arabidopsis thaliana columbia
  unsure (1)..(347): unsure at all n locations
attcgaattgcgagatccgacaacaccgcttcttttgatttcgatcttactttcgcgggatctcatagatagatctggtttgagtctagaaatgtcgagtgatgcagctcgtacgccattgttacccactgagaagatagatgccatggctcaagatttcaacctgaactcaagaacttcttcttcaagaaaacgaagattgcgtcgctctagaagtgctcctcgtggtgattgtatgtacaatgatgatgtcaaaatcgacgaaccacctcctcatccgagtaaaatcccaatgttcagtgatctaaacccgaatctcaagcgagtgatcnatgtcttggctttat

SEQ ID NO: 165521 - DNA, 452 bp, Arabidopsis thaliana columbia
attacaaacaaaaatggttttgcaaaagcttcctctcattgggctgcttttgctcctgaccatcgtcgcctctccagcaaatgcagatggacctgtttgcccgccgtcgaacaaactaagccgggcaagtttccctgaaggttttttatttggcacggctactgcggcataccaggtcgaaggtgcgattaatgaaacttgtcgtggaccagccttatgggacatctactgtagaagatatccagagaggtgcaataacgataacggcgatgtggccgttgatttcttccatcgttataaggaagatatccaactaatgaagaatctaaacacagacgcctttagaatgtctatcgcatggccaagaatatttcctcatgggagaaaggagaaaggagtgagtcaagctggtgtgcaattctaccacgacctcatcgacgagctcataaaaa

SEQ ID NO: 165522 - DNA, 362 bp, Arabidopsis thaliana columbia
catttgtgggtgatgggaccacacaagaagcagttatcatgcgtgttgtacagattaggaatcttattgagcaagcggagcaagactacgagaaggaaaaattaaatgagagaattgcgaagctctctggtggagttgctgtaattcaggttggagctcaaactgagacagagctcaaagaaaagaagctgagagtggaagatgctcttaatgctacaaaggctgctgttgaggaaggtattgtcgttggtggtggttgcactctgtttcggcttgcattaaaggtcgatgccatcaatgatacccttgaaaatgattaagaaataggtggagcggattttgttaaaagagcactgagattc

SEQ ID NO: 165523 - DNA, 486 bp, Arabidopsis thaliana columbia
  unsure (1)..(486): unsure at all n locations
ctcaaacaaacatattgacatctgagtcttgtcttcatgtcaacttctctccaagccgccgcaacttttcttcaaccggcgaagattgccgcttctccttctcgtaatgtccatctccgatcaaaccaaaccgtgggcaagtcctttgagttagactcttcacaagctaggctcacgtgctctctccactctgacctcaaagacttcgctggaaaatgctccgacgccgccaagatcgccggttttgctctagccacctctgctctcgttgtctcggaggccggtgcggagggagcaccaaagaggctaacgtacgacgagatacagagcaagacttacatggaggtaaagggtaccggtacggcaaaccagtgtccaactatcgatggtggctctgagacattctcgttcaaagctggtaagtacacaggcaagaagttctgcttcgagcccancttcttcaccgtcaaggcagatagcgtcagc

SEQ ID NO: 165524 - DNA, 417 bp, Arabidopsis thaliana columbia
gctatgtatgttgccattcaagctgttctatcactttacgccagtggtcgtacaaccggtattgtgttggactctggtgatggtgtgtctcacactgtgcctatctacgagggtttctcacttccacatgctatcctccgtctcgaccttgctggtcgtgaccttactgattacctcatgaagatccttaccgagagaggttacatgttcaccacaacagcagaacgggaaattgtgagagacatcaaggagaagctttcctttgtcgctgtcgactacgagcaagagatggagacctcgaaaaccagctcctccatcgaaaagaactatgaattacccgacggacaagtgatcacgatcggtgctgagagattcaggtgcccagaagtccttttccagccatcatttgttggaatg

SEQ ID NO: 165525 - DNA, 387 bp, Arabidopsis thaliana columbia
ctcgaaaccgaccctggtcttacggagacgatgttaccttcctcaagtcccatggagtcaagacatcgactctcgttctcaaatgagaagacaagtaggaggagatttcaaagaattgagaagggtgtcaagttcaacactctgaaacttgtgttgatttgtataatgcttggagctttgttcacgatctaccgttttcgttatccaccgctacaaattcctgaaattccaactagttttggtcttactactgatcctcgctatgtagctacagctgagatcaactggaaccatatgtcaaatcttgttgagaagcacgtatttggtagaagcgagtatcaaggaattggtcttataaatcttaacgataacgagattggtcgattc

SEQ ID NO: 165526 - DNA, 470 bp, Arabidopsis thaliana columbia
cgccgctcctcttcacacagttccatcttcttcttcttcagaggtgaaaaatgagtcgtggtaacgcagcagcagctaagggaaagaagaagggagtttccttcactatcgattgttctaaacctgtggatgataagattatggagattgcttctttagagaagtttcttcaggagaggattaaggttggtggtaaagctggtgctcttggtgattctgtttctatcactcgtgagaagagcaagatcactgtcactgctgatggtcaattctccaagaggtatcttaagtacttgacaaagaagtacttgaagaagcacaacgtgagggattggcttagagtgattgcggcgaacaaggaccgtaacctctatgagttgaggtacttcaacattgccgagaacgaagctgaggaagaagattaaaaccggttttggtctagtgctatatcctctgttcctctaattctg

SEQ ID NO: 165527 - DNA, 337 bp, Arabidopsis thaliana columbia
ctgtgatgaaccttgtggtattcctttcattgtttcttctcctatgtggcactgtctttggtgccagcgcctcatacatgttaagtgtcacatgattatgtccaaggaatctggtgatgcttgtgatcttggctctctcagaagagtaatcctctctccagtacatgtaaaactcaatgaagcaaatggtgtcgatggagtactgactactattaaaaacgagttagcatctatacgagggcatgtgagaagaaagcgccacaggggaaaaaatgggaatggccaatctttaaatggtaagctactggaggattcagtctgcgatccagtaaaaacc

SEQ ID NO: 165528 - DNA, 357 bp, Arabidopsis thaliana columbia
ctcctttctctttcaatctccaaggattttacgtgagatatttggcgggaaaatgtcggggaaaggtgctaaaggtttgattatggggaaacccagcggtagcgacaaggataaggacaagaagaagcctatcactcgttcttctcgagctggtctccagttcccagttggtagggtgcatcgtctgttaaagacaaggtccactgctcatggaagggttggagcaactgcagctgtttacacagcagcaatattggagtatctgactgcagaagttttggagttggctggtaacgccagcaaggacttgaaggtgaaaccgatctcgccgaggcatttgcagcttgcgattcgtgg

SEQ ID NO: 165529 - DNA, 404 bp, Arabidopsis thaliana columbia
aagttagtcaccaaaaaaaaaaaaaaaatcacattttgtttcaatggccgcctccacaatggctctctcctcccctgccttcgccggaaaggctgtgaacctttcccccgcggcatctgaagtcctcggaagcggccgtgtgacaatgaggaagactgttgccaagccaaagggtccatcaggcagcccatggtacggatccgaccgagtcaagtacttgggtccattctctggcgagtcaccgagctaccttaccggagagttccccggagactacggatgggacaccgctggactttcagctgatcccgagacattcgcaaggaaccgtgagctagaagttatccacagcaggtgggctatgctcggagccctaggctgcgtcttccctgagcctttggcta

SEQ ID NO: 165530 - DNA, 320 bp, Arabidopsis thaliana columbia
gagcaatgagggagaccctgaattgcttgtttttgtaccatttacatcagacgtcaagatcaagagcatatcaattgttggtggccctgaaggaacaagtccttctaagttgagagtgtttatcaatcgtgaagggattgacttctccgatgctgagagtatgcaagccgttcaggaatgggagttagctgaaaatttgcaaggagtcttagaataccagaccaggtattcaaagttccagagtgttggaaacatcaccctgcatttccctgagagttttggaggtgacacaacccaaatacgttatatcgggttcaaag

SEQ ID NO: 165531 - DNA, 400 bp, Arabidopsis thaliana columbia
ctcaccgatcactcctcgaatcacgatttcctatattcttcaccggattccgcaaatccgtcaatctcaaacctccccgtgtctcatctggtcctgaatccaacgattcaggtcacgaaaccttaaccgataagcttatccatctcctcagagctgttccagattgggcagacgagattaaagagcgtgggatgcagcagaaacgctctctctacacacacgagaaatgggttgaacatagaagctctcttcgccatgtgcgtcatctactctcgagcttttcttcacgagttatactctccctgattccacctgttttcttcttcacaagcgtcgcggttgtgatcgctagctacaacttcgccgtggctttggattggcttcctgggattttttcaat

SEQ ID NO: 165532 - DNA, 403 bp, Arabidopsis thaliana columbia
ctgttttgtaaccaatctcagctctccctctcatacaattcaggattcttcagattcctctcctttgatcctctctttaacaatctctctctctctgttttcttcgatccgttgtaggagaaaatggtcgttatcaacagtctccgacgcttggcgcgtaccactcaggttcatttgcacagtaagtatgccacttgcatgtctgggaactctacttccaggaggattttcactactgaggcagcacctgagaagaaaaacactgttgggtctaaagggcatgatatgcttgcaccttttactgctggatggcagagtgctgatttagatcccttggtcattgcaaagtctgagggaagttatgtgtatgatgatactgtgaaaaaatatcttgactttctcg

SEQ ID NO: 165533 - DNA, 442 bp, Arabidopsis thaliana columbia
  unsure (1)..(442): unsure at all n locations
gagagattcatcaataaggtgacacatctcgttgttgngtcaggatttggaggtttttgtttcctacttggtgcatgacctcaagacattcctttagtttactgtttcttctatgtgatctttgttcctcttcgatggatatattaccggtttaagaaatggcattattatcttttggacttttgctactatgccaatacaatcttcttgtttaatcttgttctgttgtctatgattgaaatgctctttatcgtttgctttttttttgcttggatatcattgtcttgggcttttctattctgcttgtactttttggtttatactatctctttaagtctttatttttttttctatttcctttatattatctttttattatacttctattcatatatatctctttcttttttatatttatgctttttttcttttctcctttttt

SEQ ID NO: 165534 - DNA, 358 bp, Arabidopsis thaliana columbia
ctaatttctcttcttttccccaaaaaaaaatgtttgaagttgagtaccggtgctttgtcggcggccttgcctgggccaccaatgatgaagatcttcaaaggacgttctcacagttcggcgacgttatcgattctaagatcattaacgaccgcgagagtggaagatcaaggggattcggattcgtcaccttcaaggacgagaaagccatgagggatgcgattgaagagatgaacggtaaagagctcgatggacgtgtcatcaccgtgaacgaggctcagtcgagaggtagcggcggtggcggaggaggccgtggtggaagcgctggtggttaccgcagcggaggcggtggtggattctc

SEQ ID NO: 165535 - DNA, 440 bp, Arabidopsis thaliana columbia
catagcccttgcaaaccataaccaaaccatcattatcatcatctcttggtgacagaagaaaagagttgaggaacagagaaaatggcagcacaagcacttgtgtcttcttcacttacctcctctgttcagacagctagacagatatttggctcaaaaccagttgcgtctgcctcacagaagaagagttcctttgttgttaaagctgctgcaactccacctgtcaagcaaggagccaacagaccattgtggtttgcttcatcgcagagtctctcttacttggatggcagcttacctggtgactatggattcgaccctcttggtctttcagacccagaaggtactggaggattcattgagccaagatggctagcatacggagagatcatcaacggacggttcgccatgttgggtgcagctggagctattgctcctgagatttt

SEQ ID NO: 165536 - DNA, 451 bp, Arabidopsis thaliana columbia
tgagaactcttttgcacaacttcaattttgtccttcaagattctccttattacaaaacgtccccttttcccacatcatccttcttcaacgttcgctttcccatcaagaacaaccaaatctcttgtaacaaagcaaagaatttgagaatggatccgtctaagggaatccaagaacagaggattgtgattccaaacagacacaacgagaagctggttggtctgcttcatgaaactggttctacagacatcgtagtcttgtgccatggctttcgatcaaacaagagtaaccaaataatgaataatgtggctgctgctatacagaaagaagggatcagcgcttttcgttttgatttctccgggaatggagagagtgaaggcagtttctattatggtaactataaccatgaagctggtgatttacattctgttgtccaatacttctctaacaagaa

SEQ ID NO: 165537 - DNA, 471 bp, Arabidopsis thaliana columbia
gaagagtgaaagttgcagagcgagaaaaaatggcttccatgtctgctcttcagagctcttttacttctctttctctatctcccagctcttccttcctcggccagcgtttaatttccccgatttccctctccgtcacttctccggtcaagcccgctgagaacccatgtcttgttcttgcaaagctcaagcgttgggaacgaaaagaatgcaaaccaaacagtcttccgattctccacaaaatgcatgtcaagtttggagatacagtcaaagtaatatctggacgcgacaagggtaaaatcggagaggttactaagattttcactcacaacagtaccattgtgatcaaagatgtgaacctcaaaacaaaacacatgaagagccgagaagagggagagcctggtcaaattgtcaagatagaagcacctatccacagctcaaatgtgatgttgtattcaaaaaaaaagacgtagt

SEQ ID NO: 165538 - DNA, 329 bp, Arabidopsis thaliana columbia
ctttgttcataactaagaactcagaaagagaccatcgacactgcaaatggcggatgaatctccaaagtctatctacgacttcaccgtcaaggatatcggaggtaacgatgtgagtttggaccaatacaaaggcaaaactcttttggttgtaaacgttgcttccaaatgtggtctgacggatgcgaactacaaggaactgaatgttctgtacgagaaatacaaggagcaagggttggagatattagcattcccgtgtaatcagttcttaggacaagaaccaggaaacaatgaagagattcaacaaactgtctgcaccaggttcaaagctg

SEQ ID NO: 165539 - DNA, 398 bp, Arabidopsis thaliana columbia
gaagaacaatggcttcctctatgctctcttccgctactatggttgcctctccggctcaggccactatggtcgctcctttcaacggacttaagtcctccgctgccttcccagccacccgcaaggctaacaacgacattacttccatcacaagcaacggcggaagagttaactgcatgcaggtgtggcctccgattggaaagaagaagtttgagactctctcttaccttcctgaccttaccgattccgaattggctaaggaagttgactaccttatccgcaacaagtggattccttgtgttgaattcgagttggagcacggatttgtgtaccgtgagcacggtaactcacccggatactatgatggacggtactggacaatgtggaagcttcctttgttc

SEQ ID NO: 165540 - DNA, 454 bp, Arabidopsis thaliana columbia
  unsure (1)..(454): unsure at all n locations
cgtaacccaaaacttgtgttcgagaaggctgatgtgatggctcagacattcagacagagaattgcgcaagcagaagccatggctcgtgcagacatgcttcgcttccaacctgagagtggactgacgctgagttctgacgggatactaggaccactcggatctgagttaccagatgatggcgtagatctaacggtcgacgacattccttctgcagttgatatttagattctaaagctttagtgtattttttcatacacaaaaacacctccttgagcttaattgaatatgtagtttacttcctacaagacattntatcatgtgtactttgtcttttgtaatcgatatgttctgttacaatgtcaagaaaccaaagaaaggctttgcccaagaccaaacagagcacacggtcttaaaaaaaaagatattgttaaaattttaaaaagaatttattcat

SEQ ID NO: 165541 - DNA, 337 bp, Arabidopsis thaliana columbia
cacaagttagtcataaaaaaaaaaaaaacacatatagttttaatggccgcctcaacaatggctctctcctcccctgctttcgccggaaaggctgtgaacctttcccctgcggcatcagaagtccttggaagcggccgtgtgacaatgaggaagactgttgccaagccaaagggtccatcaggcagcccatggtacggatccgaccgagtcaagtacttgggtccattctctggcgagtcacccagctaccttaccggagagttccctggagactacggatgggacacagctggtctatccgctgaccccgagacattcgcaaggaaccgtgaggcta

SEQ ID NO: 165542 - DNA, 213 bp, Arabidopsis thaliana columbia
  unsure (1)..(213): unsure at all n locations
aaagagagacagagataatggcgtacagtgcgngtttcctacaccagagcgcattggcttcatcagccgcacgatcatcatcttcctcctcatcccagcgtcacgtgtcgctctccaaacctgttcagatcatctgtaaagctcaacagtctcatgaagacgataactccgccgtctcccgccggcttgctctcactcttctcgtcggcgccg

SEQ ID NO: 165543 - DNA, 336 bp, Arabidopsis thaliana columbia
acgaaaaaaaaaacacaaaaagtttcaatggccgccttcactatggctctctcctcccctgccttcgccggaaaggctgtgaacctttcccccgcggcatctgaagtcctcggaagcggccgtgtgacaatgaggaagactgttgccaagccaaagggtccatcaggcagcccatggtacggatccgaccgagtcaagtacttgggtccattctctggcgagtcaccgagctaccttaccggagagttccccggagactacggatgggacaccgctggacttttagctgatcccgagacattcgcaaggaaccgtgagctagaagttattcacagc

SEQ ID NO: 165544 - DNA, 268 bp, Arabidopsis thaliana columbia
  unsure (1)..(268): unsure at all n locations
aaccctagcttctcgatttctctcctcttttcttcaattccatcttcccatggcgatttcggctccagccgcttgttcttcctcctctagaattctctgntcctactcctctccttctccttctctctgtcccgccatttccacctctggtaaactcaaaaccctaactctctcttcctccttcctcccttcttactcattaaccaccacctccgcttttcaatccactcgtcgttccttcaccgtccgcgccggtcgtggaaagttc

SEQ ID NO: 165545 - DNA, 310 bp, Arabidopsis thaliana columbia
gctctctcgaagttccgtgcgactctctgctcgttcaagatctcctaccgatacaatgattatctcagaggctaaccgcaaagaaatctgcaagtacctcttcaaagaaggagtttgctttgcgaagaaggatttcaatcttgctaagcatccgttgatcgatgtccccaacctacaagtgattaagcttatgcagagtttcaaatccaaggagtatgttagggagacatttgcctggatgcattactattggtttttgaccaatgaagggatcgagttcttgagaacttatcttaatctttcatctgat

SEQ ID NO: 165546 - DNA, 291 bp, Arabidopsis thaliana columbia
ggggaagaagaaaaatgtataaatcaccattaacgttgctcacacttcttactatttgttttggattcttcgatctcagcagtgctctttatggatcttcgtcacctgtggttcagctcactgcttctaactttaagtccaaggttcttaattcaaatggagttgttttggtagagttctttgcaccatggtgtggtcattgcaaagctctaacacctacatgggagaaagtggctaatattctgaaaggagttgctactgtggctgcaattgatgcagatgctcaatcag

SEQ ID NO: 165547 - DNA, 337 bp, Arabidopsis thaliana columbia
caaatacacaacttgtaacttcaaatagattactttcaatgaagagagagagaaagaaagatggagaagaacatgaagtttccagtagtagacttgtccaagctcaatggggaagagagagaccaaaccatggctctaatcaatgaagcttgtgagaattggggcttctttgagatagtgaaccatggattaccacatgacttaatggacaagatcgagaagatgacaaaggaccattacaagacatgccaagaacagacgctcagtgacatgctcaagtccaaaggtttggataatcttgagacagaagtcgaagatgtcgaatggtaaagcactt

SEQ ID NO: 165548 - DNA, 411 bp, Arabidopsis thaliana columbia
  unsure (1)..(411): unsure at all n locations
gtgattgaagaaagagagcaaggaatacaagaaatccatcagcaaattggtgaggttaacgagatattcaaagatcttgcggttctggttaacgatcaaggagtcatgatagatgatattggtactcacattgacaactcccgtgctgcaacttcacaaggaaaatctcagcttgtgcaagccgcgaaaacacaaaaatcaaactcctctctgacatgcttgctcttggtgatatttggcattgttctcctgatcgtgattatagtactcgcagcttgatttcgaacagcaagaacatttcgtttgtgtgtgttcattgatcttaaggcatcaatgactggaactacttggtatatattatatgntgaagagaacacttagaaattgggtttgtgtttggttgggttggtt

SEQ ID NO: 165549 - DNA, 451 bp, Arabidopsis thaliana columbia
gaagaacaatggcttcctctatgctctcttccgttactatggttgcctctccggctcaggccactatggtcgctcctttcaacggacttaagtcctccgctgccttcccagccacccgcaaggctaacaacgacattacttccatcacaagcaacggcggaagagttaactgcatgcaggtgtggcctccgattggaaagaagaagtttgagactctctcttaccttcctgaccttaccgattccgaattggctaaggaagttgactaccttatccgcaacaagtggattccttgtgttgaattcgagttggagcacggatttgtgtaccgtgagcacggtaactcacccggatactatgatggacggtactggacaatgtggaagcttcccttgttcggttgcaccgactccgctcaagtgttgaaggaagtggaagagtgcaagaagga

SEQ ID NO: 165550 - DNA, 275 bp, Arabidopsis thaliana columbia
agtaatttctcctcaaagaaactcgcagatctcttggtggtggctcgtgttcctcccgctgttaaccaggtggagtgtcacccttcatggcaacaaaacgtgctcagggatttctgcaaatctaaaggcgttcatctctcagggtactctcctttgggttctccaggaacaacgtggctaacgagcgatgttttgaagaaccctattcttggtggtgttgctgagaagctcggcaagactcctgcacaggttgcaatacgctggggtcttcaaat

SEQ ID NO: 165551 - DNA, 396 bp, Arabidopsis thaliana columbia
ctttcttcttcgctctcttcctataaatctctctctgctctgtaagaaaaatatcttacaccaaacacaaacacaaaacacagattccttcttgttcttcttcttcctttgattgctttcgaagatggttggttctaggaagcgttcatcagccaagaacagacttgtttcttcttcaactcgttcttctgggaaggataaggtttctgatgctcgtaaatatggtgaagccttggtgggttcaaggatacgagtttggtggccgatggacagcaaattctataagggtgtggtggattcctatgtctcttccaagaagaaacatcgggttttctatgaagatggtgataaagagaccctggatctgaagaaggagagatgggagtttgattgaaa

SEQ ID NO: 165552 - DNA, 372 bp, Arabidopsis thaliana columbia
aagagagacagagataatggcgtacagtgcgtgtttcctacaccagagcgcattggcttcatcagccgcacgatcatcatcttcctcctcatcccagcgtcacgtgtcgctctccaaacctgttcagatcatctgtaaagctcaacagtctcatgaagacgataactccgccgtctcccgccgtcttgctctcactctcctcgtcggcgccgctgctgttggttccaaagtatctcctgctgatgccgcctacggtgaagctgcaaacgtgtttgggaagccaaagacgaacacagacttcttgccatacaatggagatgggttcaaagtgcaggttccagcaaaatggaacccaagcaaagagattgagta

SEQ ID NO: 165553 - DNA, 402 bp, Arabidopsis thaliana columbia
agaagattggattgagaatttcttgtcaagcgtttagtattccagcagacagagttccagatatggaaaagaggaagactttgaatcttcttcttcttggggctctttctctacctactggctacatgcttgtcccttacgctaccttctttgttcctcctggaaccggaagtggaggtggtggtactccagccaaggatgcccttggaaacgatgtagttgcagcggaatggcttaagactcatggtcccggtgaccgaaccttgacccaaggattaaagggagatccgacttacctagttgtagagaacgacaagactctagcgacatacggtatcaacgcagtgtgcactcatctttgatgtgttgtgccatggaacaaagctgagaacaagtttctat

SEQ ID NO: 165554 - DNA, 445 bp, Arabidopsis thaliana columbia
aagacatacaaaataattgagttttttttttaattagaatcaaatggggttgagtggtgttcttcatgtggaggttgaggttaagtctccggctgaaaagttctgggtagcccttggcgacggcatcaatctcttccccaaagctttccctaacgactacaaaaccatccaagttctagccggcgatggcaacgctcctggctccattcgcctcattacttatggagaaggatctccactggtgaagatatcggcggagaggatcgaagcagtggatttggagaacaaaagcatgtcgtacagcatcattggcggagaaatgttggagtactacaaaaccttcaaaggaaccatcaccgttatccctaaggatggtgggagccttctgaaatggtccggtgagtttgagaagaccgtccatgagatcgatgatccacatgtcatc

SEQ ID NO: 165555 - DNA, 465 bp, Arabidopsis thaliana columbia
  unsure (1)..(465): unsure at all n locations
caatgctcgccactcttggcgctatcaccgtcgtatggctcaccggtgttacttggcaagacgccggcaaggtagagctagtggatggatcatcttacttaggacagccattgccgttctctatctcgacattgatatggatcgaagtgttagtgatcggctacattgagttccaacgaaacgctgaactggactcggagaagcgtttgtatccaggaggcaagttctttgacccgttaggactagcgtctgacccggtgaagaaggctcagcttcagctagctgagatcaaacatgctcgtttagccatggttggattcttgggttntgcggttcaagcggctgcaaccgggtaaggaccgctcaacaactgggcgactcaccttagtgacccacttcacaccaccattatcgataccttctctttcttctgatgtggtggcctttaacttctactggtggcat

SEQ ID NO: 165556 - DNA, 394 bp, Arabidopsis thaliana columbia
  unsure (1)..(394): unsure at all n locations
gaccaaattgagagcttgttgtgaaatttgtactagtgtgagagtggcaaaccttgctcgggtctgccctttttttgttatatgcatataatttgatatatacacattcacttctatttctttattttgaagatgtgtaatacatttctcattcacggaacaaataaaatctttacaaaaaaaaaaaaataaaaaaaaaaaaaaaaaaaaaaaatataaaaaaaattattaaaaaaattaaaaaaaaaaaaaaaaaaaaaaatataaaaaaattatattaaaataaaattattataaantttaattttttttaaatatataaaaaatatattatatattattttttatttattattatgtgtggtggttttataaagaataaaaattttttttt

SEQ ID NO: 165557 - DNA, 394 bp, Arabidopsis thaliana columbia
gattggtgctcgccgtgcctcgtggcgtatcatttcatctatcgagcagaaggaagagagccgtggtaacgatgaccacgtcacggcgatccgtgaatataggtctaagatcgagacggaactctccggaatctgcgacggaatccttaagttgcttgactctagactcatccctgccgctgcttctggtgattccaaggtcttttaccttaagatgaagggagattatcacaggtacttggctgagtttaagactggtcaagagaggaaagacgccgccgaacatacactcgccgcttacaaatctgctcaggatattgctaatgcagagcttgctccaacacacccaattcgtcttggtcttgcattgaacttttctgtggtctattacgag

SEQ ID NO: 165558 - DNA, 447 bp, Arabidopsis thaliana columbia
ctttcaacggacttaagtcctccgctgccttcttagccacccgcaaggctaacaacgacattacttccatcacaagcaacggcggaagagttaactgcatgcaggtgtggcctccgattggaaagaagaagtttgagactctctcttaccttcctgaccttaccgattccgaattggctaaggaagttgactaccttatccgcaacaagtggattccttgtgttgaattcgagttggagcacggatttgtgtaccgtgagcacggtaactcacccggatactatgatggacggtactggacaatgtggaagcttcccttgttcggttgcaccgactccgctcaagtgttgaaggaagtggaagagtgcaagaaggagtaccccaatgccttcattaggatcatcggattcgacaacaccccgtcaagtccagtgcattagtttcatt

SEQ ID NO: 165559 - DNA, 403 bp, Arabidopsis thaliana columbia
gaggaatcctattattcggtccacctggtactgtcaaaacaatgcttgcaaaagcaattgcaaatgaagctggagctagtttcatcaatgtctccatgtctacaatcacttcaaaatggtttggagaagacgaaaagaatgtgagagctctgtttactttagcagctaaagtatctccaacgattatatttgtggatgaagttgatagtatgttgggacaaaggacaagagttggagagcatgaagctatgaggaagattaagaatgagtttatgacacattgggatgggctaatgacgaaacccggtgaaaggattctcgttcttgcagcgacaaacagaccgtttgatcttgatgaagctatcattaggagggttgagagaagaataatggtgggactttc

SEQ ID NO: 165560 - DNA, 457 bp, Arabidopsis thaliana columbia
cagcgactcgattcgatcaaggaaatggcgtacgcttctcgttttctctccagatctaagcagctacaggggggtctggtcattttgcagcagcaacatgctattccagtccgagcttttgctaaggaagctgctcgtccaacctttaaaggagatgagatgttgaagggtgtcttttttgatatcaagaacaaattccaggctgctgttgatattctccgtaaggaaaagatcacccttgatccagaggacccagctgccgtaaaacagtatgcaaatgtaatgaagaccatcaggcaaaaggcagacatgttctcagaatctcagcgcattaaacatgacattgatactgagactcaagacattccagatgctcgtgcatacttgttgaagttgcaggaaattcgcaccaggagggggcttactgatgagcttgtgctgaggccatgatgttcga

SEQ ID NO: 165561 - DNA, 394 bp, Arabidopsis thaliana columbia
gaagaagaagtaatggcttcctctatgctctcctctgtctctgtggttacctccccggctcaagccaccatggtcgctccattcactggtttgaagtcatccgcttctttcccggtcacccgcaaggccaacaacgacattacttccatcacaagcaatgggggaagagttagctgcatgaaggtgtggccaccaatcggaaagaagaagtttgagactctatcttacctccctgaccttaactgacgtcgaattggctaaggaagttgactaccttctccgcaacaaatggattccttgtgttgaattctagttggaccacggatttgtgtaccgtgagcacgggaacacttccggatactacgatggacggtactggacaatgtggaagctt

SEQ ID NO: 165562 - DNA, 411 bp, Arabidopsis thaliana columbia
gaccatttcttgttctttggacgaccatcggcgtcagtgttaagtctagagtcttcttcttcttcggcgtagttttttccccggcttgaaaaatgggtctatccttcggaaagttgttcagcaagctctttgcaaagaaagagatgcgtatcctcatggtgggtctcgatgcagctggtaagactacgatcttgtacaagctcaagcttggagagatcgtgactacgattccaaccattggtttcaatgtggagactgtggaatacaagaacattagctttaccgtgtgggatgtcgggggtcaagacaagattcgtccattgtggaggcactactttcagaacactcagggacttatctttgtgggggacagcaatgatcgtgaccgggttgttgaagcccgagatgagc

SEQ ID NO: 165563 - DNA, 357 bp, Arabidopsis thaliana columbia
ctcttgttctctccgcccatctctgctctcttttatttttccagaaagttttttttttttttccgaattccgttaatctcattggggtttccattgatagcaatggcgacggctttcgctcccactaagctcactgccacggttcctctgcatggatcccatgagaatcgtctcttgctcccgatccgattggctcctccttcttctttcctcggatccacccgttccctctcccttcgcagactcaatcactccaacgccacccgtcgatctcccgtcgtctctgtcccaggaagttgtcaaggagaagcaatccaccaataataccagcctgttgataaccaaagaggaaggatt

SEQ ID NO: 165564 - DNA, 299 bp, Arabidopsis thaliana columbia
cattcttcttcaagtgccgggttctcgggtcggtacttctaagtctagctagggataatggctactgtcactactcatgcctcggcctcgattttccgaccttgtacttcaaagccaagattcctcaccggttcttccggtaggttgaaccgcgacttgtcgtttacatcgatcggttcatcggccaaaacgtcgtcgttcaaggttgaagctaagaaaggagaatggttgccctggttggcatcgactgattatctcaccggcagtctttcctggtaacaatttttttgactttttat

SEQ ID NO: 165565 - DNA, 459 bp, Arabidopsis thaliana columbia
aagaaacacgagtggaagcttttaaacataatttaaaaagagagagagaaatggcgacgtcgggaacatacgtgacgcaggtgccgttaaaaggaacggtggagaaacacttcaagaggtacaggaacgagaactatctcttccctgacactatcggccaccacatccaaagtgttactgttcacgatggcgaatgggacactcaaggaggcatcaagatttggaactacacactcggagatggaaaggaggaggtattcaaggagaggagagagatagacgatgacaataagatagtgaaggttgtaggattggaaggtcacgtgatggagcagttcaaggtgtatgagattgacttccaatttattcccaactctgaagaagattgcgtctgcaaaatcactatgatatgggagaagcgcaacgatgattttctccgaccaagcagctacatgcaac

SEQ ID NO: 165566 - DNA, 432 bp, Arabidopsis thaliana columbia
aataaaaaggttcgaaaatggcagaggaaacttcatagatatgctgtagttactggagcaaacagagggattggatttgagatatgcagacaattagctagtgaagggattagagttgttttgacctctagagacgaaaacagaggacttgaagctgttgagacactgaagaaagagcttgagatttctgatcaaagccttctttttcatcagcttgatgtcgctgatcctgctagtatcacatctcttgctgagtttgtgaaaacccaatttgggaaactcgatatcttggtcaataatgcagggattggtggtataatcactgatgctgaagctttaagagctggggcaaggaaaagaaggtttcaagtgggatgaaatcatcacggagacttatgagttaactgaagaatgcataaagataactactat

SEQ ID NO: 165567 - DNA, 462 bp, Arabidopsis thaliana columbia
gaagaacaatggcttcctctatgctctctttctctactatgggtgcctctccggctcaggccactatggtcgctactttcaacggacttaagtcctccgctgccttcccagccacccgcaaggctaacaacgacattacttccatcacaagcaacggcggaagagttaactgcatgcaggtgtggcctccgattggaaagaagaagtttgagactctctcttaccttcctgaccttaccgattccgaattggctaaggaagttgactaccttatccgcaacaagtggattccttgtgttgaattcgagttggagcacggatttgtgtaccgtgagcacggtaactcacccggatactatgatggacggtactggacaatgtggaagcttcccttgttcggttgcaccgactccgctcaagtgttgaaggaagtggaagagtgccagaaggagtaccccaatg

SEQ ID NO: 165568 - DNA, 313 bp, Arabidopsis thaliana columbia
aaattccacaaagtttttcaaatggcgattgctttcaaatccggcgtcttcttcctccaatccccaaaatctcaaattggattccgccattcttctcctcctgattcatcgctttctttcaagagattcactcccatggcttctctctccacctcttctcctactctcggtctcgctgatactttcacacagctcaaaaaacaaggcaaagtagcattcataccatatatcacagctggtgatccggatctctctactactgctgaagcattgaaagttcttgatgcttgtggttctgacataatcgaatggg

SEQ ID NO: 165569 - DNA, 54 bp, Arabidopsis thaliana columbia
ctgaaaatgacaaaagttgaagaactagtaacatgtatttgtattcttgtttgc

SEQ ID NO: 165570 - DNA, 356 bp, Arabidopsis thaliana columbia
cattttcacatcaaaatcacattccttccatggtcttcttctccatgatctccattctccttggctttgttatctcctccttcatcttcatcttcttcttcaagaaacttctctccttctccagaaagaacatgtctgaagtctccactctcccctctgttccagtggtaccagggtttcctgttattgggaacttgctgcaactaaaagagaagaaacctcacaagactttcactagatggtcagagatttatggtcctatttactctataaagatgggttcttcttctcttattggccctaaattctactgagactgccaaagaggccatggtggcgcggttttcgtctatctc

SEQ ID NO: 165571 - DNA, 272 bp, Arabidopsis thaliana columbia
  unsure (1)..(272): unsure at all n locations
aatttctgaacaatttgacttcagtgacagtgagttctgcatcaccgaagtctcttataaaatattggtcgctgtaataaggacacagctctcttgttgtgtatgtgtcacagagttcttcattttgcttgtgtaatgaacaattaaacatgctcttttctgagtgtgtgtgcgttttgtgtgtgtcaagtttttcatcgtctcctttaaaaaaaaaaaaaaacaanacttacacaaaatanncanaaatatataaaaactatatactatat

SEQ ID NO: 165572 - DNA, 431 bp, Arabidopsis thaliana columbia
ctcttaccaatttccatttctcgggggaaaatattaatactacttttgaaatctctcactaatatttcccaagaaaacctgatgaattaaaagttcatattttcttggtgttgattggtattagatgactatttcttagtattagtcaattctctgtttccatcttatatggatagtctagacacagagcaaagatccttctttggagaaaaagaagatgagagacgagagaggatcgtttcttcacgtattggtcgtagatagatcttaatcgataaccatctaggccttgatctaaccattcaatataaactttatttccttcttcttttcgatctcaattgttccgaccaaacaagatgaagagatcacgtggaagctcccattctttatcccggttcttaccaattcgccattctacaacagacaaa

SEQ ID NO: 165573 - DNA, 407 bp, Arabidopsis thaliana columbia
aataggtttgacagggattcaaccccagtcccggtttttagtaaccgagaggcatcagaaagagtcaatgatcgagccaattcgatccttaaccggttgatgacatctaggggagttagatcagagcagaaccaggctagtgctgcagcagcagccattgtcgcagcatcagaggatattgatctaaatccaaacattgctcctgatcttgaaggagaaagcaacacgagattccatcctctcttgatcaggagacagttacagtcgcaccgagttgcaaggatctcgactttcacttctgcgttgagttcagctgagaggcttgtggatgcgtattttaggactcatccgttggggaggaaccaccaagagcaaaaccatcatgctcctggtgtgggtgatgatag

SEQ ID NO: 165574 - DNA, 442 bp, Arabidopsis thaliana columbia
tgaagataaggctcgcgcgtcttggttgtaaacaccgatccttctatcgtgtagttgtcgccgatgaaaaatcgcgcagggacggtaaacaaatcgaggtgttaggcttttatgatccactccaaggcaaagaagatgcggatagagtgagcctcaaattcgacagaatcaagtactggttatctgttggagctcaaccaacagacacagtggaaagcatgcttttcagggccggtttgataccaccaaagcctatggtagtggtcggttcgaaaaatgggcagaagtctacgagccaacatgtttcacccattacaggtgaaatcttgaactaagagtgttgatgcgttgagcaagaaagagccttttgtgtctgtgtgaaaggagtttatgtaatgttgtttaagacttttctgtttatgtgaaaggagttaatgtaatg

SEQ ID NO: 165575 - DNA, 386 bp, Arabidopsis thaliana columbia
aaaaaaagaaaacacaaaaacaaagattataatggcttcctcaaccatggctttgtcctcccctgccttcgccggaaaggctgtgaagcctgccgcatcagatgtcctcggaagcggccgtgtgaccatgaggaagactgtcgccaagccaaagggtccatcaggcagcccatggtacggatctgaccgagtcaagtacttgggtccattctccggcgagcccccgagctaccttaccggtgagttccccggtgactacggatgggacaccgctggtctatccgccgacccagagaccttcgccaggaaccgtgagctagaagttatccacagcagatgggccatgctcggagccctaggctgcgttttccctgagctattggcta

SEQ ID NO: 165576 - DNA, 436 bp, Arabidopsis thaliana columbia
  unsure (1)..(436): unsure at all n locations
caaagatagagttcagaccaaacacagatgacgtctccacacaagaggaaaccagacatcacaaaggccaaagagcttcttggttgggaaccaaaggtggctctacgccaaggactcccacttatggtcaaagatttccgtcaacgtgtctttggcgaccaaaagcaggattcttccaccacttcatcatcaacagagtaactgtcgctggagattctcgtttctcttcgttttcatttttaattttgatatttctattcctgtcaatgtagtgatattgaaacctcaccgattttaaagttttattttttttaatgcaatcaccgtagttttgagcttttnaaaaaaaaaaaaaaaaaaaaaaaaaaaaaccttannaaataaaaaaaaaaaaaaaaaaaattttanaattatttttttatatattatatatatt

SEQ ID NO: 165577 - DNA, 451 bp, Arabidopsis thaliana columbia
ggggatatatctccacacactagttctgatgatgataatggggaccatgatagtcttgagaaaaaatctagtaggagtaagaatattgcttatggaaaatgtgatgtcaagccacccaggcttcagagtggcgttcttaggaccaattgcattgattgccttgaccgtacaaatgtagcacaatatgcatacggttgggctgctcttgggcagcagcttcatgtattagggattagagatgttcccgccatagaacttgatgatcccttggctatttcgttaatggggttgtatgagagaatgggtgacacactagctcatcagtatggcggatccgcagcccacaacaaggtattcagtgagagaagaggccagtggagagcaacaactcagtcacaggagttcttgagaactctacaacgattttataaccacccatatatggatgcag

SEQ ID NO: 165578 - DNA, 399 bp, Arabidopsis thaliana columbia
cttggtctgattgatgagtcaaaaatttctcgttctctaccttggagacgccctgcaaatgttttccgtactaaggaagatgttcgcccaattttctgggcaaaccgtccaaagagctacatatctagaacaaagggctggaatgacttcccacatggacgttggggtgattcacacagtgcagcatacagtacactttcggattatcagtttgcgcgcccaaaaggacgtgacaagaagcttcagcaagaatgggtcgtcccactgaaaagcattgaagatgttcaagagaaattcaaagagctctgcattggaaacttaaaaagcagcccatggtctgaattagatggactccagccagagacaaagatcataaatgagcaactcggaaaaatcaac

SEQ ID NO: 165579 - DNA, 227 bp, Arabidopsis thaliana columbia
aagaaatcaaaaatccgatggggaggaagaagggtttgctcggagttcgaagagtcggcgccggatggattcgatcctgagaatccgtacaaggatccggttgcgatggtggagatgagagaacacattgttcgtgagaaatggatccatatcgagaaggctaagatcttacgtgagaaggtcaaatggtgttaccgcgtcgaaggcgttaaccattaccagaagtg

SEQ ID NO: 165580 - DNA, 370 bp, Arabidopsis thaliana columbia
cgcgttttaaacgatttgattagttttaaattatatatagatgatccgagcgatgtctggttcgacccggaaagaaatggatcggatcaaaggaccatggagtcctgaagaagacgatctgttacaatcgttggttcagaagcacggaccaaggaactggtctctgataagcaaatcaatccctggacgttccggtaaatcttgccgtctccgttggtgtaatcagctttcttcggaggtagagcaccgtggattcacggctgaggaagatgatacgattattctagcgcacgctcggtttggtatcaagtgggcgacgattgtacggttttctaatggttttacttgatatctctatttaaaatttttt

SEQ ID NO: 165581 - DNA, 438 bp, Arabidopsis thaliana columbia
ctcactcctttactcacacaagaaaacaaaatcatgtctcgatttgctatcttagtaaccttggcacttgccattgccactgtttcggtggttatagctcaagtccctccggagaaacaattcagagtcgtcaacgaaggagaattcggtgaatacatcactgagtacgacgcaagttacagattcatcgaatcatcaaaccagagcttcttcacatcaccattccagctcttgttttacaacactacccctagcgcctacatcttagctctccgagtcggactcaggcgtgacgagtctaccatgcgttggatatgggacgcgaatcgcaacaaccccgtcggagaaaacgctacactctcactcggccgtaacggcaacctcgtcctcgctgaaactgacggacgagtcaaatggcagactaacacagcttacaaa

SEQ ID NO: 165582 - DNA, 404 bp, Arabidopsis thaliana columbia
agaaaatcgagaaaatcggatccgaaatctcctctcttaaccctcgaagaagctcgtatcctcgtcgactatctccaagacaaattcggtgtctccccactctccttagcccccgcagcagcggccgttgcagctccagccgacggtggcgcggcggctgtagtggaggagcaaacagagttcgatgtggttatcaatgaagttccgagtagttctcgtattgcagtaattaaagctgttagggctttgactagcttggcgttgaaggaagctaaggagctaatcgaaggattaccaaagaagtttaaagaaggtatcactaaagatgaagctgaagaagctaagaagactcttgaagaagctggtgcttaagtctccattgcttaagtttcttcaacaatcgg

SEQ ID NO: 165583 - DNA, 406 bp, Arabidopsis thaliana columbia
aactggtcaaatgagaaagtggagagcgaatatgtacaccgttctggcaactgtgaaatgcatgagagcactcagggcagggttgctggagaaacagaaaaacgaaaggttacctgcttttgctctgtgtgaaaacaacgtaacatctgaaattgttaagtctcacgagttggagatcagaacccttgcaaatctatcatccttagaggttgtgtcaaaaggacaacatgcagcaccacctggatcttcagttgagacggtgaacgagaacctcaaagtatatcttgaagtggacggagccattaacacagaagctgaacaagaaaaaatcagaaacaagattggtgaactacaaaaacaaaaagagaagttgcagaagatgatgagtgtgtctacttacgaagag

SEQ ID NO: 165584 - DNA, 444 bp, Arabidopsis thaliana columbia
gaaagaaaagaacttaaatcaaaatacttaatagcatggcgatacatttatacaaaacttctaccccgagcacacgcaatggagccgtagacagtcaagtgaaatccaatccacgaaataatttgatctgtgggcagcatcattgtggtaaaggtcgtaatgccagaggaataattaccgcaaggcatagagggggaggtcataagcgtctataccgtaaaatagattttcgacgaaatgcaaaagacatatatggtagaatcgtaaccatagaatacgaccctaatcgaaatgcatacatttgtctcatacactatggggatggtgagaagagatatattttacatcccagaggggctataattggagataccattgtttctggtacagaaagtcctataaaaatgggaaatgccctacctttgaccgatatgcccttaggca

SEQ ID NO: 165585 - DNA, 385 bp, Arabidopsis thaliana columbia
aagcgaaccaacaaaaagtcttcatctttaatcattcaatggcttcttcgtcttctatgcagatggttcacacttcccgctccattgcccagattgggttcggtgttaagtcgcaattagtttctgcaaatcgaacaactcaatcagtttgctttggagctcgttcctctggaattgcattatcttcgagattgcactatgcatcacccattaagcaattttctggggtttatgcgaccaccaagcatcagagaaccgcttgtgttaaatccatggctgctgaggaagaagaagtaatcgaacctcaagctaaagtgacaaacaaggtttactttgatgtggaaattggaggggaagttgctggcagaatttggatgggtctctt

SEQ ID NO: 165586 - DNA, 382 bp, Arabidopsis thaliana columbia
cagttatcaaagcttaagccgttttagggttttatccttttgctgagatccaatcatggcggatgttgaaccagaggttgctgctgctggagttcccaagaagaggacgtttaagaagtttgccttcaaaggagttgatctcgatgctcttctcgatatgtctactgatgatcttgtcaagctcttctcttctcgtattcgtagaaggttctctagaggtttgacaaggaagccaatggctctgattaagaagctgaagaaagcgaaaagggaggcaccacaaggtgagaagccagaaccagtgagaacccacttgaggaacatgatcatcgtccctgaaatgattggaagcatcattggagtgtacaaacggaaagacttt

SEQ ID NO: 165587 - DNA, 421 bp, Arabidopsis thaliana columbia
  unsure (1)..(421): unsure at all n locations
ctcgttgagcccagatcagaccaaagcactggttgctgttctacctaagccgtcaacagctcagttgagtgacatggagatagatgaatgcgaggagaccacgctccacgatgtcaacattgaggatgagatgaggaggaaggcacaagctcaaagagaggcttatgatgatgacgatgaagatgatgaccatccgggtggtgctcaaagggtgcaatgtgcccagcagtaagtaactccttagagagactttgacccacatgggtttgggctccaaccaatttgtctcttgctttttcattctaagtgtattggagtctttatgggaggttggtacggtttaagaatttgcccacttcggtggaacatcgaaacttgntttctctttttcctctgactttaaaaattaaggccttattac

SEQ ID NO: 165588 - DNA, 417 bp, Arabidopsis thaliana columbia
gtttgatggtgccttaaatgttgatgtcactgttttccaaaccaacttggtcccatacccaagaatccacttcatgctttcctcctatgccccagtcatctccgcagagaaagccttccatgagcaactctcagttgctgagatcacaaacagtgcttttgagccagcttccatgatggctaagtgtgacccacgtcacggaaagtacatggcttgctgtttgatgtaccgtggtgatgttgtccccaaggatgtaaacgcagctgttggcaccatcaagaccaagcgcactattcagtttgttgactggtgtcctactggattcaagtgtggtatcaactaccagccaccaacagttgttccaggaggtgatcttgctaaagtccagagagctgtttgcatgatctcaaactcgac

SEQ ID NO: 165589 - DNA, 459 bp, Arabidopsis thaliana columbia
caagcaccggcggaagagtgaactgcatgcaggtttggtctccgattggaaagaagaagctggagactatctcttaccttactgaccttaccgattccgaattggctaaggaagatgactaccttatccgcaacaagtggattccttgtgttgaattcgagttgcagcacggatttgtgtaccgagagcacggtaactcacccggatactatgatggacggtactggacaatgtggaagcttcccttgttcgggtgcaccgactccgctcaagtgttgaaggaagtggaagagtgcaagaaggagtaccccaatgccttcattaggaacatcggattcgacaacacccgtcaagtccagtgcaataagttcattggctacaagccaccaagctttaccgggtaatttcccttttgcttttggtaaacctcaaaactttatcccccatctttgattttat

SEQ ID NO: 165590 - DNA, 337 bp, Arabidopsis thaliana columbia
ctcatgctgtgagaatgcattagctgtatcagtagtcgttgtactcaaccatcatgaatgccaaggatccttctaagacatgatgttcaccttgccacggataaactcaattaccgagcaacgaacatgtggttcctcctagacccacacgtgaaggcaaccatacatgtggaaaacgtggatgagattaaggggctcaacgcatctgactgtcatgggcttcgttaacttgaatgtgcagtactgagagagtactattttatagctgaccattcgcctttttatgctgcggatcttaaatacagaggccccatgtatctattcatgttgaatctct

SEQ ID NO: 165591 - DNA, 466 bp, Arabidopsis thaliana columbia
ctcttcttcttcttcttcttcctcttcccgatttgcccctccccgtctttctccgatccgatctccggcgccgaggactcagctgtctgttcgcgctttctcagccgtcaccatgaccgattctaacgatgctggaatggatgctgttcagagacgactcatgtttgaagacgaatgcattctcgttgatgaaaatgatcgtgtggtgggacatgacactaagtataactgtcatctgatggaaaagattgaagctgagaatttacttcacagagctttcagtgtgtttttattcaactccaagtatgagttgcttctccagcaacggtcaaaaacaaaggttactttcccacttgtgtggacaaacacttgttgcagccatcctctttaccgtgaatccgagcttattgaagagaatgtgcttggtgtaagaaatgccgcacaaaggaagcttttcgatgagctc

SEQ ID NO: 165592 - DNA, 394 bp, Arabidopsis thaliana columbia
  unsure (1)..(394): unsure at all n locations
ctctctctctctctctgcctcctttcggattcatatctcagatctagctcaaccatggcgttgctcgtcgagaagacctcaagtggccgtgaatacaaggtcaaagacatgtctcaagccgatttcggtcgtctcgaactcgagctcgccgaagttgagatgcctggactcatggcttgtcgtaccgaattcggaccttctcagccattcaaaggcgctagaatcaccggatctcttcacatgaccatccaaaccgccgtactcatcgaaaccctaactgctctcggtgctgaagtcagatggtgttcctgcaacatcttttccactcaagaccacgccgccgcagccatcgctcgtgactccgncgctgttttcgcctggaaaggtgagactc

SEQ ID NO: 165593 - DNA, 460 bp, Arabidopsis thaliana columbia
aacagttccaatgttacgccttcaaccactcgttcatctctccgacatcaagattatgactgagtatctgggtgaatagcgagttattcatcgttttttagattatggttaatagataccctttttgaccggaaaatttggaagtagatagaaggttttttttaatgagtccgcttttatgttagttcgtactatacaattcctttgtttgtgagaaaattttctcacaaaagaaaaggtaaaggaaataaaaagagttagagaatggattactacctatgccaagatcgcgtataaatggaaattttattgataaaacctttacaattgtagccgatatcttattacgagtcattccgacaacttccggagaaaaagaggcatttacttattacagagattggatgtcggctcaatctgaaggaaattatgcggaagcattacagaaatattatgaagc

SEQ ID NO: 165594 - DNA, 405 bp, Arabidopsis thaliana columbia
cttcaattgaaaaaaaaaaaaaaattcaacccatttctctgcttcgttgagctaaaacaatggcggaaacaactcccaaagtgaaaggccacgtcgtaatcttaccatacccagttcaaggccacctaaacccaatggttcaattcgctaaacgtctagtctccaaaaacgtcaaagtcacaatcgccaccactacctacaccgcctcctcaatcacaacaccatcactctccgtcgaaccaatctccgatggattcgatttcatccccataggtatccccggtttcagcgtcgatacttactcagaatccttcaagctcaacggatccgaaaccctaactctcctaatcgagaaattcaaatccacagattcaccaatcgattgcttaatctacgattcggttc

SEQ ID NO: 165595 - DNA, 412 bp, Arabidopsis thaliana columbia
tcgggttcgacccattgggtttggggaatgaccttgcttttctgaaatggtacagagaggctgagctgatccatggccgatgggcgatggcagcggttcttgggatcttcgtcggccaggcctggagcggtgtggcatggtttgaagctggagcccagccagacgcgatcgctcccttctcgttcgggtcgcttcttggaacccaattgcttctcatgggttgggtggagagcaaacgatgggtcgatttcttcaacccggattctcaatcggttgagtgggcaacgccatggtcgaagaccgccgagaatttcgcgaactataccggcgatcagggataccccggtgggagattcttcgatccgttgggtctcgccgggaaaaaccgcgacggtgtttatgagccggactt

SEQ ID NO: 165596 - DNA, 425 bp, Arabidopsis thaliana columbia
tcccgatctctcagcttcttccatttacaattctaccctttgcctcttggaacctttgaacgaaaatggcggaaacgatcggctcagaggtttcgtccatgtctgacaaatctgccaaaatcttcgtcgcgggtcatcgtggtttggttggatctgccattgtccgcaagcttcaggaacaaggtttcaccaatctcgttcttaaaacacacgccgagcttgatctcactcgtcaagccgatgttgaatccttcttttctcaagagaagccagtttatgtaatcctagcagcagctaaagttggtggtattcacgctaacaacacctatcctgctgatttcattggtgtcaatctccagattcagaccaatgtgatccactctgcatatgagcacggtgtgaagaagcttctcttccctggatca

SEQ ID NO: 165597 - DNA, 425 bp, Arabidopsis thaliana columbia
aacacacagctccagaccaaatttagttaggatcctgaacctatagattgggattactataggaagggtattggagctggcattgttgacaagtacaaggaagcttatgacagcattgagattccaaagtacgttgacaaagttactcctgaatacaagccaaagtttgatgctttgttggtggaactgaaagaagcagaacagaaatcgctcaaggagtctgaacggttggagaaagaaattgctgatgtccaagagatcagcaaaaagctcagcaccatgactgcagatgagtactttgagaagcacccggaactcaaaaagaagtttgatgacgaaatccgtaatgacaactggggatactgatcatgtttctccatcttcggcttggaaagaaaactctctttctctttctctggtctctt

SEQ ID NO: 165598 - DNA, 346 bp, Arabidopsis thaliana columbia
tcaatttgaattttctcgagaaaaatgtcttgttgtggaggaaactgcggatgtggatctggctgcaagtgcggcaacggttgtggaggttgcaaaatgtaccctgacttgggattctccggcgagacaaccacaactgagacttttgtcttgggcgttgcaccggcgatgaagaatcagtacgaggcttcaggggagagtaacaacgctgagaacgatgcttgcaagtgtggatctgactgcaagtgtgatccttgcacctgcaagtgaagaagcctttttaaataagcagagataatcgagtctctttaattaattaagttattcaataagtcaaccatatata

SEQ ID NO: 165599 - DNA, 359 bp, Arabidopsis thaliana columbia
gttctacaatgatctctgtctctcgattcttgtttccttatattctacgcaattccaaggagcttcgtaaaaatgtctgcttcagcgactcacacggccggagaagtttcaatggggatcaagcctccttcacaccctacttacgatttgaaagctgttatcaaactagccctagctgaagatgctggtcatacaggagatgtaacgtgtatggctacgataccgtttgatatggaaggggaagcttatttcttggcccaggaagatggctttggtgctggcagtgctcttgctgacatgatttttgaacacggtgatccgctcttggaaggctgaatggatgcgaaaggatggagatt

SEQ ID NO: 165600 - DNA, 372 bp, Arabidopsis thaliana columbia
cggaaatcctcagaattgcagagcaaagaacaaccatggcgaatcctattcaagagattctggagaagcaagttctaacggtggctaaagctatggaagataagatagacgacgagatcgcctctttagaaaagcttgacgaggacgatctagaggttttgagagagagaaggttaaagcaaatgaagaaaatggcagagaagaagaaacgttggattagtcttggacatggtgaatactctgagatccattctgagaaagacttcttctccgtcgttaaagccagcgaacgcgtcgtctgccatttctaccgcgagaattggccatgtaaagtgatggataagcacatgagtatattggcaaagcaacaca

SEQ ID NO: 165601 - DNA, 406 bp, Arabidopsis thaliana columbia
aaactgtgaacaccggatatgtgggattccctactgtttaaatcttttttgttatggttaaaaacatcgcagtcctaaaatactacaggataaattctgaggaagatggcagggaagcttgtgctattcttcatgcagctggtccttcaaaggttgtgatcactagcattactataggaggcattctattacttatcggaagccatcagaaagaaaagggtctcaagcctgagcaattcaagattttgatacacaaaatccctgcttattttacgggaacaggagatctcatgactgctcttctacttgggtggagttataaataccttgacaaccttgacaaagtagccgagcttgcagtttaaacgttgcaggcgcttttgctaagggcgctttatggttacaa

SEQ ID NO: 165602 - DNA, 366 bp, Arabidopsis thaliana columbia
cttcatcattttctcttcttcttctccaagaattcactgaagaagaaatggggttccttaagccaaccatggcgattctttttctagcgatggtcgccgtttcatcagccgtggacatgtcaatcatctcctacgacgagaaacatggcgtctccaccaccggtggccgtagcgaagccgaggttatgagtatctacgaggcatggttggtgaaacacggcaaggctcagagccagaactctcttgttgagaaagatcgacggttcgagatctttaaagacaatcttcgtttcgtcgatgaacataacgagaagaatcttagttatagattgggtttgactcggtttgcggatcttactaacgatg

SEQ ID NO: 165603 - DNA, 376 bp, Arabidopsis thaliana columbia
tcgttaattaggattttctagagacaaatgtaccgttctgcatcgacaccaccgtatattcctacggacgctccgacatccgagctcgcatgcgaaatgtttagcatttttccacgcacggaaaacttcagagacgatcctgccgatagcagcgactcaagcgcggttttgaacgaagagtatagtcccaatacggttgaagcagctggcgcagtggcggccacgactgtagaaatgtcgacgatgggttgttttagccaattcgtgaaaatggaagagcatgaagatctgtttagtggagaggaagcttgcaagttgtttgcggacaatgagcaatggtattgctccgatcagcggaattctgaaaatgtggggg

SEQ ID NO: 165604 - DNA, 351 bp, Arabidopsis thaliana columbia
agaaggttagccgtgctgctggtggaccgactcgtgtggagaatgctaagattgctgtgattcagttccagatctcacctcctaagactgatatcgagcagagtattgttgtctctgattatactcagatggataggatcttgaaagaagagaggaattacatattggggatgattaagaagatcaaagcaactggttgcaatgtgttgttgattcagaagagtattttgagggatgcagtgactgatctatctcttcactatttggccaaagctaagattatggttattaaaggatgttgagagagatgagattgaatttgtcaccaagacattgaactgcttgcctatc

SEQ ID NO: 165605 - DNA, 381 bp, Arabidopsis thaliana columbia
tttcctctgttcgtgtcattcttctcgtatatctcgagagagagccttaaggaaattaaaaaaggttggattttgatcgatgggttcttcgtcaggacaacccgaatttgattacttgtttaaggttttattgatcggagattctggtgttggaaagagctctcttttgttgagtttcacatctaatacctttgatgatctttctccaacgattggtgtggattttaagggtaagtatctgacaattggagaaaagaaactcaagcttgcgatttgggatacagctgggcaagagagatttaggacgctaacaagttcgtattacagaggagcttagggtataattatggtatatgatgtgacacgaagagactcgttcac

SEQ ID NO: 165606 - DNA, 346 bp, Arabidopsis thaliana columbia
cggacgcgtggggtctgataatagttttgtagagtttggttaataaaactaatcgtgtacgctactaatacgtacaggtaactaattaatattcaaaaagatggctcaaaaagtggaagcagggggtggcgccggaggagcttcatgggatgatggtgtccacgatggcgttagaaaggtgcatgtagggcaaggccaagatggtgtgtcatctatcaacgtcgtgtatgcgaaggactctcaggatgttgaaggaggtgaacacggaaagaaaacgttacttggatttgaaacgtttgaggttgatgcaaacgactacctagtagcagtgcaagtgacctacgac

SEQ ID NO: 165607 - DNA, 270 bp, Arabidopsis thaliana columbia
gatggtttgaggtttgtgcggagaatgaaggaaatgagagtggaagcgaatcttgtggtcttcaattctttgatcaatggctttgttgaagtcatggaccgtgatggtatcgatgaggttcttaccttgatgaaagagtgtaacgtgaaagcagatgtaatcacgtacagtactgtgatgaacgcttggagctcaactggatacatggagaaagctgcacaagtgtttaaagaaatggttaaagcaggagtcaaaccaaacgctcacgcg

SEQ ID NO: 165608 - DNA, 250 bp, Arabidopsis thaliana columbia
acctgacagagtgaagtacttaggacccttttctgttcaaactccgtcttacctcaccggagaattccctggcgattatggttggacaccggcggtttattcgcagaccctgaagcctttggcaaaaacagagctcttgaggtgatccatgggagatgggcaatgttgggagcttttggttgcataacccctgaagttcttcaaaagtgggtccgtgtggactttaaagaaccagtctgggtcaaaggcc

SEQ ID NO: 165609 - DNA, 224 bp, Arabidopsis thaliana columbia
ggaggagacgcctagctcagcaggttagacatctagcagctgcagcaattgagccggaattagagcaaagggaattgtaacagacacgtgaatctattaagtcttgtgcagtttgatccttgtggataagtttggtagtagatcatagaaacctcgagagtcgtgtgcagttttacagacaatgatattgcagactttaaaagtatatacatatctccttttct

SEQ ID NO: 165610 - DNA, 370 bp, Arabidopsis thaliana columbia
gattctctctctctctctcacatggctcatctcttaaaccgcgttagatcttcctggtcgtcgatcttaccattaactataacattcctcgtcatcttcaccggaaactcactcgccggagaattacgtccttccgatcatggcttacagtaccaattcagctcaccaccgacagaatctcactcacctccgggaaaaatgaagtccttctttggagattctcattcttcttctcctcctccttctcaccctcagctcctccctaaagccacggcggcagacggcggagacgacgattcttggtggcgagatggagctgggatcagacgtgatcacgtgatgaggcacgtgtttcttgcggcgagtatca

SEQ ID NO: 165611 - DNA, 233 bp, Arabidopsis thaliana columbia
ggccggaatttcctggccggaccgacgccgtgcgcacaaggagagaagagagaaagagagaaagagagtcagttataatggcgtacagtgcgtgtttcctacaccagagcgcattggcttcatcagccgcacgatcatcatcttcctcctcataccagcgtcacgtgtcgctctccaaacctgttcagatcatctgtaaagctcaacagtctcatgaagacgataacctcggc

SEQ ID NO: 165612 - DNA, 377 bp, Arabidopsis thaliana columbia
gaaggtgagatattaatccaaaaaaaaaatccatatttttgccaacgtttttagacgatcaaatggcttacactaaccaaatttcagcgggttgtgtttctagcggttgcgattgctccgctattagctgagccacagtcaacgatgtttccagagatgactcctgaatgtgccacggttatgcctgacctgctcgaaaagtgttttgcaaccggtagtgtgacgccaacagaagattgctgcaccgatctaaaatccgcaacctcaacgcaagtgacttgtctttgtgataactacatagcaaatcccgccgtttcaaacatcaccggaccttactccaaagcaatcacaactaaatgtggcgttttcgacaaata

SEQ ID NO: 165613 - DNA, 340 bp, Arabidopsis thaliana columbia
  unsure (1)..(340): unsure at all n locations
ttccttttcccgagaaaatcagaaagaaaattcactangtcaccaagagccgagaagaagcccgccgagaaaaaaaccgccgctgagagaccggtggaagagaacaaggctgctgaaaaggctccggcggagaagaaacccaaggcggtgaagaaattgccaccaaaggaagccggtgacaagaagaagaagcgatctaagaaaaacgtcgaaacctacaagatctacatcttcaaggtgctgaagcaggatcatccagatatcggaatttcaagcaaagccctggggattttgaacagtttcattaacgtcatatttcagtagggctgcttaaagaatc

SEQ ID NO: 165614 - DNA, 470 bp, Arabidopsis thaliana columbia
  unsure (1)..(470): unsure at all n locations
caaaagagttctttctctctatcttattcttcgttcatcatgatgcagcagccaccacccggaggtatccttccacatcacgctcctcctccttctgcgcaacaacagtacggttaccaacaaccttacgggattgctggagctgctccaccaccaccacagatgtggaatcctcaagcggcggcgccgccatcagttcagcctacgaccgctgacgagatccggactctttggatcggggacttacagtattggaatgatgagaatttcctctacggttgctttgctcataccggagagatggtttctgctaaagtgattcgtaacaagcaaaccgngcaagttgaaggatacggtttcattgaattcgcatctcatgctgctgctgaaagagttctacaaacattcaacaacgctcctatcccgagctttcctgatcagctctttagactgaactgggcatcattgag

SEQ ID NO: 165615 - DNA, 400 bp, Arabidopsis thaliana columbia
  unsure (1)..(400): unsure at all n locations
agaatcttcatcatggcctcagtaacctcatccttcgttgcaatcccatctttcaccggccttaaagcctcaaccatcaaatcatccgccaccgtcagaatccaaactgctgctgttgcatcaccgaagcttacagtgaagtcatctctaaagaacttcggagtcgcggccgtagcggctgcagcttcaattgctttggccggaaacgccatggcaatagaagttctcttgggaggagggggatgggcgttngctttcactcccaacaacatccctatgcctaaaggagagaagattgcgttcaagaacaacgctggatacccacacaatgttgtctttcatgaagacgagttcccatttggcgtcgacgtggccaatatctcttatgacgagccagatc

SEQ ID NO: 165616 - DNA, 391 bp, Arabidopsis thaliana columbia
gaacaatggcttcctctatgctctcttcctctatcatggttgcctctccggctcaggccactatggtcgctcctttcaacggacttaagtcctccgctgccttcccagccacccgcaaggctaacaacgacattacttccatcacaagcaacggcggaagagttaactgcatgcaggtgtggcctccgattggaaagaagaagtttgagactctctcttaccttcctgaccttaccgattccgaattggctaaggaagctgactaccttatccgcaacacgtggattccttgtgttgaattcgagttggagcacggatttgtgtaccgtgagcacggtaactcaaccggatacttatgatggacggcactggacaatgtggaagcttccct

SEQ ID NO: 165617 - DNA, 470 bp, Arabidopsis thaliana columbia
agtcaccaaaaaaaaaaaaaaaacacaaaaagtttcaatgtccgcctccacaatggctctctcctcccctgccttcgccggaaaggctgtgaacctttcccccgcggcatctgaagtcctcggaagcggccgtgtgacaatgaggaagactgttgccaagccaaagggtccatcaggcagcccatggtacggatccgaccgagtcaagtacttgggtccattctctggcgagtcaccgagctaccttaccggagagttccccggagactacggatgggacaccgctggactttcagctgatcccgagacattcgcaaggaaccgtgagccagaagttatccacagcaggtgggctatgctcggagccctaggctgcgtcttcccttagcttttggctaggaacggagtcaagttcggaggaggcggtggttcaaggcccggtcacagatctttaacgatggaggactcga

SEQ ID NO: 165618 - DNA, 340 bp, Arabidopsis thaliana columbia
gaaatacacacatagaagacgaagaagaagatgttgacgatacagatccacaacgccatgggtttaggcatcttagcttctcgaacaattcgaccagcttcacgtcttcttcaatctcaaacctccaatttcttcctccgcacaatcgtctcaaaaccagagctccaatctcctgaatccgctgctgtctctgagcctgagccgccgacacagattctccctcctagaaaccctgtaggtggagcacgcgtccacttctcgaatcctgaagatgcgatcgaggtctttgtcgatggttacccggtcaaagtccctaaaggattcactgttcttcaagctt

SEQ ID NO: 165619 - DNA, 290 bp, Arabidopsis thaliana columbia
cccacgcgtccgctcaagtggttcggagctgtttctaagaaaacaacaggtagttcggatcggagctacgcttgcaaaactcaaaacatggcgaggggtttgaagaagcatctgaagaggcttaatgcgcctaagcattggatgcttgacaaacttggtggtgcatttgccccaaagccgtcttctggaccacataagtcaagggagtgccttcccctcgtccttatcatcaggaacaggttgaagtatgctcttacctacccggaagtgatttcaatcttgatgcaaag

SEQ ID NO: 165620 - DNA, 344 bp, Arabidopsis thaliana columbia
aaacaagcccaccaatctcttcttctctgctcttctctctctgtagacactagaagaagaacaaaaatgctcaaacagtttcttcttctccaatccttctccttcttcctcttcaatgtagttatcgtcggaggaagaacattcggcggcggtttctcagcggaggagaatccatttactccaaaagcatctctagttcgttactggaacaaagagattcgtggccaatctcccagatcggagtttttaatctcaaaagcttcaccaattcaacgccgtagactcagcaactttctcaaaactcgccgccgcgaactcgctggcgactcgttttcccgatttct

SEQ ID NO: 165621 - DNA, 461 bp, Arabidopsis thaliana columbia
atggcagcgagtgcatctccaatggcgagccagctatatgagcagcttctcctccgcttctctttctcagcgtctcgccgtcccgaagggcatctccggtgctcctttcggtgtttctccgaccaaaagagtctcttccttcactgtccgagctgttaaatccgacaagacaacattccaagtagttcaaccaatcaacggtgatccattcatcggaagtttggaaactccggtgacatcaagcccattgatccggtggtacctttccaacctccctggataccgtaccggcgtcaaccctctcctctcgcgggtgggtgaggggcctggcccatggtttcttcttagtgggcccattcgtcaaagctggcccattaaggaacactgcttacgccgggtcagccgggtctttagccgcggctgggcctgagtcatcctcagcatgtgcctcaccatctacg

SEQ ID NO: 165622 - DNA, 279 bp, Arabidopsis thaliana columbia
cgcaggcgcattttcagtcgaagaagctctcggttggctcaagccgctctacagagttagagaaggaaacttcatggagtttttttaatagcttttgggttcagagaaatcaacatcttttattcccggtgagagttattcatctttccattggaaaaatgatctatagagagcactgttgtcaataatctcctcgaataatttataacctctttttgggataatcatattttgctcattagagagctttgtttctaataaaatctatgttagtcactg

SEQ ID NO: 165623 - DNA, 380 bp, Arabidopsis thaliana columbia
aattcacaaaaccctgaaagcgttctttaaattcttccaatcggaatcaagatgcagatctttgttaagactctaaccggaaagactaatcaccctcgaggtgggaaagctctgacaccatcgacaacgttaaggccaagatccaggataaggaaggcattcctccggatcagcagaggcttattttcgccggaaaacagctagaggatggccgtacgttggctgattacaatatccagaaggaatccaccctccacttggttctcaggcttcgtggtggtatgcagattttcgtcaagaccttaacgggaaagacgattacctctgaggtggagagttctgacaccatcgacaacgtcataggccaagatccaagacaa

SEQ ID NO: 165624 - DNA, 356 bp, Arabidopsis thaliana columbia
agaccatttcttgttctttggacgaccatcggcttctgtgttaagtctagagtcttcttcttcttcggcgtagttttttccccggcttgaaaaatgggtctatccttcggaaagttgttcagcaagctctttgcaagaaagagatgcgtatcctcatggtgggtctcgatgcagctggtaagactacgatcttgtacaagctcaagcttggagagatcgtgactacgattccaaccattggtttcaatgtggagactgtggaatacaagaacattagctttaccgtgtgggatgtcgggggtcaagacaagattcgtccattggggaggcactactttcagatcactcatggactt

SEQ ID NO: 165625 - DNA, 425 bp, Arabidopsis thaliana columbia
cttaaatctatgtgctcacagttttacaagggcttacctggttcaacttttactggatatgattaggccggagatggaaacatcaccgagcgagttggcaataactaatccgcaaagactctatggctgtcaatcaaatgttgtttatggtcgatctcagctattgaatggtcttcctcctttagtgttccgccgggtgcttgaggttttgacgtacttggctacaaatcattctgctgttgctgacatgttgttttactttgattcgtcacttctatcccagttgtcaagccgaaaaggtaaagagaaagttactcatgtgacagattcccgagatctggagataccttttgttgtcttcctaaaactgcttaatcgggctcagcttctgcagagtacatctcaactaaggctggtcatgggct

SEQ ID NO: 165626 - DNA, 469 bp, Arabidopsis thaliana columbia
gggtttcaattcattgttccagtacttcatcgtttcgccgctcctctcttgtccagactccagaagattcaatggcacccaagaaagacaaagttcctcctccgtcctctaaacccgccaaatccggtggcggcaagcaaaagaaaaagaagtggagcaaaggaaagcaaaaggagaaagtgaacaacatggttttgtttgaccaagcaacttacgacaagcttctctctgaggctcccaagttcaaacttatcactccttctatcctctctgaccgtttgaggatcaatggatcgcttgctagaagggcgatcagagaattgatggctaagggaacaatcaggatggtctctgctcactcaagccagcagatctacactagggcaacccacggctaacttcctttcgaaggtttagtgtttccttgtattttacctaatgtctttatgaaccattatctttctagaat

SEQ ID NO: 165627 - DNA, 468 bp, Arabidopsis thaliana columbia
cgaaaacgctagaacaataactttgatcgttcttcttcttctcttgaatcggaaacaatggcggatgaacataagcatgaagaatcttcacctaatttggatccagcagtggaggttgtagagagggaatcgttgatggagaagttatcggagaagatccatcacaaaggtgattcgtcgtcttcatcatcatcagatgacgaaaacgagaagaagtcttcgtcatcgtctccaaagtctttgaaatcgaaggtttatcgtttgttcggaagagagagacctgttcataaggttctcggcggcggaaaaccggcagatatatttatgtggaaggacaagaaaatgtcaggaggtgtattttgcggtgctacagtggcatgggtgctatttgaattgatggagtatcatcttcttactctggtatgtcacgttatgatcggtgctcttgcctgggtggttctatggtct

SEQ ID NO: 165628 - DNA, 384 bp, Arabidopsis thaliana columbia
  unsure (1)..(384): unsure at all n locations
gttccagtaagacaattcttgtttcaacttggtttatatctttcatctaaaacatttccggctgctcttgagtcatggatgttcgaccatgaaaacttgtcagtaaaacaacaaaattgtggtctttttttcttttttcaaccttggctgcaaatcgatactggtctttgaggaggcttaaaaaaaaaaaaaaaaaaaaaaaaaaaaaaaaaaaaaaaaaaaaaaaaaaaaaatataaaaaaaacaaaattaaaatacacaaaaatacaaaaatataaaatcttntatagggcgtcctattttgaaggtccctgctttcggacgcgcacaggctactctaaattaccctgggggaaccctatttaaagccatggcccacttttt

SEQ ID NO: 165629 - DNA, 306 bp, Arabidopsis thaliana columbia
  unsure (1)..(306): unsure at all n locations
gaatgaatctctgtttgttatggggaagaacatcgnctaggagcagaatctccctgtgagcgacggagctgcttcggctaggaataacggaggtggaggaataagcacatgttgttgctgcgattggatctctagctactttagtatcagacgcgttccgatacctgctttttctgctggtgtgatactttacgccttgtttccgttaccttcatttcttcgatttgcagatccaggggatactagatcttgttccactgtctcacgacgagaaagcagaggattcaccagctgtcacgtacaccc

SEQ ID NO: 165630 - DNA, 420 bp, Arabidopsis thaliana columbia
gtgttaacttgcagcaaaacgatgttcaaagagtctgctgctgctttgatgataggagatgaattgcagaagcttggaagatggagacctgaaaggattgatctttctgctatggcttgtccagcttcaagacagatctatctgacattccctgccgacagtaggttcagggaggaagatgtgtccaattacttcagtacttttggaccagttcaagatgtgaggataccatatcagcaaaagagaatgtttggttttgtgacatttgtgtaccctgagactgttaagagcattctcgccaaagggaatcctcactttgtgtgtgattccagagttcttgtcaagccttacaaggagaaaggcaaagtccctgacaaattccgaacttaccaaaccacagagcgagaactgtccccaaca

SEQ ID NO: 165631 - DNA, 365 bp, Arabidopsis thaliana columbia
ctctttatggcttcttcttcctcctcctcttctctcaattggtcatatcacgttttcccgagtttcagcggagaagatgtccgcaacacattccttagccactttctaaaagaactggataggaaactgatcatttctttcaaagacaatgagatcgagagaagccagtcacttgatcccgaacttaaacatgggattagaaattccagaattgcggtggtgtgttctccaaaacctatgcctcttcaagctggtgccttaacgagctactggagattgcgaaatgcaagaaaggggttggccaaacttgtgatacccattttctacaatttggatccatcccatgtgaggaaacagaccggaga

SEQ ID NO: 165632 - DNA, 407 bp, Arabidopsis thaliana columbia
aaaaaaaagaaaacacaaaaacaaagattataatgtctttctcaaccatggctttgtcctcccctgccttcgccggaaaggctgtgaagcctgccgcatcagatgtcctcggaagcggccgtgtgaccatgaggaagactgtcgccaagccaaagggtccatcaggcagcccatggtacggatctgaccgagtcaagtacttgggtccattctccggcgagcccccgagctaccttaccggtgagttccccggtgactacggatgggacaccgctggtctatccgccgacccagagaccttcgccaggaaccgtgagctagaagttatccacagcagatgggccatgctcggagccctaggctgcgttttccctgagctattggctaggaacggagtgaagttcgga

SEQ ID NO: 165633 - DNA, 425 bp, Arabidopsis thaliana columbia
cgtccggccgtcgtggttgcaaagctcggggatgttgactttagagcaaatggtttatctctttgatcgattcgattacttgacttcacaatctgatgtgaagaaacgaatctccgacgctgtggatgacaaacaggaagctgtagcggtaacaactgctattcaagaggagatattcttggagatggggattgacccgggatttggtattggctgcttgggaaagctgaactctgcatacgaaaacgataaagagttgatgattggttttctacaagtttctcgcaaaggaggagatggcatgtgaagaagctgagcttggacaagatggatttgaacagaaaatgaaagcactacaacaattacaagaacagcaactagagatgcttaagtatatgcgtaaattctctttggatgatcaatct

SEQ ID NO: 165634 - DNA, 505 bp, Arabidopsis thaliana columbia
cggtccgaatttccggttggaccacccttccgagttcttcttccttttcgagcgatgaagaaggttattaaaagaaggagaagaagaagaagatcgttgaaggagaggaagataagaaaggactagtggagaagatcaaggagaagctcccaggacaccacgacaagacagcagaggatgatgtaccagtttccactaccatcccggtaccagtgtcggagagtgtggtggagcatgaccatcccgaggaagagaagaaaggattagttgagaagatcaaggagaagcttcctggtcaccacgacgagaaagcagaggattcaccagctgtcacgtccacgccgttggttgtaacggagcatccggtggagcctacgacggagcttccagtggaacaatccggaggagaagaaggggattttggaaaagatcaaagagaagctttcaggttatcatgccaagaccactgaagaggaagtgaagaaaggaaaagagtctgatgatt

SEQ ID NO: 165635 - DNA, 392 bp, Arabidopsis thaliana columbia
gtttagaagaagcaatggccacttcagcaatccttcactcttctttcgctggccaaacgaccctaaagccatccaacgatctcctccgcataatcggagcctccaatggcggtggccgcatcatcatgcgtcgtaccgtcaagtctactcctcagagcatctggtacggaccagaccgtcccaaatacctaggaccattttccgaaaacacaccatcatacctaaccggagaataccctggagactacgggtgtgacaccgcttgtctcttagccgattcaaaaacattcgcaaagaatcgtgagctcggagtggtccacaatagatgggccatgttgggagctttaggctgcaccttccctgaaattctttcaaaaaacggagtcaaattc

SEQ ID NO: 165636 - DNA, 449 bp, Arabidopsis thaliana columbia
gaccggaggtcatgttcccgagaccaattacatatttatgggggatttcgttgatagaggttacaacagtcttgaagttttcaccattcttttgcttcttaaagcaagacatccagccaatatcactcttttgcgtggaaatcatgaaagtagacagctaactcaggtgtatggtttctatgacgaatgccaaaggaagtatggtaatgctaatgcttggagatattgcacggatgtttttgactatcttacactttcagctattatagatggcactgttctatgtgttcatggtggcctttcacctgatgtacggacaattgaccagataagattgattgagcggaattgcgaaataccgcatgaaggacccttctgtgatcttatgtggagtgatcctgaagatattgaaacatgggctgtcagtccacgtggagctggttggcttt

SEQ ID NO: 165637 - DNA, 450 bp, Arabidopsis thaliana columbia
  unsure (1)..(450): unsure at all n locations
aaaaaaatggctcaagcagtgacttcgatggctgtcttacgtggagcatctcaggctgtccttgaaggaagtttacagatcaacggctcaaaccgtttgaacatctcaagagtctcggttgggtctcagagaaccggacttgtgatcagggctcagcagaacgtgtcagtaccagaaagtagtcgccggtcagtgattggactcgtggcggctggtttagccggtggttcattcgttnaagctgttttcgccgaagctattccgatcaaagttggtggtcctccacttccttccggtggcctacctggaacagataactcagaccaagcaagagacttttcattggcattgaaagatagattttacatacaaccattgtcaccaacagaagctgcagctagagccaaagattctgctaaagagatcaatcaacgttagtcatttatcgac

SEQ ID NO: 165638 - DNA, 378 bp, Arabidopsis thaliana columbia
aaaagaaaacacaaaaacaaagattataatggcttcctcaaccatggctttgtcctcccctgccttcgccggaaaggctgtgaagcctgccgcatcagatgtcctcggaagcggccgtgtgaccatgaggaagactgtcgccaagccaaagggtccatcaggcagcccatggtacggatctgaccgagtcaagtacttgggtccattctccggcgagcccccgagctaccttaccggtgagttccccggtgactacggatgggacaccgctggtctatccgccgacccagagaccttcgccaggaaccgtgaagctaaagttatccacagcagatgggccatgctcggagccctaggcttggttttccctgagctatt

SEQ ID NO: 165639 - DNA, 447 bp, Arabidopsis thaliana columbia
atgacctccatggtaataaactactaattatctttgtaaaatgttctcacgtgaaactctctcactatttcctattgctcactttatgtccccatagcaacaacgacttgtactcgtctgaaaatttctcaaatttcatgtaaataataataataaaaaaattattacaattcttcgctaaaagcatcacagatccagttggcaaaaagaattatatatatactattagtgcattgcaaataaaattattaaagaccaactgtttgtcatataaaatattataaaggatttcatagataatatgtatttgatataacaattataatcgataacaatattctgatattgtaagcttgaaagattatgtcaacagagttaattgctctaattaaatatgtctgggttaatctgatattgacccacaacgtggttacttccattaattcc

SEQ ID NO: 165640 - DNA, 443 bp, Arabidopsis thaliana columbia
  unsure (1)..(443): unsure at all n locations
cttacttcgacgttgtctctcgcttgtggttctttgatgatgcttgtctcttgggctactagaatcgcagatgctcctaaaactgatctcgagttctggaaaactctgttcccggtcgctgtagcacacacgataggacacgttgcagcaacagtgagtatgtcaaaagtagcagtttccttcacacacatcattaaaagtggtgaaccagctttcagtgtcttagtctcaagattcttcatgggagagactttccctcttcctgtctatctctctctcttaccaatcatcggaggctgcgctctcgcggccatcaccgagcttaacttcaacatcactgggtttatgggggcaatgatatcgaatttggncattgtgttccggaatatcttttcgaagaaagggatgaaaaggaagtcagtgagcggaatgaactactacgc

SEQ ID NO: 165641 - DNA, 460 bp, Arabidopsis thaliana columbia
  unsure (1)..(460): unsure at all n locations
cagaaaacaagtagaaactttaaaacgagagagtattataaagaaatggcgacatcgggaacgtacgtgacggaggttccgttgaaaggatcggcggagaaacactacaagagctggaagagcgagaaccatgtcttcgctgacgccattggccaccacatccaaaatgtcgttgttcacgaaggcgaacatgactctcacgggtctatcaggagttgggactacacatatgatggaaagaagagatgttcaaagagaagagagagatagatgatgagaataaaacattgacgaaaagaggactggatggtcacgtgatggagcatctcaaagtatttgatatcatctacgaatttattcccaaatctgaggatagctgcgtctgcaaaatcactatgatatgggagaagcgcaacgatgactntcccgaaccaagcggctacatgaaattcgtcaagca

SEQ ID NO: 165642 - DNA, 426 bp, Arabidopsis thaliana columbia
  unsure (1)..(426): unsure at all n locations
ctggtcaaatgttgtcatagcctatgaaccagtgttgtccattggaaccggaaaggtcgctagcccagcccaagctcaagaagtacacgatgagctgaggaaatggctggccaagaacgtgagtgctgatgtcgctgctacaacccgcatcatttatggaggatccgtcaatggtggtaactgcaaggagctaggtggacaggccgatgttgatggtttcttggtcggtggtgcttctctaaagcctgagtttatcgacatcattaaggccgcagaggtgaagaaaagtgcctaatgagctcattaagcaatttaaaagtcctttgcttttccagtcgcaactctgaaaaaatgaataagttggtattatgatatgatacattttgcttcaantgtatttggcaaaagtttttctcttactatatt

SEQ ID NO: 165643 - DNA, 361 bp, Arabidopsis thaliana columbia
tgttaacgccaagtttattgaggagaatccagtctcgtcgattactactaacccatctttcttctctcagttcactctcgttatagccactcagctggtggaagattcaatgttgaaacttgatagaatctgtcgagatgcaaacgttaagttggttttggttcgctcttatggccttgctgcgtttggtcgcatctccggtaaggagcaccccataattgactcaaaacctgatcattttcttgacgacctacgcctgaataatccatggcctgaactcaagagtttggtggagaccattagttggaatgtatcaaagccgggcggtgtacataagcacataccttactttgacattctt

SEQ ID NO: 165644 - DNA, 422 bp, Arabidopsis thaliana columbia
  unsure (1)..(422): unsure at all n locations
cgcttttgcttcctatcgcatagatggccaagagagtaatagatccatgtcaaaccgggtnaggttggcngaatgtntaggcgattcttatgggtnnttagtggttcaaccacccacatgtgancctggataataggacccaaattttgagatatcnttgttgcanngcacttttgnntctganncccatgtgcaccaaccacttatnttgtccataannccttcatactataagtaagtgatagaccaagatctcttganntctcatacctanntctatcttccatcannctttcatgtctgtctgtgagtgtgtttcatctttagagttcttgggttttgagcttgaattattgttgaaccggtgtagctccatgaacaaaattggatatcttcaatgtacagaggaactaaagttaatc

SEQ ID NO: 165645 - DNA, 452 bp, Arabidopsis thaliana columbia
caaaatttagacaaaaaaataaatatggagctcgttacctcagtttatcgaccaaacgtcgccgtttatgattctccggatggtgtggaggttcgaggacggtacgaccaaatcttcgccaagattttgacgagagaagctcttagctttgtggctgagttacagagagagtttcgtggccatgtgaagtatgccatggagtgccggagagaggcaagacggcgttataactccggtgccgttcctgggtttgatccttccactaagttcatcagagacggtgattggagctgtgccttcgtccctcctgccgttgctgaccggagagttgagatcaccggtccggtcgagaggaagatgatcattaacgctcttaactccggagcttaaagttttatggctgatttcgaggaccctttgtctccaagcttggagaatcttgttggagggca

SEQ ID NO: 165646 - DNA, 310 bp, Arabidopsis thaliana columbia
gacagatagagagaaacgatggcgtcgaactcgcttatgagctgtggcatagccgccgtgtacccttcgcttctctcttcttccaagtctaaattcgtatccgccggagttccactcccaaacgccgggaatgttggtcgtatcagaatggctgctcactggatgcctggcgagccacgaccagcttaccttgacggttctgctcctggtgactttgggtttgacccacttggacttggagaagatccagcgaaccttgagagatacaaagagtcagagctcattcactgtagatgggctatgctcgctg

SEQ ID NO: 165647 - DNA, 437 bp, Arabidopsis thaliana columbia
cttctcccttgtgcgatatcgtttgcgtgagatttgtctgaaaagtagctaaccatgggtaaagagaagtttcacatcaacattgtggtcattggccacgtcgattctggaaagtcgacaaccactggacacttgatctacaagttgggtggtattgacaagcgtgtgatcgagaggttcgagaaggaggctgctgagatgaacaagaggtccttcaagtacgcatgggtgttggacaaacttaaggctgagcgtgagcgtggtatcaccattgacattgctctctggaagttcgagaccaccaagtactactgcactgtcattgatgctcctggtcatcgtggattcatcaagaacatgatcactggtacctcccaggctgattgtgctggccttaatattgactccaccactggtggttttggggtgttttttca

SEQ ID NO: 165648 - DNA, 425 bp, Arabidopsis thaliana columbia
ctctctctctctctgcctcctttcggattcttttctcagatctagctcaaccatggcgttgctcgtcgagaagacctcaagtggccgtgaatacaaggtcaaagacatgtctcaagccgatttcggtcgtctcgaactcgagctcgccgaagttgagatgcctggactcatggcttgtcgtaccgaattcggaccttctcagccattcaaaggcgctagaatcaccggatctcttcacatgaccatccaaaccgccgtactcatcgaaaccctaactgctctcggtgctgaagtcagatggtgttcctgcaacatcttttccactcaagaccacgccgccgcagccatcgctcgtgactccggcgctgttttcgcctggaaaggtgagactcttcaggagtactggtggtgtaccgagcgtgctc

SEQ ID NO: 165649 - DNA, 428 bp, Arabidopsis thaliana columbia
acaacaacaaatcttaaacgttttactttgttctgcactactcaacctcaatggccgcctcaacaatggctctctcctcccctgccttcgccggtaaggccgtcaagctttcccccgcggcatctgaagtccttggaagcggccgtgtgacaatgaggaagactgttgccaagccaaagggcccatcaggcagcccatggtacggatctgaccgtgtcaagtacttgggtccattctctggcgaatcaccgagctaccttaccggagagttccccggagactacggatgggacaccgccggactttcagctgaccccgagacattcgcaaggaaccgtgaactagaagttatccacagcaggtgggccatgctcggagccctaggctgcgtcttccctgagcttttggctagaaacggagtcaagttc

SEQ ID NO: 165650 - DNA, 404 bp, Arabidopsis thaliana columbia
cggacgcgtgggcaacattttccgtttcactcattccttctctgaagtgtctgctttactcggtcgtatcccgtctgctgtgggataccagccaactctggcttctgatcttggtgctcttcaagagcgaattactaccaccaagaaagggtctatcacctcagtccaagccatctatgtacctgctgatgatttgactgatcctgctcctgctacaacttttgctcacttggacgccacaactgtgctctcaagacagatttctgagcttggtatctacccctgctgggatcctttggattcaacatcccgtatgctgtcacctcacattcttggagaggagcattacaacacgggtcggggggtgcagaaagttctacagaactacaagaacctgcaagata

SEQ ID NO: 165651 - DNA, 316 bp, Arabidopsis thaliana columbia
aaatcgctcgagagtgagaactctgctcttcttcttcttcctccgccatagctacaatgcttagtctctcaatcgctacgccggggacggcggcgatttttcgtagaggaactgcttcggcgacttcaacttcgtcttcattccatggtgtcagaatccagcaccaggtttctgctcgcgtccccgcggcggcgacgatatcgtcgtcgtctcctaaaccgtcggtggggatgatgtcgaaaagagaggcggaattgaaaggagataagatcgaagacgacggggcagttacaagaggaggttgttgaccttaaag

SEQ ID NO: 165652 - DNA, 465 bp, Arabidopsis thaliana columbia
atcaacgagagtgtgattgaatccgtggactctctttatcccatttatgcacgccaggggagtgtccttcatggttgacaactgctcaaccacagcaagattgggttcgaggaaatgggcgccacggtttgactacatcctgacccaacaagctcttgtggctgtggacagtggtgcagcaatcaacagagacctaatcagtaacttcttctctgatccagtccatggtgccattgaggtctgcgcacagctcaggcctaccgttgatatctctgtgcctgctgatgcagactttgttcgacctgagttgcgtcaatctagcaactgagtgaagggtttgaaagtttgcagtctcttatttgtaatcggagtattaagtcgagaagtttggatgttttcttaggcgtgactgtttgttttgtttgaagggatatggctctttgctttggtcttaaaatctactta

SEQ ID NO: 165653 - DNA, 458 bp, Arabidopsis thaliana columbia
cttccgaccaaaaaaaaaccccttaaaaccatttcctaattttttcttcttcatctacaacaatggctggagttgcctttggttccttggatgattcattcagctgggcttctctaagagcttacctcgctgagttcatctccactttactctttgttttcgctggtgttggctctgccattgcctacgcaaagctgacgtcggacgctgctcttgatacaccgggactagtggccaatggggtttgtcatggttttgctctcttcgtggccgttgcaatcggagccaacatctccggtggccatgtgaacccagccgtcacttttggtcttgctgtcggtggtcaaatcacagtcatcaccggagttttctactggatcgctcagcttctcggctccaccgccgcttgtttcctccttaaatacgtcaccggtggtttgcggttccaacccacagcg

SEQ ID NO: 165654 - DNA, 391 bp, Arabidopsis thaliana columbia
accagaggcaagggtatggttgactctgtcttcttgttcctatgggaaccggaactcaccacgctgtccttagctcatacgaatacgttagccaaggccttaggcagtacaacttggacaacatgatggatgggttttacatcgctcctgctttcatggacaagcttgttgctcacatcaccaagaacttgttgactctgcctaacatcaaggctccacttattttgggcatatggggaggcaaaggtcaaggtatatccttccagtgtgagcttgtcatggccatgatgggtatcaacccaatcatgatgagtgctggtgagcttgagagtggtaacgcaagagaacccgcaaagcttattcgttagtggtaccgtgaggcttctgactt

SEQ ID NO: 165655 - DNA, 128 bp, Arabidopsis thaliana columbia
  unsure (1)..(128): unsure at all n locations
aaggaaacgaaaatatgatgatgaagtcgnngatccgtctctctctcatcctcctcccacttgtctccgtcgtggaaggtctcggtggtggtggtggnctntggagccggaagccggtcaagaatgta

SEQ ID NO: 165656 - DNA, 295 bp, Arabidopsis thaliana columbia
ggaactgttgcactacgtgaaattcgtaagtacctgaagagtaccgagttgctgatcaggaagctccctttccagaggctagttcgtgagattgcccaggatttcaagactgacttgcgtttccagagccatgctgtgcttgcactccaggaggctgctgaagcataccttgtgggtctctttgaggacactaacctctgcgccatccatgccaagcgtgtgaccataatgcccaaagacattcagctcgctcgcaggatcagaggagaacgtgcttaattgtgattgggagtag

SEQ ID NO: 165657 - DNA, 373 bp, Arabidopsis thaliana columbia
gaaacttgagcttcaattacaaagaatggctgcttcaagtgctgtcaccgcaaactacgtcctcaagccacctccattcgcactggatgctttggagccgcatatgagcaaacaaactctggagtttcactggggaaaacatcacagagcttacgtggacaacctcaagaaacaggttcttggaaccgagcttgaaggcaagcccttagagcacattatccacagcacttacaacaatggtgatctcctccctgctttcaacaacgctgctcaggcgtggaaccacgagttcttctgggagtcaatgaaacccagtggtggaggaaaaccatcaggagagcttcttgctttgcttggaaagagatttcacttt

SEQ ID NO: 165658 - DNA, 467 bp, Arabidopsis thaliana columbia
aaaaacattgtgggtctccggtgattaggatcttattagggcaccagccttatcggaggaagaagccatgggtagaaaaaaagtcgagatcaagcgaatcgagaacaaaagtagtcgacaagtcactttctccaaacgacgcaatggtctcatcgagaaagctcgacaactttcaattctctgtgaatcttccatcgctgttctcgtcgtctccggctccggaaaactctacaagtctgcctccggtgacaacatgtcaaagatcattgatcgttacgaaatacatcatgctgatgaacttgaagccttagatcttgcagaaaaaactcggaattatctgccactcaaagagttactagaaatagtccaaagcaagcttgaagaatcaaatgtcgataatgcaagtgtggatactttaatttctctggaggaacagctcgagactgctctgtccgtaactagagctt

SEQ ID NO: 165659 - DNA, 453 bp, Arabidopsis thaliana columbia
  unsure (1)..(453): unsure at all n locations
caacaacactaagcaaaaaagaaaagctcatgcctagagagacaatggcatcaacattcacgagctcaagcagtgttcttaccccaacaacattccttggccagactaaagcctcaagctttaacccccttcgtgatgttgtctctctcggatctcccaagtacactatgggaaatgatctttggtatggacctgacagagtgaagtacttaggacccttttccgttcaaactccgtcttacctcaccggagaattccctggcgattatggttgggacaccgccggtttatccgcagaccctgaagcctttgccaaaaacagagctcttgaggtgatccatgggagatgggcaatgttgggagcttttggttgcataacccncgaagttcttcaaaagtngggccgtgtggacttcaaagaaccagtctggttcaaagccggttcacaaatct

SEQ ID NO: 165660 - DNA, 412 bp, Arabidopsis thaliana columbia
  unsure (1)..(412): unsure at all n locations
aacgagcaaaagaagaagagaaacaacaagatgttgtaatggcttcctctatgctctcctccgccgctgtggttacatccccggctcaggccaccatggtcgctccattcaccggcttgaagtcatccgctgcattcccggtcacccgcaagaccaacaaggacatcacttccatcgcaagcaacgggggaagagttagctgcatgaaggtgtggccaccaattggaaaggagaagtttgagactctatcttacctccctgaccttagtgacgtcgaattggctanagaagttgactaccttctccgcaacaagtggattccttgtgttgaattcgaggtagaagacggatttgtgtaccgtgagcacggaaacactcccggatactacgatggacggtactggacaatggg

SEQ ID NO: 165661 - DNA, 297 bp, Arabidopsis thaliana columbia
  unsure (1)..(297): unsure at all n locations
cgatcactttactctaaaagaatcttcatcatgggccttatgtttcctcagcccaccgttgcatatcccattctttcaaccggccttaatagcctcaaccccatcaaatcatccccgccaccgtcagnnaatccaaactgctggctgttgcatcaaccgaagcttacanngtgaagtcatctctataagaaacttcggagtcgcggcccgtagncggctgcagcttcaattggctttggcccggaaaccgccatggccaatagaaagttcttcttggggagggagggggatggggtc

SEQ ID NO: 165662 - DNA, 446 bp, Arabidopsis thaliana columbia
cggagattggccctcgagtgcagtggcgacgactgttgctgaaggagtagcttgcaaaagcgcgtgtgaagcgtttggaacgccggagtactgctgtagcggcgcgtttggaacgccggacacgtgtaagccaagcgagtactcacagtttttcaaaaacgcgtgcccgagagcttatagttacgcttacgacgacggaactagtaccttcacttgtggcggagctgattacgtcatcactttctgtccttctcctaacccaagtgtgaagagtgcaacgaagggagtccaatcccgagctgttagctactctaaggcatctccaaacgcgtcgccaactctttctgccgtgttttcgattggcgttttggctgtcgcgtcttgggtgatgcaacgcgttttgtgattcatgtacgggtgcgtttgaagttttaataacatcaatc

SEQ ID NO: 165663 - DNA, 470 bp, Arabidopsis thaliana columbia
  unsure (1)..(470): unsure at all n locations
tccacaactctaacaaaccttcccgattcatcctcgttgactcccttcactcgatctcatccgcagtggaatcaaagacaacccaaaacggatccgaagtcgtcgaactcacagagttcgagaaaacccagaagaagtatcaagatttcatcgctacacttccaaagagcaaaggctggagaccagatgagatcttaacccaatacggtggacactggtggcaagaatgtcttctcgaaggtctttttcacgctaaagaccatttcgaagcacgaccaactgatttcctcgtctgtagctacccaaaaaccggtacaacttggctcaaagcactaacttacgcaatcgtcaatcgttctcgttacgacgacgccgcatacccactcctcaaacgaaaccctcacgagtttgtcccttacgttgagatcgnacttccgttggaccccccctttgatgttcttcaagacaga

SEQ ID NO: 165664 - DNA, 449 bp, Arabidopsis thaliana columbia
  unsure (1)..(449): unsure at all n locations
ggaagaagctccagtggcaaagactcaacattnaatangagaggtgggagtctatggcagctagggcaatcaataacccgtcgtcttgctcaatctgacaagaaggttgtgtcacgtcgctactttgcctctgaagctgacctgaaaaagactgctctttacgacttccatgttgcccatggaggaaagatggttccttttgctggttggagtatgccaattcagtacaaagattcgattatggactcaacggttaactgcagggaaaatgggagtttgtttgatgttgcacatatgtgcggtttgagccttaagcgtgaagattgtgttcctttttttgagacacatgtgattgctgatgttgctttttttggttccttgtactgttatcttatctgagtccatttactggttatgtaattttctttgtagtgtccagttagtgactg

SEQ ID NO: 165665 - DNA, 424 bp, Arabidopsis thaliana columbia
caaatcttaaacgttttactttgtgctgcaccatccaacctcaatggccgcctcaacaatggctctctcctcccctgccttcgccggtaaggccgtcaagctttcccccgcggcatctgaagtccttggaagcggccgtgtgacaatgaggaagactgttgccaagccaaagggcccatcaggcagcccatggtacggatctgaccgtgtcaagtacttgggtccattctctggcgaatcaccgagctaccttaccggagagttccccggagactacggatgggacaccgtcggactttcagctgaccccgagacattcgcaaggaaccgtgaactagaagttatccacaagcagtgggccatgctcggaaccctaagctgcgtcttccctgagcttttggatagaaacggtgtcatagtcccg

SEQ ID NO: 165666 - DNA, 153 bp, Arabidopsis thaliana columbia
ctttttgtgtctcttggcaccatttaactacaaatgggaagcattacggttcggtttcgtgctctacgcattgacttcactcagcatcacattctcataccataggaacttggctcaccggagctttaagcttccgaaatggcttgaatatcc

SEQ ID NO: 165667 - DNA, 341 bp, Arabidopsis thaliana columbia
cgattctcgctttccttctctcaacgttctcgtggaattcccaaatcggcttgaaatttttggagaaattggagcttcgattcattcatttatgaggatctctgatgattagtttcgaaattcgtgaagacatcttcgtccttgctttcgaatcgctgaatcgtgttacgttttctagattcggctgaggagtgaaattggatttttgaatcgatttctgaataaagaggaagaggatcggagatggcggcgggtgtaatggtaacggccacgggagcagtggggattctgtacttactgagccgtcggatcgggtgggcgagaaatggagaagatgattc

SEQ ID NO: 165668 - DNA, 462 bp, Arabidopsis thaliana columbia
caaaagcctatttgggggatcatcaaccttctatcatcaccatggatccttacaagtatcgtccttcaagcgcgtacaacgccccattctacaccacaaacggtggtgctccagtctccaacaacatctcttccctcaccatcggagaaagaggtccggttcttcttgaggattatcatttgatcgagaaggttgctaatttcaccagagagaggatccctgagagagtggttcatgctagaggaatcagtgctaagggtttctttgaagtcacccatgacatttcaaacctcacttgggctgattttctcagagcccctggtgttcaaactccggttattgtccgtttctccaacgttgtccacgaacgtgccagtcctggaaccatgagggatatttcggggtttgcgtgcaaggtttacaccagagagggaaactttgatcttgttgggaacaacactt

SEQ ID NO: 165669 - DNA, 462 bp, Arabidopsis thaliana columbia
aaatactgctgtaaccagacgatatcagattactttcaggtttatcagtttgagcaactcttttccaaaaggaacactcccattgctcatgctgttggtttctgggactaccagtctttcattactgctgctgccctctttgagcctcttggttttggtaccactggaggaaagctcatgggacagaaagaaatggctgcctttctcggtcatgtagccagcaaaacgtcctgtggctatggagttgcaacaggagggcctttagcttggggtctgtgctacaacagggaaatgagcccaatgcaatcctactgtgacgagtcctggaaattcaagtacccctgcagccctggagctgaatactacggacgcggtgccttacccatttactggaacttcaactacggagcagctggggaagccctgaaagctgatctcttgaaccaccctgagtacattgag

SEQ ID NO: 165670 - DNA, 54 bp, Arabidopsis thaliana columbia
cctttgagggcggtttgaactattggatttacgtttttggaagtaaccaattag

SEQ ID NO: 165671 - DNA, 396 bp, Arabidopsis thaliana columbia
gatttactgagtgaaaaaagcttatcgcggcgattagttcccggcgaagaagaagaagagagataagaaaatggcgactaatggatctgctagctcagcgcagctctctcagaaggaagctgatgtcaggatgatgtgtgccgctgaggttcatcttggaaccaagaattgcaattaccagatggagcgttacgtcttcaagagacgcaacgatggtatttacatcttcaaccttggcaaaacatgggaaaagctccagatggctgctagagttattgttgccattgagaacccacaggacatcatcgtccagtcagctaggccctatggacagagagctggggttaagtttgctcaggacactggagccaatgccattggtggaagacacactcc

SEQ ID NO: 165672 - DNA, 334 bp, Arabidopsis thaliana columbia
caaatcttaaacgttttactttgtgctgcactactcattctcaatggccgcctcaacaatggctctctcctcccctgccttcgccggtaaggccgtcaagctttcccccgcggcatctgaagtccttggaagcggccgtgtgacaatgaggaagactgttgccaagccaaagggcccatcaggcagcccatggtacggatctgaccgtgtcaagtacttgggtccattctctggcgaatcaccgagctaccttaccggagagttccccggagactacggatgggacaccgccggactttcagctgaccccgagacatttgcatggaaccgtgaa

SEQ ID NO: 165673 - DNA, 333 bp, Arabidopsis thaliana columbia
aacactaagcaaaaaagaaaagctcaagccgtgttgtcaatggcatcaacattcacgagctcaagcagtgttcttaccccaacaacattccttggccagactaaagcctcaagctttaacccccttcgtgatgttgtctctctcggatctcccaagtacactatgggaaatgatctttggtatggacctgacagagtgaagtacttaggacccttttccgttcaaactccgtcttacctcaccggagaattccctggcgattatggttgggacaccgccggtttatccgcagaccctgaagcctttgccaaaaacagagcttttgaggtgatc

SEQ ID NO: 165674 - DNA, 167 bp, Arabidopsis thaliana columbia
ataaccccaagaacccttattggttcaaccgtgatcgtacgttctatctgctggacatggatgtatgttgctctacgcggtgctttatcttggccgctacgacagcgtacaggaggaagatttgaagcaggttcgccattgggggagcaagagacccacacatcctg

SEQ ID NO: 165675 - DNA, 397 bp, Arabidopsis thaliana columbia
ctctctctctctctctctgcctcctttcggattttaatctcagatctagctcaaccatggcgttgctcgtcgagaagacctcaagtggccgtgaatacaaggtcaaagacatgtctcaagccgatttcggtcgtctcgaactcgagctcgccgaagttgagatgcctggactcatggcttgtcgtaccgaattcggaccttctcagccattcaaaggcgctagaatcaccggatctcttcacatgaccatccaaaccgccgtactcatcgaaaccctaactgctctcggtgctgaagtcagatggtgttcctgcaacatcttttccactcaagaccacgccgccgcagccatcgctcgtgacttccggcgtgttttcggcctgaaaggtgagactct

SEQ ID NO: 165676 - DNA, 361 bp, Arabidopsis thaliana columbia
cattaatggacaccaagacgtacctactaatgtttagaagagtctcttgaaggcattggctcatcagcctctcagtgtcgccattgatgcatctggtagagagttccagttctatagcggcggcgtgtttgatgggcggtgcggggttgatcttgaccacggtgtggctgcggttgggtatggatcaagcaagggttcagattacatcattgtgaagaattcttggggaccaaaatggggagaaaaaggttacatcaggctgaagaggaacactgggaaaccagagggtctctgtggaatcaacaagatggcttctttccccaccaaaactaagtgatcatcagatcattctcttttattt

SEQ ID NO: 165677 - DNA, 354 bp, Arabidopsis thaliana columbia
  unsure (1)..(354): unsure at all n locations
gatggaagttgtggaacacaactagaccacgtagttgtggcggttggatacggaactgagaacggcaaagattactggattgtgagaaactcatggggtaaaagctggggagagagtggatacctaaggatggcgcgtaacattgcgtcttcatcaggaaaatgtggaatcgcgattgaaccttcatacccgataaagaatggcgaaaacccgccaaacccgggaccttcacctccatctcccatcaagcctccaacccaatgtgacagttactacacttgtcctgagagcaacaacttgtgntgtctgtttgagtatggcaagtattgcttttgcttggggatgttgcccact

SEQ ID NO: 165678 - DNA, 414 bp, Arabidopsis thaliana columbia
ggaagtgaaagcattattaggaggcaaaaaattgtcggtccttccaagtgtccagcccttccatgcaatagcatatcctattgaccctattcttgcccttgaaatcagtcgtaaatacgctgcacactgctccataatcgcttctcgttttggactacctccttttacccatccagctgggctccctgtaaaacgtgagggaggatttaagagattaaggattggatacgtgagcagtgattttggtaaccatccgttgtcacacctcatgggatcagtgtttgggatgcacaacagagaaaacgttgaggttttctgctatgctctgagtgcaaatgataatactgagtggagacagcgaatccaatcagaagccgagcattttcctgacgtttctggtatgtcatctgatgc

SEQ ID NO: 165679 - DNA, 445 bp, Arabidopsis thaliana columbia
gacgatcgatctaaggagacgatgaagatctttcacgttccttgtctgcaagacaactactcttatctgataatcgatgagagcaccggagacgcggcggttgtggatccagttgatccggagaaggtgatcgcatcggctgagaagcaccaagctaagatcaagttcgtactcactacgcatcatcactgggatcatgccggtggaaacgagaagattaagcagttggttcctgatatcaaagtatattgaggttctctggataaggtgaagggttgcactgatgcggctgataatggtgacaagctgactttgggtcaggatattaacatattggctcttcacacttcttgtcacaccaagggtcacattagttattatgtgaacggaaaagaaggggaaaacccaaccgtgttcaccggagatacactttttgttgctggat

SEQ ID NO: 165680 - DNA, 409 bp, Arabidopsis thaliana columbia
aagaagaagagaaacaacaagaagtagttatgtcttcctctatgctctcctccgccgctgtggttacatccccggctcaggccaccatggtcgctccattcaccggcttgaagtcatccgctgcattcccggtcacccgcaagaccaacaaggacatcacttccatcgcaagcaacgggggaagagttagctgcatgaaggtgtggccaccaattggaaagaagaagtttgagactctatcttacctccctgaccttagtgacgtcgaattggctaaggaagttgactaccttctccgcaacaagtggattccttgtgttgaattcgagttagagcacggatttgtgtaccgtgagcacggaaacactcccggatactacgatgggcgggactgggacatgtggaagct

SEQ ID NO: 165681 - DNA, 403 bp, Arabidopsis thaliana columbia
atcacttgccacactgttacaccgcactcgaggtgtatatttacacatttggtgggccttggttgtttggtcttcttctgatgggtctcctcatcctcttagcacttgtacttagtgttgcacgaatgaaatttgttggagttgatgatttacctggcccagctcccacacagcatggctctcaaatagatcattcgttccctttcctggaatcacttaatgaggtgttggaaacaaatagagctgagcaatctcagagtcatgtgcatagaatgtattttatgggtcctaatacattcagtgaaccgtggcatctctcacacattccccccggaggagattaaagagatagtatatgaggctgcatttaacacatttgtcgacgaaatcaactctatagctg

SEQ ID NO: 165682 - DNA, 439 bp, Arabidopsis thaliana columbia
  unsure (1)..(439): unsure at all n locations
acgtgtacgatggtgatgtggaggagcttgatcttctcgtgggacttatggcagagaagaaaatcaaaggttttgctatcagtgagactgctttttacattttcctcatcatggccacaaggcgattagaagcggataggtttttcacgagtgatttcaatgaaacgatttacacgaagaaggggcttgaatgggtgaatactacagagagtctcaaggatgtgattgatcgtcattatcctgatatgacagacaaatggatgaactctgaaagtgcattttcagtatgggattcacctccacttaccaaaaatccaatccctctctatctccgaattccctcttaatttgatcattttaaatgtgatctatggcacttcgaatgatttttnttcttccctttttggcatttgttggctgtgagctgtgtttcgacatt

SEQ ID NO: 165683 - DNA, 381 bp, Arabidopsis thaliana columbia
ccggacccacccgtccggaaactgaagcttagtgtgaaatacccgtcgaggtcacatcggatcagaaattcgagctaaagagagttcttggtggggtctcatgaggaagtcattgatgaatgtagatagcaaaagtagaggagatgatagattgtgaatggtaggagggactctcttaaagaggcttggacttactagcgcgaaaaactgcacaagctttgcttgtgacttttacatctgttgatcgaattagacctttattcccttcgggtaagtatttcattgatgtgctttgattccacaggcttctaatgctcatagagtgttcctgcacggttcctgtaattccgacctatcttataaaaagaaaaaaataatggg

SEQ ID NO: 165684 - DNA, 508 bp, Arabidopsis thaliana columbia
acgccggcagcgtgaccgtacggtactggccgggatcgacgcgtccgcaaaaagaaggaaagcacaaaaacaaagattattttgtcttcctcaaccatggctttgtcctcccctgccttcgccggaaaggctgtgaagcctgccgcatcagatgtcctcggaagcggccgtgtgaccatgaggaagactgtcgccaagccaaagggtccatcaggcagcccatggtacggatctgaccgagtcaagtacttgggtccattctccggcgagcccccgagctaccttaccggtgagttccccggtgactacggatgggacaccgctggtctatccgccgacccagagaccttcgccaggaaccgtgagctagaagttatccacagcagatgggccatgctcggagccctaggctgcgttttccctgagctattggctaggaacggaatgaagttcggagaagcgggttggttcaagggccggttcacagatctttagcgacggaggattg

SEQ ID NO: 165685 - DNA, 261 bp, Arabidopsis thaliana columbia
cgtaggaagaccacatgcacttgcaatcttcctaatggtttataggccataaggcaaatgcagttgctacaaacacttggggagcgggtaatctgcggttaaagaatcaacgaagtactaaccatagacaaatatattctgcagcttggtacccgattggaagcggttatggtgtgggagtgcacatcttcccactgctagctcttttaaacgatgcaccaaaaggatatttgctgcatgacgccattatttccgaagctc

SEQ ID NO: 165686 - DNA, 318 bp, Arabidopsis thaliana columbia
  unsure (1)..(318): unsure at all n locations
cagagatcctatagcaatggcgaacctaccganttttttggattactggccaagtatgttcgggatgagggctagagttgcgttgcgagagaaaggtgttgagtttgaatacagagaggaagatttctcgaacaagagccctttactcctccagagtaatcccattcacaagaaaatcccggttctggtccacaacggtaaaccggtatgtgaatctcttaacgttgtccagtacgtcgacgaggcttggcccgagaagaacccgttctttcctttcnatccctacgggagagctcaagctcgattctgggctgattt

SEQ ID NO: 165687 - DNA, 372 bp, Arabidopsis thaliana columbia
cccacccgcaaccatacccgctttcccggatctttccgatttctccggctgcccactcgatttaccagaagacctcttccacggcatcaagtcagcttgcagcggcaaaaagctccacaaaggaaaatgttgccccgtactaggcgcgtggctctactctgcttactcaaccactgctctaagccgttcgatttccgccgccgcaagaaactcatcctcctcctccgccgcggtaacgactcctgaagaagatatgcctttgcttcccgatgactcggagacttgcgttgacggattagggaaatctctgaggcaaagagggattgagctcactagaccgaaccaggacttgcggcgtcgtttactgctact

SEQ ID NO: 165688 - DNA, 270 bp, Arabidopsis thaliana columbia
agaaaaacctagaaagctctagagagaaagagatagagagatggaaggtaaagaagaagatgttagagtcggagctaacaagtttccggagaggcaaccgatcggaacttcggctcagagtgacaaggactacaaagagccaccacctgcgccgttgttcgagcccggcgagctagcttcatggtccttctggagagctgggattgctgagtttatagctacgtttttggtcctgtacatcactgttttgactgttatgggtgtgaagag

SEQ ID NO: 165689 - DNA, 425 bp, Arabidopsis thaliana columbia
ctttgcgaagaaataaagagactcgatcgtgatttaactcacttaagcgatggttttggaatagtcagagttttggaataagaataatgcctcacaataaaagctcttgcggtcttcttggatccaatcttaaaggttcaagaaactcatctcctttaggtaaaatcttcgattgttttatcgttccatcgaaccactttgttcttagatacaagaacgtttatgatttatgtagttgggctataaaagtgagaacagagcaataatcttgcaacattttttctcatcttcttggtgtgttttttttttgttggttttcatctttttgttcttgctcatgagagcatccttagaaggctattgttgggaagtaaataagtttgcatcgccggaaatatgatcaaggtcattcggtatacctcata

SEQ ID NO: 165690 - DNA, 460 bp, Arabidopsis thaliana columbia
  unsure (1)..(460): unsure at all n locations
cggacgcgtgggttcggttccctgagagncctcggtagctcagtggtcggagtgtcggcgttcaatttctcgatgactaataaccctcaaattgtgttatatcccagtgaccagcttgtccttctcggtggaaagtgacatacgcttcatgcttcttttacatgttcttcataaacagacagaaaagaaaagagaagcttacttgatttgctcattaatgactgcctcgctagcgtcggcaaacctctggcgagcgagagaggcatgagatgtgattggaatggccagatcggctttcttcacctcttcgaaaggctggaacacgactccggtcatcggcatgttgtttgtgtccaccgtagccgctgcaacgaccactgctctgccgccgccaacttttctgtggaagccgagagaaaccgtctgtgaagcagagccgttagggagtagtggcttatga

SEQ ID NO: 165691 - DNA, 454 bp, Arabidopsis thaliana columbia
attcgttattcgcatcagtaatggaagattttgtaggagctgaagcagtgataaatctcaaatctggatattcgctaccaatttcttatcacccatgttttgggcctcacgaggatctacttcttcttgaagctgatgacaaactcgtctctgatatctttcatcaaagggtaacattgagaggacttcctgatgaagatgctgttctttgcaccaagtctaagacttatgctatcaaatttgttggtaattctaattccatgttccttattcctccttcaatttttcctggagatgcacaagtttctgataccaacaacaatgtatcggttctcaaaatcgctcctggtaatatggaacttgttgaggcttctcctaggcttgataaacttaagcagattctcttggcaaatccttttggtgctggggaagttgaagctatgaatggatgtga

SEQ ID NO: 165692 - DNA, 423 bp, Arabidopsis thaliana columbia
cttcttaccttagaatctctctttcttttctcttctgggctttactactctcaccggctgtgtcacagtcatcttcttgttcgtcacagacattttccggcgtcaaatcttaccctcactgtctcgacctccctgatcttaaagccattctccattactcttatgacgcatctaacacaactctcggcgttgttttctctgctccaccgtcaaaaccctggggttggatcgcttgggctattaaccctaaatccaccggcatggctggatctcaagccctcgttgcctctaaggaccctagcaccggcgttgcttccgtgacgacccttaacatcgtctcttacagctttctggttccctcgaaactgtcctttgacgtgtgggatgttaaggcggaggaagcggcttatgacggtggagctt

SEQ ID NO: 165693 - DNA, 459 bp, Arabidopsis thaliana columbia
agttattcagatcgccgaatttgcagtaaggatgtcgtattatatggtgcacgtttgctactaccgcaactatggaaagaccttcaagggaccacgtcgtccttacgagaaggagcgtcttgattctgaattgaagctggttggtgagtatggtctgcgtaacaagcgtgagctctggagagtgcagtactctcttagccgtatccgtaatgctgctagagatcttttgactcttgatgagaagagtccaagaaggatctttgaaggtgaggctttgctccgtaggatgaaccgttacgggcttcttgatgagagccagaacaagctcgattacgtcttggctttgactgttgagaactttcttgagcgtcgtcttcagactattgtgttcaagtctggtatggctaagtctatccatcactctcgtgtcctcatcaggcagaggcatatcaaggttgg

SEQ ID NO: 165694 - DNA, 359 bp, Arabidopsis thaliana columbia
  unsure (1)..(359): unsure at all n locations
ctcagaaagatcaatctagagagaccaaaaagatanctatagagatggcttctacctccgcgatgtcattggtcacaccacttaaccagacccgttcgtctcctttccttaagccattacctctgaaaccatccaaggctttggttgcatctggaggcagagcacagaggcttcaagttaaggccctcaagatggacaaggctttgaccggcatctccgcggctgctcttactgcttcgatggtgattccggagatagctgaagctgctggctctggtatctctccttccctcaagaatgtcttgctcagcattgcttcaggtggcctggttctcactggcatcattggtgtcgtcgct

SEQ ID NO: 165695 - DNA, 398 bp, Arabidopsis thaliana columbia
caaacatagacgagtatctatggttaatgggcttatctcattacaaacccgtaatcgagtattgtggcggaactgagattggaggcagttttatctcaggttctttgcttcaacctcagtcgctggctgcttttagcacagctgccatgggttgcaagcttttcattctcgatgaagatagcaatcctattcctccatatgctgcaggagtaggcgaattggctctttgtcctcacatgtttggagcttcaagcactcttctgaacggtaatcacttcaaagtttacttccaaggaatgcccaccttccaaggacagatcttacgaagacatgttgatttatttgaacggacttcaaaaggatactaccgtgctcatggacgtgctgattacacaatg

SEQ ID NO: 165696 - DNA, 461 bp, Arabidopsis thaliana columbia
ctctcatattctaagtttgctatatatgtaactttcttccttgtagactttcatttgcagcaaaaatagtttctcatatggagaggcaaatcataaacaggaagaaacgagtgttttctcttgaaccaaacaagaaccctagtgcagttttcacgagaaaatacacaagccacttggttcctgcactcaagaagctcaacatgaacaagaactcttcaaaacaaaccgtgaagcatgaagtagatatggctttggctttgtctgctcaagaatttgcatggagccgtttcttgctgcagaagctatcgtcctcatcgaatccaaccactaccactagttcttcttccgatggaattcggattcttgaaagacccgataaagaaggcggaaacgaagaaggagggattagggagagactgagggaaatgaagaagcttttgccaggtggggaagagatgaat

SEQ ID NO: 165697 - DNA, 404 bp, Arabidopsis thaliana columbia
cagcttagtctctctgatctctctacctcccttactttctaaaactcagcaacaatggccgttaccttttcagatctacacacagaggagggtgtcaaatccgtggaggagcacctcgccggaaaaacctacatctccggagatcaattgtctgtggatgatgtcaaggtttacgctgccgttccagtgaaacccagcgatgccttccccaatgctagcaagtggtacgagtccgtggcttcccaacttgctaaaagtttccctggaaaggccgttggagtacaattcggtggctctgctgctgctgctccagctgttgaagctgaggcacctgcagctgcagctgatgatgatgatgacatggatctctttggtgacgagaccgaagaagaaaagaaagctgc

SEQ ID NO: 165698 - DNA, 339 bp, Arabidopsis thaliana columbia
caagtggtatggtcctgacaggagaattttcctgctctgatggtcttttggatagatcagagatcccagagtacttaaacggtgaagttgctggagattatggttatgacccatttggtcttggaaagaagcctgagaactttgctaaataccaagcttttgaattgatccatgcgagatgggctatgttaggagcagctggtttcatcattcctgaagctttaaacaaatatggcgctaactgtggccctgaagctgtctggtttaagactggtgctttgcttcttgatggaaacacattggactactttggcaagaacatccctattaaccttgttc

SEQ ID NO: 165699 - DNA, 357 bp, Arabidopsis thaliana columbia
gtgctaagagaatcagagtccatattcgtacctaaggtcgtgatgttttggatggatctagagtttgattagaccttaaagggaccacctccctcttacgagtaggagcgtattgattctgaattgaaactggttggtgagtatggtctgcgtaacaagcgtgagctctggagagtgcagtactctcttagccgtatccgtaatgctgctagagatcttttgactcttgatgagaagagtccaagaaggatctttgaaggtgaggcttagctacgaaggatgaaccgctacagtcttcttgttttgagccataacaagctcgattacctcttggcttatgactgttgagaactttct

SEQ ID NO: 165700 - DNA, 232 bp, Arabidopsis thaliana columbia
  unsure (1)..(232): unsure at all n locations
ccaactgcaaaaccgtgaggtgatgagctagcaactgngagatgatgctactaccggaagtttcgaatccttattatataatggatgagattaatattaaataagatgttcgaatgtttgtttttagagtttttaatttcttgtctttttctattgtggtgctcttgttatatgggtttgcctgtactatgttcgcacgcatcaacgttttatgaaatttcagagtacttga

SEQ ID NO: 165701 - DNA, 439 bp, Arabidopsis thaliana columbia
agaagagaaacaacaagaagtagtaatgtgttttctctatgctctcctccgccgctgtggttacatccccggctcaggccaccatggtcgctccattcaccggcttgaagtcatccgctgcattcccggtcacccgcaagaccaacaaggacatcacttccatcgcaagcaacgggggaagagttagctgcatgaaggtgtggccaccaattggaaagaagaagtttgagactctatcttacctccctgaccttagtgacgtcgaattggctaaggaagttgactaccttctccgcaacaagtggattccttgtgttgaattcgagttagagcacggatttgtgtaccgtgagcacggaaacactcccggatactacgatggacggtactggacaatgtggaagcttccattgttcggatgcaccgactccgctcaagt

SEQ ID NO: 165702 - DNA, 426 bp, Arabidopsis thaliana columbia
atggaatctgaaatcgcctccgagtttcttcctttctgccggatttacaaagacggtcgtgtagaacgactcatcggcaccgataccatcccggcctctctagatccaacatacgacgtcgtttcaaaagacgttatatactcaccggagaataacctctccgttcgtctcttcctccctcacaaatcaacaaaactcaccgccggtaacaagctccctctacttatctacatccacggcggagcttggatcatcgagtcacctttctccccactctaccacaattacctcactgaagtagtcaaatccgctaactgccctgctgtctctgttcagtatcgccgtgcaccggaagatcctgttccggcggcttatgaagatgtatggtccgcggattagtggatttttgctcattctaatggatct

SEQ ID NO: 165703 - DNA, 378 bp, Arabidopsis thaliana columbia
gtcagtagccaataatgataagaatcaccggctgttcacatgtggattgattacctcacattcatatttattacataaactcatctctctgtttttctttcttagaatcattcatatttcagacacaaaggcagagaaacaaattcttgtaacaatggcaggcagagagattctccataagatgaaggttggattatgcggatctgacacaggcagaggtaaaaccaaggtgtggaagaacatcgcacacggttatgactttgtgaaaggcaaagcgggccatccgatggaggactatgttgtgtctgagttcaagaaagtagacggccatgatttgggtttggttgctatctttgatgggcacttagggcatgatgt

SEQ ID NO: 165704 - DNA, 460 bp, Arabidopsis thaliana columbia
gaaagctgcatatgcattgagtgagggtcttgttttgatagcttgtattggggaaaagctagaagagagggaagcaggcaagacgtttgatgtttgcttcgcgcaactgaaggcgtttgctgatgctgtgcctagctgggacaatatagttgttgcatacgagcctgtatgggcaattggaactggtaaagttgcatctcctcagcaagcacaagaagtccatgtagctgtccgcggttggctaaagaagaatgtctctgaggaagttgcttccaaaacgagaatcatatatggaggttctgtcaatggaggcaacagtgcagagcttgccaaagaagaagacattgatggatttcttgttggtggtgcctccttgaagggtcctgagtttgcaaccattgtgaactcagtcacgtcgaagaaagttgctgcttgattgagaactatcagtaacggaaat

SEQ ID NO: 165705 - DNA, 459 bp, Arabidopsis thaliana columbia
gagagagagaaagaaatggcgacatcgggaacgtacgtgacggaggttccgttgaaaggatcggcggagaaacactacaagagctggaagagcgagaaccatgtcttcgctgacgccattggccaccacatccaaaatgtcgttgttcacgaaggcgaacatgactctcacgggtctatcaggagttgggactacacatatgatggaaagaaggagatgttcaaagagaagagagagatagatgatgagaataaaacattgacgaaaagaggactggatggtcacgtgatggagcatctcaaagtatttgatatcatctacgaatttattcccaaatctgaggatagctgcgtctgcaaaatcactatgatatgggagaagcgcaacgatgactttcccgaaccaagcggctacatgaaattcgtcaagcaaatggttgttgacattgaaggccacgtc

SEQ ID NO: 165706 - DNA, 457 bp, Arabidopsis thaliana columbia
catctttcaatctctcttgattccaatccattcttcttcaagtgccgggttctcgggtcggatcttctaagtctagctagggataatggctactgtcactactcatgcctcggcctcgattttccgaccttgtacttcaaagccaagattcctcaccggttcttccggtaggttgaaccgcgacttgtcgtttacatcgatcggttcatcggccaaaacgtcgtcgttcaaggttgaagctaagaaaggagaatggttgcccggtttggcatcgcctgattatctcaccggcagtcttgccggtgacaatgggtttgacccgttgggtctagcagaggatccagagaacttgaaatgggtcgtccaggcagagctggtcaacggacgatgggctatgctcggtgtcgcttggatgcttttgcccgaaggtttcaccaagatcggaatcataaatggt

SEQ ID NO: 165707 - DNA, 456 bp, Arabidopsis thaliana columbia
atcaaatcctcctcctctgcttcaccaccaaattgcatattcttctctcgtcttctccggttaatcaaaatctctccgtgtgaatcgtttgtgaatggtggaaactaatccgatcggtggtaagtttacgctctccctttccatcaaaagggcgagcttttctcttcctctctcgacatcctctgttttcgctttcggatcttgcaaagaaggctggtactttcgctgccttggcctcgacccgtgaacgattcgcccctaaaattcacaacccggaaccctaatttcctaaaaagtggttctttttttattgattctgttacttgtgagatttgctctgttttttgttctctcgatttcgaagatgttgctctacaacaagcagaagaagaaccaaaacgctaaagggaataggattctcattagcgttacggttttgggtagtgccggtccgat

SEQ ID NO: 165708 - DNA, 461 bp, Arabidopsis thaliana columbia
aaaaaaaacacaaaaaagtttcaatggccgcctttcattggctctctcctcccctgctttcgccggaaaggctgtgaacctttcccctgcggcatcagaagtccttggaagcggccgtgtgacaatgaggaagactgttgccaagccaaagggtccatcaggcagcccatggtacggatccgaccgagtcaagtacttgggtccattctctggcgagtcacccagctaccttaccggagagttccctggagactacggatgggacacagctggtctatccgctgaccccgagacattcgcaaggaaccgtgagctagaagttatccacagcaggtgggccatgctcggagccctaggctgcgtcttccctgagcttttggccaggaacggagtcaaagttggagaggcaagttggttcaaggctggttcacagatctttagcgatggagggctcgattact

SEQ ID NO: 165709 - DNA, 412 bp, Arabidopsis thaliana columbia
aaaaaatatggaaaagccggctatcggaatcgttctcgatgaccatcgcattacaaatgcgatgctctaacctctgagctaagcgggctcaaataaaatagcgcatgcatacaaattcactaaactactagatcgtatcaattaactattctattaatatttttccttatctagttagaattaatgatattctatatattctagaacagaatatagctcacataaatagtgactatcattcatcattaaataaataaaacataaccttaattctatatatatatctatatagtcatagaatagtatagaattattagaatttcaaatttacgaagtagacttataatttttttccattgcacattgtagaattctaagtttcaataataataataataaaattcttttaatg

SEQ ID NO: 165710 - DNA, 455 bp, Arabidopsis thaliana columbia
cgttttatcttccaatcaaagcagctcatttcttgctcgcaaagatgatgcacatgaccttctactggggaatcaaagccacaattctcttcgatttctggaaaactgactcatggcttagttacatcctcactttaatcgcttgcttcgtcttctccgctttctatcaatacctcgagaatcgccgcatccaattcaaatccctttcttcctcccgtcgtgctcctccaccgcctcgctcttcctccggcgtctccgcgcctcttatccctaaatccggtaccagatccgccgctaaagctgcttcggttcttcttttcggcgtcaacgcagcgatcggttacttgctgatgcttgcagctatgtctttcaacggaggtgttttcatcgcgattgtcgtcggattaaccgccggatacgctgtttttagatctgatgacggcggtgctgatacc

SEQ ID NO: 165711 - DNA, 455 bp, Arabidopsis thaliana columbia
ggggatcataagccctagccctacggctctttatttcaccagtaatgtcggtgggaggcgactgaaagcagtgagctgtgcgggaaagagtgtctccgggaacgttatccgccggagaagcttgagaattgctgcggagctgaaattcgtgaatgcagaagaagcaaaacagttaatagctgaagaaggttactcggtggtggatgtaagagacaagactcaattcgagagagctcatataaaatcttgctcccatattcctctcttcatttacaacgaagacaacgatattggcacgatcataaagaggacagtgcacaacaatttctcagggctcttctttggtttacctttcacgaaagtgaatccggaatttcttaaatctgttagaaacgagttttctcaagacagcaaacttttacttgtttgccaagaaggtctcagatctgcagctg

SEQ ID NO: 165712 - DNA, 454 bp, Arabidopsis thaliana columbia
aaaaaaaaaacacaaaaagtttcaatggccgccttcacattggctctctcctcccctgccttcgccggaaaggctgtgaacctttcccccgcggcatctgaagtcctcggaagcggccgtgtgacaatgaggaagactgttgccaagccaaagggtccatcaggcagcccatggtacggatccgaccgagtcaagtacttgggtccattctctggcgagtcaccgagctaccttaccggagagttccccggagactacggatgggacaccgctggactttcagctgatcccgagacattcgcaaggaaccgtgagctagaagttatccacagcaggtgggctatgctcggagccctaggctgcgtcttccctgagcttttggctaggaacggagtcaagttcggagaggcggtttggttcaaggccggttcacagatctttagcgatggaggac

SEQ ID NO: 165713 - DNA, 415 bp, Arabidopsis thaliana columbia
cgcgtgctcgcctctggtgtctctgagactcataatacgacggtcgagattcggtcatcagcccgtcacgcgtgagccttaatcctagtctcagccagagaggatctaaaccttttccgttgatccaggcgaggaagacaaggaaaagcaggaacgatgaccctcatatctcatcagctcgacctgacgacgccactggttctcttactgaatgcattcttctgaaagagacgaggagtgatgaagaaggagatgttcttgccgcagttgctgctgcttgagaagacgagacacacaagcttgcagagcctgatgtatcaactgactcgtgtgccgaaacgaggagaatctgtcccgtgtattacatgaggataaatatgaataccctggatgtctttacatctatacctctatc

SEQ ID NO: 165714 - DNA, 375 bp, Arabidopsis thaliana columbia
aatgtcgatgacaaagttgtttattaaatattcactaatgacattacgacgagtggaccaaaagattagacgaagcgtataatagatagatcataaattcttatgattaggaaaaggattttgaacaacattctaaatcaccaaatacatagaaactaagatccaaaagcttcaaatttctacattcaccagagctcaaacacaaactagcaacgaaaactctagcagattaagctttctttggagacttgactggtgatttggtagccttttcttcagctggtttagtggcagacttcttaggcaatagaacagagttgatgttaggcaaaacaccaccgtgagcgattgtgacaccacttcaaagttttccca

SEQ ID NO: 165715 - DNA, 460 bp, Arabidopsis thaliana columbia
ccacgtcgtgaaaatccgatctacgtctctgtttctttccaatctctctgcgccacagaattgtgcgatttacgaaaatctctgaaacctccgatcgttaacggcgaccgccgattttcccggtaaaaatgaacgacggagatgtatcgaggcagatccagcagatggtgagatttatccgccaagaagcggaagagaaagcaaacgagatctcggtttctgctgaagaagaattcaacattgagaaactccagcttgttgaggcggagaagaagaagatcaggcaagattatgagaagaaggagaagcaagctgatgttcgcaagaagattgattactctatgcagctaaatgcatcaaggatcaaagttcttcaagcgcaagacgatattgtcaatgccatgaaagaccaagcagctaaggatcttcctgacgttagtcgcgatgagtatgcctacaa

SEQ ID NO: 165716 - DNA, 459 bp, Arabidopsis thaliana columbia
cacaacctcgttgaatgggcgagaccgcatcttctgtacaaaagaagattctaccggttacttgatccgaggctggagggtcatttctcagttaaaggagcacaaaaagtgactcagcttgcagcacaatgccttagccgtgactccaaaataagacccaaaatgagtgaagtggtggaagtacttaagcctctcccacacctcaaggacatggctagcgcttcttactacttccagacaatgcaagctgaacgtttgaaagctggttctggttctggttctggtcgtggattcgggtcaagaaacgggcaaccagtgtttcggacattgtctagtcctcatggtcaagctggttcgtcgccttatcgtcatcagattccgtctcctaagcctaaaagtgcaactacttagattggctcgcatgtgtggacgcaagcaaacgtcttttttaaccgatgt

SEQ ID NO: 165717 - DNA, 444 bp, Arabidopsis thaliana columbia
caaaagaggaagagaaacaccaggaagaagtattggcttcctctatgttctcctccaccgctgtggttacctccccggctcaagccaccatggtcgctccattcaccggcttgaagtcatccgcttctttcccggtcacccgcaaggccaacaacgacattacttccatcacaagcaacggaggaagagttagctgcatgaaggtgtggccaccaatcggaaaagagaagtttgagactctatcttacctccctgaccttagtgacgttgaattggctaaagaagttgactaccttctccgcaacaagtggattccttgtgttgaattcgagttggagcacggatttgtgtaccgtgagcacggaaacactcccggatactatgatggacgatactggacaatgtggaagcttccattgttcggatgcaccgactccgctcaaa

SEQ ID NO: 165718 - DNA, 142 bp, Arabidopsis thaliana columbia
ggaagagactaggtcagcagcccgtcacgcgagtgccttaatcctagcctcagccagagaggatctaaacctcttccgttggtcgaggcggcgaaggagaagaaaggcaagaacgaggacagtcataactgttcaggtcgac

SEQ ID NO: 165719 - DNA, 435 bp, Arabidopsis thaliana columbia
cagtaacaagaaggtctctggcgaggttccatgtttcggcattgaacaagagtacactttacttcagcaaaacgtcaaatggcctttaggttggcctgttggagcgttccctggtcctcagggtccttactactgtggagttggagctgacaagatttgggggcgtgacatttcagatgctcattacaaagcttgtttatatgctggaattaacattagtggtactaatggtgaagttatgcctggacagtgggagttccaagttggcccgagcgtaggaattgatgcaggtgatcatgtttggtgtgctagataccttcttgagagaatcacagaacaagctggtgttgtcctaacacttgatcccaaaccgatagagggtgactggaacggtgctggttgccacaccaattacagtaccaagagcatgagaga

SEQ ID NO: 165720 - DNA, 453 bp, Arabidopsis thaliana columbia
catgcgcaagccctagctatctcaaagaatctgtagacttgatcagtaggttgcctgatgatattctccaactaattctctcctatcttccaaccagattggcgatcaaaacttccgttttatccaggcgatggaggcatgtatggtctgatacatggtccctctccttccatagggacagaccggatgctccttgtattaacagaatcctagatcgctacagggctcccaagatgatgagttttcgtatctgttcttgttgcagggcagcctgtatcagcagacccgacacgcatgctgacatcgacagttggatcaacttcgccatgtcccgaaacgtggagaatctgtccctgtatctcgatgaggataaatatgatatccctgaattcctttacatcaattcctctctcaagcaactctaccctgatttcggctgcaaaaaggatttta

SEQ ID NO: 165721 - DNA, 408 bp, Arabidopsis thaliana columbia
gatcataagaagaactgtctatgtgtctgttattgaccaacaggtcactgaggagcagcttgctggtttgtttatcggctttggacaggttgttgactgtcgtatatgtggtgatcccaactcagtacttaggtttgctttcatcgagttcactgatgaagtgggtgcaaggactgctctgaatttgtctgggacgatgcttggattctatcctgtgaaggttatgccgtctaagacagctattgcaccggttaacccaaccttcttgccaaggactgaagatgagcgtgagatgtgtgcaagaactatctactgcactaacattgacaagaagctcactcaaaccgacattaaactcttctttgagtctgtgtgtggcgaggtgtaccggctgaggcttctgggcga

SEQ ID NO: 165722 - DNA, 375 bp, Arabidopsis thaliana columbia
gtccaagccccaatggtgagccagtggcatgccttggcaaggtgtttttgaagtatgccgatacagatggctcgactagggcaagattcgggatgaatggtaggaaatttggaggaaatgaagtcgttgcagtgtattaccctgaagacaagtttgaacagggtgattatggagcctgatcacttctttgtttgctttctattacttaaaagttaagtactttgcttcagtttcaagacccttttgcgtgattgtaagagtatgagattatcgacacgttgcttattataacgtttttatctcaaaataaataattatatataattaaaataaaattaattttaaattaatttttttaatttattttttatttat

SEQ ID NO: 165723 - DNA, 450 bp, Arabidopsis thaliana columbia
gtctacatttttagggaagatacggtgatcaatctcatatcttcttcgattagactagctttggagaatccgttgaactatgctcggaactatctcggagatattcttgatcgaagtgttgaacgagtcatttatcttgactcggatgttataactgtggatgatatcacaaagctttggaacacggttttgaccgggtcacgagtcatcggagctccggagtattgtcacgcgaacttcactcagtatttcacttccgggttctggtcagacccggctttaccgggtctaatctcgggtcaaaagccttgctatttcaacacaggagtgatggtgatggatcttgttagatggaaagaagggaattacagagagaagttagagcaatggatgcaattgcagaagaagatgagaatctacgatcttggatcattaccaccgtttcttttg

SEQ ID NO: 165724 - DNA, 419 bp, Arabidopsis thaliana columbia
aaagaagaagagaaacaacaagaagaagtaatggctccctctatgttctcctccaccgctgtggttacctccccggctcaagccaccatggtcgctccattcaccggcttgaagtcatccgcttctttcccggtcacccgcaaggccaacaacgacattacttccatcacaagcaacggaggaagagttagctgcatgaaggtgtggccaccaatcggaaagaagaagtttgagactctatcttacctccctgaccttagtgacgttgaattggctaaggaagttgactaccttctccgcaacaagtggattccttgtgttgaattcgagttggagcacggatttgtgtaccgtgagcacgtaaacactcccggttactatgatggacatatcttgacattgtggaagcttccatttgt

SEQ ID NO: 165725 - DNA, 464 bp, Arabidopsis thaliana columbia
catcttcaagccatctccgatcatcatcagacattgtcagcagctatggcaacagcaaccaagtgcatgtctctaaacccatctcctcctaaactccaaaaccaaaccaaatccaaaccattcatctccctaccaaccccaccaaaaccaaacgtctctctcgccgtcacaagcaccgccctagccggagccgtcttctcttccctcagctactctgagccagctttagccatccaacagatcgctcagctcgctgcagcaaacgccagtagcgacaaccgtggcttagctcttctccttcccatcgtcccagccattgcatgggtcctttacaacatcctccagccagctattaaccaggtcaacaagatgcgtgagagtaaaggtattcgtggtggtctaggtattggggggggcctgcagcgtcagggcttttgactccacctccggaggcttatgctgcg

SEQ ID NO: 165726 - DNA, 250 bp, Arabidopsis thaliana columbia
  unsure (1)..(250): unsure at all n locations
gagaaacaacaagaagaagtaatggcttcctccatgnncttctccaccgctgtggttacctccgcggctcaagccaccatggtcgctccattcaccggcttgaagtcatccgcttctttcccggacacccgcaaggccaacaacgacattacttccatcacaagcaacggaggaagagtcagcttcatgaaggtgtggctcccataccgtaagaaaaaatttgatgactcttcctacccccttgactctt

SEQ ID NO: 165727 - DNA, 440 bp, Arabidopsis thaliana columbia
gccaaggatggagggtttcctaacggatcagcatagagagatgatgaaagttgcaactcagactgcagatgatcttccaccctcacaaaaacctcactcggttttacttgagcatctgcctaaaccatctggtggtgggaaagcttctggtgcgtcaaatgctgtgaagcacagaaggtctcatgcgggaaggtctattcgctctaagaaggatggaggtggtggaaaaggaaattggggaaaacttattgacactgatggagactatcacattgacccgaatgatcctaattatgacagtggagaggaaccattcgagcttgttggtgcaactctgtcagacccattagatgattacaagaaagctgcagcttccatcattaacgaatacttcagcaccggtgatgttggtgtggcagcagctggacctattggacttg

SEQ ID NO: 165728 - DNA, 267 bp, Arabidopsis thaliana columbia
gtgggtccaggtcaattgaccgatggaaccctagcattggacacagagacgttgcaatgggagaggctggataagtttggtggagaggaagagactccgagtagcagaggatggaccgcgtccacgactgctaccattgatggtaagaaaggacttgtgatgcatggtggtaaagctccaaccaatgaccggtttgatgatctcttcttttacgggattgactctgcctaattaaggcagatttggtgatcatgaacgtttgtgaat

SEQ ID NO: 165729 - DNA, 459 bp, Arabidopsis thaliana columbia
aaaagagttccgatggtaagcttttcgttgatatctttaaggaaggaggagttcttcccggtatcaaggttgacaagggtaccgttgagctagctggaaccgacggtgagaccaccactcaaggtcttgacggtctcggtgacagatgcaagaagtactacgaagctggtgctcgtttcgccaagtggcgtgcagtcctcaagatcggagagaacgagccatctgagcattccattcatgagaacgcttacggattagctagatacgctgttatctgccaagagaacggtcttgtaccaattgtcgagcctgagatcctagtcgatggatcccatgacatccagaagtgtgctgccgtgactgagcgtgtccttgcagcttgctacaaggctcttagcgaccaccacgtcttgctcgagggtacactcttgaagcctaacatggttactcccggatctg

SEQ ID NO: 165730 - DNA, 279 bp, Arabidopsis thaliana columbia
ctccaatttcgctcacttgtgtcagattctacttcgatttgtggtccaagtaagttcaccggaaaaaacagaagagtatcggttaccgtttccgccgccgcaacaactgaacctctcaccgtcctcgttaccggtgccggtggaagaacaggacaaattgtgtataagaaattgaaggagaggtcggagcagttcgtggcaaggggtttagtgaggacaaaggagagtaaggagaagatcaatggagaggatgaagtattaattggagatattagagat

SEQ ID NO: 165731 - DNA, 441 bp, Arabidopsis thaliana columbia
  unsure (1)..(441): unsure at all n locations
tgacatgtacatgcgtgttaagggtaatgtgttcaagaacaagcgtgtcttgatggagagtatccacaagtcaaaggctgagaaggctagggagaagactctgtctgatcagtttgaggctaagagggcgaagaacaaggctagccgagaaaggaagcatgctaggagagaggagcgtttagctaagggtcccggtggagatgttgcgcctgtagctgctccagcacctgctgctacacctgctccaactgcagctgtaccgaagaagaagtctaagaagtgaagaggatatatagtgtgaagctatatcgatcatcagttcacggattagactctgaagaaggttttgaatgttttatcgaatgcgtttgtggaataaccttttattttcgcaaagaacataaccttatgtcagntaattctttatggctttcaaaattt

SEQ ID NO: 165732 - DNA, 386 bp, Arabidopsis thaliana columbia
cgatcttgacgctggtgcgggtcgtatgtttgttactactcagtacactgtcaacaaccagatggttaacgcaacactcatgaacattgctgataacccaaccaacgtccagctcccaggaatgtacaacaaggaagagaacgcacgtgtccccatcatttgcactggtaacgatttctccaccctatacgctcctctcatccgtgatggacgtatggagaagttctactgggccccgacccgtgaagaccgtatcggtgtctgcaagggtatcttcagaactgacaagatcaaggacgaagacattgtcacacttgttgatcagttccctggtcaatctatcgatttcttcggtgctttgagggcgagagtgtacgatgatgaag

SEQ ID NO: 165733 - DNA, 448 bp, Arabidopsis thaliana columbia
gcaaccacccaaaaacaatattacataacctatttctctacttcttcatacatttatagcaaatcctcttttgctttaaacccaccaaataactcagagcttttttgcattttttcccattctctattttgttttgtacttttggtctcactttaaaagatcataagttgaaagatttctgcagagaacaatatgttggaaggtcttgtctctcaagaaagcttgtccttaaactctatggacatgtctgtacttgaaaggcttaaatgggtacaacagcaacaacagcaactgcaacaagttgtgtcccatagcagtaataattcacctgaacttcttcagatacttcagttccatggaagcaacaatgatgagttgttggagagtagtttcagccaatttcaaatgcttggatctggtttggaccaaactataacatgggtttggt

SEQ ID NO: 165734 - DNA, 420 bp, Arabidopsis thaliana columbia
cagcttacaagaagaggaagctaagtctaccagtcatcatgactcctttgattgttattatcacatgaaagattctgaaatcaaagctccaagtcaaaagttgaggtttttgaataaagcttgtttaataagtaaccgtgaggaggagattgggtcagatgggtttgctttgaatccatggaggctatgtacaacagacaaagttgaggagcttaaggcattgatcaaagtcatacccatatggtccacaggtataatgatgtccataaacactagccaaagttcgtttcagttactgcaagcgtcttccatggacaggcgtctgtaccgtcatggttttaagctttaagctccagttggatcatttctttatggtcactattatagtttttagcccttatgtttcattttatttgacct

SEQ ID NO: 165735 - DNA, 396 bp, Arabidopsis thaliana columbia
caaaaaaaagaaaacacaaaaacaaagattattttgttttcctcaaccatggctttgtcctcccctgccttcgccggaaaggctgtgaagcctgccgcatcagatgtcctcggaagcggccgtgtgaccatgaggaagactgtcgccaagccaaagggtccatcaggcagcccatggtacggatctgaccgagtcaagtacttgggtccattctccggcgagcccccgagctaccttaccggtgagttccccggtgactacggatgggacaccgctggtctatccgccgacccagagaccttcgccaggaaccgggagctagaagttatccacagcagatgggccatgctcggagccctaggctgcgttttccctggactattggcttggaacgga

SEQ ID NO: 165736 - DNA, 325 bp, Arabidopsis thaliana columbia
  unsure (1)..(325): unsure at all n locations
tgcgtctctctcccgcaaccttcgatttgcgtgcantcgcatccatcggagagagaaaacaatcaataagcgaccatgttggtgtaccaagatcttctcaccggtgatgagcttctgtctgactctttcccttacaaggagattgagaatggaatcctctgggaagtagaaggaaagtgggttactgcgggagctgcagatgttaacaatggtgccaatccatctgctgaagaatgtggtgaggattaacgacactgtttctctcttcattctttctcttacattcacaaccactctttgtttcgaacatcatcttactaatttt

SEQ ID NO: 165737 - DNA, 454 bp, Arabidopsis thaliana columbia
aaagaaagaaaaagaaaaccagagatggcgttgtctacagcatctacggtatttgttctaccggccaatgtcacctcggtcgccggcgcttcgtcgtccaggagctccgtgtctttcttgccgatgagaaacgccggttctaggctcgtagtcagggcagccgaagatcctgctccggcttcctcttcttcaaaagattctccggcagctgccgctgctccggatggagctactgccaccaaacccaagccaccaccgattggtcctaagagagggtctaaggtcaagattctaaggagagaatcctattggttcaagaacgttggatcagttgttgccgttgatcaggaccctaagactcgatacccggttgtggtccggttcgcaaaagtcaattacgccaacatatcgaccaacaactatgcattggatgaggtcgaagaaagtgcagctt

SEQ ID NO: 165738 - DNA, 449 bp, Arabidopsis thaliana columbia
caaaaaactcttgaatttttcaagaacattagtttaagacatctttaatggcggccatgaactcgagtgttctcacttgcagctacgcaattgctggctctggctcggtagagcttaaccagaaagttggtttggtgaattcatcagttgggtttggtcagaagaaacagatgattatgcctgtgatcaaagctcaacgcgttgttggtgatgatgttgatggatctaatggaagacgatcagccatggttttcttagcagctacactcttctccactgctgctgtttctgcttctgctaatgctggcgtcattgacgaatacctcgagaggagcaaaaccaacaaagaacttaatgataagaagagattggcaacaagtggagcaaactttgcgagagcattcactgttcaattcggaagctgcaagttccctgagaatttcactggc

SEQ ID NO: 165739 - DNA, 462 bp, Arabidopsis thaliana columbia
aattgcctgagaatcacaatgaagagatggctgttgtagaacaacccaatcaattggctgtggaaatacacgaagaagagaaggagcaggagcaggacatgcatattgagtatggaagagaccaagctgatgagttatcaatcaatagcgaagcagtcaatgacccatcaccagcagctattcatttgggagaagcatcatcagattatgcacaaagttctgttcgaggtgtggagaatcttcattgtggatggctaattgatgaggaggagacggatcctgaggaggaaacggatccagaggagaaggagaccgagccagaggatccaaaggagaaggagacggagccagaggaggatagtgatggggatgatgatgagatcattcagcttactccagaacctctttgtgaagaacttcaagagcttctcagggaagtacgtggacagaagaggaggaaga

SEQ ID NO: 165740 - DNA, 397 bp, Arabidopsis thaliana columbia
caggagcttccgccttattcagagtgtataggtggatccaaaagaaaagaggaaaaaatggactatatgtatggaccagggagacaccatctgtttgtaccaggaccagtgaacataccggaaccggtaatccgggcgatgaaccggaacaacgaggattaccggtcaccagccattccggcgcttacgaaaacattgttggaggatgttaagaagatattcaagaccacatcagggacaccttttctgtttcccacgaccgggactggtgcttgggagagtgccttgaccaacacgttatctcctggagacaggattgtttcgtttctgattggacaatttagcttgctctggattgaccagcagaagaagcttaatttcaatgttgatgtggttg

SEQ ID NO: 165741 - DNA, 402 bp, Arabidopsis thaliana columbia
gtctcctttttgtttccttgatgtgttttctcttctaatctccggtgaaacaaagaacaaaggattcataagacacaaagcagagaaggagagagagatacgaggcttttcttcatctttatggcttctatgaccgagaaggaagctatggtggatccttttctggtcgaggctcttcaaaatcctcgtcatcgtctcaccattttgcgaatggagcttgatatacagaagttctttcaaaaccctgagcagcttcagttcgaattcccgccttttccaacatcgtacctgcgtcttgctgcacatcgagttgctcagcattatggactagtaaccatggctttggacaatggtactggtgcaggagatggatccgataacagaatcctcgtgacgaagaca

SEQ ID NO: 165742 - DNA, 288 bp, Arabidopsis thaliana columbia
cgacaatcatgggtcactccaacgtctggaattctcatcctaagaaatacggtcctggttctcgcttatggtactatctttttctcatctctcggctttcttttcttttaaaataaaaattctgtttagtttagagaaattgggattgcctaagaacttttatcatgtttatcattcgaaagattttcaacataggaagattttttatctgaacctgatccttattgattatgtgaaacttttgatgtgaaattttgcttagggatagttaagtggtgtggtttaggt

SEQ ID NO: 165743 - DNA, 233 bp, Arabidopsis thaliana columbia
tctctgtgtcatttttcctcttctcatgtcatttcttttcttcgtcttcgttgggcgattcggaggcgacgtgttccggtatagttccgttacggtaccggtacgataagatctcgataaccgactttggaggcgttggagatggtcgaacggtgaatactaaggcgtttagggcggcgatttatcggattcagcatctgaagaggagaggaggcacgctttggtatataaca

SEQ ID NO: 165744 - DNA, 462 bp, Arabidopsis thaliana columbia
ctccgatctaaccttcttacctctctgggaaagcttcttccaaggtcaccaagatctctacaacgtttacatccacgcagatccaacctcctccgtctctcctcttctcgattcttcatcaatcaacgctaagttcatcccggcgagaagaaccgcacgagcttctccgacgttaatctccgccgaacgacgattactagcaaacgcaatcctcgacgatcctaacaatctctatttcgctttaatctcacaacactgtatccctctccattccttctcttacatccacaaccacctcttctccgatcatcatcaacaaagcttcatcgagatcctctccgatgaaccgttccttctgaaacgatacaacgcaagaggagacgacgcgatgctttctgagatccagtaccaagaacttctgttggatctcagttcttcgtattagcgaaacgtcatgctcta

SEQ ID NO: 165745 - DNA, 430 bp, Arabidopsis thaliana columbia
gtggaacgctttccggatcaggaagattcctcatggtgaagaataaagactttaaggtttatggtgtggaacctacagaaagtgcggtaataagtggaggcaaaccgggtacacatttgatccaaggtattggggctggactcatcccagacaatttggatttcaacgttcttgatgaagtcatccaagtgacaagtgtggaagcaattgaaacagccaaacttcttgccctgaaagaaggattactggtgggaatatcttctggagctgctgcagccgctgcgataaaggtggcaaagcggccagaaaacgccggcaaactcaaagttgtgattttccctagcggtggggaacgttacctatcgacctcattgttcgaatcaatcagacatgaagcagagaatttgccaattcaatgaggcttttacac

SEQ ID NO: 165746 - DNA, 450 bp, Arabidopsis thaliana columbia
cgatcatattcatattacagggagaggaacattctcagagtatgtcgccaaagttgccccaaggtttcaagatggagttaaagcgtttgcctctggtagtcctattattggagaggttaccatttctcttggtcctttacttaccagttttattcaataagaattatttgactgaggacattttgtgatggttatcagacaagaggaacaggtttgattcttgggactgagtttgtagacaataaatctccgaacgaaccatttccaccagaatggggtgttggcgcattctttggagccgagtgccagaagcacgggatgttagtccgtgttgcaggtgatggcattttgatgtctccaccgctcattatctcacctgaagagattgatgagttgatttctatctatgggaaagcattgaaggcaacgggagagaaggtaaaagaactc

SEQ ID NO: 165747 - DNA, 318 bp, Arabidopsis thaliana columbia
cttgaaacgtactggttggaagaggaagatgaaactttaccacctggtgatccctctgcacaaggcttccagtttggaggaggtaatgatgcagccgtaccaccaggtggattcaacttccagtgaaggagctgaacatgacgatttgaagagtcgaaggagcttaaagagtttgggggcactggttaaaaagggtatgattagagagtctggtcttctgtgtaaaagtcagatggggtgccttacttagtctggcctggtccggtcagatccagtggttggtgggtttgagtcatggaataagcttgttggggggga

SEQ ID NO: 165748 - DNA, 312 bp, Arabidopsis thaliana columbia
cctgaatctgcccctgctcttgctctcaatgctcagatcgagaaaaccaaacgcaggttcgacaactacgggaagtacggattgttatgcgggtcagacggtttaccgcacttgatagtgaacggagaccagcggcattggggagagttcattactccagggattcttttcctctacattgctggatggatcgggtgggttggaagaagctacttaatagctattagtggtgagaagaaacccgcgatgaaagagatcatcatcgatgttcctttggctagtcggatcattttccgtggtttcatttgttcc

SEQ ID NO: 165749 - DNA, 460 bp, Arabidopsis thaliana columbia
aaaagagataacacacacaaaaaaaaatggcatctacctcactcctcaaggcttctccggtgttggacaaatccgaatgggtcaagggacaaagcgttctcttccgtcagccttcttccgcttctgtcgtcctccgcaaccgtgccaccttcctcaccgtccgtgccgcttcctcctacgccgatgagcttgttaagacagcgaaaactattgcgtctcccggacgtggaatcttggcgatggacgagtcaaacgcgacttgcgggaaacgtttggattcgatagggctagagaacactgaggcaaatcgtcaagctttccggactttgctggtctctgcaccgggactcggacagtacgtctccggcgcaattctatttgaggagactctgtaccagtctaccaccgaaggcaagaaatggtcgacgtcctcgtcgagcagaacattgtccctggtatc

SEQ ID NO: 165750 - DNA, 308 bp, Arabidopsis thaliana columbia
agaaactttaaaacgagagagagagaatgtaaatgcgacatcgggaacgtacgtgacggaggttccgttgaaaggatcggcggagaaacactacaagagctggaagagcgagaaccatgtcttcgctgacgccattggccaccacatccaaaatgtcgttgttcacgaaggcgaacatgactctcacgggtctatcaggagttgggactacacatatgatggaaagaaggagatgttcaaagagaagagagagatagatgatgagaataaatcattgactaaaagaggactggatggtcacgtgatgg

SEQ ID NO: 165751 - DNA, 317 bp, Arabidopsis thaliana columbia
gttgtgcaatcctcagcaggctttaggattagttagtgggactcaaagcacttacttctcagagtcaggaaccttctcgaagctgaagaagatctaaaatatggaagacagagatacaagtcttgaaaagccgagcactaaaagtgtaaaaatgaaacaaaggtggaaagaaactgctttctctatctcatgtctgttttaaggtttcttcggtcacttaagagacaaaaggcattgttttgatcactctttggaaacgttttataaattttatttttgtattagagccatacctaaagatccatcttcttattacc

SEQ ID NO: 165752 - DNA, 382 bp, Arabidopsis thaliana columbia
agcatcttgaagcttaaatctcagccgttcgatcatgccgatcagaaacatcgccattggccgtccagatgaagccacccgtcccgatgccttaaaggcggcgttggctgagttcatttcaactttgatctttgtcgtcgccggttcaggctctggcatggctttcaacaagctcactgaaaacggagccaccactccttctggtctcgtagctgctgcagtggctcatgcctttggactcttcgtcgctgtctcagttggtgccaacatctctggtggacacgttaaccctgccgtcactttcggtgctttcattggtggtaacatcactctcctccgtggtatcctctactggattgctcagcttctcggctccgtcgtc

SEQ ID NO: 165753 - DNA, 426 bp, Arabidopsis thaliana columbia
gagaacaacaaccaaacactcatttctccacattttgttagaaaaaaacagagcaagtatattagagatctcatggcgatggcggtctccggagctgtcctcagtgggcttggttcttcgttcctcaccggaggcaagagaggtgccaccgcattggcaagcggcgtatgcactggagctcagagagttggcaggaaaactcttattgtcgctgctgcggctgctcagcctaagaaatcttggatccctgccgctaaaggtggtggcaacttccttgaccctgaatggctcgatggctcgctaccaggagatttcgggttcgacccattgggtttggggaaagacccggcttttctgaaatggtacagagaggctgagctgatccatggccgatgggcgatggcagcggttcttgggatcttcgtc

SEQ ID NO: 165754 - DNA, 445 bp, Arabidopsis thaliana columbia
cgataaattaatttctgttccatatgttgaaattacattgaagttgatggaacgtttcggggttagtgtcgagcatagtgatagctgggatcgtttctttgtcaagggcgggcaaaaatacaagtctccgggtaatgcgtatgtagaaggtgatgcttctagtgctagttatttcttggctggtgctgccattaccggtgaaactgtcacagtcgaaggttgtggaactaccagcttgcagggagatgtaaaattcgccgaggtccttgagaaaatgggatgtaaagtgtcctggacagagaacagtgtgactgttacaggaccacctagagatgcttttggaatgagacacttgcgggctattgatgtttacatgaacaaaatgcctgatgttagcattacccttgccgtctgtgttctttttctgacggttcaaccaccatta

SEQ ID NO: 165755 - DNA, 456 bp, Arabidopsis thaliana columbia
ccaccactcattcataacagaaacccaccaaattattttaagagagacttttcactctggggagagagctcaagttctaatggcgaacttggtcttatcagaatgtggtatacgacctctccccagaatctacacaacacccagatccaatttcctctccaacaacaacaaattcagaccatcactttcttcttcttcttacaaaacatcatcatctcctctgtcttttggtctgaattcacgagatgggttcacgaggaattgggcgttgaatgtgagcacaccattaacgacaccaatatttgaggagtctccattggaggaagataataaacagagattcgatccaggtgcgcctcctccgttcaatttagctgatattagagcagctatacctaagcattgttgggttaagaatcccatgaagtctttgagttatgtcgtcagagacgtcgc

SEQ ID NO: 165756 - DNA, 425 bp, Arabidopsis thaliana columbia
  unsure (1)..(425): unsure at all n locations
ggggatcataagccctagccctacggctcttnatttttctcagtaatgtcggtgggaggcgactgaaagcagtgagctgggcgggaaagagtgtctccgggaacgttatccgccggagaagcttgagaattgctgcggagctgaaattcgtgaatgcagaagaagcaaaacagttaatagctgaagaaggttactcggtggtggatgtaagagacaagactcaattcgagagagctcatataaaatcttgctcccatattcctctcttcatttacaacgaagacaacgatattggcacgatcataaagaggacagtgcacaacaatttctcagggctcttctttggtttacctttcacgaaagtgaatccggaatttcttaaatctgttagaaacggagtttctcaagacagcaaacttttactt

SEQ ID NO: 165757 - DNA, 360 bp, Arabidopsis thaliana columbia
gccaaagacaagggctttgttcaggtatactctttgtctccaaatccaggacctgagttcatcgcaaagtacaagaactacttggcacaatttggctatgacccggaaaaaataaaggatacaccacaggactgtgaagtgactgatgctgagctagcagccatgatgtccatgccaggtatggagcaaacactgaccaaccagtttccagatcttggattaagaaagtcagtccagtttgatcccttcacaagtgtgtttgaaaccttgaagaaacttgtaccgctctatttcaaatagagcaagcttctttgctcaaattcttatgtagactataatcactgtccatatatacatatc

SEQ ID NO: 165758 - DNA, 393 bp, Arabidopsis thaliana columbia
cttgacatatgtttgtgtgttatcctctttcaccaaaaccaccgatgcatacctgattaatcacattgggttcattgagcatatcaaattattactatagtggggcctaacccgcaactgaaaatgtgtggatgattgaacgaataaaaaagagtgggaaaaccggtaaagtgttttctttcagctcatctcatatccaccagaaattaaaaatcaaaagtttaaaccaaagtcatcttgatttggcttgtcgtaggcggctttacttccttctccctctcaatccacatctcctgagggcttctacatgtgaatgggcttgtcataggtagccatggcagcttccttgatagccttactcatggtgggatgggcgtgacagactcgagcaat

SEQ ID NO: 165759 - DNA, 328 bp, Arabidopsis thaliana columbia
ctagttctagttcaaactctttttttttttttttgtttgatccaaattttaacaaaattatggatcgcaatttcctcctaacagttacattgatctgcattgtcgtcgccggtgtcggtggccaatctcctatctcttctccgaccaaatctcccaccactccttctgctccaactacttcccctactaaatcccccgccgttacttcttccactacggctccggcgaaaactccaactgcttcggcttcttcaccggttgagtcaccaaaatctccggctcctgttagcgagtcgtctccaccaccgacacctgttccagagagctc

SEQ ID NO: 165760 - DNA, 411 bp, Arabidopsis thaliana columbia
caaagcattctaaaagaagtttcaaagaagaagtgaaaatggaaaccactgcttttaacacaacatcacgaattggaaactggtcatcggctatttctccacctctacaaacatgtggatctttcaagtgccaattaccaacacgaagaggtgttattgtagctgatcttcgaaactcaaacttccgatggaggaaagcaacgacaacaagcagaggaaatgttgcagcagaggcagttaaaattcctacgtcagtaccagtaagagtggcgcgtgagctagctcaagcaggataccgctatctcgacgtgaggacaccagacgaattcagcatcggacatccgactagagccatcaacgtaccttacatgtacagagtcggatcaagaatgggtaagaacccgagttttc

SEQ ID NO: 165761 - DNA, 285 bp, Arabidopsis thaliana columbia
gagggatgcaagggctgaagcaccattctcgtttaacagtagcgaacattcgcccgggagatggtcggataccgttcagagcttgccaagggatgatcaagtgagcatttagagaaattgggtgggccttcttcattgctttcatagaatgacacgtgtgattcttgaagtagggttcatagtgtaaagcttcttttttattttgtaacgccattttgattcatcgaccttgtaggacttgcataagatctattgaattgagatgctggcattgagtagttgaag

SEQ ID NO: 165762 - DNA, 221 bp, Arabidopsis thaliana columbia
accgttcttagccacgtcgataacttgatctccggtgttaccagaggtttccgttacaagatgaggttcgtgtacgcccattttcccatcaacgcctccatcggcggtgacggaaagtctatcgagatccgtaacttccttggcgagaagaaggtgaggaaggtataagtgttggatggtgtaaccattggttgatctgagaaggttaagggtgagattgt

SEQ ID NO: 165763 - DNA, 292 bp, Arabidopsis thaliana columbia
cagaaatcctcactcatattagagaaggaggtcttagtttttataagcaacggagcgaatgagcagatgatctcgcagggagcatctaaggtaaacattttattgatagtgaatgatgaagaggcagagcaatgtgtgaggtctcttcactccgacttctttgagaccgatccgtagtgcaacacatatcacccatccttctacttcaactctgcttttgggcgtagattaatgctaagaatgggttaagacttgtatctattttatattcctgtccatcgttgatgttgtt

SEQ ID NO: 165764 - DNA, 438 bp, Arabidopsis thaliana columbia
cgctcttgactacgagcaagagctagagacagttaatagcagttcttcagtggagaagaactacgagctacctgatggacaagtcataaccatcggagctgagagattccgttgtcctgaggttctgttccagccatcgctcatcggaatggaagctcctggaatccatgaaacaacttacaactccatcatgaaatgtgatgtcgatatcaggaaggatctctatggaaacatcgttctcagtggggttccaccatgttcccaggaattgctgaccgtatgagcaaagagatcaccgctcttgcacctagcagcatgaagatcaaaggggttgcaccgccagagagaaaatacagtgtctggatcggaggatcaatccttgcattcctcagcaccttccaacagatgtggatttcaaagagtgagtacgatgagtca

SEQ ID NO: 165765 - DNA, 291 bp, Arabidopsis thaliana columbia
gcgagtcatgctagggacaagaagaaagctggtggctctcgatcctttggaagagtattgcaatgataatcctgagactgatgagtgtcgtacttatgataattaaaaaatatgtttttgatgttcgaattatgaaactttaggtatggatcaatgtttgttcttcttgtcccttgttgttatgtttgtgtttttggtttggttgatgattgtaatgtgataaatgaatatgaatagtacaatacacaacatatgtttcatatattaaaaaaaatattttatttaattttt

SEQ ID NO: 165766 - DNA, 273 bp, Arabidopsis thaliana columbia
ggagcaagatggtccttgctggtccatccaaatttgtcgatactattttcaaatacatagctcctgaacaagttcccgttaaatacggtggacttagcaaagatactcctttgaccgaagaaaccataacggaagccatcgttaaaccggcagcaaactacactattgaattgcctgcttctgaggcttgcacgctttcatgggagcttagggttttgggtgctgatgtgagctacggagcttattttgagccaaccaccgaaggaagctatg

SEQ ID NO: 165767 - DNA, 369 bp, Arabidopsis thaliana columbia
atcttctttgattgatccacatggcttccgctttcgcatgttccgccttttcactccttaagtccaccggcgctgttgcttcctccgccggaactcgcgcacgtgcctcccttctgccaattccctctacctctgtttccgcgcgtcctctaggcttctccgccactctagattcccgtcgtttctctctccacgttgcttccaaagttgaatcggtgcgtgggaagggaagcagaggagtggtttctatggcgaagaagagcgtcggagatctgacctcagctgatttgaaggggaagaaggttttcgtgagagctgatctcaatgtacctctcgatgataatcagactatcactgacgataccagaa

SEQ ID NO: 165768 - DNA, 278 bp, Arabidopsis thaliana columbia
cagaaatcctcactcatattagagaaggtgttttatgtatttagaagcaatggagtgaatgtgcagatgatctctcatggtgcatttaaggtaaacatcttattgatagtgaatgatgaagaggcagatcattgtttgaggtctctccattccgccttttttgagactcatccttagtgcatcacattgcacccatctttatttttcaactctgtttttgtgcgtagttaaaagctataaatgtgtcttgactttctacaattatataattcttgtcc

SEQ ID NO: 165769 - DNA, 419 bp, Arabidopsis thaliana columbia
tgtgaacctgaaagatgcagtggatggatctcattacgttccacgacaagtcaaggaacagagtttacaagctcaacgaccaaaccgctaagctttttgtccggccaagaggttggcatctcccggaggctcacatcctcatcgacggtgaacccgccactggatgtcttgtcgattttggcctttacttcttccacaactacgccaaatttagacagactcaaggttccggtttcggtccattcttctatctccccaaaatggaacattctagggaagcaaagatatggaacagtgtttttgagcgtgctgagaagatggctgggatagagagaggaagcattagagcaactgtgcttatcgagaccctcccggctgtcttccagatgaatgagatactctatgaactacgtgatcac

SEQ ID NO: 165770 - DNA, 423 bp, Arabidopsis thaliana columbia
aataaaacaaaagaacagcgttcgccgagtgatttacatactcggatcagtcgtcaaaagctttggaatttgatacttttgatttttcgagaatcttgaaaatcagtcatgggttctggaaaagagcgtgacactttcgtctacctcgctaagctctctgagcaagctgagcgttatgaagaaatggtggaatcaatgaaaagtgttgcgaaattgaatgttgatctgacggtggaagagaggaacttactctctgtgggttacaagaacgtgattggttcaaggagagcttcgtggaggatcttctcgtcgattgaacaaatggaagcagtgaaagggaatgatgttaatgtaaagaggatcaaagagtatatggagaagggtgagttagagctttctaacatatgcattgatattatgtct

SEQ ID NO: 165771 - DNA, 351 bp, Arabidopsis thaliana columbia
ccttattgaaatctacttcttcaagcattgactcacgaatatcttgaaaccatggggttgacagggcaagctactgctccaagagtatataagtactgcagcagccggcgggtacttacaatggagaggctatatggagttcctctgactgatctggactctataagatcacttgtttccagtcccgaaaacagccttattaccgcgcttaatgtgtggtttggaagcttacttgcttgtgaaagcttccatgctgatgtacatgcaggaaacttatggctgttgcgtgatggccggattgggtttcttgattttggcattgttggtcggatattccccaaaacatgggct

SEQ ID NO: 165772 - DNA, 440 bp, Arabidopsis thaliana columbia
caaaccctctccaaaacacacccacacgttcgctcacacacaaagacaatgtctcctttcaaaatattcttcttcacgactcttctcgtggcggcgttttcagtgtcggctgctgatttcaacactgacgtcaacgtagcttggggaaatggccgtgggaagatactcaacaacggccagcttcttactctctccttagacaaatcctctggttccggttttcaatccaaaacagagtatttgtttggaaagattgatatgcagattaagcttgttcctggtaactctgcaggaacagtcacaactttttacctaaaatccgaaggatccacttgggatgagattgattttgagttcttgcgtaatatgagtggagatccctatactctacacactaatgtttacactcagggaaaggggacaaagagcacaattccatc

SEQ ID NO: 165773 - DNA, 407 bp, Arabidopsis thaliana columbia
gttccctctctcctcaggtaactaattaatattcataaaagatggctcaaaaagtggaagcagggggtggcgccggaggagcttcatgggatgatggtgtccacgatggcgttagaaaggtgcatgtagggcaaggccaagatggtgtgtcatctatcaacgtcgtgtatgcgaaggactctcaggatgttgaaggaggtgaacacggaaagaaaacgttacttggatttgaaacgtttgaggttgatgcagacgactacatagtagcagtgcaagtgacctacgacaacgtgtttggccaagactctgacatcatcacatctattaccttcaatacattcaagggaaaaacatctccaccctatggattggaaacgcaaaagaagtttgtactcaaggacaaaaac

SEQ ID NO: 165774 - DNA, 346 bp, Arabidopsis thaliana columbia
ctgaaaagaaaaaccaaatcagctaaatttcataagtttccgtcaatgtcttctcgccggagagttcttctcaaggttatcattctcggtgatagcggtgttgggaagacttcggtgatgaatcagtttgtgaatcgaaaggttagtaatcaggataaagctacgattggagcagattttttgactaaagagggtcaaatagatgacagaatcttcactttacagatttgggatactgctggacaagaaagatttcaaagtttgggagttgcgttttaccgaggagcggattggtgagttcttggctatgatgtccatgttatgaaaaccttttgataatcttaat

SEQ ID NO: 165775 - DNA, 451 bp, Arabidopsis thaliana columbia
accgtaacggaagggccgacccgaccgacgcgtatggtaaacgaacataaaacactacctaagatatctatattgctggagtgatgaagttggcatgcttgctcttggcctgcatgattgtggccggtccaatcacatcgaacgctgcgctaagctgtggctcagttaacagcaacttggcagcgagcattggctacatgctccaaggtggcgtcatttccacagcgcgatgctccggcgttaaaaacctcaacagcatagccaagacgaccccagaccgtcagcaagcttgcaattgcattcaaggtgccgctagagccttaggctctggtctcaacgctggccgtgcagctggaattcctaaggcatgtggagtcaatattccttacaaaatcagcaccagcaccaactgcaaaaccgtgaggtgatgagctagcaacggtgagatgat

SEQ ID NO: 165776 - DNA, 217 bp, Arabidopsis thaliana columbia
ccttgtccaatttccaaatcctttgttggcgaattttgtcttctttcttcctgagatttcccttcttgtcttcaagaaaccttgatcagggtttctattgtttaaggagggagaaacgaaatgtcaggtggtggcggatcacagagtagttgaaggaggtatcttggagctattaaagataccaccacagtttcattagctaaggtcaatagtgagt

SEQ ID NO: 165777 - DNA, 426 bp, Arabidopsis thaliana columbia
ctaatttcgttgccgtctctccaagcaagaagaagcctctcagttctcacagcgaagatgcctacagtaagcgtgaagtggcaaaagaaagtgttggatggtatcgagattgacgttagtctgcctccttatgttttcaaggctcagttgtatgatttgactggagttccaccagaacgccaaaagatcatggtcaaaggtggtctcttaaaggatgatggagattgggctgctattggtgtgaaagatggtcaaaaattgatgatgatgggaactgctgatgagatagtgaaagctcctgagaaggccattgtttttgcagaggatctacctgaagaagcgctagccactaatctgggttacagtgctggccttgtcaatcttggcaacacgtgttacatgaactccacggtgcagtgcttaaaa

SEQ ID NO: 165778 - DNA, 292 bp, Arabidopsis thaliana columbia
tcaagacgagcactgacagacagtgcatatgtgtatttttggccagctaaggagcagctgctgctccgcttctctttctcagcgtgtcgccgtcccgaagggcatgtccggagctcctttcggtgcttgtacgaccaaaagagtctgtgccttcactgtccgagctgttaaatccgacaagacaacattccaagtagttcaaccaagcaacggtgatccattcatcggaagtttggaaactccggtgacatcaagcccattgatcgcgtggtacctatccaacctccctgga

SEQ ID NO: 165779 - DNA, 259 bp, Arabidopsis thaliana columbia
tgttgagaaccttgcaaagcatctcagtgatcctttttgaaacaacttgcttaccgtcatcgctggaactgccgagagagctcccactctctaagccatttctactttttttaagagcttccaaaatgtacactttgttcgattggaactccttttgacaatgttaaaaaaacttccatctgaatcttcttgatatatttcaaattttcaatggtgctttatcatgcttctaaggatatacatagtcacccattggttt

SEQ ID NO: 165780 - DNA, 416 bp, Arabidopsis thaliana columbia
  unsure (1)..(416): unsure at all n locations
acggtcttccaaatctcccaaaagatgtcgatccctatagttttcttcgacatgagtctcagcggtactcccatcggacggatcgagatggagcttttcgctgatacaaccccaaacacggcggagaatttccgtgctctctgtaccggcgagaaaggaatgggaaagctaggtaagccacttcacttcaaaggatcgatcttccaccgtgtgattcccggattcatgtgtcaaggaggtgatttcaccgccaagaacggaaccggtggtgaatcgatctacggtgctaagttcaaggacgagaactttatcaagaagcatacaggagctgggattctctcaatggctaactctggtcctaacactaacggatctcagntcttcatctgtaccgataagacgtcgtggttagatgg

SEQ ID NO: 165781 - DNA, 406 bp, Arabidopsis thaliana columbia
  unsure (1)..(406): unsure at all n locations
aatctcaacttccgacgtctattcatcatgggtttgaaggaggaatttgaggagcacgctgagaaagtgaatacgctcacggagttgccatccaacgaggatttgctcattctctacggactctacaagcaagccaagtttgggcctgtggacaccagtcgtcctggaatgttcagcatgaaggagagagccaagtgggatgcttggaaggctgttgaagggaaatcatcggaagacgccatgaatgactatatcactaaggtcaagcaactcttggaagttgctgcttccaaggcttcaacctgatgaatcaaatcctcatctgcagtaactttatcttaagcatcaaaataacattgcataagacttgntcttgctcttgtgtttctatcatatttaagctatc

SEQ ID NO: 165782 - DNA, 428 bp, Arabidopsis thaliana columbia
  unsure (1)..(428): unsure at all n locations
ctcatattgttcaagccaacaacaacaattacttttacccaatgagcaaatgaaccagtttggacatactggaaatcttcagaacacccaacaacaacaacagagatctgataatgaacctgctccacagcaacagcaacagccaacaaagtcttatccgcgagcaagaaagagcaggcaagggagcacaggaagcagtccaagtgggccacagggaatctctggtagcaagtcctttcggccattcgcagccgttgatgaggacagcaacatcaacaatgcacctgagcaaacgatgacaacaaccacaacgacgacaagaacaactgttactcagacaacaagagatggnggaggagtgacgagagtgataaaggtggtacctcacaacgcaaagctcgcgagtgagaatgcttgcagaattttca

SEQ ID NO: 165783 - DNA, 388 bp, Arabidopsis thaliana columbia
cttctctctctctctctagattcgaaaaaatggttaatctggtgatgttgttggttctctgtatcttaccggcgatagccatggcggcaaggaggggaaatattggaaagaatacaatggtggttcaaggtagcacctactgtgacatttgcaaattcggcttcgagactcctgaatcctcctacttcatccccggtgcaacggtgaagctatcatgcaaagacaggaagacaatggaagaggtttacacagacaaagctgtatcagacaaagaaggaaagtataagttcattgtccacgacgatcacagagaccagatgtgcgatgttttgcttgtgaaaagctcggataaaacctgctctaaaatctccgttggacgtgagaagtc

SEQ ID NO: 165784 - DNA, 336 bp, Arabidopsis thaliana columbia
  unsure (1)..(336): unsure at all n locations
gcaaagacggtgttgttttgctgtgggannttgccgaggggaagaagctttactctcttgaagctaactctgtgatccatgctctttgcttcagtcccaacaggtactggctctgtgctgcaactgaacatggtattaagatttgggaccttgagagcaagagcattgttgaggatttgaaggntgatcttaaggctgaggctgaaaaggctgacaacagtggtcctgctgccaccaagaggaagggtatttactgcacaagccttaactggagcgcttgatggaagcacccttttcagtggttacaccgatggagtcattagagtttggtgtatt

SEQ ID NO: 165785 - DNA, 326 bp, Arabidopsis thaliana columbia
attcttcttcaagtgccgggttctcgggtcggatcttctaagtctagctagggataatggctactgtcactactcatgcctcggcctcgattttccgaccttgtacttcaaagccaagattcctcaccggttcttccggtaggttgaaccgcgacttgtcgtttacatcgatcggttcatcggccaaaacgtcgtcgttcaaggttgaagctaagaaaggagaatggttgcccggtttggcatcgcctgattatctcaccggcagtcttgccggtgacaatgggtttgacccgttgggtctagcagaggatccagagaacttgaaa

SEQ ID NO: 165786 - DNA, 417 bp, Arabidopsis thaliana columbia
  unsure (1)..(417): unsure at all n locations
gtctatatatccacgctcttgttcgncgtttctagatcacacacacaaccaccaaacacaaagcttttcaaaacccagagaaaatgttcatcgagagcttcaaagtagagagtccaaatgtcaaatacacagagaatgagatcaattcggtgtacgattacgaaacaacagaggtcgtccacgagaatcgtaacggtacatatcaatgggtcgtgaagccaaagactgtcaaatacgatttcaaaacagacactcgtgtccccaaattaggggttatgcttgttggttggggaggaaacaatggatcaacactaaccgctggtgtcattgctaacaaagaaggaatattgtgggcgactaatgacaaagtgcaacatgctaattaacttggttcatttactaaagctttatcgattc

SEQ ID NO: 165787 - DNA, 413 bp, Arabidopsis thaliana columbia
caaaaaaccgacaaaagcctctgtctcggacagtgacttagaaacagaacagagcaagaacaatggctgttacacaaatacttgtcgtctttgcttctgcattactcctatcaatgttcttcactggcgtcgattccacaaggtctaatgaaacatggcatgaacatgcagttgagaatccagaggaagtagctgccatggtggacatgagcattcgaaacagcacagcgagaagaagattaggatacttctcatgctcaaccggaaatccaatcgatgattgttggcgttgtgaccggagatggcaatcccggcgaaaacatctagccaattgcgcaatcgggttcggtcgcaatgcaatcggcggtagagacggtcgttactacgtagtgagtgatccaaacgacgataac

SEQ ID NO: 165788 - DNA, 303 bp, Arabidopsis thaliana columbia
aaaaaatctttttaaagagctttgaagatccattgcgttgtctcatgtccagcctatgctactcctgctcgtatcactcttcttcttaccggctttgcgtggcgccatagatttcgaatactgcgccaaaaatggaaacgattacggaaccgtcactagcattgtggtctctccatctgttgggcctcacgaaaactcaaccatcactataaatttattcggttctgcaagcaaaaacatccccgcgggaccccttgtgtacgtagcctttagagatggggaaattaccggccttttaaaaac

SEQ ID NO: 165789 - DNA, 369 bp, Arabidopsis thaliana columbia
gagaactgaagcaataggcttttgaagctctcttgtatatacatgactttcaagcgcaggaatggtggcaggaacaagcataaccgtggtcatgtgaaaccaatcaggtgttccaactgtggaaagtgttgccccaaggacaaggcgattaagagatttatcgtaaggaacattgttgagcaggctgctattagagatgttcaagaagctagcgtctacgaaggttacactctcccaaagctttacgctaagacgcagtactgtgtctcgtgtgctatccattctcacgttgtgagagtccgatcccgcaccaaccgtagagttcgtaccccaccacctcgttttgccagacgcaaggaggatacaccc

SEQ ID NO: 165790 - DNA, 374 bp, Arabidopsis thaliana columbia
ctgagtttttagcaatggcgaaactaaacccttaattcatctctttgattcttttcgctctcgtggtgatcgtctctgctgaagttatcttcgaggagaaattcgaagatggatgggagaagagatgggtaaaatctgactggaagaaagatgataatactgctggggaatggaaacacacagctggaaattggtctggtgatgctaacgataaaggtatccaaactagcgaggactacagattctacgctatatcagctgaattccctgagtttagcaacaaggataagaccttagtcttccaattctctgtcaagcatgagcagaagcttgactgtggtggtggctacatgaagttgctaaatgatgatgtt

SEQ ID NO: 165791 - DNA, 452 bp, Arabidopsis thaliana columbia
aataaattcaacggggagagaggaaaaacgatagggaacaaaaagaaataggggatatggtaggcggacgcggcggagttggcggtggtggtggtaacagagtggaggcggatcagtggcttgtaacatcggagaagcttctagcgtctagtgatcttcaaggagcaaagacatttgcgatccgcgcatgcgaagctgacccgacccgagcagaagctgcagactacatcctcgcaatctgcgacattcttctcgccggagagactcgtttaggtgatttcaacttgccagactggtacgccgttctccgacttggtcgtttagtttaaaaccttgaacacgtttcgacttagtaccgtagactcgcttttctcctcaattctttccgttaatgtttcccattcgccgatcgagttttaaaatcgttttctatgcttggttcgttttctttg

SEQ ID NO: 165792 - DNA, 342 bp, Arabidopsis thaliana columbia
atctcagaaagatcaatctagagagaccataatagatcggaagagatggcttctacctccgcgatgtcattggtcacaccacttaaccagacccgttcgtctcctttccttaagccattacctctgaaaccatccaaggctttggttgcaactggaggcagagcacagaggcttcaagttaaggccctcaagatggacaaggctttgaccggtatctccgcggctgctcttactgcttcgatggtgattccggagatagctgaagctgctggttctggaatctctccttccctcaagaattatttgctcagcattgcttctggcggtctagtccttactgtc

SEQ ID NO: 165793 - DNA, 463 bp, Arabidopsis thaliana columbia
  unsure (1)..(463): unsure at all n locations
cacgatctaaaaatcccttctctctttctttctttctttttttctctccctctcttctcaggcgagtatgcaaagcaagaacatgatcgtggcttcatctcatcagcagcaacaacaacagcaaccgcagcagccacaaccgcaacttaaatgccctcgttgcgattcttccaacacaaagttctgctactacaacaactacagcctctctcaaccacggcacttttgcaaggcttgcaagaggtactggacgagaggtgggactctcaggaacgttcccgtagggggtcgctaccggaagaacaaacgtgtaaagcggccatcaaccgcaaccacaaccactgcctncaccgtctcgacgactaattcttcatcccctaataaccctcatcagatctctcatttctcttccatgaatcatcatcctttgttctatggtttatcagatcatatgagcagttgt

SEQ ID NO: 165794 - DNA, 410 bp, Arabidopsis thaliana columbia
agaaagttgcagccactaaatcagatccgtcaatgccgaagcaaatccatgagatcaaggacttccttttgacggcgagaaggaaggatgcaaggtctgtgaagatcaagagaagcaaggacattgtgaagttcaaggtcaggtgctcaaggtacctctacacactatgtgtcttcgaccaagagaaggccgataagttgaagcagtctcttcctccaggtttgagtgtgcaagacctttgaagatcttatgaaatcaggatctatcatggttttatatacccttgtcttagatgattttgttttttccctttctgctgtcttttgaatgactatgattcagacttccgttgagtttctttcttataacttcaagactaaattatgagttggatttgtatttttttttgc

SEQ ID NO: 165795 - DNA, 422 bp, Arabidopsis thaliana columbia
ctccgaaattataagaagtaaagacaactttgtgggtgctaccttctccttctgtcccctctctcaatcccatccccattcttctctaatcaaaccgacaccgtttctcagatatggcaagaaactacaccatcttcaccaccacatcttcatcaccatctcttacccatctcaccattctcgctacttggccgtttcaagagacgatgccgcgacgcctctttcttcttccgaccaaacccaagagacagagaccaaagaagtggaagacactatagagaaacgaagaatggaggagacgtttgctgttctaaacactggaatctatgagtgtagatcatgtggttacacgtacgatgaatcagcgtatgacccatctgacccggactcaccgggtttcagtttgataagttgcctgaaga

SEQ ID NO: 165796 - DNA, 449 bp, Arabidopsis thaliana columbia
atttgctcattagagaacagagaaaaaaaaaatcaatttcaactcaagccgccgggatcttcaactccgccataacaaccgccgcaacctccggcgtcaagaaactccactttttctcaacaacccaccgtcccaaatccctctccttcaccaaaaccgcaatccgcgccgagaaaacagattcctccgccgccgctgctgcagcccccgccacgaaagaagctcccgtgggattcacgccaccgcagctagacccaaacacaccgtctccgatcttcgctggaagcaccggtggtcttctacgtaaagcgcaagtggaagagttctacgttatcacgtggaactcaccgaaagaacagatctttgagatgccgacaggaggagcagcgatcatgagagaaggtccgaatcttctgaagctagcgaggaaagagcagtgtttagctttg

SEQ ID NO: 165797 - DNA, 400 bp, Arabidopsis thaliana columbia
  unsure (1)..(400): unsure at all n locations
gaagaaaggctcttacattttagaactgaaaattaatctcacaaacaaaacgaagaaaagttggaggaaagacttgtgcagtataaaaacaagaacgacatgcttcttcgtgaaatgtctagcacagaagcccagatgagacaattgctagatgaaagatctaccttcactcagaaagaggcgagtctagaaaagaaagttcaacaacttcaacacgatgaagaatccttggtggctgaggagaagtcatccagagaaatgatatctagccttaacaatgaaattgcaaggctgcgagcacagtttggcaggttacggangtggaaaaatctaagagtaatcttctagagcagaatcagagtcttaaggaaactatatncaatcttaaagtcagcatgaa

SEQ ID NO: 165798 - DNA, 422 bp, Arabidopsis thaliana columbia
aaaaaacatcgcacaagaaaataaaagatttgtttaattatactaagaaaatggctagcactatgatgactacattgcctcagttcaatggtcttcgagccaccaaaatctctgcagctcctgtacaaggcctggcaagtgttcagcccatgagacgcaagggaaatggagctttgggtgcaaagtgtgacttcatcggttcatcaacaaatctgataatggtaacgtcgacgaccctgatgttgttcgcggtgagattcggacttgcgccatcagccaataggaaggcgacagctggacttaggttggaggcacgtgactcaggtctacaaacgggtgacccggccgggttcacgcttgcggacactttggcttgtggcaccgttggtcatatcatcggtgtaggagttggccttggcctt

SEQ ID NO: 165799 - DNA, 455 bp, Arabidopsis thaliana columbia
gatacattcccgccgccgtcgcaacgttccactcgttttcgcagcaaacagttcatctatggctacatcaggacgctcccacggctctaccacggcggctttagcctttacactcgccgtagtatctgtatccgctgccttctcgcgtaatctctttctctctacctctctgtcacttcctcttcccaatacctgttattgagctggtttcgagaaactaacactttattgagcatgttcttgcgaagtgtatagatggcgaagacgagaagaagatttggagaataggatcaaggaatttgagaagtctttgggatctaccttggaaaaaagtgcttctgagagaaaaggtcgagtcaaagctcagcagctgtaggctttacgggaggcgttagcacagactgagtcacatgatttacacagcacaatatacccgatgcgacctattggcacta

SEQ ID NO: 165800 - DNA, 375 bp, Arabidopsis thaliana columbia
cacaaaacaaaaaaaaatggcttccactgctctttcaagcgccatcgtcggaacttcattcatccgtcgttccccagctccaatcagtctccgttcccttccatcagccaacacacaatccctcttcggtctcaaatcaggcaccgctcgtggtggacgtgtcacagccatggctacatacaaggtcaagttcatcacaccagaaggtgagctagaggttgagtgtgacgacgacgtctacgttcttgatgctgctgaggaagctggaatcgatttgccttactcttgccgtgctggttcttgttcgagctgtgctggtaaagttgtgtctggatctgttgaacagtctgaccagagtttccttgatgatgaaca

SEQ ID NO: 165801 - DNA, 228 bp, Arabidopsis thaliana columbia
  unsure (1)..(228): unsure at all n locations
attatttcgaagatgatgataaagagcccgtttcgnttgctcgtctcccaattcaatggagcgtggaggagaaagttgatggtagtggtttaggtttttacttgcgaggaagatctgataacggccttttgcctatgtataagcttgttaaggtttggagatactatctttcgaactttcaggctgagattttgatcttactaaagataatatatttatttagcttgt

SEQ ID NO: 165802 - DNA, 310 bp, Arabidopsis thaliana columbia
accaaaagaagaagagaaacaacaagaagtgattggcttcctctatgttctcctccaccgctgtggttacctccccggctcaagccaccatggtcgctccattcaccggcttgaagtcatccgcttctttcccggtcacccgcaaggccaacaacgacattacttccatcacaagcaacggaggaagagttagctgcatgaaggtgtggccaccaatcggaaagaagaagtttgagactctatcttacctccctgaccttagtgacgttgaattggctaaggaagttgactaccttcttcgcaacaaggg

SEQ ID NO: 165803 - DNA, 408 bp, Arabidopsis thaliana columbia
ctgatacaaattaaaactcttaaacagcttctctacgagaggaaactgaggaacacaacaatggagtttcgtggagatgccaaccagaggattgctaggatttcagctcatctcactcctcagatggaggccaagaactctgtaatcggacgggaaaactgcagagctaaaggtggtaatccaggattcaaagtagcaattcttggagctgcaggtggaattggacaatctttatctttgctgatgaagatgaaccctcttgtctctttacttcatctctacgatgttgtcaatgctcctggcgtcactgctgacgtcagtcatatggacactggagctgttgtccgcgggttcttgggagcgaagcagcttgaggacgcgctaacgggtatggatcttgtgatcata

SEQ ID NO: 165804 - DNA, 470 bp, Arabidopsis thaliana columbia
cccacccgcaaccatacccgctttcccggtgcatttcgatttctccggctgcccactcgatttaccagaagacctcttccacggcatcaagtcagcttgcagcggcaaaaagctccacaaaggaaaatgttgccccgtactaggcgcgtggctctactctgcttactcaaccactgctctaagccgttcgatttccgccgccgcaagaaactcatcctcctcctccgccgcggtaacgactcctgaagaagatatgcctttgcttcccgatgactcggagacttgcgttgacggattagggaaatctctgaggcagagagggattgagctcactagaccgaacgagacttgcgacgtcgtttactgctactgtggaatcagattgcatccgttgagctgttccgaggcttttagagtgaatgatgaagggagactcgttggagacgagagagttgatagattagagactg

SEQ ID NO: 165805 - DNA, 229 bp, Arabidopsis thaliana columbia
  unsure (1)..(229): unsure at all n locations
cacgatttcggaggaagcttcgattctaccnnatttcagatctgaaatagttgtgtttgagaagcgggattggtgatcggagctggaatttggttggtaatcggaggtcagagagaagtcaacggatatgccggaggaagaatcgatagatatcaaattcaggttgtacgatggctccgatatcgggccttttcggtaatctgctgcttctactgttgactttttgaag

SEQ ID NO: 165806 - DNA, 395 bp, Arabidopsis thaliana columbia
gttgatgttgaagctgccaataagtatggaattgctgtcggtaacactccgggagtgttgactgagacgacggctgaactagctgcttctctttccttggctgctgcaagaagaattgttgaagccgacgaattcatgagaggtggcttgtacgagggatggcttcctcatctgtttgtggggaacttacttaaaggacagactgttggagttattggagctggacgtattggatctgcttatgctagaatgatggtggaagggttcaagatgaatttgatctactttgatctttaccaatccactcgtcttgagaaatttgtgacagcttatggacagttcttgaaagcaaatggagaacaccctgtgacatggaaacgagcttcgtccatgga

SEQ ID NO: 165807 - DNA, 396 bp, Arabidopsis thaliana columbia
  unsure (1)..(396): unsure at all n locations
acggatctgaccgtgtcaagtacttgggtccattctctggcgaatcaccgagctaccttaccggagagttccccggagactacggatgggacaccgccggactttcagctgaccccgagacattcgcaaggaaccgtgaactagaagttatccacagcaggtgggccatgctcggagccctaggctgcgtcttccctgagcttttggctagaaacggagtcaagttcggagaggcggtttggttcaaggccggttcacagatcttcagcgatggagggctcgattacttgggaaaccctagcttggttcacgctcagagcattttggccatttgggccacacangttattttgatgggagccgttgaaggctacagagtcgcaggaaatgggccat

SEQ ID NO: 165808 - DNA, 472 bp, Arabidopsis thaliana columbia
gcttgatgaaattcttacacctgctgcatgcactattgtttcatctctctccaacgatcaattggactcttacgtactctctgagtccagcttctttgtctacccctacaaagtcatcatcaagacttgcggtaccactaagctcctcctctctatcccaccacttctaaagctggctggtgagctctctctgagtgtcaagtctgtgaagtacactcgcggctccttcctctgccccggaggccagccttttcctcaccgcagcttctctgaagaagtctctgttcttgatgggcactttactcagctgggcttgaacagcgtagcctacttgatgggcaatgatgatgagactaagaaatggcatgtctatgctgcctctgcccaggactccagcaactgcaacaacaatgtctacactctcgagatgtgcatgactggtctggacagagagaaagctgctgtcttctac

SEQ ID NO: 165809 - DNA, 472 bp, Arabidopsis thaliana columbia
tagtcataaaaaaaaaaaaaaaaacacaaaaaagttttatatggccgcctcaacaatggctctctcctcccctgctttcgccggaaaggctgtgaacctttcccctgcggcatcagaagtccttggaagcggccgtgtgacaatgaggaagactgttgccaagccaaagggtccatcaggcagcccatggtacggatccgaccgagtcaagtacttgggtccattctctggcgagtcacccagctaccttaccggagagttccctggagactacggatgggacacagctggtctatccgctgaccccgagacattcgcaaggaaccgtgagctagaagttatccacagcaggtgggccatgctcggagccctaggctgcgtcttccctgagcttttggccaggaacggagtcaagtttggagaggcagtttggttcaaggctggttcacagatcttcagcgatggagggctc

SEQ ID NO: 165810 - DNA, 377 bp, Arabidopsis thaliana columbia
  unsure (1)..(377): unsure at all n locations
aagagaaacaaacaatggcggcttctctgttatctgcaaaccctacattgtcacgaaccctagcttctccgaacaaaccttcctccttcgccaccttccgatctccatttctcagattcaattcaacatccgtcgcttccaatttcaaacccctagtttctcgagaagcatcctcatcgttcgtcactcgctccgccgccgagccacaagaaagaaaaaccttccatggactgtgctatgtcgtcggcgacaacatcgacactgaccaaatcattcccgcggagtttctcactctcgtcccttcgaatccagaggaatacgagaaactcggttctttacgcttagttggncttccagcttcttacaaggaacgattc

SEQ ID NO: 165811 - DNA, 387 bp, Arabidopsis thaliana columbia
aaaaaaatggctcaagcagtgacttcgatggtttgcttacgtggagcatctcaggctgtccttgaaggaagtttacagatcaacggctcaaaccgtttgaacatctcaagagtctcggttgggtctcagagaaccggacttgtgatcagggctcagcagaacgtgtcagtaccagaaagtagtcgccggtcagtgattggactcgtggcggctggtttagccggtggttcattcgttaaagctgttttcgccgaagctattccgatcaaagttggtggtccttcactttcttccggtggcctacctggaacagataacctcagaccaagcaagagactttttattcgcattgaaagatagattttacatacaaccattggcaccaac

SEQ ID NO: 165812 - DNA, 292 bp, Arabidopsis thaliana columbia
aattttcgtcatcatttcttgagagtatatgtctcactgtctccgagactccacaaagcgtacaaagctagatgtgttagcttaccggttcggtctcatccgagtgttaggaggattcaagaagtggtctccaaggttagagctttggggtcttcttcgttagactcgaggacaatagtccgtgacagtctctctggtctcaccgagctttacagatgtttaagtgaagatctctttaagtcttcttctgaaactcaacaagccctttttaatggggatggtttgatggaag

SEQ ID NO: 165813 - DNA, 329 bp, Arabidopsis thaliana columbia
caaacgtaaccagagacggtttgatattgcatgtttgtgctcctaagcatcattcgacccctgacttgagcagtttcgccaatgtcttaacaaagaacctgaatgattctaagttcactggagctggagttggtattgattctgatggtatttggcttgttaccgtcctcactacaaacacaccagggggtagctattctaactcaggagcttttgcattcggagttaatggccttgtttcttcaagtttgatgtttcttcatgttttgagtcacaactcgttgtctttgttttcttaatatgacgtgattatggtgaaatttttaata

SEQ ID NO: 165814 - DNA, 331 bp, Arabidopsis thaliana columbia
  unsure (1)..(331): unsure at all n locations
cttcatcatggcctcagtaacctcagccatccgtgcaatcccatctttcaccggccttaaagcctcaaccatcaaatcatccgccaccgtcagaatccaaactgctgctgttgcatcaccgaagcttacagtgaagtcatctctaaagaacttcggagtcgcggccgtagcggctgcagcttcaattgctttggccggaaacgccatggcaatagaagttctcttgggaggaggggatgggtcgnnagctnntattcccaacgacttctctatagctaaaggagagaagattgtgttcaagaacaacgctggatacccacacaatgttgtc

SEQ ID NO: 165815 - DNA, 230 bp, Arabidopsis thaliana columbia
attcattggagaatttatggactattatagtattactaataggacccaagaacaatgtaaaagagaaagaaagagtgtagagtatataagtattgaaaacacattcaatcaattgcagactgtgaatctgcaggtcccggaattagccttgatgaaactaatagcagtcatgactacatacactcccgaatttccctgtagtagctcatgagcttttgcattcggagtta

SEQ ID NO: 165816 - DNA, 343 bp, Arabidopsis thaliana columbia
  unsure (1)..(343): unsure at all n locations
agtgtagctttgagagcttgcttgatgnnntttcgtaatcgtcatgatccaaccaccttgaatcgtcagggtggggatgtgggaacgcagtatcgatcaggtatatactactacacagacgagcaagagcgcatagctcgtgaagctgttgagaaacagcagaagatattgaacaagaggattgtcacagaaatacttcccgctacgaaattctacagagcagaaaattaccaccagcaatacctggcaaaagggggtcgcatgggtttaagacaatcagctgagaaaggttgcaaggatccaattcgattctatggttaagaaactaagtcagtctttccct

SEQ ID NO: 165817 - DNA, 433 bp, Arabidopsis thaliana columbia
gcaagctgtttcgactctgtgctgtgttatgggtattggcagattgcaagcacttgctcgtgggagagagatcagacattcagacattggagttgaagttcagaggaaatgtcatttgcatcatcagcctttagagaataaagccaactcggttgttgatacacattcttacttgggaatcaataagctaacaggaaatgcttttgctcagaagcttctagcttcatcgccaaacgtgctgcctttgtccctcgacaatgattcttccaattcaatctggttagagaactggtcagcatcttgcttctggaaaccagttcctcagccaaagaaagcatcactcagaaaatctcagaagaaggttgccagtaatcctcagatagtcgaggctgattttgcgagaccaaaaaagagtgttccaaaggcccttttt

SEQ ID NO: 165818 - DNA, 378 bp, Arabidopsis thaliana columbia
aagaacaatggcttcctctatgctctcttccgttactatggttgcctctccggctcaggccactatggtcgctcctttcaacggacttaagtcctccgctgccttcccagccacccgcaaggctaacaacgacattacttccatcacaagcaacggcggaagagttaactgcatgcaggtgtggcctccgattggaaagaagaagtttgagactctctcttaccttcctgaccttaccgattccgaattggctaaggaagttgactaccttatccgcaacaagtggattccttgtgttgaattcgagttggagcacggatttgtgtaccgtgagcacggtaactcacccggatactatgatggacggtactggacaat

SEQ ID NO: 165819 - DNA, 265 bp, Arabidopsis thaliana columbia
taagaagcacataaagatactctggtgaaaccggtagggctgttcaagaagaacttcgaggtttttgctaaccataagattggtgtggatggtaagcttacggaggagattctcgctgctggtcctatcttttagaaaaaccaaactctgaatgatgttgtcgaaaacaaagaaagatctactattattaagaagaataaaatgcgactttgtgtttttctttgctgggagagtctgtctggaataacttagagaatttaatgtt

SEQ ID NO: 165820 - DNA, 270 bp, Arabidopsis thaliana columbia
  unsure (1)..(270): unsure at all n locations
cgacgaagctgatttctccgccgttgtcncgtccgtgggttacttcaagagaggtgataatcaaagggcttccacggcggagaagagaatggatggtcacgaagagaaacagagtctctgctgtcacggccatgattgtggagccactttctgttgtttcttcttcagcaattcagattcatcaatggtgggaacaaaaccctaattcgttactgttaatgacggaggctactggtggttattcgttggctagctattatacgtctgtgg

SEQ ID NO: 165821 - DNA, 386 bp, Arabidopsis thaliana columbia
taaataaacctctcttcatcgaaaatgtgtagattctctgtgtcaattttcctcttctcatgtctcttcgtttcttcgtcttcgttgggcgattcggaggcgacgtgttccggtatagttccgttacggtaccggtacgataagatctcgataaccgactttggaggcgttggagatggtcgaacggtgaatactaaggcgtttagggcggcgatttatcggattcagcatctgaagaggagaggaggcacgcttttgtatatacctccgggagtgtatttgacggagagcttcaatctcactagccatatgactctttacttagctaaaggtgctgtgattagagctgttcaggatacctgcaattgtccattgattgatccttt

SEQ ID NO: 165822 - DNA, 410 bp, Arabidopsis thaliana columbia
ccgtcgtcaaccacaaaccaaccgtagattcaatacactcatcacttgcgcacaagaaaccatcgtgatcggactagctgctgactctggctgcggcaaaagtacctttatgcggaggctcaccagcgtctttggtggcgctgctaagccaccaaaaggcgggaaccctgattccaacacactcatcagcgacacgaccactgtgatctgtcttgatgattaccattctttggataggtacggtaggaaagagcagaaagtcaccgctttggacccacgcgccaatgactttgatctcatgtatgagcaagtcaaagctcttaagaatggtatagccgtcgagaaaccgatttataaccatgtcactggacttcttgacccttcggagcttattcagcctcctaagattc

SEQ ID NO: 165823 - DNA, 480 bp, Arabidopsis thaliana columbia
ctagatctctctttcttatacatccatattattgatgatgcctcgccgtgacgtcctcttcctctcactcctcctcgtcatcgccaccgtctccgctgtcgcattagccgacgatgaagcagattgtgtctacacattcttccttagaaccggatcaaccttcaaagccggtacagattcgatcataagcgctagagtctacgacaaatacggagactacatcgggatccgaaacctagaagcatggggtggtttaatgggaccaggttacaactactacgagaggggtaatgtcgacattttcagtgggaaagcaccatgtcttccgagcccagtctgttcattaaatctgacctctgacggctccggtgaccaccacggttggtatgttaactacgtggaagtcacgacagtcggagttcatgcaaagtgctcgtaccaaagctttgatgttgagcaaggccttgcgtccgatacatc

SEQ ID NO: 165824 - DNA, 408 bp, Arabidopsis thaliana columbia
  unsure (1)..(408): unsure at all n locations
cggatttgtgtaccgtgagcacggaaacacnctcggtatactacgatggacggtactggacaatgtgaaagcttccattgttcggatgcaccgactccgatcaagtgttgaaggaagttgaagaatgcaagaaggagtacccgggcgccttcattaggatcatcggattcgacaacacccggcaagttcaatgcatcagtttcattgcctacaagcccccaagcttcaccgaagcttaatttcttttctaaaacattcttatgaattatctctgctcatttcatttcctattgtctgtgttctttttctctttatgagacaatttctatcggattgtcaaatgtctgatttatgaatatgtaatttatataagatagaaaataaatgggctttcgctctagaacggac

SEQ ID NO: 165825 - DNA, 419 bp, Arabidopsis thaliana columbia
  unsure (1)..(419): unsure at all n locations
agaagaagaagtaatggcttcctctatgttcncttctgccgctgtggttacctccccggctcaagccaccatggtcgctccattcactggtttgaagtcatccgcttctttcccggtcacccgcaaggccaacaacgacattacttccatcacaagcaatgggggaagagttagctgcatgaaggtgtggccaccaatcggaaagaagaagtttgagactctatcttacctccctgaccttactgacgtcgaattggctaaggaagttgactaccttctccgcaacaaatggattccttgtgttgaattcgagttggagcacggatttgtgtaccgtgagcacggaaacactcccggatactacgatggacggtactggacattgtggaagcttccattgttcgaatgcaccgactccg

SEQ ID NO: 165826 - DNA, 433 bp, Arabidopsis thaliana columbia
cattacaaaacgttacaatggcttctaaggctcttgtagttacagctcttcttattacacttaatcttcttttcttcacctttgtaacctccacaaaatgtccaccaactactcctaaacccccaaaaaccccgaaatcgcctaagaaggctcctgccgtgaaacccacttgtcctaccgacacacttaagcttggtgtttgcgcagacttattgggcctagttaacgttgttgttggttctccaccaaagactccttgttgtacacttcttcaaggtcttgctaatcttgaagctgcggtttgtctctgcaccgctcttaaagccaatgtcttggggattaatctcaatgttcctattgatctaaccttgctgttgaactattgtggcaagaaagttcctcatggtttccaatgttcttgaagatttgagac

SEQ ID NO: 165827 - DNA, 480 bp, Arabidopsis thaliana columbia
attggtgagaattcgataccgaaagacgctgcgtattatatcataaaagatgagctgatgcttgatggtaacccaaggcttaacctagcttcttttgtgactacatggatggaaccagagtgtgacaaactcatcatggactctatcaataagaactacgttgatatggatgagtaccctgtcacaactgagctccagaaccgatgtgtaaacattatagctcgactgttcaatgcgccactcgaggaatctgagacggcggtgggagtagggacagttggttcttcagaagccatcatgttagccggattggccttcaaaagaaaatggcagaacaaacgcaaggctgagggtaaaccctatgacaaacccaacattgtcaccggagccaatgttcaagtttgctgggagaaattcgctcggtacttcgaggtggagctaaaggaaagtaacctaagtgaacgttactacgtgatggat

SEQ ID NO: 165828 - DNA, 475 bp, Arabidopsis thaliana columbia
gaaaaagctcacaactttaacctttctggagagtgtataacaaaagagggagagggagagaaatggaaggcaaagaagaagatgtacgagtgggagctaacaagttcccggagaggcaacccatcggtacatcggctcagtccaccgacaaggactacaaagagccacctcctgcgccactgttcgagcccggcgagctcagctcatggtctttctacagagccggaatagctgagtttatcgctactttcttgtttctctacatcactgttttgactgtaatgggagttaagagagcaccaaacatgtgtgcttctgttggaatccaaggtatcgcttgggcttttggtggcatgatctttgctcttgtctactgtactgctggaatttcaggtggacacatcaaccctgctgtaacattcggtctgttcttggctggaagttatttttgacccgagcagtgttctacatgatt

SEQ ID NO: 165829 - DNA, 479 bp, Arabidopsis thaliana columbia
caagttagtcataaaaaaaaaaaaaacacaaatatgtttcaatggccgcctcaacaatggctctctcctcccctgctttcgccggaaaggctgtgaacctttcccctgcggcatcagaagtccttggaagcggccgtgtgacaatgaggaagactgttgccaagccaaagggtccatcaggcagcccatggtacggatccgaccgagtcaagtacttgggtccattctctggcgagtcacccagctaccttaccggagagttccctggagactacggatgggacacagctggtctatccgctgaccccgagacattcgcaaggaaccgtgagctagaagttatccacagcaggtgggccatgctcggagccctaggctgcgtcttccctgagcttttggccaggaacggagtcaagtttggagaggcagtttggttcaaggctggttcacagatctttagcgatggagggctcgattac

SEQ ID NO: 165830 - DNA, 416 bp, Arabidopsis thaliana columbia
atcgctcctccttaaaccctaacatttttgcttcccctgtttcgattctcgagagttatcagagatgagttcggacgatgagagagacgagaaggagctgagtcttacctctcctgaagtcgtcaccaagtacaagagcgccgctgagatcgttaacaaggcgttacaggttgttttagctgaatgcaaaccaaaagctaagattgttgatatctgtgagaaaggagactcttttattaaagagcaaacagcaagcatgtacaagaattctaagaagaagattgagagaggtgttgcgttccctacatgcatttctgtgaacaacactgttggtcatttttcaccgcttgctagtgatgagtctgtgttggaagatggtgacatggttaaaatcgatatgggatggcatattgatg

SEQ ID NO: 165831 - DNA, 371 bp, Arabidopsis thaliana columbia
aaaaacatcgcacaagaaaataaaagatttgtataatcaactaagaaaatggctagcactatgatgactacattgcctcagttcaatggtcttcgagccaccaaaatctctgcagctcctgtacaaggcctggcaagtgttcagcccatgagacgcaagggaaatggagctttgggtgcaaagtgtgacttcatcggttcatcaacaaatctgataatggtaacgtcgacgaccctgatgttgttcgcggggagattcggacttgcgccatcagccaataggaaggcgacagctggacttaggttggaggcacgtgactcaagtctacaaacgggtgacccggccgggttcacgcttgcggacactttggc

SEQ ID NO: 165832 - DNA, 405 bp, Arabidopsis thaliana columbia
taaattcttgttctagtgcttttgttgacctgatcctataggccaactgaagacgatctgaaaatctggcctaacaattttgagttcaggctgaggatagccttggggaccgaaggagaattaactctgacatctcgtatcaggaacaccaactctgatggaaagccgtttacattcacatttgcttatcacacctatttctctgtctcagacatcagtgaagtacgggttgaaggattggaaacgttggattatcttgacaacttgaaggacagagaacgttttaccgaacaaggcgatgcgataacttttgaatccgaagttgacaagatttatctaagcacgccaacaaagattgctattttggatcacgagaaaaagaggactttcgttattcgcaaggac

SEQ ID NO: 165833 - DNA, 387 bp, Arabidopsis thaliana columbia
  unsure (1)..(387): unsure at all n locations
aaagaagaagagaaacaacaagaagtagttangtcttcctctatgctctcctccgccgctgtggttacatccccggctcaggccaccatggtcgctccattcaccggcttgaagtcatccgctgcattcccggtcacccgcaagaccaacaaggacatcacttccatcgcaagcaacgggggaagagttagctgcatgaaggtgtggccaccaattggaaagaagaagtttgagactctatcttacctccctgaccttagtgacgtcgaattggctaaggaagttgactaccttctccgcaacaagtggattccttgtgttgaattcgagttagagcacggatttgtgtaccgggagcacggaaacactcccggatactacgatgga

SEQ ID NO: 165834 - DNA, 344 bp, Arabidopsis thaliana columbia
gtgtttatggaactgatgattttaggatggttagctttaaggttaagccatgttctagggcttattcacatgattggactgaatgtccttttgttcatcctggtgagaatgcaaggaggagagatcctaggaagtatccttacacttgtgtgccttgtcccgagtttcgtaaagggtcttgtcctaaaggagattcgtgtgagtacgcgcacggtgttttcgagtcttggcttcacccggcgcagtataggacacggctttgcaaagatgagactggttgtgctaggagagtttgtttctttgctcatagacgggatgagttaagaccggttaatgcttttact

SEQ ID NO: 165835 - DNA, 480 bp, Arabidopsis thaliana columbia
  unsure (1)..(480): unsure at all n locations
gtgcaatcaaacagtcacaatctcaattttcnctttcgctgatcctttttgtccaatttgtaaccaagggtttcttgaagaatacgaagaccctaaccctaatcaatccctcaatttcaaccctaactcttctgattcctttttccccatggccgatcctttctccaccttgctcccgctcatattcggctcttccgctgccgctccttccggcatggacttcatgagcttattcggtccttcgatgcaaccacaggctcgttccactcagcagaatcctcagtctgacgcgtttgatccgtttacgtttcttcagaatcatctccagactttgcgatctagcggtacgcactttgagttcgtgatcgagaatcatccttcggatccaggtaatcgtatgcctgggaatttcggtgattacttttttggtccaggtcttgagcagttgattcaacaactagctgagaatgatcctaatcg

SEQ ID NO: 165836 - DNA, 348 bp, Arabidopsis thaliana columbia
ttaaaataaccagatccgatctactgccccggtttcttgccggaatctccattctgtaaccggcgatcctctttctgttatggaagacgtgaaagggaaggagattattgatgatgctcctattgacaacaaggtttcagatgaaatggagagtgaggaaaatgcgatcaagaaaaagtatggaggattgttgcctaagaagattcctttgatatctaaggaccatgaacgtgcgttttttgactcagctgattgggctttaggcaagcaaaaaggacagaagccgaaagggcctttggaagctctccgcccaaaactgcagccaaccccgcaacagcaaccaagagc

SEQ ID NO: 165837 - DNA, 297 bp, Arabidopsis thaliana columbia
  unsure (1)..(297): unsure at all n locations
ttcgatgatatcggtggtgcttttggtatgggagctgncggaggatctgcctttcatttcattaaagggacttacaattctcctaaaggtagtcgctttgttggaggaacacaatcggtgagcatgaacgcacctcgtactggaggcagttttgctgtttggggaggtttattctcgacatttgactgtaccatggtgtacctaaggcaaaaggaggatccttggaactctatcattgctggtgctgcaactggagggtttctgtctatgcggcaaggggctggtgctgcttctaga

SEQ ID NO: 165838 - DNA, 190 bp, Arabidopsis thaliana columbia
  unsure (1)..(190): unsure at all n locations
atcttaagtagaaagagtgaaacatggctaancataaaaatctcttctttctatgtttcttaataggtttagggttatgttctgctagacgagcactactctcctcctctgaatccgaggctgaagtcgctgcctatggcgtgaatagtggtttaagtgctggtcttggtgttggtattggtggtggtcc

SEQ ID NO: 165839 - DNA, 296 bp, Arabidopsis thaliana columbia
  unsure (1)..(296): unsure at all n locations
cgctaagattgcatcctccgggaccagtggtaaggtcgntcaaagagacatgtgaaatcaaaggattctacataccggagaagacaagactttttgttaatgtttatgcgataatgagagatcctgatttctgggaagaccctgaggagtttaagccagagaggtttttagcttcttcaagattaggggaagaggatgagaaaagagaggacatgctaaaatacattcctttcggtagcggaaggagagcttgtcctggatcacatctagcttataccgttgtaggaagtgtaatt

SEQ ID NO: 165840 - DNA, 414 bp, Arabidopsis thaliana columbia
  unsure (1)..(414): unsure at all n locations
acagatttaaaaaaccccaaaaactttacatncttacattttcaaccctatgggcttacttgatcatctctgggatgatactgtcgctggtccacggccagagaacggccttggcaagcttcgtaaacaccataccttcagtttccgacctagctccggcaatgatcaatcggaagctggaagtgcgagatcgtacggtgaggattcgctaccggaagaagcagtgaaagttacacgtagtatcatgataattaaaccaccgggttaccaaggcagttcagctccagcttcgcctgccggttcaactccgccgctatcacctttctctccgccgctgtctccgttctctgagcaaacgcagggggaaaggaaccctttcggtttaggagacggtcgacgtctgatgcgttcgag

SEQ ID NO: 165841 - DNA, 352 bp, Arabidopsis thaliana columbia
atgagtcaagaatggacagcaaccatattctgctcattataccagattcgaggcaagtgaaggcagaagacttgcaggcaggagtgtgctatctgcaaattactgctgttgatgcagtgatggaagatgaggatcttgggagcagaagagagagaatattttctctttcaactggaagtgttcgagcacgagtgtttgatcgtttcttatttgacacaccatttacgaaaaatggtaaaacccaaggtggattagaagatcaatggaagagaagaacagtgctgcagactgagggttcattctctgcccttgtgaataggcttgttggttaccaagtctgaatcccttgaat

SEQ ID NO: 165842 - DNA, 402 bp, Arabidopsis thaliana columbia
aaacaagaagaacaacaacactaagcaaatttgttaagctcaagccgagagagacaatggcatcaacattcacgagctcaagcagtgttcttaccccaacaacattccttggccagactaaagcctcaagctttaacccccttcgtgatgttgtctctctcggatctcccaagtacactatgggaaatgatctttggtatggacctgacagagtgaagtacttaggacccttttccgttcaaactccgtcttacctcaccggagaattccctggcgattatggttgggacaccgccggtttatccgcagaccctgaagcctttgccaaaaacagagctcttgaggtgatccatgggagatgggcaatgttgggagcttttggttgcataaccccttgagttc

SEQ ID NO: 165843 - DNA, 326 bp, Arabidopsis thaliana columbia
aaaacgtcaacttcgcaattttccgaacaccgtacaaggcagtccgcgacccgttcacccggcacgtctacaccaacatgtttgatgcactcatggactcgacatactcagccatgaaagctcttggatacggtgatgttaacattgtcgttggcgagactggctggccatctgcttgtgacgcaccttggtgctcgcctgcgaatgctgcttggttcaacctcaacattatcaaacgtgcacaaggccaagggacacctgtcatgcctaacagacggttcgagacatacattttcggttttttgaacgaataaggtaaatctcgt

SEQ ID NO: 165844 - DNA, 314 bp, Arabidopsis thaliana columbia
atggaagtggttgctgttgggtcaatgaagactctatacaggagacatgggcttgctctgtcactgagtcttttctcctcctcgtcggaaagaatctggcttgtcttctccttgtggcagaatcattactgataggtttggttgctgttgaccagaggttgtctgtcaaggagggttacaaaagaggaagccgtattgaggaaaacaaagatgctagtgacagtgacgatgacgacgatgatgaagacgctgatgaggacgacgatgatgaggatgatgctaatgatgaagatttctcagggggtgaaggggat

SEQ ID NO: 165845 - DNA, 390 bp, Arabidopsis thaliana columbia
aaaaactcttgaatttttcaagaacaaattaaatagacatctttaatggcggccatgaactcgagtgttctcacttgcagctacgcaattgctggctctggctcggtagagcttaaccagaaagttggtttggtgaattcatcagttgggtttggtcagaagaaacagatgattatgcctgtgatcaaagctcaacgcgttgttggtgatgatgttgatggatctaatggaagacgatcagccatggttctatcagcagctacactcttctccactgctgctgtttctgcttctgctaatgctggcgtcattgacgaatacctggagaggagcaaaaccaacatagaacttaatgatatgaagaggatggcaaccaagggagcaaacttt

SEQ ID NO: 165846 - DNA, 409 bp, Arabidopsis thaliana columbia
  unsure (1)..(409): unsure at all n locations
aagagagaaatgggtaactctttgatctttcnttgctcaatcttccacttgctggtgttatggggatcctcagtgaatgcctattggccaccatcacctggttattggccaagctccaaggttggttccctcaacttctacaaaggttttaggaatctttggggtcctcagcatcagagaatggaccaaaatgccctcaccatctggcttgatagaacctcaggaagtggattcaagtcagtgaagccattcagatcaggctactttggagcaaacatcaaactccaacctggctacactgctggagtcatcacatctctctatctatcaaataatgaggcacatccagggttccatgatgaggtagacatagaatttttggcgacaacatttgggaagccttacacac

SEQ ID NO: 165847 - DNA, 374 bp, Arabidopsis thaliana columbia
  unsure (1)..(374): unsure at all n locations
gcggaaagcactcccctaaagcccctaagctactaggtcctccggtgaccgtccctaagctaccagttcctccggtgaccgtccctaagctaccagtccctccggtgaccgtccctaagctacccgttcctcctgtgaccatccctaagctacccgttccaccagtgactgtacctaagctacccgttcctcctgtgaccgtccccaagctacccgttcctccagtgaccgtccccaagctacccgttcctccagtgacagtccctaagctacccgttcccccggtaactgtacctaagctacccgttccttcagtgaccgtncctaagctaccccttnctncgatttcagggctacccatacctccagtggta

SEQ ID NO: 165848 - DNA, 434 bp, Arabidopsis thaliana columbia
gagaagacccgtgtcatcttcctcagctgcccatcacttaacgaggagacgctccgaaaatcaaccagcactgtcctgagtgagatagtgcggacaaacgaaacttgccgcctatactccgaagcctgtgtatctctatgcaaagagatggacctgaaggtggttgatctttggaatgctatgcagaaacgggacgactgggcgacggcctgcttcacggatgggcttcatctgtctgaagaagggagcaagattgttgtggaagagatcctgaggatcctcaaggaggcagagtgggatccatgcctgcactggaaggcgatgccgacagagtttggggaggactcaccctatgatctcgtctcctccagcggccaatccaccgtcaacccctccgactggaccttccacaggactatccaatgggactgacc

SEQ ID NO: 165849 - DNA, 448 bp, Arabidopsis thaliana columbia
tcttcatcgatttctctcttccaaatctcccattagttgtcgaaccctagagttttcttcgacatgagtctcagcggtactcccatcggacggatcgagatggagcttttcgctgatacaaccccaaacacggcggagaatttccgtgctctctgtaccggcgagaaaggaatgggaaagctaggtaagccacttcacttcaaaggatcgatcttccaccgtgtgattcccggattcatgtgtcaaggaggtgatttcaccgccaagaacggaaccggtggtgaatcgatctacggtgctaagttcaaggacgagaactttatcaagaagcatacaggagctgggattctctcaatggctaactctggtcctaacactaacggatctcagttcttcatctgtaccgataagacgtcgtggttagatggtaagcacgttgtgtttggac

SEQ ID NO: 165850 - DNA, 430 bp, Arabidopsis thaliana columbia
gatcttgggcgttcacattatggcgccaaacgctggatagctgattcatgaggctgttcttgcgattaactacgatgcatcaagtgaagacattgctcgagtctgccatgctcatcccactatgagcgaggctcttaaggaagctgccatggccacctatgacaagcctattcacatctaaaagggaacaaggaagaccttaaaggagtgagccacctatgacaagccaaatcgatatcttaacctggttggattttggttcgcgtttctgtggtttagccttcaatttgtcctttatactgtgtttttattcggtaatgtttagatacgggttaagcctgatctttaataaaatattcaacattcactttcaacaaatcatcggtcctccctttttcatctctcttcttcttctccatcatcctcttgc

SEQ ID NO: 165851 - DNA, 454 bp, Arabidopsis thaliana columbia
caagaagaagaatccaaagacatgaaacttttctttattgttctcatctcttttctttccctcctccaagcatcaaaaggattcgatttcgacgaaaaagaattagaaaccgaagagaacgtatggaagctctatgagaggtggagaggccaccactctgtatccagagcctcccacgaggcaataaagcggttcaacgtttttagacacaatgtccttcatgtccacaggactaacaaaaagaacaagccttacaaactcaagatcaatagattcgccgacataacgcaccacgagtttagaagctcctacgctggctctaatgttaagcatcaccgaatgcttcgtggaccgaagcgcggatctggtggtttcatgtatgagaatgtgaccagagtttccagttctgttgattggcgagagaaaggagctgtcacttgagtcaagaattaac

SEQ ID NO: 165852 - DNA, 402 bp, Arabidopsis thaliana columbia
aaaaaacaaaaaacattttccatctctctctctttctctctcgcctgcttcaagaaatggatcggcaaagttccgatgacatcatgaaatttctcgacggcatggctagctccgacgatgttctttttggcttcctcgacgaaggaaaccactcaccggaggattataacttcgccgccggcgacgaatccgaagttgacaacgataccaccgattgtaattcagaagagaacagaaaattttggcaagaacacgaacaacttctccaggcgacactgtataggacaagttcaattgagacaaagataagacaagcaactaaggaagcgttgaaagtagttagatcaaagggtttggtatgtgtctgccggagaccggttaccgacggttgttgtagctgtt

SEQ ID NO: 165853 - DNA, 331 bp, Arabidopsis thaliana columbia
agaaaaacaaaaatggcggttctttgctcgtcgtcgacggtgatactctcttcttcttccgtgaaatcctccggaagtgagagaaagtctccgtttttagggttctctttaacggctatctcgaagccgtcggtacgagtcggcatttatgcgaattcgaaaagaggattgcaagtgaagtgtgaagctgagccgacgacgacgacttttcttgttccggcgaatcaacgatggatgttcgacgaagaagaagctaatggccctgacatctggaactacgacatggtattcaaaagctttagaccatgtgaacacggacaagccctggttt

SEQ ID NO: 165854 - DNA, 317 bp, Arabidopsis thaliana columbia
aaaaaaaaacacaaaaagtttcaatggccgccttcacattggctctctcctcccctgccttcgccggaaaggctgtgaacctttcccccgcggcatctgaagtcctcggaagcggccgtgtgacaatgaggaagactgttgccaagccaaagggtccatcaggcagcccatggtacggatccgaccgagtcaagtacttgggtccattctctggcgagtcaccgagctaccttaccggagagttccccggagactacggatgggacaccgctggactttcagctgatcccgagacattcgcaaggaaccgtgagcta

SEQ ID NO: 165855 - DNA, 257 bp, Arabidopsis thaliana columbia
  unsure (1)..(257): unsure at all n locations
gttcagttagtctttggtttcttcacacagtattgatantcacaacaccaaacgtgacacgcctcacagatcaattcagtaagatcgccattgaaaatggcttctccagacgtttcggagctcacaatattcaggtcaatggctccctcgctaagctcactctcgacaaatcctccggagctgggttggtgtcaaagaacaagtatcactatggtttcttcagtgcaagactcaagctttccgctggatttgcctct

SEQ ID NO: 165856 - DNA, 396 bp, Arabidopsis thaliana columbia
cacataaccacttctagtctctgcgaatcttcactagactctttgagaagctttcctctgtttctccgctgttatgggtagctccggcgacgttaactggaaacttgcggaccaccccaagcttcccaaaggcaaaactatcggtttgattgttctcgatggatggggtgaatctgatcccgatcaatacaattgcatccataaagctccaactcctgccatggattcccttaaagacgggaagcccgacacatggaggttgatcaaagctcatggtaccgccgttggtctccccagcgaagacgacatgggaaacagtgaagttggccacaatgctcttggagctggtcaaatttacgctcaaggagctaagctagttgatctcgcccttgcttc

SEQ ID NO: 165857 - DNA, 311 bp, Arabidopsis thaliana columbia
attcagttcgcccacgcgtcgtatactttagatgagcacattcacaatggtttatcatacggctccgcatatacctttcaagcctgcggatgagtggaacgcggctcaggcccagctgaatggaactgttcattgtgactaccctagttggattgtaattctctgccatgatatcaacgttcacatcccgcatcatattagcccaagaataccgagctacaatctccgtgcagctcatgagtctatacaagagaactggggaaagtatacattcttgtcttcattgaactggcgattgatttatacgataa

SEQ ID NO: 165858 - DNA, 309 bp, Arabidopsis thaliana columbia
tgaaaatattagtcaccggctctactggttacctaagtcacgactctgccacagttctcctccgtcgtggccactccgtacgtgcattggtccgccgcaccagcgatctctctgacttacctccagaagttgagctcgcctatggagacgtaacggattaccgttctctaacggatgcttgctccggttgcgatatcgttttccacgccgtatctttagttgagccttggcttcctgacccatctcgaatcatctcagtcaacgttggtggactgaagaatgtcttggaagctgtataggtgacgaata

SEQ ID NO: 165859 - DNA, 166 bp, Arabidopsis thaliana columbia
atcgttaactttcaaaacatcaaaaggaagagctccctagcgattggaaaagagactggtagcaaattcaagctggagagacaaggtgatgctattgttgggttccatggacgggtaggctcttgtattgatggtatcggggtgcattacgcttcacttccacctt

SEQ ID NO: 165860 - DNA, 298 bp, Arabidopsis thaliana columbia
cgaaaacgctagaacaataactttgatcgttcttcttcttctcttagaatcggaaacaatggcggatgaacataagcatgaagaatcttcacctaatttggatccagcagtggaggttgtagagagggaatcgttgatggagaagttatcggagaagatccatcacaaaggtgattcgtcgttttgatcatcattagatgactaaatctagaagaagtctttgtcttcgtcttcaaagtctttgtaatcgaaatggctatcgttatttctttagttattagaccttttcactaaattt

SEQ ID NO: 165861 - DNA, 400 bp, Arabidopsis thaliana columbia
ctcaaaaggttttacttcactcaaaaatggctttgtctcttatctttctagctctcttagtgttgagccctagtagtggtcacagccaacgttctccttcaccgggatactacccgagttcccgagtaccgacttcaccttttgatcgtgaattccgtactttatggggctctcaacaccaacgtagagagcaagacgttgtcactctttggctcgacaaatccactgggagtgggttcaagtctcttcgtccataccggtcgggctactttggtgcttccattaagctccaaccaggcttcactgctggagtggatacattcctctatctctcaaacaaccaagagcatcctggagaccacgatgaggtcgatttcgaagttctagggacaacgccagg

SEQ ID NO: 165862 - DNA, 160 bp, Arabidopsis thaliana columbia
  unsure (1)..(160): unsure at all n locations
cggacgcgtagggcatcgatcggttcatctgccataacgtcgtcgntcaaggatgaagctaagaaaggagattggttgcccggtttggcatcccctgattatctcaccggcagtcttgccgttgacaatgggtttgacccgtcggttttagctgtggctc

SEQ ID NO: 165863 - DNA, 242 bp, Arabidopsis thaliana columbia
  unsure (1)..(242): unsure at all n locations
cttatccgttcagctcatcttcttcttcttccncggtacccctgaattaggttcccagaatccgaaattcctaggaagagaacataacaatggcgcagatggttgcgatgcccgtagcgcactcgctctcactcatttgcaattgggcaaaatccaatcctctctctcgcaacactcttgcccttccagcttcaaacactcccaataagcagagtctaagcatcagatttgctcgtgttggt

SEQ ID NO: 165864 - DNA, 396 bp, Arabidopsis thaliana columbia
caagactctgacatcatcacatctattaccttctattttttcaagggaaaaacatctccaccctatggattggaaacgcaaaagaagtttgtactcaaggacaaaaacggtggtaaacttgttggcttccatggacgcgctggtgaagctttatatgctcttggagcatattttgctacaaccacaactcctgtgactcctgccaaaaaactatctgcaattggtggtgatgaaggaactgcatgggacgacggtgcgtacgatggtgtcaagaaggtgtacgtaggacaaggccaagatgggatatcagccgttaagtttgagtacaacaaaggcgcggagaatttcgtaggaggtgaacatggaaagcctactttacttggattcgaggagttt

SEQ ID NO: 165865 - DNA, 449 bp, Arabidopsis thaliana columbia
cttaaccaatatcacgtgtctaaaattttttgctcctgtttcactaaaacgttgacttttagataatggaactcaatctagaggtgatccaaagagaagtgatcaaaccttcatcacctgcacctcatgatcgccttcaactatcagtcatcgattttggcattgcagaagcttgcgtgcccatgatcttcttctacaacctcgcggatcttgcggaaaagtccccggatattgtctcaacaaggctgagaagctctctatcccaggcgctgtcacgtttctatcctctcgctggaaaaaaagatggtgtctccatcagctgtaacgacgaatgtactgtgtttacagtggcaccgcacatatcttcttttggctgatttccctaatgaacattgatgtcaacttttttaaagattttcgtttcctcccttttcaccaattgatttctt

SEQ ID NO: 165866 - DNA, 450 bp, Arabidopsis thaliana columbia
aaaacaactaaccaacgtagtaacgcgttggtatttgaataaacaaaatctcaatgagatcttcttctatgatggggccttcaacccatctcatttgcgctctaggagttgtcatcatggcaacaatggttgctgcatatgatccatacacagatagctctccaccaccactgtattcctcaccgcttcctaagattgaatacaaaactcccccactaccatacatcgacagttccccaccaccaacttactcaccggctcctgaagtagaatacaaatctccaccactaccatacgtttacagctccccacccccactatattactctccttctccaaaggttcattacaaatctccaccaccaccatacgtgtataactctccacctccaccatactattctccttctccaaaggtcacttacaagtctccaccaacccccatatgtc

SEQ ID NO: 165867 - DNA, 446 bp, Arabidopsis thaliana columbia
catctattcaatgcaccgttagaagaggcggtgtctcgccgtcggagtaggaaccgttggatcatcggaggccataatgttggccggtttggccttcaagcgtaaatggcagaacaagcgcaaagctgaaggcaaacccgtcgataaacccaacattgtcaccggagccaatgttcaagtgtgttgggagaaattcgctaggtactttgaggttgaacttaaggaagtgaaattgagtgaaggatactatgtgatggaccctcaacaagctgttgatatggttgatgagaacaccatttgtgttgcggccattcttggttccactcttaatggagaattcgaagatgttaaactcttgaacgatctcttggtcgaaaagaacaaagataccggatgggatacaccaatccacgtggatgcggcaagtggaggattcattgcaccgt

SEQ ID NO: 165868 - DNA, 427 bp, Arabidopsis thaliana columbia
ctcttctccaccgttggatctccttcttttgcttagtttctcagagatctccccaaagacttcccctctaccaacgccaaacgtgacgcctctctgcttattgggaaaacgcctcttgtgttcctcaacaaagtcactgaaggttgtgaagcgtatgttgcagccaaacaagaacatttccagccaacttgtagcattaaagacagaccagctatagccatgattgcagatgcagagaagaaaaaactaatcatccctggaaaaacaacactgatagagcctacttcaggaaacatgggaatcagtttggctttcatggctgctatgaaagggtacaggattataatgacgatgccttcgtacactagcttggagaggagagtgacgatgagatcctttggtgctgagctttgtctcactgatccag

SEQ ID NO: 165869 - DNA, 398 bp, Arabidopsis thaliana columbia
tttctcttatatctcaaaagcttttttcataattcggaaaaagcaacatcgtgggaagaggattcatcttctctctgtagcgttcatcaggatcctcgagagcttttggttcagtcgtcaataggcggaagagacgcgagaaaaagtacattacgaacgaagatcttaaaaaacacaacaaatctggagatctatggatcgcgattcaaggcaaggtctacaacgtctccgattggattaaaactcatcccggaggcgacacggtgattctcaatctcgttggtcaagacgtcaccgatgctttcatcgcatttcatcccggaaccgcttggcaccatctcgaccatctctttaccgggtaccacatcagagatttccaagtctccgaagtcttacgc

SEQ ID NO: 165870 - DNA, 233 bp, Arabidopsis thaliana columbia
ccttcctcacctgcacgtcatgatcgccttcaactatcagtcatcgattttggcacagcagaagcttgcgtgcccatgatcttcttctacaacctcgcggatcttgcggaaaagtccccggatattgtctcaacaaggctgagaagctctctatcccaggcgctgtcacgtttctatcctctcgctggaaaaaaagaaggtgtccccatcagctgtaacgactaaagagctgt

SEQ ID NO: 165871 - DNA, 131 bp, Arabidopsis thaliana columbia
aaaaacttgaatctgcaaatcgacttcccccggaatagcgatcggagatcggaaactgaggaattgctgctctctactcgcggtgtttagcttacgattggaatatggggaagatatttagctggatagtg

SEQ ID NO: 165872 - DNA, 440 bp, Arabidopsis thaliana columbia
ccccctcctccagtcaagcactactcttttcctctttttaccactcaccaccaccaccaaagaaacattacgtatacaagtctcctcctccggttaagcactactctccccctccggtttaccattccccacccccacctaaaaagcattacgtctacaaatctccaccaccaccggtgaagcactactcacctcctccggtttaccattccccaccacccccaaagaaacactacgtgtacaaatctcctcctcctccggttaagcactactcttctcctccggtttaccattccccaccaccaccaaagaaacactacgtgtacaaatctcctcctccttcagttaagcactactctcctcctccagtctaccattcctcaccaccaccaaagaaacatttcgtatacaaagtccctcctcctccggttaagcactac

SEQ ID NO: 165873 - DNA, 286 bp, Arabidopsis thaliana columbia
  unsure (1)..(286): unsure at all n locations
ggaagttgtgtctactgagaaagcaccagctgcnttgggaccttactctcaggccattaaagccaataatctggtttttctttcaggagttcttggacttatacctgagactggaaagtttgtttcggagagcgtcgaagatcagactgagcaggtactcaaaaacatgggggagatattgaaagctagtggtgctgattatttccttggtggtgtagactacaattatgttgcctgattcggctggcttcaagacagtaaactgagatatattgctaattctttc

SEQ ID NO: 165874 - DNA, 337 bp, Arabidopsis thaliana columbia
gtcgattttcaaaaccggagctcagagatctgatccggaaagtaaatcgcagccatggcggaaaaagctgtcactatcaggaccagaaacttcatgaccaacaggcttctcgccagaaagcaattcgttattgatgttcttcatcctggaagagccaatgtttcaaaggctgagcttaaggagaaattggcgaggatgtatgaggttaaggacccaaatgctatcttctgtttcaagttcagaactcactttggaggtggtaaatcttctggatatggtttgatctatgatactgtcgagatcgctattaagcttttagcctatattcagactcatt

SEQ ID NO: 165875 - DNA, 322 bp, Arabidopsis thaliana columbia
cagggacgagtatggttctggacgcgtttatccaggagaagctgcgaatagttgtcatcggtagtcgatcttttcagagagaatctgcttctgatgctcatccttatgatatccagcagcttgctcggctctagttcatgaaatttcctccaagcaaacacagagtgaaaaagagagggagacagatttaatctttttcttatttaagtgtttgatgattgtttctttttgctgcagaagaattgtttgttttgttgagtttatgtatcatggttctatataatgacatgaaatttttgctttcttattaaatattattaat

SEQ ID NO: 165876 - DNA, 351 bp, Arabidopsis thaliana columbia
gtataattggccattcccaataactctcaccatgatcctcatgggtttttgctcttccttagctgtgattctcatcaaagtcttcaaagtcgtcgagcctgtttcaatgtcacgcgagacttatctcagatccgtcgtaccaatcggcgcgttgtactcactttctctctggttatcaaactctgcttacatctacctctctgtttccttcattcaaatgctcaaagccctaatgcctgtagcagtttactcaatcggggttttgttgaagaaagagactttcaaatctcagactatgactaacatgctttcgatctcgtttggagttgctattgctgcttatggtgaagc

SEQ ID NO: 165877 - DNA, 228 bp, Arabidopsis thaliana columbia
ctttctccctcactcgcggcttcgcttcgtcaggatccgactacaacgacgtcgtcatcatcggcggcggtcctggagggtatgtggcggccactaaagcggcacaattcgatcctaagactacctgaatcgcaaagcgagaagctctccgaggtacttgtcttaactttggctgttaaacttctaaggcccttacctactcttttcacactgttccatgaattcata

SEQ ID NO: 165878 - DNA, 327 bp, Arabidopsis thaliana columbia
cttaatggggttcgtgttcttccgaagaacaagtgatctagacgaggtttgatccaaaaagctcgttgtgagctctctgcttcttctgattctgcgtctaatgcagctagcatctctgctcttgaacaactcaagaactctgcagctgatcgatatacaaaggaaagaagcagtattgttgtgattggacttagtattcacacagctcctgttgagatgcgtgagaagcttgctatacctgaagctgaatggccaagagctattgctgaattgtgtggtttgaatcatattgaagaagctgctgtgcttattacttgtatccgtatg

SEQ ID NO: 165879 - DNA, 338 bp, Arabidopsis thaliana columbia
tccgaaatataagaagaaagacaaccagttatgttcatcttctccttctgtcccctctctcaatcccatccccattcttctctaatcaaaccgacaccgtttctcagatatggcaagaaactacaccatcttcaccaccacatcttcatcaccatctcttacccatctcaccattctcgctacttggccgtttcaagagacgatgccgcgacgcctctttcttcttccgaccaaacccaagagacagagaccaaagaagtggaagacactatagagaaacgaagaatggaggggaagtttgctgttctaaacactggattctatgagtgatgatcatg

SEQ ID NO: 165880 - DNA, 288 bp, Arabidopsis thaliana columbia
gcaaaagaagaagagaaacaacaagaagtagttttggctccctctatgctctcctccgccgctgtggttacatccccggctcaggccaccatggtcgctccattcaccggcttgaagtcatccgctgcattcccggtcacccgcaagaccaacaaggacatcacttccatcgcaagcaacgggggaagaagtagctgcatgaaggtgtggccacctattggaaagaagaagtttgagactctatcttaccttcctgaccttagtgacgtcctatcgcctatggaatgt

SEQ ID NO: 165881 - DNA, 402 bp, Arabidopsis thaliana columbia
ctccgaaattataagaagtaaagacaaccatggtgagtgctaccttctccttctgtcccctctctcaatcccatccccattcttctctaatcaaaccgacaccgtttctcagatatggcaagaaactacaccatcttcaccaccacatcttcatcaccatctcttacccatctcaccattctcgctacttggccgtttcaagagacgatgccgcgacgcctctttcttcttccgaccaaacccaagagacagagaccaaagaagtggaagacactatagagaaacgaagaatggaggagaagtttgctgttctaaacactggaatctatgagtgtagatcatgtggttacaagtacgatgaatcagcgggtgacccattgtacccgatttcacccggttttc

SEQ ID NO: 165882 - DNA, 329 bp, Arabidopsis thaliana columbia
  unsure (1)..(329): unsure at all n locations
agtacatttcgcctagctttcttcgttccaggtcnccggatcttacttaattacccaaaacccttgaatccattactctgtgtgagcttaaatctcttaccttttatcactttcaatcgattgggtattaagttgtaaaggaaggaacttggaatcatgaagctagggcttttcactctctcgtttcttctgatcttgaatctaccaatgggtagattctgtgtcgtttaagaaccctctcaaagtttcatcacctgattcaatcataggtttctacaataagtgccatctggtgtttttcgaagttcttttatttatgatgatttcct

SEQ ID NO: 165883 - DNA, 445 bp, Arabidopsis thaliana columbia
ctaaactcgaaccctaaagaaaaacaaaaaaggttgttatagcttctactctctctctttcttcaaccaaacctcagagacttttcgattcttccttccatggctcagccatctccgcagctcctatctccatcggtctcaaaccacgatctttctccgttcgcgccacaaccgctggttacgacttgaacgctttcacgttcgacccgatcaaggaatcgatcgtgtcacgtgagatgacgagaaggtacatgacggatatgatcacttatgctgagactgatgtcgtcgtcgttggtgctggatctgctggtttatctgctgcttatgagatcagtaagaaccctaatgttcaagttgccattattgagcaatctgttagtccctgtggtggtgcttggctcaggggtcaggtttttctcgtcatgattgttcgcataccagc

SEQ ID NO: 165884 - DNA, 412 bp, Arabidopsis thaliana columbia
ctacagaagaagaggaagaagaagaagtttctgtgtcaacaagaagaagaagaaacagtctcatctcgccggagaagaagaaagatgtcgtggcaatcatacgtcgatgaccatctcatgtgcgaggtcgaaggcaaccacctcacacacgccgccatcttcggccaagacggcagtgtctgggctcagagctcagctttccctcagttgaagcctgcagagatagcaggaatcaacaaagactttgaagaagccggacatcttgccccaaccgggctattccttggcggtgagaagtacatggttgtccaaggtgaggctggagccgtcatccgagggaaaaagggacctggtggagtcactatcaagatgactactcaagctctagtctttggtatctatgatgtaccgt

SEQ ID NO: 165885 - DNA, 448 bp, Arabidopsis thaliana columbia
attaactaaagagccttttacttgcgccacactctcaccgcaatggccgcctcgacaatggctctctcctctcctgctttgaccggaaaggccgttaagctatccccggcggcctccgaagtatttggaaccggccgaatcaccatgcgcaaagcctccaagcccaccggtccatccggcagcccatggtacggatccgaccgagtcaagtacttgggtccattctccggtgagcctccgagctacctcactggagagttccccggtgattacgggtgggacactgccggtctatccgccgatcccgagaccttcgctaggaaccgtgagctagaagttatccacagcagatgggccatgctcggagccctaggctgcgttttccctgagctattggctaggaacggagtgaagttcggagaagccggttggttcaaggctggttcac

SEQ ID NO: 165886 - DNA, 328 bp, Arabidopsis thaliana columbia
aaaggacaaacatataataacaacaacttctcttctttactcgtttctctctctctcttttcttttcttttcttcaagcgcttctttaatggcggctgttcaatgtctcactttcctcttcttgtttcttctccaaaacgcgacgtcagcttcacctctccctctcttccggcggccgatccaaagcaaccacagcaacttcgtgaagcatcctcgccgaagtcaggtggttttcccggtgaatcatagtagttgtgatctgttcgccggcgagtgggtgcgggatgagacttacccacttttaccgtctaaagaacgcggccgagga

SEQ ID NO: 165887 - DNA, 378 bp, Arabidopsis thaliana columbia
  unsure (1)..(378): unsure at all n locations
ggagaatcttcgaatcaacggcggagaaaaggcgctanctcgcctctcatcacgatccaacatcatgactcgtcccttctccgccgccttcagccgattaatctcaacggacacaactccgatcacaatcgagacttcgcttcctttcacagctcacttatgtgatccaccgtcacgctccgtcgaatcatcgagtcaagagcttctcgatttcttcagaaccatggcgttgatgcgacgtatggaaatcgcagccgattcgctttacaaagcgtagctaattcgagggttttgtcatctctacgacggtcaagtagctgcagctataggctatggaagctgcgattacaatgattgactcgatttatactggttatc

SEQ ID NO: 165888 - DNA, 224 bp, Arabidopsis thaliana columbia
gagttacgaaaagatacgataatggcaacatctgcatccttaatcctccttcgccggccaaacggctctcaagccctccaacgaactcctccgcaaggttggtgtatccggtggtggccgtgtgaccatgcgttgtaccgtcaagtctactcctcaaagcatctggtacggaccagaccgttccaagtacttaggaccattctcgtagattacaccgttcttcc

SEQ ID NO: 165889 - DNA, 379 bp, Arabidopsis thaliana columbia
cctgaatccattcagttggtatctgagcacgcttcagtaaacaacaaggtgttcacaatgaacctttctgctccattcatctgtgaattcttcaaagatgtgcaggagaagttcttgccatacatggacttcgttttcggcaatgagacagaggcaagaaccttctctagggttcatggctgggagactgaagatgtcgaacaaatagccatcaagatttcacagcttcccaaggccacaggaacatacaagaggaccactgtgattacacagggcgctgatccagtggttgttgctgtagatggaaaggtgaagaaatatccagtcattcctctcccataggagaagctggttgacaccaacggtgcaggttgatgca

SEQ ID NO: 165890 - DNA, 209 bp, Arabidopsis thaliana columbia
cattcaaactccaacgaattctctgcgatccatccaaaggcgatggcaacatcgaagagggagaatctaataggggcattcaaaggcttgtctctttcttagactccgacattttcttagaggcgatttagagttaatcccccaaaacctttggcacggagactcttacttttgttaaatccttccagcttctctttcaatcacaattt

SEQ ID NO: 165891 - DNA, 265 bp, Arabidopsis thaliana columbia
agagagagctaaagctacagtgtacagatttatcgagaggactctccagaaactccggcgcggcggcgatattcgcgattctactcattctcgccgttcataactggtccgtcgccgtatcttctcaatccaccgaattcgccggagatttccctccattcgaaacagagtgccgcggtacaattgccgagtgctctgtttccgccgccctcggagacggaggagatctattctacggcggaggagatatgggagaggtgttcta

SEQ ID NO: 165892 - DNA, 113 bp, Arabidopsis thaliana columbia
cactctcagaggagcagagaaggaactaactaccttgaggcgcttgctttcaatccagaagatcagcattagcttgaagaacagcattcgcgacatgaatgacagatacgggt

SEQ ID NO: 165893 - DNA, 432 bp, Arabidopsis thaliana columbia
acgatcactttcaccagcttcctgttgccccccagtccatcaccattccccatcgttttcactacccgctgctcatgtggttgatggtgaagctgactcttcagcagcacgaggcctaccttattcgcatccatttctttttagtcaccggtctaatcaaaggtcctcaccagcaattaacagttaccaaggaagcagcacccatatgcgtgaacagcatcatgcttataatcatcagaggcaacaacatcatgccaatggtcccactctcgcatcacctctcatctccatgacaagaaggggattaccgccgtcgtcacctcccccaccaatgccagatcagaacgttggattcttcatttatccaggtggacaccatgaaccagaaaccgatcaaattcatgcatgggagagagattggttcccacattt

SEQ ID NO: 165894 - DNA, 444 bp, Arabidopsis thaliana columbia
cttccactgctctctcaagcgccatcgtcggtatttcattcatccgtcgttccccagctccaatcagtctccgttcccttccatcagccaacacacaatccctcttcggtctcaaatcaggcaccgctcgtggtggacgtgtcacagccatggctacatacaaggtcaagttcatcacaccagaaggtgagctagaggttgagtgtgacgacgacgtctacgttcttgatgctgctgaggaagctggaatcgatttgccttactcttgccgtgctggttcttgttcgagctgtgctggtaaagttgagtctggatctgttgatcagtctgaccagagtttccttgatgatgaacagattggtgaagggtttgttctcacttgtgctgcttaccctacctctgatgttaccattgaaacccacatagaagaagacattggttaag

SEQ ID NO: 165895 - DNA, 444 bp, Arabidopsis thaliana columbia
  unsure (1)..(444): unsure at all n locations
gatcactgttgactttgaaaactgcttcatcttcctcctcttatgtcttttctcacgcctctcttacgatcttttcttcaggaaaacaaaagactcacgagctggctgtgctcttcctccgagccctccttcattaccaatcattggtcatcttcaccttatactctttgtcccaatccaccagtctttcaagaacatctcatctaaatatggacctctcctccacctccgcttctttaacttccccatagtcctcgtctcctcggcctcaacggcctacgagatcttcaaggcccaagacgtgaatgtctcctctcgccctccccctcctatcgaggagtctctcattntaggatcttccagcttcatcaacactccctatggagattactcgaagttcatgaagaagttcatggtccaaaagctgcttggaccacaagcact

SEQ ID NO: 165896 - DNA, 431 bp, Arabidopsis thaliana columbia
caacaacaaatcttaaacgttttactttgagcatcacttctcaacctcaatggccgcctcaacaatggctctctcctcccctgccttcgccggtaaggccgtcaagctttcccccgcggcatctgaagtccttggaagcggccgtgtgacaatgaggaagactgttgccaagccaaagggcccatcaggcagcccatggtacggatctgaccgtgtcaagtacttgggtccattctctggcgaatcaccgagctaccttaccggagagttccccggagactacggatgggacaccgccggactttcagctgaccccgagacattcgcaaggaaccgggaactagaaagtatccacagcaggtgggccatgctcggagccctaggctgcgtcttccctgagcttttggctagaaacggagtcaagttcggag

SEQ ID NO: 165897 - DNA, 262 bp, Arabidopsis thaliana columbia
ataagaagaagaagaaactacaatagctaatcatccaaatagaagtaagagaaaaggcagactctaactgtggatgtggctgctcctgcaaatgaggagactcttgcagtcgcgagaagaactacaacatggagtgcgacaactgtagctgtcgctcaaactgcaaatgcagggcaaactgtaactgccgatgaaactattacggccgaaaataatacatatggcactacaattggggaatatctggtttctcataactaat

SEQ ID NO: 165898 - DNA, 428 bp, Arabidopsis thaliana columbia
cttaaacgttttactttgagctgcactactcattctatttgccgcctcaacaatggctctctcctcccctgccttcgccggtaaggccgtcaagctttcccccgcggcatctgaagtccttggaagcggccgtgtgacaatgaggaagactgttgccaagccaaagggcccatcaggcagcccatggtacggatctgaccgtgtcaagtacttgggtccattctctggcgaatcaccgagctaccttaccggagagttccccggagactacggatgggacaccgccggactttcagctgaccccgagacattcgtaaggaaccgtgaactagaagttatccacagcaggtgggccatgctcggagccctaggctgcgtcttccctgagctttaggcttgaaacggagtcaagttcggagaggcggttt

SEQ ID NO: 165899 - DNA, 318 bp, Arabidopsis thaliana columbia
cgatcttatcgcaagaggtaagagtaagatgactaaaaggactagctcctaagtccgatgatgtctacctaaagcttctcgtcaagctttaccggtttttggtgaggagatctaacagcaacttcaatgctgtgattctgaaaaggcttttcatgagcaaagtcaacaaagctcctctttcactctctaggcttgtagagttcatgactggcaaggatgacaagattgctgtgttggttggaactatcactgatgatttgagagttcatgagattcctgccatgaaggttactgccttgtggcttactgtgagggctt

SEQ ID NO: 165900 - DNA, 79 bp, Arabidopsis thaliana columbia
  unsure (1)..(79): unsure at all n locations
aaacagtgaacagattgtggcgggntctggtgttagcagcagcagcggaactgaaaacattgtcagggatatcgttgtt

SEQ ID NO: 165901 - DNA, 409 bp, Arabidopsis thaliana columbia
  unsure (1)..(409): unsure at all n locations
gaagaacaatggcttcctctatgctctcttccgttactatggttgcctctccggctcaggccactatggtcgctcctttcaacggacttaagtcctccgctgccttcccagccacccgcaaggctaacaacgacattacttccatcacaagcaacggcggaagagttaactgcatgcaggtgtggcctccgattggaaagaagaagtttgagactctctcttaccttcctgaccttaccgattccgaattggctaaggaagttgactaccttatccgcaacaagaggattccttgtgttgaattcgagttggagcacggatttgtgtaccgtgagcacggtaactcacccggatactatgatggacggtactggacaatgtggaagcttcccttgttcggntgcaccga

SEQ ID NO: 165902 - DNA, 446 bp, Arabidopsis thaliana columbia
cataaatccaaaaccactcatttttctattactttaatttttcttagagaagaagaagaagaagcaaaatggccacaagcgcatcagctttgctctcaccaaccacattctccactgcaatctcccacaaaaaccctaactccatctcattccatggccttcgtcccctccgtctaggtggctcctcctccgccctacccaaactatcaaccaccgggagaaaatcctcctccgctgtcgtgagagctgagctaagcccttccatcgtcataagtctcagcacaggtctctccctcttcctcggccgtttcgtcttcttcaacttccagagagagaacgtagcaaaacagggcttaccggagcagaacggaaaaacccatttcgaagctggagatgatcgtgctaaggagtacgtcagtctcttgaaatcgaacgatccaattgga

SEQ ID NO: 165903 - DNA, 400 bp, Arabidopsis thaliana columbia
caattagcttctcatagggttgggtaggagtgcaatcgatgggtcgatttcttcaacccggattctcaatcggttgagtgggcaacgccatggtcgaagaccgccgagaatttcgcgaactataccggcgatcagggataccccggtgggagattcttcgatccgttgggtctcgccgggaaaaaccgcgacggtgtttatgagccggactttgagaagctggagaggctgaaattggcagagattaagcactcgaggctcgcaatggttgccatgttgatcttttactttgaggccgggcaggggaaaacgcctctcggtgctcttggtttgtgagaaaacggcatgatgtttttgattttgtaaatacaatttacctttcaaaaacctaatgattctc

SEQ ID NO: 165904 - DNA, 449 bp, Arabidopsis thaliana columbia
gaagaacaatggcttcctctatgctctcttccgttactatggttgcctctccggctcaagccactatggtcgctcctttcaacggacttaagtcctccgctgccttcccagccacccgcaaggctaacaacgacattacttccatcacaagcaacggcggaagagttaactgcatgcaggtgtggcctccgattggaaagaagaagtttgagactctctcttaccttcctgaccttaccgattccgaattggctaaggaagttgactaccttatccgcaacaagtggattccttgtgttgaattcgagttggagcacggatttgtgtaccgtgagcacggtaactcacccggatactatgatggacggtactggacaatgtggaagcttcccttgttcggttgcaccgactccgctcaagtgttgaaggaagtggaagagtgcaagaag

SEQ ID NO: 165905 - DNA, 412 bp, Arabidopsis thaliana columbia
cactactcaacctcaatggccgcctcaacaatgttctcttttctcccctgccttcgccggtaaggccgtcaagctttcccccgcggcatctgaagtccttggaagcggccgtgtgacaatgaggaagactgttgccaagccaaagggcccatcaggcagcccatggtacggatctgaccgtgtcaagtacttgggtccattctctggcgaatcaccgagctaccttaccggagagttccccggagactacggatgggacaccgccggactttcagctgaccccgagacattcgcaaggaaccgtgaactagaagttatccacagcaggtgggccatgctcggagccctaggctgcgtcttccctgagcttttggctagaaacggagtcaagttcggagaggcgggttggttc

SEQ ID NO: 165906 - DNA, 290 bp, Arabidopsis thaliana columbia
acagaaccacaggtggaggaggacggcaccaccgtgtcgtcgtttggaacggaggaggaaacggtctgtgcgcacttgccttaaacttctccatattcttagtaatcggaagaacaggcgctgtaacaatccgggttgctggggttctcaaagactggattctcatagccctctccactgtcatatttcctgagtccacaatcactgggctgaatataactggatatgctatagcgctctgtggagttgtaatgtacaattacatataaattaaggttgtataagcgatt

SEQ ID NO: 165907 - DNA, 251 bp, Arabidopsis thaliana columbia
  unsure (1)..(251): unsure at all n locations
gtcggaaatctctcaccgaccactaccgaagtctatnctagttaagccttnnccggctacggaaacgtagtagatgcaattgtaatgagagacagatacacagataggtccaggggttttggatttgtcacttacaataccctgtcttaataatgagcacactctcatgtcttggttactctaattctactttgacaaaatgtgcgattacacctttgctttttgcaaattttttccattaaaagtgttta

SEQ ID NO: 165908 - DNA, 353 bp, Arabidopsis thaliana columbia
gatagcaatctctttcccctagttcctaagtttcctccctcacaacaccaagctctgttctttcttctgacaagaacttcttcttcgtcgatttcgttggattatactgtaagtccaagaggaccagacgcagacttcgtggagactcttcctcttcctcacgctcttcttcttctctctctcgtctttcctctgttcgagccgttatcgaccttgaacgtgttcatggcgtctctgaaaaggatctctcctctccttcagctttaagacctcaggttgctaatttggaggatatattgtctgaaagaggagcttgtggagatgggcttatagcaaacttagattacttacct

SEQ ID NO: 165909 - DNA, 380 bp, Arabidopsis thaliana columbia
attgttgagggactcatgaccactgtcctctctccactgctactcagaagacagttgatggtccatcaatgaaggactggagaggtggaagagctgcttccttcaacattattcctagcagcactggtgccgccaaggctgttgggaaagtgttgccatccctcaatggaaaattgaccggaatgtctttccgtgttccaaccgttgatgtctcagttgttgatctcaccgttagacttgagaaagctgctacatacgacgaaatcaagaaggccatcaaggaggaatcttgtggcttaatgaaaggaattttgggatacactggggatgtggctgcgtctacctacttttgtgttgtcaactggtctagcattttcttt

SEQ ID NO: 165910 - DNA, 448 bp, Arabidopsis thaliana columbia
gagaaacgagagttccgtaatcattttctttagtagttcctgatcgcgtagctcaagcgaaaaaaatggcgtcgtttgatgaagcaccaccaggaaacgccaaggccggtgagaagatcttcaggaccaagtgtgctcagtgtcacaccgtcgaagcaggcgccggtcacaaacaaggacccaatctaaacggtctatttggaagacaatctggtacaactgctggttactcttactctgctgctaacaagaacaaagctgtggaatgggaagagaaggccttgtacgattacttgctcaaccccaagaagtacataccaggtaccaagatggtgttccctgggctaaagaagccgcaagaccgtgctgatctcatcgcctacttgaaggaatctactgggcctaagtgaatctgatggtggattgattctgagttggttaagctctc

SEQ ID NO: 165911 - DNA, 437 bp, Arabidopsis thaliana columbia
gatctctctttcttatacatccatatcaccgttgatgcctcgccgagacgtcctcttcctctcactcctcctcgtcatcgccaccgtctccgctgtcgcattagccgacgatgaagcagattgtgtctacacattcttccttagaaccggatcaaccttcaaagccggtacagattcgatcataagcgctagagtctacgacaaatacggagactacatcgggatccgaaacctagaagcatggggtggtttaatgggaccaggttacaactactacgagaggggtaatctcgacattttcagtgggaaagcaccatgtcttccgagcccagtctgttcattaaatctgacctctgacggctccggtgaccaccacggttggtatgtcaactacgtggaagtcacgacagccggagttcatgcaaagtgctcgtacc

SEQ ID NO: 165912 - DNA, 336 bp, Arabidopsis thaliana columbia
agtagcaagagcaggagtgtgtcacctgctagatccattccccgcgttcacggccccttagtcgttctcgctcgctatacagctctgtctcaagatctggctcactgctacgagctggggattggatctagatgggtcatctagatggattcttggactggatttacaaagctggattagcatgaacttgaacttctgtttttacggtctggtctggtctggtactccgcgcgtatcagctgtaggatctgatcgcaaagttttggactatgattactctgattcctcaatatatttatctttttgacaataagggattctgtgttgaagttcttc

SEQ ID NO: 165913 - DNA, 451 bp, Arabidopsis thaliana columbia
ctccgggaacttatcatgaatccactggtttctgctgtttcggttattagctgctgggttggctgttgggcttgcttctattggacctggagtcggtcaaggtacagctgcgggtcaagctgtcgaaggtatcgcgagacaacctgaggcagaaggaaaaatacgaggtactttattgcttagtttggcttttatggaagctttaacaatttatggcctggttgtagcattagcgcttttatttgcgaatccttttgtttaagcccagaaatcacaaaattctggattttttttgtagtttttttaattctatcaagatttaactcctacaattattcattgagacaacaattcttgggaaggactaatttgaggatggggaattagcacattcgattccctttcttgctttcctctattcttttagtttaatagaaactttttttaagga

SEQ ID NO: 165914 - DNA, 460 bp, Arabidopsis thaliana columbia
ccacgcccacgcgtgcgtagcgagttggatgatcgctccgaaatctgctttactttcctcctcttatgtcttttctcacgcctctcttacgatcttttcttcaggaaaacaaaagactcacgagctggctgtgctcttcctccgagccctccttcattaccaatcattggtcatcttcaccttatactctttgtcccaatccaccagtctttcaagaacatctcatctaaatatggacctctcctccacctccgcttctttaacttccccatagtcctcgtctcctcggcctcaacggcctacgagatcttcaaggcccaagacgtgaatgtctcctctcgccctccccctcctatcgaggagtctctcattttaggatcttccagcttcatcaacactccctatggagattactcgaagttcatgaagaagttcatgagccaaaagctgcttggaccac

SEQ ID NO: 165915 - DNA, 423 bp, Arabidopsis thaliana columbia
gaggctacgacccacgagagcgtatcatctttgtgcttcctgcaaattgttctttgttgttgatctttctcctccatcaacaaacatgggtaagacacgtggtatgggagctgggcgtaagctgaagagactccgaattaaccagaggtgggctgacaagcagtacaagaagtctcacttgggaaatgagtggaagaagccttttgctggttcttctcacgctaaaggaattgttcttgagaaaattggtattgaggctaagcagcctaactctgctatccgtaagtgtgctagagttcagcttatcaagaatggaaagaagattgctgcctttgtccccaatgatggttgtttgaactacatcgaggaaaacgatgaggtcttgattgctggatttggtcgttagggtcacgctgtgggaga

SEQ ID NO: 165916 - DNA, 319 bp, Arabidopsis thaliana columbia
atctatttctttgccatctgtacaatctccatactctcctgattcatcagttttaagtcttcttcaagtcccagggatcatcaatccaatggctcagatcttagcagcttctccaacatgtcagatgagagtgcctaaacactcatcagtcattgcatcatcatccaagttatggagctctgttgtgttgaaacagaagaagcagagcaacaacaaagtcagaggctttagagttcttgctctccaatctgataacagttctgccaatagagctgagactcttctcaagttagagacgctaccttactctgacaggatc

SEQ ID NO: 165917 - DNA, 320 bp, Arabidopsis thaliana columbia
gatagagagaaacgatggcgtcgaactctcccttgagctgtggcatagccgccgtgtacccttcgcttctctcttcttccaagtctaaattcgtatccgccggagttccactcccaaacgccgggaatgttggtcgtatcagaatggctgctcactggatgcctggcgagccacgaccagcttaccttgacggttctgctcctggtgactttgggtttgacccacttggacttggagaagttccatgcgaacctcgagagatacaaagagtcagagctcattcactgtttatggtgctattctcgctgttcctgttattt

SEQ ID NO: 165918 - DNA, 351 bp, Arabidopsis thaliana columbia
ccagaagtcgacgacaacaatggcaccgaagattggagttaaagtggcttcaaagaagaagccggagaaagttaccaacccattgtttgagagacgcccaaagcaattcggtattggtggcgctttgcctcctaagaaggatctttctcgttacatcaaatggcctaagtcaatccgtcttcaaaggcagaagcgtatccttaagcagaggttgaaggttcctccagctcttaaccagttcaccaagacccttgataagaatctcgccaccagcctcttcaagattcttctgaagtataggccagaggacaaagccgcatagaaggaacgccttttgaacaaggctcaagc

SEQ ID NO: 165919 - DNA, 321 bp, Arabidopsis thaliana columbia
ctagtttgaggagatttagaggagtgtttggttttttggataacaatatcccaaactgaaaatggctaagtcatatggagctatcttcctcttgaccctcattgtcctcttcatgcttcaaaccatggttatggcctcaagtggatctaatgtgaagtggagccagaaacgttatggaccaggaagcctgaaacgtacccaatgcccatcggaatgtgataggaggtgtaaaaagacacagtaccacaaggcttgcattacgttctgcaacaaatgctgcaagaagtgtctctgtgtgcctccgggttactatgggaacac

SEQ ID NO: 165920 - DNA, 456 bp, Arabidopsis thaliana columbia
aaacacataaaagagagatttaatacaaaagaaagagaaaaaagaaagatatggcaggactcatcaacaagatcggagacgcactccacattggaggaggcaacaaggaaggtgagcacaagaaggaagaggaacacaagaaacacgttgacgagcacaagagtggtgagcacaaagaaggtattgttgacaagatcaaagacaagatccacggtggtgaaggtaaaagccacgacggagaaggcaaaagccacgacggtgagaagaaaaagaagaaggacaagaaggagaagaaacatcatgatgatggtcaccacagcagcagcagtgacagcgacagcgattaaggtgaggaagtgaggaggatcgcttgaataaaacagatctggttctggctattattaattaatgttgctgtatgttcttatcatcttagaaagaggttaaagacaggag

SEQ ID NO: 165921 - DNA, 337 bp, Arabidopsis thaliana columbia
tcgcgcaaggaagatgaaggtgatagatattatcctgtcattagccgacgaaggcaaaacagcgttttccttcgaattcttcccaccaaagacagaagatggagtcgacaatctctttgagagaatggatcgaatggttgcttatggtccaacgttttgcgatatcacttggggagctggtggatctaccgcagatctaacgcttgatatagcttcgaggatgcaaaacgttgtttgtgttgagagtatgatgcatcttacgtgtactaacatgcctgttgagaagattgatcatgctcttgagactattagatctaatgggattcaaaatgtgctt

SEQ ID NO: 165922 - DNA, 422 bp, Arabidopsis thaliana columbia
cgtcgttggtgacaaaagttatcagaaatcaggtattgttctcaggggttggattgatgcacgcacctattgcattgctaccaactgcattcccagaagcttattggaagcaagcttgtaatgttactcctcttttcaatgaattgattgatcgtgttagcttggatggcaaattcttacaggatagtctctctagaacgaagaaagttgatgtctttacatctagacttcttgacattcactccaagatgctagaaagaaataagaaagaggacattcgtttgggtttacaccggtttgattatatgcttgacgaagaaacacattcacttcttcagattgagatgaatactatctcgtgttcgtttcctggccttagtcgtcttgttagccagctacatcagtcattgcttcgatcttat

SEQ ID NO: 165923 - DNA, 360 bp, Arabidopsis thaliana columbia
acaaccaaaaaaaagaaaacacaaaaacaaagattataatgtcttcctcaaccatggctttgtcctcccctgccttcgccggaaaggctgtgaagcctgccgcatcagatgtcctcggaagcggccgtgtgaccatgaggaagactgtcgccaagccaaagggtccatcaggcagcccatggtacggatctgaccgagtcaagtacttgggtccattctccggcgagcccccgagctaccttaccggtgagttccccggtgactacggatgggacaccgctggtctatccgccgacccagagaccttcgccaggaaccgtgagctagaagttatccacagcagatgggccatgctcggag

SEQ ID NO: 165924 - DNA, 461 bp, Arabidopsis thaliana columbia
ctcttgatcatggttcgggccgagatcgaaaccgtagctctctttccgttctgttaaagaggctgttactcttttcggcgagagaattcttctcggagataattacatcagcaagtccgtagagagaagcagttgcaaaagcattcaagatgagctggttgaagcaaaggagaatctgaagaaagctgaggaagagaacaaggttttgtctcagcttatcgaaagccttacacaagagcttgaaaccactaaagaaaagcttaatcactcactcagaaatttcccagaacaccctcaagtcgaagatgacctcaagtttatagaggaatccacggttaacgaaccggacaacataaccgagatcaagatgaaccggtttgatcgaaatgaagtgtatggtgatcgtctagagaagaggcgttcggtgaagtttgctaacccaccattgttaacgaaggtca

SEQ ID NO: 165925 - DNA, 151 bp, Arabidopsis thaliana columbia
tcgacctagagagctcatgcagcagtggactgctcattgctgatactaaacatggctgattgctcgtcgagtgtgactagtgcccgctcagttgtcaccgccttacgaacatgctgttcagggcttatgactgccgttaggactgcaccag

SEQ ID NO: 165926 - DNA, 416 bp, Arabidopsis thaliana columbia
acctactcaatctcagatctcgttaaacctagatacctcgagaaaaaccgtatcaatggcgccgaaagcagagaagaagcccgctgagaagaaaccagcttccgagaagccggtggaggagaaatcaaaagccgagaaagctccggcggagaagaaaccaaaggccggaaagaagctcccgaaggaagctggtgccggaggcgacaagaagaaaaagatgaagaagaagagtgtcgagacttacaagatctacatcttcaaggtgcttaagcaagttcatcccgatatcggaatctccagcaaagcgatggggatcatgaacagtttcattaacgatatcttcgagaagcttgctcaagaggcgtcgaagcttgcgaggtacaataagaaacctacgatcacttctcgggagattc

SEQ ID NO: 165927 - DNA, 387 bp, Arabidopsis thaliana columbia
aaccaaaaagatggcctcggcgatggttacatctctcaggctgaggccaaacttctccgcagccacgtcaccctcctcctcttcttccgccggaaatgtcaagtaccgacccgccgtaattctcccggtaaataatctccgtcctttgattgagacaactatggcggaaaatgtgtggttccaaattttttttttattattttcactgaattttctgtttcttatagttttaagtgttttcctgcattttcctttagaaacatatttaaagtccaaaacttggtttttgtgttatatgattcaatggtgggtttagtgtcactatggctgctttgtggaattggtttattagggtttagggaataatacaggagactacaagaagct

SEQ ID NO: 165928 - DNA, 384 bp, Arabidopsis thaliana columbia
gccccacgcgtccgccaaatcccagatctatatgtgcctctggcccgttgagtccccgagagattgatcaccatcacttttgtaccttccttgtactacctatggcgtctgctagcttcgttaagcctaacaccctctcttctccatggatcggccaacgctcctttgctcacacctctgcttcttcttctcctcctcctcgagtctccttcgcgatccgcgccggtgcttactccgacgagcttgttaaaaccgccaaaagcattgcatcccctgggagaggtatcttggcgatcgatgagtccaatgcaacctgtgggaagaggcttgcttctatcggcttggataacaccgaggacaaccgtcaggcctacaggcaacttc

SEQ ID NO: 165929 - DNA, 448 bp, Arabidopsis thaliana columbia
caatctactctctttaaaagaaattcgtaagtactatcaagaagcagaagatggcccaaaaggtggaagcacaaggagggaaaggagccaacctatgggacgatggatcgacacatgacgccgtgaccaagattcagctcgcagcaggcatagacggaattcaatatgttcagtttgattatgtcaagaacggacaacccgaacaagctcctcttcgtggtaccaaaggccgtgttctcccagctgatccgtttgtgattaaccatccagacgaacatctagtttctgtagaaggttggtatagccctgaaggtatcattcaaggaattaagttcatctccaacaagaagacttctgatgtcattggatccgatgagggtactcacttcactctacaagttaaagacaagaagatcattggctttcatgggtctgccgggggcaatct

SEQ ID NO: 165930 - DNA, 439 bp, Arabidopsis thaliana columbia
aaaaaaacaatggcaactcaagccgccgggatcttcaactccgccataacaaccgccgcaacctccggcgtcaagaaactccactttttctcaacaacccaccgtcccaaatccctctccttcaccaaaaccgcaatccgcgccgagaaaacagattcctccgccgccgctgctgcagcccccgccacgaaagaagctcccgtgggattcacgccaccgcagctagacccaaacacaccgtctccgatcttcgctggaagcaccggtggtcttctacgtaaagcgcaagtggaagagttctacgttatcacgtggaactcaccgaaagaacagatctttgagatgccgacaggaggagcagcgatcatgagagaaggtccgaatcttctgaagctagcgaggaaagagcagtgtttagctttggggacaaggcttagat

SEQ ID NO: 165931 - DNA, 441 bp, Arabidopsis thaliana columbia
aaaaaaaagccgcaagaatagagcttgcgattatcggaggattcaatcatcggcggaggacgaaaatgagtgttatcaggctgcaccagtaccaagtcgtaggacgagctctcccgacggagaaagatgagcaaccaaagatttacaggatgaagctatgggcaacgaacgaggttcttgccaaatccaagttctggtactacttaaggaggcaaaagaaggtgaagaagagtaatggacagatgctagccatcaacgagatctttgagaagaacccaacaacgatcaagaattttggaatctggttgagataccagagccgtacaggttaccataacatgtacaaagagtaccgtgacactactttgaatggagcagtggagcaaatgtacactgagatggcgtcaagacacagagtaaggttcccttgcattcagatta

SEQ ID NO: 165932 - DNA, 456 bp, Arabidopsis thaliana columbia
gttcagcaagctctttgcaaagaaagagatgcgtatcctcatggtgggtctcgatgcagctggtaagactacgatcttgtacaagctcaagcttggagagatcgtgactacgattccaaccattggtttcaatgtggagactgtggaatacaagaacattagctttaccgtgtgggatgtcgggggtcaagacaagattcgtccattgtggaggcactacttccagaacactcagggacttatctttgtggtggacagcaatgatcgtgaccgtgttgtggaagccagagatgagcttcacagaatgttgaacgaagatgagttgagagatgctgtgcttctcgtttttgctaacaagcaagatcttccaaatgcgatgaacgccgctgagataaccgataagcttggacttcactctctccgtcaacgacacttgtacatacagagcacatgtgc

SEQ ID NO: 165933 - DNA, 449 bp, Arabidopsis thaliana columbia
gccgggttctcgggtcggatcttctaagtctagctagggataatggctactgtcactactcatgcctcggcctcgattttccgaccttgtacttcaaagccaagattcctcaccggttcttccggtaggttgaaccgcgacttgtcgtttacatcgatcggttcatcggccaaaacgtcgtcgttcaaggttgaagctaagaaaggagaatggttgcccggtttggcatcgcctgattatctcaccggcagtcttgccggtgacaatgggtttgacccgttgggtctagcagaggatccagagaacttgaaatggttcgtccaggcagagctggtcaacggacgatgggctatgctcggtgtcgctgggatgcttttgcccgaagttttcaccaagatcggaatcataaatgtttctgagtggtacgatgctgggacagagcagtattt

SEQ ID NO: 165934 - DNA, 442 bp, Arabidopsis thaliana columbia
gatcaaatcattaccttgtcttgaacaagaaggtatgatctggatttggcccggtgatgagccacctgcacctatacttccttctttacagcctccatcagggtttttaattcatgctgagcttgtaatggacctcccggtggaacacggtttacttctagataatctcttggatcttgctcatgccccattcactcatacatccacttttgcaaaaggctggagtgtcccaagtttggtgaagtttttaacacctacctcgggtctccaaggatactgggatccatatccaatcgatatggaatttaaaccaccgtgtattgttttatcgacaatcgggatatcaaaacccgggaaactagaaggcaaaagcacacagcagtgtgcaacacatcttcatcaactccatgtctggttaccttcttctaaaaacaagacaaga

SEQ ID NO: 165935 - DNA, 448 bp, Arabidopsis thaliana columbia
gaaatcacaactatcgacaatgactaattgatgagaagaatagaaacaaaagaaaacaaatttcttcagactttgtattctaccaaacaagaaatctaagccaaaacattcaaagcgatttctcaagcaaaactagaagatgaagcaaaagatcttgataagagtgactatgaccgatgacaaaacccgagcaaaagcaatgacaaaagcagttcagtttaaaggtaagaagacctttccacaaaaaagattaccaaactctgttggatctaatggttttataggcgtgtcagccgtggaaataaaaggcgatcacaggaaccagatagaggtaaccggcgttgaagttgatatgatccctcttatccaaatactcagaaagaaagtagcgttcgcagagcttgtgagcgtgaccaaagttgaaccaccaaaagaagaagacgagaag

SEQ ID NO: 165936 - DNA, 316 bp, Arabidopsis thaliana columbia
gctgttgtcttgaaggacccggacttatcaaatatgtatatagtcagaagactagcagctttagagggatctgatatggcctcaagcgatgagaacgatgagccttttgttctcgaaaaggatcagcgctgcgtcgttgctgagaatcaagacatgaaatgtaaagaagcatatgatagtcgaacatttggttcaatttcaaaggcggacatagaggtaagagctatatattgtctgaggacagcagaggatcatggtccagtaagcaacagagcatttgccatgtacgaggattccgcaatcctggcggtagaac

SEQ ID NO: 165937 - DNA, 288 bp, Arabidopsis thaliana columbia
accgcagtatcgaaagacacggacgaatcaagtatgcatatagtcagaatactgacacttctataggcatctaatatgacctccggcgcacatgacacatgtgctaccgccgttccagaggatcacggctgcctcgtagctatgcataataacaccaaatgctaacatgcataacacactcacgcatttggctcaatgatagacacggacattgacatgggcgccatatactgccatcggacaacctacctttaaagcctagtcggcggcaaaccataacccatctac

SEQ ID NO: 165938 - DNA, 445 bp, Arabidopsis thaliana columbia
aaaggacaaacatataataacaacaacttctcttctttactcgtttctctctctctcttttcttttcttttcttcaagcgcttctttaatggcggctgttcaatgtctcactttcctcttcttgtttcttctccaaaacgcgacgtcagcttcacctctccctctcttccggcggccgatccaaagcaaccacagcaacttcgtgaagcatcctcgccgaagtcaggtggttttcccggtgaatcatagtagttgtgatctgttcgccggcgagtgggtgcgggatgagacttacccactttaccggtctaaagaatgcggccgaggaatcatagatccgggattcgactgccagacttacggcagacctgactccgactatctcaagttccggtggaaacctttcaactgcaatgtccctagattcaatggagtgaagtttcta

SEQ ID NO: 165939 - DNA, 449 bp, Arabidopsis thaliana columbia
atcagaattacaaacaaaaatggttttgcaaaagcttcctctcattgggctgcttttgctcctgaccatcgtcgcctctccagcaaatgcagatggacctgtttgcccgccgtcgaacaaactaagccgggcaagtttccctgaaggttttttatttggcacggctactgcggcataccaggtcgaaggtgcgattaatgaaacttgtcgtggaccagccttatgggacatctactgtagaagatatccagagaggtgcaataacgataacggcgatgtggccgttgatttcttccatcgttataaggaagatatccaactaatgaagaatctaaacacagacgcctttagaatgtctatcgcatggccaagaatatttcctcatgggagaaaggagaaaggagtgagtcaagctggtgtgcaattctaccacgacctcatcgacgagc

SEQ ID NO: 165940 - DNA, 452 bp, Arabidopsis thaliana columbia
aagaaagtcgtcatctttggtcttcctggggcttacacgggagtttgttcacagcagcatgtgcctagctacaagagccacattgataagtttaaagccaaaggcattgattctgtcatctgtgtctctgttaatgatccctttgctatcaatggttgggcagagaagcttggtgccaaagatgcaattgagttttatggagattttgatgggaaatttcacaaaagcttggggctagacaaggatctctctgctgcattgctcgggccacggtctgagagatggtcggcttatgtagaagacgggaaggttaaggcggtgaatgtggaagaagcaccgtctgacttcaaggttacaggggcagaagtcatcttaggacagatctaaaaagtatttccagagttgctgtttcttctgagttgcaactgataataagtttgatccgaacatgt

SEQ ID NO: 165941 - DNA, 412 bp, Arabidopsis thaliana columbia
acaagatctacatcttcaaggttctgaaacaagttcatccagatattggtatttcaagcaaggctatgggtattatgaacagtttcatcaacgacatcttcgagaaattggcatcggaatcttcaaagctcgctaggtataacaagaagccgacgattacttctcgggagattcagactgctgttagactcgttcttcctggtgagctcgctaaacacgctgtttctgaaggaaccaaggctgttaccaaattcacaagctcttgaattagtaaattagggtttgtatactctgaatttgattctgatgttgtcataacttgtgttaggatttctctttcgttttattaagctttaattatcattctccgttgtaaaagaatcttatgaatctgtcttcgaatcaaaagttc

SEQ ID NO: 165942 - DNA, 270 bp, Arabidopsis thaliana columbia
cccaaaacacaaaacaaaaaaaaatggcttccactgctctttcatagcgccatcgtcggaacttcattcatccgtcgttccccagctccaatcagtctccgttcccttccatcagccaacacacaatccctcttcggtctcaaatcaggcaccgctcgtggtggacgtgtcacagccatggctacatacaaggtcaagttcatcacaccagattgtgagctagaggttgagtgtgacgacgacttctacgttcttgatgctgctgaggat

SEQ ID NO: 165943 - DNA, 451 bp, Arabidopsis thaliana columbia
ccggtcctatgcagctgttccggttatgcctttcttcaattatcaaatcaaagatatcggtttggaagaaggcgaatttgatcttccttttctttcttctaaggaagcttattctaccattttactcattcacactcttttgcattatacttccattgacaatgttcatacccgaagccgagcttccgttgtggatcatctgctatgttcctatcttcatttcgcttctcaacattctcccgtcacctaaatctttccctttcttagtcccttaccttcttttcgaaaacacaatgtcaataaccaagttcaacgccatgatctccgggctgtttcagtttggatcggcttacgagtgggttgtgacgaagaaaaccgggagatcatcggagtccgatttgctagcgtttgctgaaaaggaagagaagttgcataggagaaacctcgagtc

SEQ ID NO: 165944 - DNA, 458 bp, Arabidopsis thaliana columbia
gcaaaaccaaggtggggtctcaatgcttggaactatgtcctgatgccagacgtcgggttatgcagtacccacatggaaatgggccaaatggccttggtacaagtccatctgctggaaattttgcaccactaccccttggtactagtccgtcacaatttactccaaatacaaacaatcaatttttagctgggtctcctggacaccatggcccgacatctccagtaagaaacagctgccatgggtctcctttgggaaagatggctgcatttagtcaaattaatagaagaatgagcgctggatattctggaggttctcagtcgcaagattcttccttgtcacaagcccaagggcatgggatggataacttttatcaaaatgaggggtattctggacaattctctggttcaccttcacgccggcaactggattctggtgtcaaaaatcgtaaacaggacaca

SEQ ID NO: 165945 - DNA, 368 bp, Arabidopsis thaliana columbia
ctagggttttgttatcaaagttttcgtttttttttggggcgtagaaagggtttatggtgatgaaacgaatatttcgtggactagagtttcagatctgggctcttcacccagaatttgaagaaacaaccctcggctgtctgagtaaatcctttttcgcccactataatgaaagtttttgttttggcgttgcctttgaattgcctatgatgataaaaacaattatcttagcggatttcagtgaggtctttttaaaatcaatgatctgaattgctacacacacctgggctatattagcccgatttgcatttgccgatcgtggaaatccggtttgcgctgatgataaaatagcactaccgtgcgtgaagggc

SEQ ID NO: 165946 - DNA, 442 bp, Arabidopsis thaliana columbia; identical to SEQ ID NO: 131708

SEQ ID NO: 165947 - DNA, 445 bp, Arabidopsis thaliana columbia
ctcagatcaatctcaactacaatctttcttggtttttcagcattgactctggtttcacttaccttgttagacttcatttctgtgaggtttcttcgaatatcactaagatcaaccaacgggtgtttacaatctacctcaacaatcaaactgctgagcctgaagctgatgtgattgcttggactagttcaaacggggttccgtttcacaaggattacgtggtgaatcctccagagggaaatggacagcaagatttgtggcttgctcttcatcctaacccagttaacaagccggagtattatgattctcttcttaatggagtggagatattcaagatgaatacttctgatggtaatctggctggtaccaatcctatacctggtccacaggtgactgctgatccatctaaagtcctacgcccgactactaggaaatcgaaaagcaatac

SEQ ID NO: 165948 - DNA, 426 bp, Arabidopsis thaliana columbia
gcgaaagctcttaaagtgcttgattcgtgtggctccgacataatcgaactcggtgttccatactctgatccattagctgatggtccagcaatccaggctgctgcgagacgttcgttacttaaaggaaccaactttaactccattatctctatgcttaaagaggttattcctcagttatcttgtccaattgcattgtttacatattacaatccaatcctgcgacgaggagtagagaactacatgactgttataaagaatgctggagttcatgggcttctggttcctgatgttccactcgaggagactgaaactctgcggaacgaagctcggaagcatcaaattgagctagtactgctcacaacacccacaactccaaaagaacgaatgaatgccattgttgaagcctctgaaggatttatctatctc

SEQ ID NO: 165949 - DNA, 441 bp, Arabidopsis thaliana columbia
tgcttagcagcgacagagctcgacgattcagtttaaccctagtagaataatggtgaagctcacggctgatttgatctggaaaagtcctcacttcttcaatgctatcaaggagcgagaattggatctacgaggtaacaagattcctgtaatcgaaaacttgggtgctactgaggaccagttcgataccattgatctgtctgataacgagatagttaagctagaaaacttcccatacctcaaccgtttaggaactttactcatcaataacaatcgtatcacccggataaatcctaaccttggagaattcctaccgaagcttcactctttggttcttacaaataacaggcttgtgaatttggttgagattgatccccttgcctccattcccaagctgcagtaccttagtttgttggataataatatcaccaaaaaggcaaatta

SEQ ID NO: 165950 - DNA, 442 bp, Arabidopsis thaliana columbia
ggagaaagaaaggtgctgtcactgaaatcaagattcaaggaaaatgtggaagttgttgggcattctctaccgtagcagctgttgagggaatcaacaagatcaagactaacaaactggtctcactgtctgaacaagaactagtggattgtgatactaagcagaatgaaggttgtaacggaggtcttatggagattgcatttgaattcatcaagaagaacggtggtatcaccactgaagatagctatccttatgaaggtatcgatggaaaatgcgacgcttcaaaggataacggcgtgcttgtgacgatagatgggcatgaagatgtacccgaaaacgacgaaaatgctcttcttaaggctgttgcaaaccaacctgtatctgttgcaattgatgctggaagttcagatttccagttttattcagagggagtgtttacgggatc

SEQ ID NO: 165951 - DNA, 452 bp, Arabidopsis thaliana columbia
cttgagagagagaacacagacgataccaactttcttcaatctcgttgccgcagtataattatctcattcctcggatatatctctccttctgcggcggcgacaagaagctacaagaataaaaagtctgttttctctcttttcaagaaaccacttacttcgaaaatggctcgttctatctctaacgttaagatcgtatctgctttcgtctctcgtgaactctccaatgctatcttccgacgtggttatgcggccacggcggcgcaagggagcgtttcgagcggtggaagaagtggagctgttgcttcggctgtgatgaagaagaagggagtggaagaatcaacccagaagatttcttgggttccagatcccaaaaccggttattacagacccgaaaccggttccaacgagattgacgcggctgagctacgagcagctcttttgaacaacaagca

SEQ ID NO: 165952 - DNA, 455 bp, Arabidopsis thaliana columbia
aaaaaaaaacccttcaaaacatttccttattctttcttcttcatctacaacaatggctggagttgcctttggttcctttgatgattcattcagcttggcttctctaagagcttacctcgctgagttcatctccactttactctttgttttcgctggtgttggctctgccattgcctacgcaaagctgacgtcggacgctgctcttgatacaccgggactagtggccatcgcggtttgtcatggttttgctctcttcgtggccgttgcaatcggagccaacatctccggtggccatgtgaacccagccgtcacttttggtcttgctgtcggtggtcaaatcacagtcatcaccgagttttctactggatcgctcagcttctcggctccaccgccgcttgtttcctccttaaatacgtcaccggtggattggcggttccaacccacagcgttgcggc

SEQ ID NO: 165953 - DNA, 456 bp, Arabidopsis thaliana columbia
gagatttcggaagattcgatcgatttgggggttttagggtttaatctcaactgctaatcaatggcgccacctccaggactttactccggtaccagcactcttgctctggttgctcgtgcttcggctttcgggttgggtctcatctacggcaacatcaagctcaaggctttaaagataaagaagaattcgcagattaaggccgaagcaaaggctcatcactaaaccaactcttcttctccttctcaataagattatgaagccaagtgattgttatctctaaatgtagttcttttcctccttaagctatatctccctcggtgacattttttccatctttctgtttttttaatcaaaatcttctgtctgacaaagcaatcgtatacccgttttggtttaaacctgagttcttctttggtactttcctgctattcaataaacaccatatttttatcaaaa

SEQ ID NO: 165954 - DNA, 414 bp, Arabidopsis thaliana columbia
aagacgaacacttacaaaaaaaaatctctttgtgtgctttagcgatcgtaacaatggcgaacgaggtgattcttcttgatttctggccgagtatgttcgggatgaggacaaggatcgcattgagggagaaaggtgttgaatttgagtacagagaagaagatctaaggaacaagagtcctttgcttctccagatgaatccgattcacaagaagattcctgttctcatccacaatggtaaaccggttaacgaatctatcatccaagttcagtacattgacgaggtctggtctcacaagaaccctatccttccttctgatccttacctgagagctcaagctaggttctgggctgatttcattgacaagaagctgtatgatgctcagaagaaggtgtgggcgacaaaaggtgaggaac

SEQ ID NO: 165955 - DNA, 455 bp, Arabidopsis thaliana columbia
gtggtgtgaaatttgctagtaagctagtggagatttttctctccagcaacaagcatgtagctactagaatgagtgcggtggcttatcttgctagcttcttggctcgtggaaagtttttgcctgtttcctttgtggctagcatgttgaaaaggttgatagatgagtgtgtgggttactgcagaacttgcaatgatgatactaggcctgaagcacatcagattttcttctccggatgtcaggcaatcatgtatgtgctctgcttcaggatgagatccatcttggatgttcctcgctttcggtcccagcttacaccattggagtcaatattaatgcacaaactaaacccattgatggtatgccttccatcggtagttgcggagttccttagacaagctaaagaaggtggtctgttcatcgtctcagactcggtcattttcgatgacctacttgagtct

SEQ ID NO: 165956 - DNA, 412 bp, Arabidopsis thaliana columbia
gtttcttcttatctccttcctccgaccaaaacttcgacttctctcttattttcaccctcagagagtaaccatggatgccttgacctcgagtttggttcgatctcccatcgtaccatcgagaacttccgacaacggttctggatctatgttccttaccgccagtggccctggattcacgcgttctggttcttcaagacttcaacttcgtttaaggcaaaacgcgtctgctagatcctcaagatcattacagagcttaacaacgactgctaaaactcggagaagttttgtggttagagcttcttcagcgtctaatgatgcttcatctggttcttcccccaaaccgatcgctccgctccagctgcaatcgcctgctggtcagtttctgtctcagattttggtgagccatcctcat

SEQ ID NO: 165957 - DNA, 306 bp, Arabidopsis thaliana columbia
tcttcatcttcatcttcctcctcgcggttccattttgaggagtctctttttgtttcttgaagatagactgggcgtcacggagcagctgagtatatgctacgagtgttgcattccggaggctgttctttcagatgattggcagtagctatattatgcttgaacggtgccataatgggcatctgtctaatgaagcgctgctgctcatggtttcttttgatctcgtttctctctgcactaacgaatgaaaatgaagcaattagtcctgatggtgaggcgcttttgagttttagaaatggagtcttggct

SEQ ID NO: 165958 - DNA, 423 bp, Arabidopsis thaliana columbia
ggatctcggagacccgccaaagcacgtttgccattatctttcagaaaatgaattcctattcgaagagtgcataaccgcatggataagctcacactaacccgtcaatttgggatccaattcgggattttccttgagggatattggtaaggaattggaatgtaataatatcgattcataatggattcatatcgatacagaagaaaaggttctctatcgattcaacaagtgctgtacttatgggaaagcgatagagaaagagaaaaaaaaaaaacgaagatttcacatagtgatttttttttttttttttgatcaaaaataaatctgattgaatttatttcgtaccccttcgctcaatgagaaaatgggtcagattctataggatcaaacttatgggacttaagaatgatgggagggattttaatc

SEQ ID NO: 165959 - DNA, 455 bp, Arabidopsis thaliana columbia
ctctacgatcagatagataaaagaagtcaacatctatgtcttgggacgatggatcacacgcaaaggtgaagaaagtgcagctaaccttcgatgagatcatctactcaatccaggtcacgtacgacggagccaccgctcttcaatcccagcttcgcggctccgttggtcccaaatctgctgagttcactttggctccggacgagtacataacggccctttctgcttacggcaaatcgttgagtacgcaagaagttattacggcgttgactttcacaaccaacaagacttcttatggaccttacggtaccaaatccggtttccagatttctgctccggaagccaccggtaaacagatctccggtttccttggtaccagcggcaatgttctcaacaccatcgacgttcactattctcccatacctactggaggaactggcaccggatgaactggcacc

SEQ ID NO: 165960 - DNA, 453 bp, Arabidopsis thaliana columbia
ccaattctcctaaagtttgttttctctcgcctctaagaaacaatgttgagtgcctttttgggtcatgcgtcagctattgctatagcttcaccagtagtcagcattgtgggcatcaggcgacaaacatatggagagatgaaacacgtgggggtcgttgaaaaacaaagagaaatgccaacatttcctcaatcgtttcctatgaacggtggtgatggtccgcacagttacatccacaattcctcttatcaaaaagtagcgatagatggcgctaaagaaaagacaagtgaagccatcctaaaaaacctcgatctcgaactcttgaaccgtaattctgatgaaaatatcttaagaattgcggattttggttgttctattggacccaacacgttcgaagtagtccaaaatattatcgatacggtgaagcaaaaaaacctaaaagaaaacaatgcctat

SEQ ID NO: 165961 - DNA, 324 bp, Arabidopsis thaliana columbia
agcaacgagccgaggcattggagggattgcttgtattcagtgcaaggttgcttcaagatgagaggtacgatgagctcaatgtcttattaagaccatttggtccaggcaaagtttcacccagagaaacagcgatttggttgtccaagagcttcaaggaaaccactactactaagctgggagattgagagacggatttctaattctaacctgttgtgacttgaaaattttccacctttaacagtttatcaagaaaattgtatcaaagtttaactacctaggttgtcttctttaatgagtagcggaccctctttgtctgatacattg

SEQ ID NO: 165962 - DNA, 435 bp, Arabidopsis thaliana columbia
  unsure (1)..(435): unsure at all n locations
gcgagatgggctatgttaggagcagctggtttcatcattctctgaagctttaaacaaatatggcgctaactgtggccctgaagctgtctggtttaagactggtgctttgcttcttgatggaaacacattgaactactttggcaagaacatccctatcaaccttgttctcgccgtagttgctgaggttgttctcctcggtggagccgagtactacagaatcaccaacggattggatttcgaggacaagctacacccaggaggtccatttgatcctctaggccttgctaaggaccctgagcaaggagctcttctcaaagtcaaagagatcaagaacgggagattagccatgtttgcgatgctcggtttctttatccaagcgtatgttaccggagaaagtccttgtgagaaccttgcanagcatctcagtgatccttt

SEQ ID NO: 165963 - DNA, 410 bp, Arabidopsis thaliana columbia
cttctggtttggctataatcttcaactctccttcactaaaccctgtcacaactcaagcgaccttcctttcttcgaatcggattcgttcctctcctcgcgttttcagtggatttcacagcctccgacgtcgcggcttccggcgattctctcaaaatgttatccccgaccggtttaatagcttctcatgtaattgcttatccgccgtatccaccagcactatcgattacgagttcacggatggtggcaaagaggtggaattaagattgaggttaaagacaggtgagatactttctccaaaggatatatctgttgacgcagatggaacatcgttagccgttaaagaaaagcggaatggattgctgattacacttctagagactaaccatctctttgagaagattatgccctct

SEQ ID NO: 165964 - DNA, 381 bp, Arabidopsis thaliana columbia
gtagctgagacggtatgatctgtatacttcccttacaccgtagaactcagcaacaatggccgttaccttttcagatctacacacagaggagggtgtcaaatccgaggaggagcacctagccggaaaaacctacatctccggagatcaaatggctgtggatgatgtcaaggattacgctgccggtccagtgaaacccagtgaagccttacgcaatgctggcaagcggtactagatacgaggcgttccagcctgctaagggatcccctggagaggccagtgcagtacaagacgaggtctttgctgctgatgactccagatgaaggagcatgtgacgctagcaacagtcttcttatgttaagcgaccacacgtatcattatggt

SEQ ID NO: 165965 - DNA, 441 bp, Arabidopsis thaliana columbia
gcagctgagtctctctgatctctctacttccctcacaccctaaaactcagcaacaatggccgttaccttttcagatctacacacagaggagggtgtcaaatccgaggaggagcacctagccggaaaaacctacatctccggagatcaaatgtctgtggatgatgtcaaggattacgctgccggtccagtgaaacccagtgatgccttacccaatgctagcaagcggtactatgtacgaggcttcccaacttgctaagggatcccctggagaggacagtgcagtacaagacgaggtctttgctgctgatgctacagctgaagaagcatgtgcagcctgcaacagtctctgatgtaaacgaccacatgtatcattatggtgacctgtaccttcttcttacaagggatggaggaaagggctattgtgccttaagaggcaccatg

SEQ ID NO: 165966 - DNA, 325 bp, Arabidopsis thaliana columbia
gcggtcttgtcatacatggcaacttctctccaagtccgtcgcaacttttcttcaaccggcgaagattgcgcgcttctccttctcgtaatgtccatctccgatcaaaccaaaccgtgggcaagtcctttgggttagactcttcacaagctaggctcacgtgctctctccactctgacctcaaagacttcgctggaaaatgctccgacgccgccaagatcgccggttttgctctagccacctctgctctcgttgtctcgggggccggtgcggagggagcaccaaagaggctaacgttccaccagatacagagcaagacttacatggc

SEQ ID NO: 165967 - DNA, 349 bp, Arabidopsis thaliana columbia
agtggagctcgccgccaaattggaagagcagaatatcgatcttgataaacctgaggttgaagatgatgatgacaatgatgaggatgattccgaggacgatgacgaggcggagggacatgatggggaggccggtggccggtcaaagcaaagcagaagtgagaaaaagagtcgtaaagctatgttgaagcttgggatgaaaccaatcactggtgttagccgtgtcaccgtcaaaaagagcaagaatatcttgtttgtgatatcaaaacctgatgtgttcaagagtccagcttcagatacatatgtgatctttggtgaggccaagatagaggatttgagctcgcagctgcag

SEQ ID NO: 165968 - DNA, 449 bp, Arabidopsis thaliana columbia
atttcctttcgatattgaagcttacaatagacattatcaaattgaagagaagtatataataaaccagtctagagagcgtcgcaacaatgttgaagaagattatccacgtcgtaacaaaagaaaatacatcaagagagagttacgtgattcaaatgcacatcatgaattgcaagcagatctagtcaaacatatcttggcgaaattcagaatgtcctgaaattaaagagatttttatgtctttatgtgttgtgtgatttaagagtttaattgtttgtgagttaatccgtatgtatttgaagtgaagtgtgtttattattaattgtgttgtgtgcttgtatcatattgtaaatcaaaatttgtaatattttttttgttttaataataattatttgttttggtcaaaaaaattagtttagaacataaaatatttaatattaaaattaatatta

SEQ ID NO: 165969 - DNA, 439 bp, Arabidopsis thaliana columbia
tcccaattcaacgattatcaatctgaagcaacattcttatacaaaaaccaagttccagttgcatcgtagcaacagaagaactctatcgataaactgcgtaaacagtggcggtgatgaagagaagattactcagccgttggatggagtggagataagattcaaaagaggatccagaaggaaaatgagggaagagggttcaggagaaggaggaggacaaagcgggaagaaaaaagagactgttcaaaagccatgggaagagatgacattgaatgagaaggcattggagctttatgttggagagaaaggtttgttgttttggctaaacaaattggcttacgcgtcgatatacattgtcattggaggttggaattttttcggtttgttggaccggcgtttaatctttatcaactcggtacaccggctcttgatcctaagaaca

SEQ ID NO: 165970 - DNA, 429 bp, Arabidopsis thaliana columbia
taaaaaacaagtggaagctttaaaacgagagggagagagctataaatggcgacgtcgggaacgtacgtgacggaagttccgctaaaaggatcggccgagaaatactacaagaggtggaagaacgagaaccatgtcttccctgatgctatcggccaccacatccaaaatgttaccgttcacgaaggcgaacatgactctcacgggtctatcaggagttggaactacacatgggatggaaaggaggaggtgttcaaggagagaagagagatagacgatgagaccaaaacgttgacgttaagaggacttgagggtcacgtgatggagcagctcaaagtgtacgacgtcgtctaccaattcattcccaaatctgaggatacctgcatcggcaaaatcactttaatatgggagaagcgcaacgatgattcccca

SEQ ID NO: 165971 - DNA, 396 bp, Arabidopsis thaliana columbia
attggaatggaggaaagtagtacatgaacatcattgatggagacttctctcttgtatgtggcttcacgctggtatcattcatcttcttacaaacatgttgagtttgatcttcattggtatccgccttgagcagcaatttggcttcataagagtcgggttgatatacttaatatcgggtctcggtggaagcatactttcgtcgcttttccttcaagaaagtatctctgttggtgcttcgggtgctctctttggacttcttggagcaatgttatctgaacttcttaccaattggactatctatgccaacaaggcggctgctctgatcacacttctgttcatcatcgcaatcaacttagcattaggcatgcttcctcgggttgacaactttgcacacat

SEQ ID NO: 165972 - DNA, 363 bp, Arabidopsis thaliana columbia
cactcacagaaaaacctagaaagctctagagagtaagagagagagagatggaaggtaaagaagaagatgttagagtcggagctaacaagtttccggagaggcaaccgatcggaacttcggctcagagtgacaaggactacaaagagccaccacctgcgccgttgttcgagcccggcgagctagcttcatggtccttctggagagctgggattgctgagtttatagctacgtttttgttcctgtacatcactgttttgactgttatgggtgtgaagaggtcaccgaacatgtgtgcttccgtcggaatccaaggtatcgctttggctttcggtggtatgattcttcgctctcgtttactgcacc

SEQ ID NO: 165973 - DNA, 271 bp, Arabidopsis thaliana columbia
acaacatgattgagaggtcaaccaaccttgaccttctcacgggaccaactcttcttgaggctcttgaccagatcaactagcccaagaggccattatacaagccccttcgtattccacttcaggatgtctacaagattggcggtataggaacggtgccagtgggacctgttgagactggcatgatcaagcctggtatgaacgtgacctgaggtcacacagggacgcccactgccgcctagtctgatgcgatgcaacacaagggcgtttttga

SEQ ID NO: 165974 - DNA, 425 bp, Arabidopsis thaliana columbia
acaacatgattgagaggtcaaccaaccttgactttttcacgggaccaactcttcttgaggctcttgaccagatcaactagcccaagacgccattatacaagccccttcgtattccacttcaggatgactacaagattggcggtataggaacggtgccagtgtgacctgttgagactggcatgatcaagcctggtatggacgtgacctgtggtcacacagggtcgcccactgccgcctagtctgatgcgatgcaccacaagggtgtttttgagacaattcatgtctacagaggtacatttagtgcttacacagatgctcgaaaagatgctagtagaggatgctggaactctagctgcaaggatgatccaactaagggtgccgccaacttcaccttccaggtcatcatcatgaaccaccctggtcag

SEQ ID NO: 165975 - DNA, 450 bp, Arabidopsis thaliana columbia
gaagaagaaagaagatgcagtcggcgaatgaaattatcagtgacatggccagtacggccaaggagaaactcaacatcggtggcgcaaaggcacaaggtcatgcggagaagacgatggcaaggaccaaaaaagagaagaagttggcccaagagcgagagaagtctaaggaggcgcaggccaaagctgacctccatcaatccaaggctgagcatgctgcggacgctcaggttcacggccaccatcttcccggtcactccacctaccctacccgagccaccggagctaattacccgccgggacagatctaaaactagctctatagctatattaagattagccgccttgtttaacaatatgatatgtacgttttttctaatataagatcagcagtcatgaaattttcttgggtaggttcttttgatagtttatgcataaacaataatgtaatct

SEQ ID NO: 165976 - DNA, 383 bp, Arabidopsis thaliana columbia
atttacaataagtgtttcttattttctttccaagatcgaaatgccaaatgtatacgagagacacaagtatgttacatcataatatacaaggtgtctccatagttttggtattagcacacaagtcaagagtatgccctacaaggaaaagattttttagatatcctattcaccttgtatctacagactgacaagacactaggactcctgttattcccaatcagcgtcgaagaatccagcatctttcatttctgaatagtagacattctccaaattcagatcttcctcctggaaaaagtctgcaagaaaagtaacatacaaaagaggaagatagaaggcgtggtaacaaacacttgtgatcccatacaaccataatccaaaatgag

SEQ ID NO: 165977 - DNA, 428 bp, Arabidopsis thaliana columbia
gtacggcaaaccagtgtccaactatctatggtgtctctgagacattctcgttcaaagctggtaagtacacaggcaagaagttctgcttcgagcccacttccttcaccgtcaaggcagatagcgtcagcaagaatgcaccgccggatttccaaaacaccaagctcatgacccgtctcacttacacactcgatgagatcgaaggacccttcgaggttggttcagacggaagcgtgaagttcaaggaagaagatggtatcgattacgcagcagtcacagtccagcttccgggaggagaacgcgtgccgttcctcttcacggttaagcagctcgaggcttcagggaaacccgaaagcttcagtggcaagttcttagttccatcgtaccgtggctcgtcctttttggacccaaagggtcgtggtggatccact

SEQ ID NO: 165978 - DNA, 439 bp, Arabidopsis thaliana columbia
gcttgacgtatttgggattgtactttgttggtatttctttgtttggctggaactgtcttgctccatggttctcttattctagccgttctgctattcgccgaaagtttaaccttgagggaagctttgaggctatgaacaggtcttgtggttgctgcggtggctgcatagaggacgagatgcaaagggaacacttggagacgacttgtgactttgtgacacatgtcctttgccatacatgtgccctttgccaagaagggcgtgagctccgcaggaaggttcttcacccaggtttcaatgctcagtccaccgttgttgtgatgccacccatagaacaaaccatgggtcgtaagtgaagcttacatagagtcgagtggtctaaagagcacttgtaatattgagtcgactgaagcttacacacgttgtgaaaacaagtgtttct

SEQ ID NO: 165979 - DNA, 444 bp, Arabidopsis thaliana columbia
ttttcgacaaggaaactggtcaaaagtgttccaggtattgtatttgcacgaggaccagctgtagctgtgcttattctcttggagtcagatggtgagacttatgcggttctcactgaacaggtatctctatttatgttcgtgttgttctattttttaacaaagatcaacattatacgggttgttttggaaggttcgggttcctactgggaagattgttctggaattacctgctggaatgttggatgatgataaaggtgactttgttgttactgcagttcgcgaggtcgaagaggagattggtataaacactgaaaaaagaagatatggttgatctcactgctatccttgacccatctactggttaccggatcttcccttttcctggaggctgtgcttgaaacgatatccgtgtttttttaccgaggtctagttaagaaaggaaac

SEQ ID NO: 165980 - DNA, 451 bp, Arabidopsis thaliana columbia
tccatcctttgctcttgatggttccaggagccattggggctcagttcgctttcttgcttcccacgggaacaccctctaacgtcgttgggttcacgacagggcatatagagatcaaagacatgatcaagacaggcttgcctctcaagatcgctggaaccatctttctctccatcttgatgcccactcttggggcttacgtttttgcatcaatgggaggagtttagttctacaagccaagcacaagaccatgtacacaattgatttattgtactatattgtttactaccgtaatacatatgtagatatatagtcaatggaatgggaaatttagatgaggtcaaaattcacaaaatcgggccatttttgtaacccgccccattataggtttcggaaccattgttttcttttatggtttcaaacgaacggtaatttttaggcctttttttttttt

SEQ ID NO: 165981 - DNA, 398 bp, Arabidopsis thaliana columbia
ggaaactcggcaccacgaggtaatgtgtttggagtagttgatgatgagtctcatatctcccacaaaagatgttaaagaagcagtggactgggttctacacgagactggggatcctgatatttcagtgcacatgcgaatgttgatgagcaaatctgttagacctatgcgtgcagcgataaactgtctagggaaagcaattaacagacttggcataccgaacccgagagtggttatagtgtctgacactccatctgtagtgaaaattatcaaaacaaatatcagcaccattgcagaggttctacattttgactataagcttttccgaggtgatatcgctcaacgtggccgcggtttaccaatgttagatttcagaataaaggattggggtcctgcaccga

SEQ ID NO: 165982 - DNA, 435 bp, Arabidopsis thaliana columbia
atcataagggaatgaattcagtatcagctgcagttaggctaaagagttttggagatgctggtccagtatgtaacaaaagcattatatttccaagtagagttgttacattagctaacagcttcgagaagaaagaccgttcctggtatgtcaaatctcaaatccctactgatctgtctattcaagtcaacgatattaccttcaaagcacacaagtttcctttgatctccaaatgtggttacataagctctattgagctaaaaccttcaacttctgagaatggatatcatctcaagctggaaaacttcccaggtggagcagatacattcgagaccattctgaaattttgctacaatctcccactggacttgaatcctctcaatgtagctccactgaggtgtgcatcagaatacttgtacatgactgaagagtttgaag

SEQ ID NO: 165983 - DNA, 443 bp, Arabidopsis thaliana columbia
acttacaaaatggagataaaaccctctaggatattctccaccatcaccatcttctttctctgccttctactagcacacgtcacctccaaggcatcatcatcatctctgtgcaatggatctgtggcggagtgcagcagcatggtggagacagaggaaatgagtgtgataatggagtcttggtcaagccagaggttgacggaggagcaggcacataagctttcgtatggagctttgaggaggaatcagcctgcttgcgatggtggtaaacgaggcgagtcttactcaactcaatgtcttcctccaccgtctaacccttatagtagaggctgctctaagcattaccgatgcggccgtgactcttgaccattcaccatcatgaatctttatgttggaaaacacctatgttctttattttgttggtggaattgaattgttttggtttc

SEQ ID NO: 165984 - DNA, 288 bp, Arabidopsis thaliana columbia
aagggtaacgccagacgacggtgtccagcggaactgtctcctgttatggcttccgcaccgatgaagtccaccgccgagcttcatgcactctagatcagccagaaaaactgagtgccttgacactgacattgtctcggtatgcccgagggtcaagagcgacgcccgagccatgactaacaaagcaaggagcgagtgctaaagccacaggcttacactagacgacccgagtcactgttgagaccataacttagctacattgctggacttgaccagaagtatacccaagag

SEQ ID NO: 165985 - DNA, 379 bp, Arabidopsis thaliana columbia
actgattcatcagctttaagtcttctttatgttctctgggatcaccaatccaacggctcagatcttagcagcttctccaacatgtcagatgagagtgcctaaacactcatcagtcattgcatcatcatccaagttatggagctctgttgcgttgaaacagaagatgcagagcaacaacaaagtcagaggctttagagttcttgctctccaatctgataacagtactgtcaatagagctgagactcctgtcaatttagacaccaaaccttactctgacaggatcattgctgaatacatttggatcggaggatctggaattgaccttagaagcaagtcaaggactatcgaaaagccggtggaggatccttctgagctacct

SEQ ID NO: 165986 - DNA, 444 bp, Arabidopsis thaliana columbia
cctgattcatcagctttaagtcttcttcaagtttttgggatcatcaatccaatggctcagatcttagcagcttctccaacatgtcagatgagagtgcctaaacactcatcagtcattgcatcatcatccaagttatggagctctgttgcgttgaaacagaagaagcagagcaacaacaaagtcagaggctttagagttcttgctctccaatctgataacagtactgtcaatagagctgagactcctctcaatttagacaccaaaccttactctgacaggatcattgctgaatacatttggatcggaggatctggaactgaccttagaagcaagtcaaggactatcgaaaagccggcggaggatccttctgagctacctaagtggaactatgatggttcgagtaccggtcaagcacctggtgaagatagcgaagtgattctatac

SEQ ID NO: 165987 - DNA, 455 bp, Arabidopsis thaliana columbia
aaacaaaaacaaaaaaacctagcttctctcacattacgcatgcaacaacatcgaaattaagaatcaatcaaagcttcttcgttcgatcacactagaaagaaagatggcaacgtctggtgcgatttcaggagctactgtctcttccttcttcaccaaaactactactacttcaaacccatctcccaaactccattcctctgcttctcttttatcacagaaaactgtgtttcaaggagtttcgttggaagattcgaagaagagtgtatcagagatcttcgctgtctccgagagaaagatcggagggttaaatgggttgagaagattcgaaatcaaagcgagagcagcagcttctaagacaatagaggttgaagtagataagcctttgggtctgactctaggacagaagcaaggccggggagttgtcatcaccggtgtggacggaggagggaacgcaa

SEQ ID NO: 165988 - DNA, 457 bp, Arabidopsis thaliana columbia
aaaattgaacccgttaaccggcgacccgaaacattgacccggtccgtcagtttccctctcttcctcttcgccgttgtactctccctctcttcttctctcctcgccgacgatcccaaaccaatccgccgtgaggtctacgaaggaggtaagatatacgacatcagccatcgttacacgccggagattccagcttgggaatcttcggaaggattgggaaagacgttcctgcgattagccgcgagtatgaagaatggatcattcgctaacgtatcggagatgaaactatctgttcactctggaactcacgtggatgctccaggtcacttttgggataattattacgatgctggttttgatactgattcgcttgatctccaagtcctaaatggtcctgctttggtggttgatgttccgagagataagaacattactgctgaggtaatggaatcacttcata

SEQ ID NO: 165989 - DNA, 427 bp, Arabidopsis thaliana columbia
cagcttagtatatctgatctctctacctgcctctctccctaaaactcagcaacaatggccgttaccttttcagatctacacacagaggagggtgtcaaatccgtggaggagcacctcgccggaaaaacctacatctccggagatcaattgtctgaggacgacgtcaagggctacgactggcgctccagtgaaacccaccgatgccttacacaatgctagcatgatggaactagtacgacgcttcccaacttgcttaaatgttccctggaaagggccgctgggtgcaacaatcaggagaatagggctatcagatcaggtgcttaaggatatgggcctatctggtaaaatcccagattctcttgaatactgtccgagtgttacaaaaacccgatctttatagaaatccgatgtggggaaatatccctac

SEQ ID NO: 165990 - DNA, 451 bp, Arabidopsis thaliana columbia
aaaatctttaattcttaatccaaacccagaaacttcctctgaaaccacttcatcatccatgaaagagatcggctcaaaaccaagaaagttacttcctttatgcttcatcatcttcctctgtttttgttcctctgttatggctgcagatgaagacgacataagatgcttaagaggactcaaagcatctctcacagatcctcaaaacgcgttgaaatcatggaacttcgacaacacaactcttgggtttctctgtaacttcgttggtgtgtcttgttggaacaatcaggagaatagggttatcaatcttgagcttcgtgatatgggtttatctggtaaaatcccagattctcttcaatactgtgcgagtttacaaaaacttgatctttctagtaatcgattgtctggtaatatccctacagagttgtgtaaatggttaccttttttggtatct

SEQ ID NO: 165991 - DNA, 444 bp, Arabidopsis thaliana columbia
gaatatcctttgtctatagttcttgttggtgttggagatggtccctgggacaccatgagacagtttgatgacaacatccccgctcgtgcctttgacaatttccagtttgtgaatttcacggatataatgtcaaagaacattgatccagcaagaaaagaggcagaattcgcgctttctgccttgatggagatcccgtctcagtataaagccaccctcgaactaggcttacttggacaaagaaccggacattgtccagacaggattgcgcttccaccaccaacttatgctactcaatctatgcgcaacagcccaagaacttcccgatcaaccagttttcaaaacaaaccatatgataatggtgtttcctctacaccaccttcaactactcataacgagagccagcaacagttttgccccgtatgtctagtgagtgcaaagaacatg

SEQ ID NO: 165992 - DNA, 448 bp, Arabidopsis thaliana columbia
aagccggttcacaaatcttctccgaaggcggtttttactacttaggcaacccaaacctagtccatgctcagagcattttagccgtccttggcttccaagtcatcctcatgggtttggttgaaggtttccgcatcaacggtcttgatggtgttggcgaaggcaacgacttgtaccccggtgggcaatactttgacccgttgggtctcgctgatgatccagttacttttgctgagcttaaggtgaaagagatcaagaacggaagattggctatgttctctatgtttggcttctttgttcaagccattgttactggaaaaggtcctttggagaatctccttgaccatcttgacaaccctgttgctaacaatgcgtgggctttcgcaactaagtttgcacctggagcttaaattttcaagtcttgatgtgattcttggaatgatatgaacat

SEQ ID NO: 165993 - DNA, 439 bp, Arabidopsis thaliana columbia
aaatcttaaacgttttactttgtgctgcactacttaaccttattggccgcctcaacaatggctctctcctcccctgccttcgccggtaaggccgtcaagctttcccccgcggcatctgaagtccttggaagcggccgtgtgacaatgaggaagactgttgccaagccaaagggcccatcaggcagcccatggtacggatctgaccgtgtcaagtacttgtgtccattctctggcgaatcaccgagctaccttaccggagagttccccggagactacggatgggacaccgccggactttcagctgaccccgagacattcgcaaggaaccgtgaactagaagttatccacagcaggtgggccatgctcggagccctaggctgcgtcttccctgagcttttggctagaaacggagtcaagttcggagaggcgttttggttca

SEQ ID NO: 165994 - DNA, 261 bp, Arabidopsis thaliana columbia
atggccgttaccttttgagatctactcacagaggagggtgtcaaatccgtggtggagcacctcgccgtatgaacctacatctccggagagcaatgcggatgaggacgacgtaaagaggctcagcgaggcctcaaaggatactcacagatcctaaaacagcgctagaatgtggaactgtacaacacaactcttgggctctctgtaacctcgatggggcgtcttggtggaacaatcaggagaatatggttatcaatcttgagc

SEQ ID NO: 165995 - DNA, 362 bp, Arabidopsis thaliana columbia
tcttggccagagccaaagccaattcgttgtctcatctcgggaaatacactggagaaggcgagtctgaggaagccaaggagggtatgtttgtaaaaggctacacctactaagctatttgtaataatggttccatagatcaaaactcaaaaacttgagcttgattctggtcatttgagttattatactcttcttcaggtataaaagtcagttctgtgttgaaaaagactgaaacatgcttaaaaagagaacttacaaagattagagaggcgggtcttccggttctagttctctggactattttccttaaagtagctcctgcatatggtttgattgttgcccagattgtcgagatgatgactcgg

SEQ ID NO: 165996 - DNA, 373 bp, Arabidopsis thaliana columbia
tcttggccagagccaaagccaattcgttgtctcatctcgggaaatacactggagaaggcgagtctgaggaagccaaggagggtatgtttgtaaaaggctacacctactaagctatttgtaataatggttccatagatcaaaactcaaaaacttgagcttgattctggtcatttgagttattatactcttcttcaggtataaaagtcagttctgtgttaaaaaaaaaaaaaaaaaaaaaaaaaaaaaaaaaaacaataaaaaaaaaaacgggtctaacgattttaagaaatccaagctaactgttccctaacatgcgacctgtttattgttttattggtggcccaaatttcaattctctggccgccgttttaca

SEQ ID NO: 165997 - DNA, 432 bp, Arabidopsis thaliana columbia
aaagaagaagagaaacaacaagaagtagtaatggcttcctctatgctctcctccgccgctgtggttacatccccggctcaggccaccatggtcgctccattcaccggcttgaagtcatccgctgcattcccggtcacccgcaagaccaacaaggacatcacttccatcgcaagcaacgggggaagagttagctgcatgaaggtgtggccaccaattggaaagaagaagtttgagactctatcttacctccctgaccttagtgacgtcgaattggctaaggaagttgactaccttctccgcaacaagtggattccttgtgttgaattcgagttagagcacggatttgtgtaccgtgagcacggaaacactcccggatactacgatggacggtactggacaatgtggaagcttccattgttcggatgcaccgac

SEQ ID NO: 165998 - DNA, 355 bp, Arabidopsis thaliana columbia
cccacgcgttatcactagctctaaaagaatcgtgattatttcctgagtaacctcagcccaccgttgcaatcccatctttcaccggccttaaagcctcaaccatcaaatcatccgccaccggcagaatccaaactgctgctgctgcatcaccgaagcttacagtgaagtcatctctaaagaacttcggagtcgcggccgtagcggctgcagcttcaattgctttggccggaaacgccatggcaatagaagttctcttgggaggaggggatgggtcgttcgcttctattcccagacgacttctgtatagctaacggagagaagatcgagttcaagaacaacgctggatacccacaca

SEQ ID NO: 165999 - DNA, 415 bp, Arabidopsis thaliana columbia
cacttttctgcgatatctctgagatttgttgacattctctaaccatgggtaaagagaagtttcacatcaacattgtggtcattggccacgtcgattctggaaagtcgaccaccactgggcacttgatctacaagttgggtggtattgacaagcgtgtcattgagaggttcgagaaggaggctgctgagatgaacaagaggtccttcaagtacgcatgggttttggacaaacttaaggctgagcgtgagcgtggtatcaccattgacattgctctctggaagttcgagaccaccaagtactactgcactgtcattgatgctcctggccatcgtgatttcatcaagaacatgatcactggtacctcccaggctgattgtgctgtccttatcattgactccaccactggggggtttga

SEQ ID NO: 166000 - DNA, 466 bp, Arabidopsis thaliana columbia
tgccatagcttctactctctctctttcttcatctaaacctcagagacttttcgattcttccttgcatggctcagccatctccgcagctcctatctccatcggtctcaaaccacgatctttctccgttcgcgccacaaccgctggttacgacttgaacgctttcacgttcgacccgatcaaggaatcgatcgtgtcacgtgagatgacgagaaggtacatgacggatatgatcacttatgctgagactgatgtcgtcgtcgttggtgctggatctgctggtttatctgctgcttatgagatcagtaagaaccctaatgttcaagttgccattattgagcaatctgttagtcctggtggtggtgcttggctcggtggtcagcttttctccgccatgattgttcgcaaaccagctcacttgttccttgacgagattggtgtggcttacgatgagcaagacacctacgtt

SEQ ID NO: 166001 - DNA, 336 bp, Arabidopsis thaliana columbia
ctttccgggtacgccaagtaggtatggtgatgcctcatttagcccggctttgcaccacggtgagaaagttggaccctttagtccacatggtggtgttcacacgaggtggcctagtgaaattgattctgaaatgggtggtgcttttgctcgtgggtatgttcaacaagctgtgtctgatactgattcacgtcgttgccatcctctagcaggcggtgcgccttttattgcttgtcacagttgctttgagctgctatatgtgcctaagaagaagctttttggttaggaaagtgctcataagatgcaatgtggcgcttgttcttaggttatcactgtttt

SEQ ID NO: 166002 - DNA, 470 bp, Arabidopsis thaliana columbia
aaccaacgtaaaacactaactaagagatcaatatggctttagtgatgaagttggcatgcatggtcttggcttgcatgattgtggccggtccaatcacagcgaacgcgcttatgagttgtggcaccgtcaacggcaacctggcagggtgcattgcctacttgacccgaggtgctccacttacccaagggtgctgcaacggcgttactaaccttaaaaacatggccagtacaaccccagaccgtcagcaagcttgccgttgccttcaatctgccgctaaagccgttggtcccggtctcaacactgcccgtgcagctggacttcctagcgcatgcaaagtcaatattccttacaaaatcagcgccagcaccaactgcaacaccgtgaggtgatgagcgacggtcaaatgaagctactagcggatgtttcgaatattatataatcgatgagataatattaaataaagatgttcg

SEQ ID NO: 166003 - DNA, 313 bp, Arabidopsis thaliana columbia
acggtttaccgcacttgatagtgaacggagaccagctgcattggggagagttcattactccagggattcttttcctctacattgctggatggatcgggagggtcggtagaagctacttaatagctattagtggtgagaagaaacccgcgatgaaagagatcatcatcgatgttcctttggctagtcggatcatcttccgaggtttcatttggcccgttgctgcctacagagaggttatgaacggcgatctcattgctaaggatgtttaaaaagggaacttgttttctgcttttgcgttactctctgtaatctc

SEQ ID NO: 166004 - DNA, 473 bp, Arabidopsis thaliana columbia
  unsure (1)..(473): unsure at all n locations
aaaatctctctctgccaatctcatcttcaacctttctctaactctcgttttcgattctacaatggctgacaagaagattaggatcggaatcaacggattcggaagaattggtcgtttggttgctagagttgttctccagagggacgatgttgagctcgtcgctgtcaacgaccccttcatcactactgagtacatgacctacatgttcaagtacgacagtgttcacggtcaatggaaacacaatgaactcaagatcaaggatgagaagacccttctcttcggtgagaagccagtcactgttttcggcatcaggcaccctgaggatatcccatgggccgaggctggagctgactacgttgttgagtctactggtgtcttcactgacaaagacaaggctgcagctcacttgaagggtggtgccaagaaaggtgttatctctgcccccagcanagaccctccaatgtttgttgttg

SEQ ID NO: 166005 - DNA, 436 bp, Arabidopsis thaliana columbia
gtcaaaggtacttaaggctgaagatgtcgatttatttttcatcgctagaggaacgcctggattttctggcgctgatttggctaatctggtcaatgttgctgctttaaaagctgcaatggacggttctaaagatgtgacaatgtctgatcttgagtttgccaaagacagaatcatgatgggaagtgagaggaaatctgcagttatatctgacgagtcaagaaagctaactgctttccatgaaggtggtcatgcccttgttgccattcacaccgaaggtgctcttccagtccacaaagcaaccattgtgcctcgtggtatggctcttggcatggtttctcaactaccagataaagatgagacgagcatttctaggaaacagatgcttgctaggcctgatgtttgtatgggaggccgggtagcccaagagttgattttt

SEQ ID NO: 166006 - DNA, 447 bp, Arabidopsis thaliana columbia
  unsure (1)..(447): unsure at all n locations
gcaaaagaagaagagaaacaacaagaagtagtaatggtttcctctatgctctcctccgccgctgtggttacatccccggctcaggccaccatggtcgctccattcaccggcttgaagtcatccgctgcattcccggtcacccgcaagaccaacaaggacatcacttccatcgcaagcaacgggggaagagttagctgcatgaaggtgtggccaccaattggaaagaagaagtttgagactctatcttacctccctgaccttagtgacgtcgaattggctanagaagttgactaccttctccgcaacaagtggattccttgtgttgaattcgagttagagcacggatttgtgtaccgtgagcacggaaacactcccggatactacgatggacggtactggacaatgtggaagcttccattgttcggatgcaccgactccgctcaagtg

SEQ ID NO: 166007 - DNA, 477 bp, Arabidopsis thaliana columbia
caagaaaataaaagatttgtagaatcaactaagatttatggctagcactatgatgactacattgcctcagttcaatggtcttcgagccaccaaaatctctgcagctcctgtacaaggcctggcaagtgttcagcccatgagacgcaagggaaatggagctttgggtgcaaagtgtgacttcatcggttcatcaacaaatctgataatggtaacgtcgacgaccctgatgttgttcgcggggagattcggacttgcgccatcagccaataggaaggcgacagctggacttaggttggaggcacgtgactcaggtctacaaacgggtgacccggccgggttcacgcttgcggacactttggcttgtggcaccgttggtcatatcaatcggtggagggagtgtccttggccttaaaaacattggtgctatttgaagtttctaaagctcttttatttgtaatttgaaaatttggagatttt

SEQ ID NO: 166008 - DNA, 455 bp, Arabidopsis thaliana columbia
gttttatctcgcattttcctcctagttctctgtatttacagccttaaaaccatggtttatggggctggagaatgtgggagaaatcctccagacagagaagccataaagttggctccttgtgcaatggctgcacaagacacatctgctaaagtgtcagcaatttgctgtgctcgagtgaaacagatggggcagaatccaaaatgcctttgtgctgtcatgctttcttccacagctaggagctccggagcaaagccagagatctcgatgactattcctaaacgctgcaacatcgctaatcgtcccgtcggttacaaatgtggagcttatactctgccttgaagcagcagacagaaagcaatagacgtgttcttcaaaaccagtctaaattgtcacatgttcacagttgtattacttggtttcaataaaaatatgaatcaaaatgatgattgatcatg

SEQ ID NO: 166009 - DNA, 482 bp, Arabidopsis thaliana columbia
  unsure (1)..(482): unsure at all n locations
acgctctctgcgtaactcttgcaccaaaagacgaagattcttttttcaaagagaaagagagagaaatgggttccaagattgtccaagttttcttgatgttggctctattcgccacttcagcactcgctcaagcccctgctcctactcccaccgccactcctcctcccgcaactccccctccagtcgcaactcctcctccagtggctaccccaccacctgctgcaacccctgccccagccacgccaccacctgctgcaaccccagcttctgccactactccaccgtcagttgctccttctcctgctgatgttcccaccgnctttccaccagcaccggaaggtcccaccgtgagcccaagcagtgctcccggaccttcagatgcattccctgccccaagcgccgcattcttcaacaaggctttcttcgcccgaaccggcttcgccgctattatgtacgccgcccgtttggcttgagaacttttt

SEQ ID NO: 166010 - DNA, 407 bp, Arabidopsis thaliana columbia
ggcaaaggcttcgttatcgacaattagtcaatatctgctttgcggatcttcagaagcctcagactgaacttgatgggaaggcttgtgctggtgttggacaaagcagtcttatggcttactatgagactatgtttgaccagcttgatgtgacggcagctcaacttctggtgaatgacagtagttttagagacaaggatttcaggaagcaacttaatgaaactgtcaagtctatgcttgatttgagggttattccaattttcaatgagaatgatgctattagcacccgaagagccccatatcaggattcttctggtattttctgggataacgatagcttagctgctctactggcgttggaactgaaagctgatcttctgattcttttgagcgatgttgaaagtctttac

SEQ ID NO: 166011 - DNA, 471 bp, Arabidopsis thaliana columbia
atcggagaaaaagctacggagctcgagagaagagtgaatctatgtcgaacccaaacgaaccagccagggctcttctgccttacctgcaacgtgccgatgagctgcagaagcatgaaccacttgttgcttattactgtcggctatatgcaatggaacgaggattgaagattccgcagagcgagagaactaagaccaccaattcgattctcatgtctctcattaatcaactcgaaaaggataaaaaatcattgactctgtccccagatgacaatatgcatgtggaggggtttgcacttagtgtctttgctaaggcagacaagcaggatcgtgcaggaagagcagacttgggcactgccaaaactttttatgctgcgagcatcttctttgaaattctgagccagtttggtcccgtacctcctgatatagagcagaaacacaagtatgctgcttggaaggctgctgacataagga

SEQ ID NO: 166012 - DNA, 475 bp, Arabidopsis thaliana columbia
caggagcttccgccttattcagagtgtagagtgtatatccaaaagaaaagaggaaaaaatggactatatgtatggaccagggagacaccatctgtttgtaccaggaccagtgaacataccggaaccggtaatccgggcgatgaaccggaacaacgaggattaccggtcaccagccattccggcgcttacgaaaacattgttggaggatgttaagaagatattcaagaccacatcagggacaccttttctgtttcccacgaccgggactggtgcttgggagagtgccttgaccaacacgttatctcctggagacaggattgtttcgtttctgattggacaatttagcttgctctggattgaccagcagaagaggcttaatttcaatggtgatgtggttgagagtgattggggacaaggtgctaatctacaagtcttggcctcaaagctcttacaagacgagaatcataccatcaaa

SEQ ID NO: 166013 - DNA, 477 bp, Arabidopsis thaliana columbia
gtttggtcatggtgggaacaaatcatttggagtatctattggatcagccttttggcccaccaatgcagatagtgcagctgaatcctttgcttcagcgtttaacaatgaatctactgaaaagaaacaaactaatggaaatgtctgtaggctttttgggtttgagctagttgaaaatgttaatgtggatgaatgtttctctgctgcctctgtgtctggtgctgtcgctgtagatcaacctgtcccatccaacgagtttgactctggccagcaatctgagccattaaacatcaaccaatctgatattccttcggggagtggtgaccctgagaaatcctctttgaggtctcctcaagaatcacaaagtagacagatacgtagctgcacaaaggtgcacatgcaaggcagtgcagtaggcagagctattgatttgacaaggtcagagtgttatgaagatctgttcaagaagctggaagagat

SEQ ID NO: 166014 - DNA, 462 bp, Arabidopsis thaliana columbia
aaactttgtgagcaaagagcgagaaaatgagcggttcttttaagaaaatcgcggatgtggctttcaaagcttcaaggactatcgattgggatggtatggctaaggtccttgtcacagatgaggctcgtagagagttctctaaccttcgtcgtgctttcgatgaggttaacacacagctccagaccaaatttagtcaggaacctgaacctatagattgggattactataggaagggtattggagctggcattgttgacaagtacaaggaagcttatgacagcattgagattccaaagtacgttgacaaagttactcctgaatacaagccaaagtttgatgctttgttggtggaactgaaagaagcagaacagaaatcgctcaaggagtctgaacggttggagaaagaaattgctgatgtccaagagatcagcaaaaagctcagcaccatgactgcagatgagt

SEQ ID NO: 166015 - DNA, 481 bp, Arabidopsis thaliana columbia
aatttctctctggcgaaagctaagaggtttcggttactgtctccatctccgatcaaatcacgaagtttctatcggaaattttcagtgatacataccgtcagagattttctttacgagagaattgtcgccgacatactaaagcagagttttgggtgggaattagtaagatttcgactttggaattgggagatctttccattatgggttctgagcaaaacgacagcacaagcttctctccttcagagccaaagctctgcgtcaaaggatgtggcttcttcggatctccatcgaacatgaacctctgctctaaatgctacagagacatccgagccacggaggaacaaaccgcttccgctaaagccgccgtcgagaaatctctaaaccctaataaacccaaaactcaaccacaacagagccaagaaatcactcaaggcgtcctcggatctggatcgtcttcctcatcaacgagagggggtgattc

SEQ ID NO: 166016 - DNA, 483 bp, Arabidopsis thaliana columbia
actcaccatcaaacaactacaacatctgcggtttgtttgttgaaagtagagagtaactgggcacaagcctgtgatacatgccgatcagccgcctgcaccgtgtactgccgggctgattctgcctacttgtgctccagttgtgatgctcaagttcatgctgccaatcgtcttgcttcccgccatgaacgtgttcgagtctgtcaatcatgtgagcgagccccggctgcctttttctgcaaggcagatgctgcatctctatgcacaacctgtgattcagagattcattccgcaaacccacttgctagacgccatcaacgagttccaattctgcccatttctgagtactcttacagttccacggccactaaccattcatgtgagacaacagtgacagatccagagaacagacttgtgcttggtcaagaagaagaggatgaagatgaagcagaggcggcttcatggttgtgcctaattcagggaaaa

SEQ ID NO: 166017 - DNA, 419 bp, Arabidopsis thaliana columbia
gcaaaagaagaagagaaacaacaagaagtagtatttgcttcctctatgctctcctccgccgctgtggttacatccccggctcaggccaccatggtcgctccattcaccggcttgaagtcatccgctgcattcccggtcacccgcaagaccaacaaggacatcacttccatcgcaagcaacgggggaagagttagctgcatgaaggtgtggccaccaattggaaagaagaagtttgagactctatcttacctccctgaccttagtgacgtcgaattggctaaggaagttgactaccttctccgcaacaagtggattccttgtgttgaattcgagttagagcacggatttgtgtaccgtgagcacggaaacactcccggatactacgatggacggtactggacaatggggaagcttccatt

SEQ ID NO: 166018 - DNA, 362 bp, Arabidopsis thaliana columbia
agaagctctcgtttagtaaattttagcttagatctcagaagaagcattttttcggatctgagatctttagatccgaacatcgtttatttcaaatcgtttattcaaggtctaaaaaaaagttttgaagaatcatagccatgtcaagaaggcaagtaaggcgtgtaggggatagtggaagcttcccatttgtaggagctctgcattcaaaatcacgttcgtctcctctgttatcagtttgccttgttctcgtgggagcatgccttctcattggttatgcttacagtggtccaggtatgttcaaaagtatcagagaagtcagcaagattacaggtgactattcttgcacagcagaagttcaaaga

SEQ ID NO: 166019 - DNA, 351 bp, Arabidopsis thaliana columbia
gttttaagcatttgaaacaaaaaaaatggcttccatttctttggttctgttgggtctctttgctgttcttctcgtcgtctcagaagtagccgcggcatcttctgccacagtgaattcagagagtaaggaaactgtgaaacctgatcaacgtggctacggtgacaatggaggaaattacaataacggaggaggttaccagggaggagggggtaattaccaaggaggaggaggtaattaccaaggaggaggaggtaattaccaaggaggaggaggaagataccaaggaggaggaggacggtaccaaggaggaggaggacgataccaaggaggcggtgggcgacaaggaggagg

SEQ ID NO: 166020 - DNA, 447 bp, Arabidopsis thaliana columbia
ctcgcttctggctgagggaatgactgtaggcattatatggtccggcgttgcaatccattgaagatcagtggcttggctcggccggtcttatgactttctcggaagctgtcgtgcaggccatcaagcgcatgaacctcaacgagaacgagaagaatcagagactgagcgagtggttaacccatgcaaggtatgagaactgcctgtcaaatgagcaaggccgagtgttagcagcaaaacttggtgtgacagatcttttctgggactgggacttgccgagaaccagagaaggattctaccggttccaaggctcggtcgcagcggccgtggtccgtggctgggcctttgcacagatcgcagacatcatctggatggaaacggcaagccctgatctcaatgaatgcacccaattcgccgaaagtatcaagtccaagacacccgaggtcatgc

SEQ ID NO: 166021 - DNA, 386 bp, Arabidopsis thaliana columbia
ggttttatcagcgatcttcgcggaggttatgagttgtaaacctgagtttaccgatcatctgactcatcgtttaaaacatcatcccggacaaatcgaagcggcggcgataatggagcacatactcgacggaagctcatacatgaaattagctcaaaaggttcacgagatggatccattgcagaaaccaaaacaagatcgttacgctcttcgtacatctcctcaatggctaggtcctcaaattgaagtaatccgtcaagctacgaaatcgatagagcgtgaaatcaactccgttaacgataatcccgtgatcgatgtttcgaggaacaaggcgattcacggtggtaacttccaaggaacaccaatcggagtttctatggataacacga

SEQ ID NO: 166022 - DNA, 464 bp, Arabidopsis thaliana columbia
  unsure (1)..(464): unsure at all n locations
catgggtcgaaaagggactatgtggtttgctcaatnttactgcatcttcggttgggttgcagtagcattagcaaaagactccatgtggcttgatattggaagactatccacaggatttgcagttggtttattaagctatgtgataccagtttacattgcagaaataacaccaaaacatgttcgaggagcgtttgtatttgctaatcagctgatgcagagttgtggattgtctttattctacgtcattggaaattttgttcattggcgtaacttggccttaatcggtctcattccatgtgcgttgcaagttgtgactttgttctttattccagagtcccctagactactgggaaaatggggacatgaaaaagaatgtagagcttcattgcaaagtcttcgcggagatgatgcagatatctctgaagatgccaacactatcaaagaaaccatgatcttgtttgatg

SEQ ID NO: 166023 - DNA, 475 bp, Arabidopsis thaliana columbia
aaaaaaacgaaacaatggatgcgttctcttcctttttttattctcaacctggtagcagaagctggagctatgattctcttaaaaacttccgtcagatttctccagccgttcagaatcatcttaaacgggtttatttgaccttatgttgtgctcttgtggcgtctgcctttggagcttacctccatgtgctctggaatatcggcggtattcttacaacgattggatgtattggaactatgatttggctcctttcatgtcctccttatgaacaccaaaaaaggctttctcttctgtttgtgtctgctgttcttgaaggtgcttctgttggccccttgatcaaagtggcaattgatgttgacccaagcatccttatcactgcatttgttggaactgcgatagcgtttgtctgtttctcagcagcagcaatgttagcaagacgcagggagtatctctaccttggaggactgctttcatc

SEQ ID NO: 166024 - DNA, 458 bp, Arabidopsis thaliana columbia
ttactattttgaaaatccggcatatggatacaataacgagggcgaaagcgttgtgtttggcgttgacatcaacattgttaaaccctttgaaaattgggaagtgttctctaatgaacaaaacattcgtgaccctattttcgaatggagactcaccaaattctctacacgttttcttgactcttacacttctgattccttttcttccggaggaagaaactgggcattgaaagtgtatccaaatggagttggaaatgctacgggtaattcgttgtcactctatttgttgagtgatcagtcaaatgataagggttatgtggaagctaagttacgagttattgaccagatccaatccaacaatttcgagaaaaaagtggcggcatggcccatagcaacggagaatggatggggttcgacaggtttttatcatttgcagatttcataaacacattaaatgggtt

SEQ ID NO: 166025 - DNA, 409 bp, Arabidopsis thaliana columbia
aacaaacgctgtctgaatcatatttcgattctgttttttcttcatggattcgtatagccaataagttttttcaatattcaaaacaaaaaccccatcaaaataatctccggaccagtttctctttcgattcagtcggaccggaaaaacaatggcgtctgtgaaccctttcgatctcttggacgatgacgcagaggatcccagccagattgttgcgtctaagccattgaaggttgtggctccggttcagactgctaagtctggtaagatgccgactaagccgcctcctccttctcaagctgtgagggaggcaaggaacgctcctggtggaggtcgtggtgctggacgtggagggagttatggtcgtggtggacgtggtggaaacaatagggattcaaggaacaatgatggt

SEQ ID NO: 166026 - DNA, 365 bp, Arabidopsis thaliana columbia
gacttgctttacccaggtggcagcttcgacctatttggcctcgctactgaccccgaggctttcgcagagttgaaggtgaaggagctcaagaacggaaggttggctatgttctctatgtttggattcttcgttcaagccatcgtcaccggaaagggacctttggagaacctcgccgaccatttggccgacccagtcaacaacaacgcttgggccttcgccaccaacttcgtccccggaaagtgagcggctgcttattatgtgaatgagagcagagaaagagagtttgtttgtggtctattctatgtaaatttgtgaactttcctttgtggtatctttgtatagaaatcgaacctctttttctctaa

SEQ ID NO: 166027 - DNA, 395 bp, Arabidopsis thaliana columbia
cggagcaagagatcgacttctttggggagatctttttttatcatttagccccgacacagaagcactcttcataggcgtttgggaccgcacttacggaagtctaattgagtatagccggcgccacaactactcctaccttgattcatttctatgatcacccgacataccagaggaataaaagagccgatacatatgtgctgctgcactctcctgtcgctctgttaaactaagaaacccgagaaaagagaaaacataaactcaagtcgatctctaatggtgtaaatgatgtgttgtgcaagtactagtaggaatgttgtcacagagagcggatttagttagataatgttcatttcttgtatgagaggtggagttcgtgtattgtacataagtatatg

SEQ ID NO: 166028 - DNA, 404 bp, Arabidopsis thaliana columbia
tttgtttcggcgattcaactcttcttcaacgccttgagagtcacgcacgagaattggattgatggtttttcacacgcaggagaggcgattcgttgtcttcttcttgtcccgttgacctgtttcgatctcagatggtgattatgcagcagctgattctaaattagggcatttaaatccgccttccaggtgaatttttgaaaagtaattaaagggtgttcttgaatggacttgaaaatggataatgttattgggggaaagtttaaacttggtcggaagatcggtggtggctcttttggagaactttttcttgccgtaagtttgcaaaccggataggaagcagcctgtaagctggagcctgttaaaacttatgcatccccaactttattatgagtcgaaaatataca

SEQ ID NO: 166029 - DNA, 469 bp, Arabidopsis thaliana columbia
cggacgcgtgggtccaaagagaagcttcaataattgtcttgcaaaacgattttgcgttccgttttcgtatcggaatcacgacggacttccggcgcacgtagatgcttctttctccctccttctccagcatcagttccagtccatggtttgttcccggcgccaaagagtctatgtttcaatggttttgcatctgttcccgagcgggctactcggcttaattgcagccataacgatcaatccgatcaaggtccgcctcaagaagctgttctcaaggcaatctcagaagtgtcaaagactgatgggagggttgggaaaactactaacatgattattggaggcactgtggctgatgattctgctaaagattggctcgaacttgaccaaaaggtcaatacatacccaacagaaagagggtttactgcaattgggactggtggcaatgactttgtgcatgcttatggtggtgctg

SEQ ID NO: 166030 - DNA, 480 bp, Arabidopsis thaliana columbia
aaaccctaactgtttccaagataatggcaaattcttaagctcctagtttggtggggaagctagagacagaagtggagatcaaagcttcggctggacagtttcatcacatgtttgccgggaagccacaccatgtctccaaagcaagtccaggcaacattcagagctgtgatctgcacgaaggcgactggggcactgtcggctctatcgtcttctggaattacgttcacgatggggaggcaaaggtggcgaaggagagaatcgaggcggtggagccggagaagaacttgatcacgtttagggttatagaaggtgatctgatgaaagagtacaagagctttttgatcacgatccaggtgacccctaagcatggagggccctgaagtattgtgcattggcaccttgagtatgagaaaatcagcgacgaggtagctcatcccgaaactctcctccaattcttgggtgaggtcttccaagagatcg

SEQ ID NO: 166031 - DNA, 480 bp, Arabidopsis thaliana columbia
gctgaagcagaagaagagcatcactcacaagttcacatatatagataagcttgtctcctatggaaccgaagtcacagccattgttgagaccgggaaaatcaagaagctcactggagtcaaagccaaggaacttcttatttgggtcactatcaatgagatctataccgaggaaccccctaccaagatcacgttcaagacaccgaccacactgtccaggactttcccggtcacagcttttatagtcccagaagaacctgccaaggaggaacctgccaaagaggaacctgccaaggagaagagcagcgaagccaccgaggccaaggaggctgttgcaatcaaggaggctggcgcagtcaaagaggcggcctaatcagctcagcttcagcagataaaagagacccgaatttttaagtgtacttcaagaatttgaacaaatcatggagaagtagtgtttctcactgctctaactatcatgtatta

SEQ ID NO: 166032 - DNA, 475 bp, Arabidopsis thaliana columbia
gttggaatggcagatgatgtttttgctttagtttagtataacacccatctatatctagcaaatgtggtgaatctcagcaaagagctaatgtatcagcaaactcttcgtcgttttgctcattttaacgcaatacagcttagcgatccagcccctttgtcagagttgatattgttggctctgaaagaggaggatctagatccaggaaatgatacaaaagatgatctgaaagaaagaattgctgaaatgaatacagaactcctcaaggaaaaagcagaaatgttagaggagtatttcagcgtgcacattgactccagtgcaaatttgtcaaggcttcctgtgatactcgaccagtatacacctgacatggatcgtgttcctgaatttttactatgcttgggaaatgatgttgagtgggaagaatgagagagtgcttttaaggagtttctgcagctattgggaacctttacgccatgca

SEQ ID NO: 166033 - DNA, 447 bp, Arabidopsis thaliana columbia
ctcctttcagattcttacttgcagctatgggtaatgtgaagtttcacattaacattgtggtcattggtcatgttgattctggaaaatcgaccacaactggtcacttgatctataagcttggtggtattgacaagcgtgtcatcgagaggttcgagaaggaggctgctgagatgaacaagaggtccttcaagtacgcatgggtgttggacaaacttaaggccgagcgtgagcgtggtattaccatcgatattgctctatggaagttcgagaccaccaagtactactgcacagtcattgatgccccaggacatcgtgatttcatcaagaacatgattactggtacctaccaggctgattgtgctgttcttatcattgactccaccactggaggctttgaggctggtatctctaaggatggtcagacccgtgagcacgctcttcttgctt

SEQ ID NO: 166034 - DNA, 413 bp, Arabidopsis thaliana columbia
gcaagagcaacccattcggtgcttcgtcaagtacactaaacctaagcacggacctgagactcggactcagcttcgggacatcctcagggactcaatatttcaacggtggctatgggtactccgttgcagctccggcggtagaggatgcggaatatgtggcggctgtggaggaggaagaagagaatgagtgtaacagtgtagggagcttttacgtgaaagtgaacatggaaggagttccaattggaagaaagatcgatctaatgtctcttaatggctactgcgacttgatcagaacccttgatttcatgttcaacgcatccattctctgggctgaagaagaagacatgtgcaatgagaagagtcacgtgctaacgtacgcagataaggaaggtgactggatgatgggtggagat

SEQ ID NO: 166035 - DNA, 388 bp, Arabidopsis thaliana columbia
aactttatctcccaaaacacaaaacaaaaaaatttggcttccactgctctctcaagcgccatcgtcggaacttcattcatccgtcgttccccagctccaatcagtctccgttcccttccatcagccaacacacaatccctcttcggtctcaaatcaggcaccgctcgtggtggacgtgtcacagccatggctacatacaaggtcaagttcatcacaccagaaggtgagctagaggttgagtgtgacgacgacgtctacgttcttgatgctgctgaggaagctggaatcgatttgccttactcttgccgtgctggttcttgttcgagctgtgctggtaaagttgtgtctggatctggtgatcagtctgaccagagtttccttgatgatg

SEQ ID NO: 166036 - DNA, 385 bp, Arabidopsis thaliana columbia
gaaaacacaaaaacaaagattataatggctttcttataccatggctttgtcctcccctgccttcgccggaaaggctgtgaagcctgccgcatcagatgtcctcggaagcggccgtgtgaccatgaggaagactgtcgccaagccaaagggtccatcaggcagcccatggtacggatctgaccgagtcaagtacttgggtccattctccggcgagcccccgagctaccttaccggtgagttccccggtgactacggatgggacaccgctggtctatccgccgacccagagaccttcgccaggaaccgtgagctagaagttatccacagcagatgggccatgctcggagccctaagctgcgttttccctgagctattggctaggaac

SEQ ID NO: 166037 - DNA, 455 bp, Arabidopsis thaliana columbia
gagagaacgaggccttgatggcaataagaaagttgggatatggagagttgttgttgttcataatctcccctattcagatggaaggcgcaatggaaaggtgcccaagcttcttgtccataggatgtttccaaatgctcgctattctttatggattgacggaaaactagaacttgtcgtcgatccatatcaaattcttgaaagattcttgtggaggaaaaatgctacttttgctatttctagacattacaaacgatttgatgtcttagtggaagccgaagcaaataaagctgctggtaaatatcataatgcttctatcgactttcaagtggatttttacaagaacgaacggttaaccccttattctggcgcaaagctcccaatcacaagcgacgtaccccgagggttgttgtcatttaagagagtatgtacccattagcacccttttcacttgtctt

SEQ ID NO: 166038 - DNA, 464 bp, Arabidopsis thaliana columbia
ctctctctgatctccgcttctcttcgccaacaaatgtcgaccgctcctctctccggcttctttctcacttcactttctccttctcaatcttctctccagaaactctctcttcgtacttcttccaccgtcgcttgcctcccacccgcctcttcttcttcctcatcttcctcctcctcgtcttcccgttccgttccaacgcttatccgtaacgagccagtttttgccgctcctgctcctatcattgccccttattggagtgaagagatgggaaccgaagcatacgacgaggctattgaagctctcaagaagcttctcatcgagaaggaagagctaaagacggttgcagcggcaaaggtggagcagatcacagcggctcttcagacaggtacttcatccgacaagaaagctttcgaccccgtcgaaaccattaagccgggcttcatcaaattcaagaaggagaaata

SEQ ID NO: 166039 - DNA, 426 bp, Arabidopsis thaliana columbia
  unsure (1)..(426): unsure at all n locations
gactcttcaatctctcccaaagcctaaagcgattactgcaaatctctcgcgactctctctttcaagatgcaaatcttcgtgaaaacactcactggcaagactatcactctcgaggttgagagctctgacaccatcgacaatgttaaggcaaagattcaggacaaggaaggcattcctccggatcagcaaagattaatattcgccggtaaacagctagaagatggccgtaccttggccgattacaacattcagaaagaatcaacccttcatttggttctccgtttaagaggtggtatgcaaatctttgtcaagactctgactggcaagaccattactttggaggttgagagctctgacactattgacaacgtcaaagcaaagatccaggacaaggaaggaatccctncggatcagcagagacttatc

SEQ ID NO: 166040 - DNA, 481 bp, Arabidopsis thaliana columbia
  unsure (1)..(481): unsure at all n locations
ctcatcttcacaggaaacaatggtgtttgtgatttcctccaaatcgaatgcttacttcaagaggtaccaagtgaagttcaggagaaggagagatgggaagactgattacagggcaaggatccgtcttatcaatcaagacaagaacaagtacaacacccctaagtaccgttttgttgttcgatttaccaacaaagacattgtggcacagattgtatctgcaagcatagctggtgacattgttaaagcttcggcttacgcacatgagcttcctcagtatggactcactgttggtcttaccaactatgctgcagcttactgtactggccttcttttggctcgtcgtgttctgaaaatgctggaaatggatgatgagtacgagggaaacgtagaggccactggagaggacttttctgtggaaccaactgattccagaagacccttccgtgctcttcttgatgttggacttatcangactaccact

SEQ ID NO: 166041 - DNA, 385 bp, Arabidopsis thaliana columbia
  unsure (1)..(385): unsure at all n locations
aaaaaaaaacccttcaaaacatttccttattcatacttcttcatctacaacaatggctggagttgcctttggttcctttgatgattcattcagcttggcttctctaagagcttacctcgctgagttcatctccactttactctttgttttcgctggtgttggctctgccattgcctacgcaaagctgacgtcggacgctgctcttgatacaccgggactagtggccancgcggtttgtcatggttttgctctcttcgtggccgttgcaatcggagccaacatctccggtggccatgtgaacccagccgtcacttttggtcttgctgtcggtggtcaaatcacagtcatcaccggagttttctactggatcgctcagcttctcggc

SEQ ID NO: 166042 - DNA, 461 bp, Arabidopsis thaliana columbia
ccaataagcaatttgctcattagagaacagaaaatattaaaacaatggcaactcaagccgccgggatcttcaactccgccataacaaccgccgcaacctccggcgtcaagaaactccactttttctcaacaacccaccgtcccaaatccctctccttcaccaaaaccgcaatccgcgccgagaaaacagattcctccgccgccgctgctgcagcccccgccacgaaagaagctcccgtgggattcacgccaccgcagctagacccaaacacaccgtctccgatcttcgctggaagcaccggtggtcttctacgtaaagcgcaagtggaagagttctacgttatcacgtggaactcaccgaaagaacagatctttgagatgccgacaggaggagcagcgatcatgagagaaggtccgaatcttctgaagctagcgaggaaaagaccgtgttagctttgggga

SEQ ID NO: 166043 - DNA, 440 bp, Arabidopsis thaliana columbia
cgggcttattaatgtcatcgagacgataatctcttatttgtcatctccttcatctctcaggtaaaaaaactgagtcgagatttggtgacgtgatgaatcatttggtgataatctctgtgttcttgagctcagtattgttgttatatagaggagaatctggaatcacaagtagttttattcgatctgaatggcctgcggttgatataccacttgatcatcatgttttcaaagtcccaaaaggatataatgcaccacaacaagtacacataactcaaggtgattatgatggtaaagctgttatcatctcttgggttacacctgatgaacctggttctagccaagtacattacggggcggttcaggggaaatatgagtttgttgctcaagggacttaccataactacacgttttacaagtataagtctggctttattcatcac

SEQ ID NO: 166044 - DNA, 473 bp, Arabidopsis thaliana columbia
  unsure (1)..(473): unsure at all n locations
atttttaagaaaataggtgacaaacaaacttccatatanggtctttacgacctctaccacatcacaaagtcatatccaaaggttgatatattttcccaacttcaaaatgctagtgaagcgtttcgtacttacatcagagatggtctggcacaggttgagaagaatgcagctgcgggaagaacaccttcaagcctaccgttgtcaactcctcccccttcgtccttagctcttccatctcctgatattccttccttgtcctctttagatgtgaagcctttgatgaaccctagatctgatttatacacagacgacatccgagccagtaacatgaatcctggagtgatgacagggacgctagatgcaatcagagaaaggatgaagaacatgcaactggcttcatcagagccagtaagcaaaccgctgatgccaacaaacgataacttatcaatgaaccaacagagcgttcccccgag

SEQ ID NO: 166045 - DNA, 442 bp, Arabidopsis thaliana columbia
  unsure (1)..(442): unsure at all n locations
taaaatcaatctctcaaatctctcaaccgtgatcaagatgcagatcaatgntatgactctcaccggaaagactatcaccctcgaggtggaaagctctgacaccatcgacaacgttaaggccaagatccaggataaggaaggtattcctccggatcagcagaggcttatcttcgccggaaagcagttggaggatggccgcacgttggcggattacaatatccagaaggaatccaccctccacttggttctcaggctccgtggtggtatgcagattttcgttaaaaccctaacgggaaagacgattacttttgaggtggagagctctgacaccattgacaacgttaaggccaagatccaagataaggagggtatttcttcggaccagcagaggttgatcttcgacggtaagcaacttgaggacggcagaacttttgcggattac

SEQ ID NO: 166046 - DNA, 419 bp, Arabidopsis thaliana columbia
cttgaataaaatcagaattacaaacaaaaatggttttgcaaaagcttcctctcattgggctgcttttgctcctgaccatcgtcgcctctccagcaaatgcagatggacctgtttgcccgccgtcgaacaaactaagccgggcaagtttccctgaaggttttttatttggcacggctactgcggcataccaggtcgaaggtgcgattaatgaaacttgtcgtggaccagccttatgggacatctactgtagaagatatccagagaggtgcaataacgataacggcgatgtggccgttgatttcttccatcgttataaggaagatatccaactaatgaagaatctaaacacagacgcctttagaatgtctatcgcatggccaagaatatttcctcatgggagaaaggagaaaggagtgagt

SEQ ID NO: 166047 - DNA, 386 bp, Arabidopsis thaliana columbia
gcttcttcttctaccaatctaattcctctcttttgtttcttgtgttgtgacgcatactcgtcgcagtcttgagatatggccgccgcagtttccaccgtcggtgccatcaacagagctccgttgagcttgaacgggtcaggatcaggagctgtatcagccccagcttcaaccttcttgggaaagaaagttgtaactgtgtcgagattcgcacagagcaacaagaagagcaacggatcattcaaggtgttggctgtgaaagaagacaaacaaaccgatggagacagatggagaggtcttgcctacgacacttctgatgatcaacaagacatcaccagaggcaagggtatggttgactctgtcttccaagcttctatgggaaccggaac

SEQ ID NO: 166048 - DNA, 373 bp, Arabidopsis thaliana columbia
agaggaggtgggcagacaaagaagaagaagaagatgttctcggcgtgcttcaatggcgatatcagtagcagcttcgtcctctatggccgtgatggttccacgtgttcccgccgtatccacccgttgctccgccgtcccttatcttcctcctcgctcctttggccgatcctctttcaccgttccgttgaagcttgtttcagggaatggattgcaaaaagttgaattgttgaagacaagagcttcttcagaagagaccttgtccattgataccaacgaactcatcacagatttgaaggaaaagtgggatggtcttgagaacaaatctactgtacttatataatggaggggagccattggtgcttgttggttatct

SEQ ID NO: 166049 - DNA, 434 bp, Arabidopsis thaliana columbia
gaaactttcaccggttatggcaaaggagctgaatgaagcaaactcagcttcaaaacctatacaccaaactctactttcaaggactacgccaaaaagggcgtcgcttttgctaaatacaacgtttcaacaaccaccgcgaacaccgtcggcgatggcaaaaccgtaaataaatggatcgaaccgggtaaattctttagagaatcgtcgcttaaagaaggtacagtgattcctatgcctgatattaaagataaaatgcctaaaaggtcgtttttaccccggagtataattacgaaactacccttctctacttctaaactcggtgagattaagagaatcttccacgccgttgagaattcgacgatgggaggtataatcaccgacgcagtgacggagtgcgagaggccaccgagcgtcggagagacgaaacggtgcgt

SEQ ID NO: 166050 - DNA, 413 bp, Arabidopsis thaliana columbia
  unsure (1)..(413): unsure at all n locations
ggcgacggaaacggaagttgtagctccggtaactgnatagcaacggcggaagcaaaggatgttgcaagtacggtggtcctggttacgcgactcctctcgccgctatgtctggtccatcggagaaacttatctacgtaaccgccgtctacaccggaactggaatagataaaccggattatttggcgacggtggatgtagatccaagctcgccttcgtattcaagtgttattcatagattaccaatgccttttgttggtgatgagcttcatcattctggttggaactcttgtagttcttgccatggtgatgcttctgttgatagacgttatctcgggttaccgtctcttatatctggtcgcatttatgcgattgatactaaggaaaacccgagggcttcgtctttgtataagtat

SEQ ID NO: 166051 - DNA, 458 bp, Arabidopsis thaliana columbia
ctccttcaccaaaaccgccatccgcgccgagatatcagagtcctcctctgctgccccagccgtgaaagaagctccagttggattcactcccccgcagctagacccaaacacaccatcaccaatcttcgccggaagcacaggaggtctcctccgtaaagcacaagtagaggaattttacgtgatcacatggaactcaccgaaagaacaaatctttgagatgccaacaggaggagctgcgataatgagagaaggaccgaatctattgaaactggcgaggaaagaacagtgtttggctttaggtacgaggttgaggtcaaagtacaagatcacttaccagttttacagagtgttccctaacggagaggttcaatatcttcacccgaaagatggagtttatccagagaaagcgaatccaggaagaagaggtgttggactaaacatgagatccatcggtaaaa

SEQ ID NO: 166052 - DNA, 396 bp, Arabidopsis thaliana columbia
  unsure (1)..(396): unsure at all n locations
cgccattctagttgctccaatgtgtaagatatctgatatggtgaagccacaccctatagtgattaatctgttaactagagtcgaagaaatcatacctaaatggaaaatagttccaacaaaagacgtgattgacgctgctttcaaggacctcgtcaagcgagaagaggtaaggaacaacaagctgatatatcaagacaagcctaggctcaaaaccgcacttgagatgcttaggacaagcatgaacctagaagacactctccacgagataacaatgccattctttgtattacacggagaagcagatacagtgacggatccagaggtaagcaaagctctgtacgagaaagctagcacaagggacangacgctcaagttgtaatccaaggatgtggcacg

SEQ ID NO: 166053 - DNA, 449 bp, Arabidopsis thaliana columbia
gcccacgcgtcggccatctagtgtccaaggaagaataagtaatgtgaagccacaccctatagcgatggggctgtttactagagtcgaagaaatcatacctaaatggaaaatagttccaacaaaagacgtgattgacgctgctttcaaggacctcgttaagcgagaagaggtaaggaacaacaagctgatatatcaagacaagcctaggctaaagaccgcacttgagacgctaagaacaagcatgaacctagaagacactctccacgagataacaatgccattctttgtattacacggagaagcagttacagtgacggatccagaggtaagctaagctttgtactagaacgctagcacagggtacaggacgcatcaagatctattcagggatctatcacggactgacgtcgaatgagtctgattgtaacgtggaccttgttattgctgac

SEQ ID NO: 166054 - DNA, 474 bp, Arabidopsis thaliana columbia
ctgatgttggagtctactacgcacctggctgtgttctatagaggtgaagagtttgatggatcagaagcagtgcgtaggatggagaaatggctgatagagaaccatggattccagcctcagtacgcggtgtctgagctcgacgagaagagcttctggagaatgtttaatggtgaattgtatgaggagtgccgcaagaagtatagagctattggaacgttcatgagtgtttactacaagtccaagaaaggaaggaagactgagaaagaagttagagaagccgaacaagctcatctcgaaactgcttatgccgaggcagattaagtaataataagccttggtttgatgtaatggctcgggatgattattgttattcctagtagtgtctggtatggtggtgtttcctaatttcagttttagtgtcttgaagactcttggtggtggtggttgcttcttggtgttggttgactcattctg

SEQ ID NO: 166055 - DNA, 481 bp, Arabidopsis thaliana columbia
ctcttcacgaaatcccatttgagaaagtactgctttttaaatggcttctcctattcccgtcggcgttactaaggaacaggcgtttagtatggcacaaacggagatggagtatcgcgtggaactctttaacaagcttgctcaaacatgctttaataaatgtgtggataaaaggtacaaggaagctgagctaaacatgggtgagaatagttgcatcgaccgttgtgtttccaagtactggcaggtaaatggaatggttggacagcttctaagtgctggcaagcctcccgtgtaatccagtttaaaggcaattattacagaccaaaaagctcatggagggaacacaactctgttctttgtttttctaaagtttaaggcaatcttgtttttattgtcaagaaagttgcatcacatttttggcgctgatttggacaaattatgcaattccatgtgaacccattattattaacctaagggtgaaatg

SEQ ID NO: 166056 - DNA, 420 bp, Arabidopsis thaliana columbia
tactttgaacacacttcttttattaaatcggatcacaaaaaaaaaaaaaaaaaaaaaaaaaaaaaaaaaaaaaaaaaaaaaaaaaaaaaaaaaaaaaaaaaaaaaaaaaaaaaaaaaaaaaaaaaaaaaaaaaaaaaaaaaaaaaaaaaaaaaaaaaaaaaaaaaaaaaaggggggggccgtttaaagggaccaaagttaacttccccgggcatgcaaggtaaaagttttttaaagggggccccaaaataaaattaacgggccggggttaaaaaactggggaacgggaaaaacccgggggtaaccaaaataaaaggccttgaaaaaaaaccccttttcgccagtgggggaaaaaacaaaaaggcccgaaccaatcgcctttccaaaaaattgcccaacctaaaagggaaaagggaccccc

SEQ ID NO: 166057 - DNA, 440 bp, Arabidopsis thaliana columbia
atgaaatagtagtcgaagaagagcaatcacagtctcaggagattactccagttccaccatcttcttcgtcttcgccttcgttagtggtggaagacgacgatgagatgaagctcaagcacttggaattcattcaagtcgcggcggtttacttcgccgcctgtttctcgaccctctacgagttggctaaagacaacgctggtccactcaaactcggcgtcgagaacattgaagattgcgttcgaaccgtgcttgctccattatacgaaaaattccacgacgttcctttcaagcttctccttttcgtcgatcgtaaggtggacgatgtgttcttcgatgttgagacatatgttccgtcattggtgaagcaagcttctagccaagcgctcacggtggcccacgaggtgcagcgcaaccgcgttgtggacactaccaagagcatt

SEQ ID NO: 166058 - DNA, 441 bp, Arabidopsis thaliana columbia
aaaaccaaaagaagaagagaaacaacaagaagaatctatggcttcctctatgttctcctccaccgctgtggttacctccccggctcaagccaccatggtcgctccattcaccggcttgaagtcatccgcttctttcccggtcacccgcaaggccaacaacgacattacttccatcacaagcaacggaggaagagttagctgcatgaaggtgtggccaccaatcggaaagaagaagtttgagactctatcttacctccctgaccttagtgacgttgaattggctaaggaagttgactaccttctccgcaacaagtggattccttgggttgaattcgagttggagcacggatttgtgtaccgtgagcacggaaacactcccggatactatgatggacgatactggacaatgtggaagctttcattggtcggatgcaccgactt

SEQ ID NO: 166059 - DNA, 475 bp, Arabidopsis thaliana columbia
attcctagaaaatattaccctagaggcctttgttattgcttcctcgtcctcttcagcaggaactcatctgtcttggaagaattattaccatgtctgcttttgtcagcaaatacgaagatgagctgatcaagacggccaagtacattgcaacgccgggaaggggcattttggcggcagatgagagcacagaaaccattgggaaacgattcgccggaatcaatgttgagaacactgagtccaaccgccaagcttaccgtgagctcctcttcacttcccctggcagatacccttgcctctctggtgttatactcttcgaggaaaccctctaccagaaaacctctgatggcaaacccttcgtcgatctcctcatggagaacggtgttatccccggaatcaaagtggacaaggggttggttgatctagcagggaccaacggcgagaccactactcaaggtctagactcgcttggtgcacg

SEQ ID NO: 166060 - DNA, 345 bp, Arabidopsis thaliana columbia
gcgttttaagctctcactagcaagcaagtactatttacaatggcgtcaagcactgcgactatgctcaaagcctcaccggtgaaatctgattgggttaagggacagagtcttctccttcgtcaaccttcctctgtctcagctattcgcagccacgtggcacctttcgctctcaccgtccgagccggttctgcttacgccgatgagctcgtcaaaaccgctaaaacaatcgcgtcttcgggacacggaattatggcgatggatgagtccaacgcgacttgtggaaagcgtttggcgtcaattgggctagagaacacggaggctaacccgcaagcttacaggacgttg

SEQ ID NO: 166061 - DNA, 314 bp, Arabidopsis thaliana columbia
caacatctccggtggccatgtgaacccagtcgatacttttggtcttgctgtcggtggtcaaatcacagtcatcaccggagttttctactggatcgctcagcttctcggctccaccgccgcttgtttcctccttaaatacgtcaccggtggattggcggttccaacccacagcgttgcggctggactaggatcgatagaaggagtagtgatggagatcatcatcaccttcgctttggtctacactgtctacgccaccgccgctgatcccaagaagggttctcttggaaccatcgctcctctcgccattggtctta

SEQ ID NO: 166062 - DNA, 192 bp, Arabidopsis thaliana columbia
aaaaaaagaaaacacaaaaacaaagattataattttttcctcaaccatggctttgtcctcccctgccttcgccggaaaggctgtgaagcctgccgcatcagatgtcctcggaagcggccgtgtgaccatgaggaagactgtcgccaagccaaagggtccatcaggcagcccatggtacggatctgaccgagt

SEQ ID NO: 166063 - DNA, 434 bp, Arabidopsis thaliana columbia
agtaaattgaagaaatgaccttaaatctttgtgtactgactccgaatcgaattgtttgggattcagaagtaaaagaaatcattttatctactaatagtggacaaattggtgtattagcaaaccacgcgccgattgccacagctgttgatataggtattttgaaaatacgccttgctaaccaatggttaacgatggctctgatgggcggttttgctagaataggcaataatgaaatcactattttagtaaatgatgcagagaagaatagtgacattgatccacaagaagctcagcaaactcttgaaatagcagaagctaacttgagaaaagctgaaggtaagagacagacaattgaggctaatctagctctcagacgagctcggacacgagtcgaggctctcaatacgatttgattttgtaactagctgacgtgt

SEQ ID NO: 166064 - DNA, 257 bp, Arabidopsis thaliana columbia
  unsure (1)..(257): unsure at all n locations
gttggattcgttcttcttcgaatcgaaacttctgtttaagaagctgaagcagagtaaatagagtaaattgctgctcttataattatatatttttggttattgttgttgtcaagctttggtaaaacttgatggatacatgttacatttgtttatgaagaagctcttttcttggtngatgaaaaaaaaaaaaaaaaaaaaaaaaaaaaaaaaaaaaaaaaaaaaaaaaaaaaaaaaaaaaaaaggggaacaaaataaaa

SEQ ID NO: 166065 - DNA, 282 bp, Arabidopsis thaliana columbia
  unsure (1)..(282): unsure at all n locations
tgcacgatctgtgaagatcaagagaagcaaggacnatgncaagtttaaggtcagatgctcgaggtacctctacacgctctgcgtctttgaccaagagaaagccgacaagcttaagcagtctcttcctccaggtttgagtgtacaagacctttgaagatgaagcaaagctcttctgcagattggagcgcctttggtgacgaatcctttgcatcattttataatttccttaggagagtttattttgcgtcgataaatttatgtggagactttacgagattgagt

SEQ ID NO: 166066 - DNA, 331 bp, Arabidopsis thaliana columbia
  unsure (1)..(331): unsure at all n locations
atcgaagaaaagagaacacacaaacaaagattataacgtcctctatgatcctgtttcgttagttcgggaccataccgtaaaggagaagctggtggaacgaggaaactctgtgcaaagctaccatggagacatattgtatgaaccgtgggagatatactgcgaaaagggcaaaccttttacgagtttcaattcttactggaagaaatgcttagatatgtcgattgaatccgntatgcttactcctacttggcggttgatgccaataactgcagcggctgaagcgatttgggcgtgttcgattgaagaactaaggctggagaatgaggtctag

SEQ ID NO: 166067 - DNA, 435 bp, Arabidopsis thaliana columbia
  unsure (1)..(435): unsure at all n locations
caccattggagaacttgggctgcttgcttcatatatgcggcttggcgcaggtacaagagaagagttatggagaataacctcactgcgattgaatcaatggaaaatgaagaaggagaagtaggagaagaattagtagtagtagaagaagaagagtgtgttgaggagagtcctagaacaaagatgaaccttggagttatggttttggcatcgcgttttgcagctaatacaagacgcggtgttgcagctcagagagttaaggatgtagaattaccccggtttaagaaacccgaggagcctgatttctctgctgagcatgatgattgactgatgtataaccaggagaagaagctgactttgttccatagaagatcttaatgacaagaacactacagagtaagtttcctgttcctttgngagacataaagaaagaaactc

SEQ ID NO: 166068 - DNA, 343 bp, Arabidopsis thaliana columbia
gttgttgacgacgcgtttccgctcactaatttatataacctttttgtgtctccgtcgtcttttgatcttcaatctcagttttgagctgaagattatcgtatcgacctgcgattctcttcagatcgataatccatggctgcagctggaaacaagagcattaacgccaaattggtgttgcttggagatgttggtgctggaaaatcaagtcttgtgttacggtttgtcaaagatcagtttgttgaattccaggaatcaaccattggtgctgcttttttctcacaaacgttagctgtgaacgatgccactgtgaagtttgagatttgggatacagcgggtcaagaac

SEQ ID NO: 166069 - DNA, 380 bp, Arabidopsis thaliana columbia
acggacacaaagagaaaaaaaagagatggagagaatcacgccggtgagaaaccctcacacttccaccgccgatctgctttcttggtcggaaactcctcctcctcctcaccactcaaccccttccgccgctcgttctcaccagccgtccgatggaatcagcaagattctaggcggtggtcagatcacagatgaagaagcccagtcgcttaataagctaaagaattgttcagggtacaagttaaaagagatgactggtagtggcatatttactgataagggaaaagttggatctgaatccgatgctactactgatccaaagactggactccgttactatcagcagactctgaatggaatgagtcagatatctttcagtgctg

SEQ ID NO: 166070 - DNA, 314 bp, Arabidopsis thaliana columbia
gaacgaatctttagcaatcggccggatcagatcctggttcgggtttggatcctggaagtgataatgggccgggtcagagtcgggttgggtcgacggtgcaaagagttaagagggaagaggtggaagcgaagataacggcgtggcagacggcaaaactggctaagattaataacaggtttaagagggaagacgccgttattaacggttggtttaatgaacaagttaacaaggccaactcttggatgaagaaaattgagaaggagctagaagagagaaaagcaaaagcgatggagaaaacgcaaaacaatgtggcg

SEQ ID NO: 166071 - DNA, 282 bp, Arabidopsis thaliana columbia
caaaaaaaagaaaacacaaaaacaaagattataatttcttcctcaaccatggctttgtcctcccctgccttcgccggaaaggctgtgaagcctgccgcatcagatgtcctcggaagcggccgtgtgaccatgaggaagactgtcgccaagccaaagggtccatcaggcagcccatggtacggatctgaccgagtcaagtacttgggtccattctccggcgagcccccgagctaccttaccggtgagttccccggtgactacggatgggacaccgctggtcta

SEQ ID NO: 166072 - DNA, 441 bp, Arabidopsis thaliana columbia
gcttctacactcgagcccactctcttctcctccttttttcttccaatccggtcacggttcctatatctccggtccggttccgtcttcgtctccgtcgtctctcatcatctcccgtcgcctccgttttcgaccttcattcctccaatcaggacgcgaattcgaacagagaagacaaagacaccaaaattggattctccgatgataaatcgagaaaatcaggttcaaatcctccacgatggaatccaggggaagtagttatgaacaaatcgaagaaagggaaatcgaaaactgtttgggtttgtgagagctgtggtcactcggaagggcaatggtgggggagttgtcgtgcttgtcatacggttgggactatgaaacgtttttctgaaggttctgagtcaagtgctagtgggtggggtggcaacggtactggctcgggtttta

SEQ ID NO: 166073 - DNA, 470 bp, Arabidopsis thaliana columbia
cacatcttattaactaaagagccttttacttgcgccatactctcaccgcaatggccgcctcgacaatggctctctcctctcctgctttgaccggaaaggccgttaagctatccccggcggcctccgaagtatttggaaccggccgaatcaccatgcgcaaagcctccaagcccaccggtccatccggcagcccatggtacggatccgaccgagtcaagtacttgggtccattctccggtgagcctccgagctacctcactggagagttccccggtgattacgggtgggacactgccggtctatccgccgatcccgagaccttcgctaggaaccgtgagctagaagttatccacagcagatgggccatgctcggagccctaggctgcgttttccctgagctattggctaggaacggaatgaagttcggagaagcgggttggttcaaggctggttcacagatcttcagcgac

SEQ ID NO: 166074 - DNA, 429 bp, Arabidopsis thaliana columbia
cagggccagagaagcatcaggcggtagcactgagtatatactctgacctctctgagttcttcagatgtgcgatgaggggttatcaagatacactctacacgcacaccatgcgtcagttctaccgtgagtgcaccatcacgggaacagtagattttatatttggggatgggactgttgtgtttcaaaactgtcaaattttggctaaaagaggactccctaaccaaaagaacaccatcactgcacaaggccggaaagatgtcaaccaaccctcaggattctcaattcaattcagcaatatctcggcggacgcagatttggtcccatacctaaacacgacaaggacgtatctaggaaggccatggaagctatattcgagaacggttttcattaggaacaatatgagcgactgtgtgagacctcgaggatggc

SEQ ID NO: 166075 - DNA, 356 bp, Arabidopsis thaliana columbia
gttttgcaaaagcttcctctcattgggctgcttttgctcctgaccatcgtcgcctctccagcaaatgcagatggacctgtttgcccgccgtcgaacaaactaagccgggcaagtttccctgaaggttttttatttggcacggctactgcggcataccaggtcgaaggtgcgattaatgaaacttgtcgtggaccagccttatgggacatctactgtagaagatatccagagaggtgcaataacgataacggcgatgtggccgttgatttcttccatcgttataaggaagatatccaactaatgaagaatctaaacacagacgcctttagaatgtctatctcatggcccaaaatatt

SEQ ID NO: 166076 - DNA, 437 bp, Arabidopsis thaliana columbia
atgggtaccggaaccagtgaagggattcctcgttatagctgcctcactaatcctttgaaaacatgttcggtatgcacaaaagcaacagaaccaggaaacagaaataggagacttaacaccagcattcttgttcggtacattagaccatccggaacaagtaacatcctcattgattgtggcaagttcttctaccatagtgcccttcgatggtttcccaccttcgggctaagaacacttgatgcagttgtaattactcattctcatgctgacgcaattggaggtctctgaaactgacaagtcttgatgatcttcgtgattggacaaacaatgtccaacctcacattccaatttacactgctatacgtgatcctgaggtgatgaagaagacccattattacttggttgatacaagtgtcatcatacccggagctgcagtc

SEQ ID NO: 166077 - DNA, 439 bp, Arabidopsis thaliana columbia
ggcagcatcatcagtactactctcgtgcttcaatttccatcatcaaccaaaccttctccatggctgcaactactcatctaaccaaacactcctcagattcaacttttcaaccccaaaacctctcctgatctcctcacggagctgctcacgacgattcagagtcttgtcagagaccatcaccgtcaaattggaagaggaggagaaggatgatggtgcaagtgctgttcttgatcctcctgccgccgttaacactaagctctacttcggtaacttgccttacaatgttgacagtgcaactctggctcaaatcattcaagatttcgctaaccctgagctcggtgaggttctttacaacagagataccggacagagtcgtggattcgccttcgttaccatgagcaatgtcgaagattgcaacatcatcatcgataacctcgat

SEQ ID NO: 166078 - DNA, 457 bp, Arabidopsis thaliana columbia
cccaaagcaaaagcttcaccgatcttcctcgttttgtctcgaatattaagtgaaatatgggtttcataatggaattcgcggagaatttggtgttaaggttaatggagaatccagaggaacgagacaggaaagcgagggaacacatatatgagatgcatgagaggtgcaagaagattaaggagatgtgggcattgcctattcgtccttatggattctggacatttgagcgtcacaatgctcagcttcgttgggatcctcagatcagtcaggttgctggtcgaagggatccttatgatgatcttctcgaggacaactacactcctccttcttcctcttcctcatcttcagactaatcaaacaatgaaagaagatgtgttatgctgtctggatggatgcatgtttgttttcaagctatttttctcggagtttgtccgcttctggttctatttgttcttaa

SEQ ID NO: 166079 - DNA, 405 bp, Arabidopsis thaliana columbia
ggctttgctggcgtttttcctgagcataaatatgagatagttaagcgactacaagcgaggaagcatatctgtggaatgacaggtgatggagtaaatgatgcgcctgctcttaaaaaggctgatattggcattgcagttgctgatgcaactgatgcagcacgtagtgcttcagatatcgatcttactgaacctggtcttagtgttatcatcagcgctgtcttaaccagccgcgctatcttgcagagaatgaaaaattatacaatctatgcggtttacatcactatccgtattgttcttggcttcatgctgctagctcttatattgaagattgactttccacccttcatggatcttatcattgccattcttaatgatggcacaattatgacaatatcaaaagacaga

SEQ ID NO: 166080 - DNA, 392 bp, Arabidopsis thaliana columbia
acaaaacccaattagccggagatggccgcatcattcgccgctgctgcagctgcttcttccatcatgggtactcgggtggctcccggtatccatcccggttcaggtcggttcacagccgtgttcggtttcggaaagaagaaggcagctcccaaaaagagtgccaaaaagacggtgactacggaccggcctctttggtacccaggcgccatttctcctgactggcttgatggttccttggttggagattacggttttgatcccttcggtttaggcaaaccggccgagtatcttcaattcgatatcgattcactagaccagaatctggctaagaacttggccggagacgtgatcggaacccgtacggaagctgccgacgccaaatcgacgccggt

SEQ ID NO: 166081 - DNA, 359 bp, Arabidopsis thaliana columbia
atcaaatcttatcaatggcttcctcactcgttttatcttttcaacccaggtcagcatttttgggagatagaaatgtgttcaaggtctcaagcacaccttttgctcaagtgggttactccagtaagaccattgagtgcaaagaatcaaggataggaaagcaaccgatcgctgtaccttccaatgtaaccattgcattggaaggtcaagacttgaaagtgaagggtccattaggagagctggctttaacttacccacgcgaagttgagcttacaaaggaagaatccggtttcttaagggtcaaaaaaaccgtcgaaactagaagagccaaccaaatgcacggccttttcaggacgctttac

SEQ ID NO: 166082 - DNA, 446 bp, Arabidopsis thaliana columbia
  unsure (1)..(446): unsure at all n locations
aaaaccaaaagaagaagagaaacaacaagatgatttaatggcttcctctatgttctcctccaccgctgtggttacctccccggctcaagccaccatggtcgctccattcaccggcttgaagtcatccgcttctttcccggtcacccgcaaggccaacaacgacattacttccatcacaagcaacggaggaagagttagctgcatgaaggtgtggccaccaatcggaaagaagaagtttgagactctatcttacctccctgaccttagtgacgttgaattggctaaggaagttgactaccttctccgcaacaagtggattccttgtgttgaattcgagttggagcacggatttgtgtaccgtgagcacggaaacactcccggatactatgatggacgatactggacaatgtggaagcttncattggtcggatgcaccgactccgctc

SEQ ID NO: 166083 - DNA, 456 bp, Arabidopsis thaliana columbia; identical to SEQ ID NO: 131544

SEQ ID NO: 166084 - DNA, 459 bp, Arabidopsis thaliana columbia
  unsure (1)..(459): unsure at all n locations
gtacccaactgaggagctcaagagcttggtgaatattcttggatggcaggttctagctattggaaactcggcgacacccaaggattggagtcttaaaggttccatctttttgtctctcgatgctcaagctgaattgggttatcgagttttagatcacttgccttatgattctttcgtaaggaagagtgttggttacttgttcgcgatccagcacggtgcgaagaagatctatgatgctgatgatcgtggggaagtgattgatggagatctaggcaagcatnttgatgttgagttagttggtctagattctaagcaagaaccgattttgcagtatagtcatgagaaccccaataggactgtggttaatccttatattcatttcgggcaacgttccgtttggcctaaaggtttgccattagagaatgtaggtgagatcaatcatgaggagtattacactga

SEQ ID NO: 166085 - DNA, 452 bp, Arabidopsis thaliana columbia
caaccctatacacaagaaggtccctgtcctcattctctatggtagatcgatagccgaatcattggtgattgtcgaatacatcgaagatacgtggaagacaactcacacgatcttgcctcaagatccttatgaacgtgccatggcccggttttgggctaagtatgtggatgaaaaggtaatgttagcagtgaagaaagcttgttggggaccggagagtgaaagagaaaaagaagtgaaagaggcttatgagggtttgaaatgtttagaaaaggagcttggagataaactttttttcggaggagagacaattggatttgtcgatatagcagctgatttcataggatattggttagggattttccaagaagcttcaggcgtcacgatcatgaccgcggaggaggtttcaaaacttcaacgttggtcggaagatttcgggggaaatactttattta

SEQ ID NO: 166086 - DNA, 447 bp, Arabidopsis thaliana columbia
ggcacaaaagcttcaccggagatcagagacgcgaattgttgaacattccaaagacaaagaacacttactgtaagaacaaggaatgcaaaaagcatactttgcacaaggttacccaatacaagaagggtaaagacagtcttgctgctcaaggaaagcgtcgttatgaccgtaaacaatctggttatggtggtcagactaagcctgtcttccacaaaaaggctaagaccacgaagaagattgttttgaggcttcagtgtcaaagctgcaagcacttttcgcagcgtcttatcaagaggtgcacgcatttcgagatcggtggtgacaagaagggaaagggaacatgtctgatttaattgtgtaccgtgagaacggaaacactcccggatactatgatggacgatactggacaatgtggaagcttccattgatcggatgcaccgactccgc

SEQ ID NO: 166087 - DNA, 423 bp, Arabidopsis thaliana columbia
  unsure (1)..(423): unsure at all n locations
atcgcacaagaaaataaaagatttgtagaatcttttaagaaaatggctagcactatgatgactacattgcctcagttcaatggtcttcgagccaccaaaatctctgcagctcctgtacaaggcctggcaagtgttcagcccatgagacgcaagggaaatggagctttgggtgcaaagtgtgacttcatcggttcatcaacaaatctgataatggtaacgtcgacgaccctgatgttgttcgcggggagattcggacttgcgccatcagccaataggaaggcgacagctggacttaggttggaggcacgtgactcangtctacaaacgggtgacccggccgggttcacgcttgcggacactttggcttgtggcaccgttggtcatatcatcggtgtaagagttgtccttggccttaaaaacatt

SEQ ID NO: 166088 - DNA, 456 bp, Arabidopsis thaliana columbia
  unsure (1)..(456): unsure at all n locations
aaacaagtagaaactttaaaacgagagagagtgaaagaaatggcgacatcgggaacgtacgtgacggaggttccgttgaaaggatcggcggagaaacactacaagagctggaagagcgagaaccatgtcttcgctgacgccattggccaccacatccaaaatgtcgttgttcacgaaggcgaacatgactctcacgggtctatcaggagttgggactacacatatgatggaaagaaggagatgttcaaagagaagagagagatagatgatgagaataaaacattgacgaaaagaggactggatggtcacgtgatggagcatctcaaagtatttgatatcatctacgaatttattcccaaatctgaggatagctgcgtctgcaaaatcactatgatatgggagaagcgcaacgatgactntcccgaaccaagcggctacatgaaattcgtcaagcaa

SEQ ID NO: 166089 - DNA, 394 bp, Arabidopsis thaliana columbia
  unsure (1)..(394): unsure at all n locations
cgagcgctcatataataactgcggttatcggattcggcgttttgtcattggcgtgggcgattgcacagctcggatggatcgctggccctgctgtgatgctattgttctctcttgttactctttactcctccacacttcttagcgactgctacagaaccggcgatgcagtgtctggcaagagaaactacacttacatggatgccgttcgatcaattctcggtgggttcaagttcaagatttgtgggttgattcaatacttgaatctctttggtatcgcaattggatacacgatagcagcttccataagcatgatggcgatcaagagatccaactgcttccacaagagtggaggaaaagacccatgtcacatgtncacgcatacctacatgatcgc

SEQ ID NO: 166090 - DNA, 443 bp, Arabidopsis thaliana columbia
agaaccactctttcgtgtcgcaataacaatatgtatgaaagaaaaagaaaaccagagatggcgatgacgacagcatctacggtatttgttctaccggccaatgtcacctcggtcgccggcgcttcgtcgtccaggagctccgtgtctttcttgccgatgagaaacgccggttctaggctcgtagtcagggcagccgaagatcctgctccggcttcctcttcttcaaaagattctccggcagctgccgctgctccggatggagctactgccaccaaacccaagccaccaccgattggtcctaaaaagagggtctaaggtcaagattctaaggagagaatcctattggttcaagaacgttggatcagttgttgcccgtgatcaagaccctaagactcgataccccggtgtgggccgggtcgcaaaagtcaattacgccaacatat

SEQ ID NO: 166091 - DNA, 466 bp, Arabidopsis thaliana columbia
  unsure (1)..(466): unsure at all n locations
cacaaacaaaaaagctatatgtcaatttggctgaactctggccaaatagattgatggattatcgtgggatcaaacatgcaattttccgggcaaaggagagacgaaaagcattgtatggaaaccttgcgaaagagatggatcaaacaaagatgaagaagagtatgaagcagttggtaccaagaacagactgtactgctcagcccaacaccgaattagtggttcagagacaacacagtggggaaaaaaaattgattgttgatccaaatgcaaccagcacttccgtggtcactagtcaaactatggttgacagatcaaatcagcagcagcctgagaagctaaagggaatctcaagctcttgcaatcctacagaggaaacangagtggtcaagagaaagaacgaggctgtaatggctgagaaacaagtcgttcttgccctgaagaagcccgaacatccacagacacgtgt

SEQ ID NO: 166092 - DNA, 456 bp, Arabidopsis thaliana columbia
ttcttccctgtcgccgcatcaaagagaactgatttattttgcttttgaagctctctgcataaacatgactttcaagcgcaggaatggtggcaggaacaagcataaccgtggtcatgtgaaaccaatcaggtgttccaactgtggaaagtgttgccccaaggacaaggcgattaagagatttatcgtaaggaacattgttgagcaggctgctattagagatgttcaagaagctagcgtctacgaaggttacactctcccaaagctttacgctaagacgcagtactgtgtctcgtgtgctatccattctcacgttgtgagagtccgatcccgcaccaaccgtagagttcgtaccccaccacctcgttttgccagacgcaaggaggatacacccaagcctgcacaacctggtcaggctcctcgccctgccggtggtgctcctgctgctcctcgtgcctg

SEQ ID NO: 166093 - DNA, 415 bp, Arabidopsis thaliana columbia
accaaaacaaaaagaaagaacaatggccaaagctcttatccttacaatctttctctttctcttgatagcttccaatgtccaatccgctcgacttctcgatgaggttcaaactcagccacaattagtcccccaggtaccggaagaggaagatgatagtccacaagccgtaacaacaactccaacaccaattcctctcccaggacccgccacgggaggacccgagccaatcctagagttctttatgcatgacgtgctaggcgggtcacacccatcagcacgtgtggttacagggatagtagcacaaacagaggtgaatggaataccgttttctaaatccagcaacaacattttcccaagagataacccaatgcccgttgtgaacgcaaacagcatcaacaacttaatcaatccaaac

SEQ ID NO: 166094 - DNA, 412 bp, Arabidopsis thaliana columbia
gtatgcttttctctatgccaagactcatttttgtgtgagagtttctgctatccacaaagccaacattatgcagaaaactgacggtctctttctcaagtgttgtcgtgaggttgctgagaagtatcctgagatcacttacgaggaggtcgttattgacaactgctgtatgatgcttgtgaaaaacccagcactttttgatgtcttggtgatgccaaacctgtacggtgacattattagcgatctgtgtgccggattggttggaggactaggattgactccaagttgtaatattggagaagatggtttagcccttgctgaaacagttcactgttctgcacctgatatcgctggaaagaacttggcgaacccaaccgcgttgctcttgagtggagtgatgatgttgcgtcacctc

SEQ ID NO: 166095 - DNA, 465 bp, Arabidopsis thaliana columbia
gactatcctaacttaaagagcggataatgttgtttgtggtcagagagagagagagagaaagtgaggttgttcgatccatggccaggggtggttaagagagaatggaaacgttgctggccattcttaacccgcgttcgtctggaccggcggtgtgataaccaagctaacctgacggctgcctggggaagacgctacataactccaagttcgaccggcaacacagaaggatgttgactgaagcataatgaggaagctgacaaggcatatagatatgggactatagtgaacgcttgagctatgaatcatgttcaataaccgcgtagatcattctatatactctttcattgtgtatgagtttcgaaatcaggttttacttttctgaaacttagcagtggaatggattttgttgacagtctcttattcccattcgagtggaaatggatgttattgccctttttgaatcat

SEQ ID NO: 166096 - DNA, 462 bp, Arabidopsis thaliana columbia
cgatcgagagatgggtgcttcatcatcatcatttgtgtcggagaaatcaatccatcaattcaccgtcaaggatagctccggcaaggaggttgacctaagcgtgtatcaagggaaagtgctgctcgtcgtcaacgtcgcttctaaatgcggattcacggagtccaattacacccagctgacggaactttaccggaaatataaagatcaaggttttgtggtattggcgtttccttgcaaccagtttctgtcccaagagcctggcaccagcgaagaggctcatcaatttgcttgtactcgctttaaggctgaataccctgttttccaaaaggtgcgtgtaaatggacaaaacgctgcaccagtctacaaattcctcaaatctaagaaaccctcttttcttggaagtcgtatcaaatggaacttcaccaagttcttggtcggcaaaagatggcaagtcattgatcg

SEQ ID NO: 166097 - DNA, 373 bp, Arabidopsis thaliana columbia
atcgtgtttacaccgatagctcgaagctcggaattgcttaagggggatgtacggaggtacaccgaggcccaaggcaggagtgccgcatatacaactgctaacgtaacaaggttctactgtctggttactgctctatgtaacccatctccaatggatgcccgggaaatattagagacaacatttggggcctcatatttttgctgcattagcggcaactcattcacagaaacatatatatagcattggactataacatttattcacgtgcaatgtgagtgccggtgcactacgagtctctcacatatcaacacatgaccaacttgccgatgctctaaccaagccattgcctcgtcaacactttcttcagttttca

SEQ ID NO: 166098 - DNA, 388 bp, Arabidopsis thaliana columbia
attagctttggcgacttgtaaaggtgacgagtttgtttgtgaagagaacgagccattcacatgtaaccaaactaaacttttcaacagtggcaatttcgaaaaaggcttcatcttcggtgttgcatcttctgcttaccaggtggaaggcggtagaggccgtggacttaacgtttgggatagcttcactcaccgattcccagagaaaggtggagctgatttgggaaatggagacactacttgtgactcatatactctttggcagaaagatatagacgtgatggacgagctcaactctactggctacagattctccattgcgtggtcaagactccttccaaaaggaaagaggagcaggggagtgaacccaggagctattaagtactacaac

SEQ ID NO: 166099 - DNA, 451 bp, Arabidopsis thaliana columbia
attggtaagagatggcaaaccaaagaaaaccaattcttcctctattacttgaaaagaaaccagttgagcttgttaaaccctcaaaacacactcattgtgaaactctttccctctccactttagacaacgatcctttcaatgaagttatgtatgcaacgatttacgttttcaaagccaatggaaagaacctagatgatcctgtctctttgcttaggaaggctttgtccgaacttcttgtgcattactaccctctttcgggcaagctgatgagaagtgagagtaatggaaagctccagttggtttatctgggtgacggagttccatttgaagtcgctacatcaactctagacctctcctctctgaactatatcgaaaacctcgatgaccaagttgctttgcggcttgtacctgaaatcgaaatcgactacgagagcaacgtttgttatcaccc

SEQ ID NO: 166100 - DNA, 443 bp, Arabidopsis thaliana columbia
cggatctcccaagtacactatgggaaatgatctttggtatggacctgacagagtgaagtacttaggacccttttccgttcaaactccgtcttacctcaccggagaattccctggcgattatggttgggacaccgccggtttatccgcagaccctgaagcctttgccaaaaacagagctcttgaggtgatccatgggagatgggcaatgttgggagcttttggttgcataacccctgaagttcttcaaaagtgggtccgtgtggacttcaaagaaccagtctggttcaaagccggttcacaaatcttctccgaaggcggtttggactacttaggcaacccaaacctagtccatgctcagagcattttagccgtccttggcttccaagtcatcctcatgggtttggttgaaggtttccgcatcaacggtcttgatggtgttggcg

SEQ ID NO: 166101 - DNA, 449 bp, Arabidopsis thaliana columbia
ctggctaagaacttggccggagacgtgatcggaacccgtacggaagctgccgacgccaaatcgacgccgtttcagccgtacagtgaggtgttcggaatccagagattcagggaatgcgaactcatccacggacggtgggcgatgctcgctactctcggcgctctctccgtcgaatggcttaccggcgttacatggcaagacgctggcaaggtggagcttgtagatggatcgtcctacttggggcagccattacctttctcgatctcgacattgatatggatcgaggtgttagtgatcggctacatcgagttccagcgcaacgccgagcttgattcggagaagcgtttataccccggaggcaagttctttgacccgctaggtttagcggctgacccggagaagactgctcaacttcagttagctgagatcaagcatgcacgtcttgcgat

SEQ ID NO: 166102 - DNA, 463 bp, Arabidopsis thaliana columbia
cggagatctctctttctcttcttctccatcctttttctctcggcgcgcgcttcatccccaccaccttcgaattcgtgtacgatctctaaaatccagttttgctatcgacttatctcttattgcgccattgttatgcataagaaggggattttaacaatctagggccggtgaataagatcatacttgaaaaatctgattttgtagatgaaatcgttgtgggcaatttgcttgtttggttaggccctttgagggaagctgctaggatgggtgtgaagcaggctctaaggagcattgatgcgtttccaagagcagaggatcatttgcttcagaagacacaatctggcgctgttgtatctattgttggacttcttataatggctactttgttcttacacgagctgagttattatcttaacacacttacagtgcaccagatgtcagtggacttaaagcgtggagaaac

SEQ ID NO: 166103 - DNA, 449 bp, Arabidopsis thaliana columbia
aacaagaagaacaacaacactaagcaaaaaaagttatgttcaagccgagagagacaatggcatcaacattcacgagctcaagcagtgttcttaccccaacaacattccttggccagactaaagcctcaagctttaacccccttcgtgatgttgtctctctcggatctcccaagtacactatgggaaatgatctttggtatggacctgacagagtgaagtacttaggacccttttccgttcaaactccgtcttacctcaccggagaattccctggcgattatggttgggacaccgccggtttatccgcagaccctgaagcctttgccaaaaacagagctcttgaggtgatccatgggagatgggcaatgttgggagcttttggttgcataacccctgaagttcttcaaaagtgggtccgtgtggacttcaaagaaccagtctggttcaaa

SEQ ID NO: 166104 - DNA, 370 bp, Arabidopsis thaliana columbia
  unsure (1)..(370): unsure at all n locations
atcctaaatcagtaagtccttaacgtacgcaccatgtgtacgttagagaagcgcggcgatctctttctcctaaccctaaccggcgaagacgagcacagattccaccccgacacgatcgcctctgttctctcgcttcttgaacaagcaaagtctcaatccacaaaaggatccgtcctcatcactaccggtcacggaaagttcttctccaatggctttgacctcgcgtgggctcaatccgctggacacggtgctataaaacggatgcaccaaatggtcaaatcctttaaaccggtgttagccgcccttcttgatcttgcaatgccgacgatcgccgncttgaacggacacgctggaacctcggggctgatgt

SEQ ID NO: 166105 - DNA, 432 bp, Arabidopsis thaliana columbia
catctccaccctatggattggaaacgcaaaagatgtttgtactcaaggacaaaaacggtggtaaacttgttggcttccatggacgcgctggtgaagctttatatgctcttggagcatattttgctacaaccacaactcctgtgactcctgccaaaaaactatctgcaattggtggtgatgaaggaactgcatgggacgacggtgcgtacgatggtgtcaagaaggtgtacgtaggacaaggccaagatgggatatcagccgttaagtttgagtacaacaaaggcgcggagaatatcgtaggaggtgaacatggaaagcctactttactcggattcgaggagtttgagattgactatccaagtgaatacatcaacgcagttgaaggcacctatgataaaatctttgggagtgatggcctaatcataactatgc

SEQ ID NO: 166106 - DNA, 456 bp, Arabidopsis thaliana columbia
agagacttgaaaaagttagcctgacattcttggttctgcttctggttttcttctgctggcttcttcagatagattagatggatcaaatcgttaatgtggatgagtttcaagagctggctaaacaagccctccctaagatgtactatgatttctacaatggaggagcagaggatcaacacactctcaatgaaaatgtccaagctttccgtagaatcatgtttaggccgagggttctcgttgatgtgagcaaaatagatatgtctaccaaaatattgggttaccctatctctgctccaatcatgattgctccaacaggaaatcataagttggctcatcctgaaggagaaaccgctactgcgaaagctgcagctgcgtgtaatactatcatgatagtatcatacatgtcttcatgcacttttgaggagattgcttccagttgtaacgctgttcggtttc

SEQ ID NO: 166107 - DNA, 343 bp, Arabidopsis thaliana columbia
  unsure (1)..(343): unsure at all n locations
aataagaacagtgagttttgtggtcctcttacttcttttgattggaatgaagctgagccacgtcgaattggaacatctagtactgatacgacttgtactatctgggacattgagcgtgaagctgttgatactcagcttattgctcatgataaggaagtttttgatattgcttggggtggtgttggtgtttttgcatctgtttcatctgntggctccgttcgggtggttgatcttcgttgtccggtacattccacgattatctatgagagctccgagcctgatacttctttagtgcgctttggttggtacaaacaggatcctaggtccatggctactaatatca

SEQ ID NO: 166108 - DNA, 406 bp, Arabidopsis thaliana columbia
  unsure (1)..(406): unsure at all n locations
agaccagtctttctcttcttctccatcctttttttctcgaagcgcgctgcatcactcgccgctttcgaaaacaagaacgaaatgtactcatctttgttgctaaagaccaatcttgcatatgcgccatttctatgcataagaggggggttggaacaatctaagcccggagaataaaatcatacttgaaaaatctgatgttgaagatgaaatcgttgtgagcaatttgcttgtttggttaggccctttgagggaagctgctacgatgggtgtgaagcaggctctaacgagcattgatgcgttttcaagagcagaggatcatttgcttcaaaagacacaatctggcgctgntgtatctattgttggacttcttataatgggctacttgttctacacgagctgagttatt

SEQ ID NO: 166109 - DNA, 452 bp, Arabidopsis thaliana columbia
gtgaaatggctaggatttggaaaggtgggtgtattatcagggcggttttcttggacaggatcaagaaagcttaccagagaaacccgaatttggcgagcttagtggttgatcctgattttgctaaagagatggttcagaggcaagctgcatggaggagagtggtgggtcttgctatatctgctgggattagcacaccaggaatgtgcgcaagtttagcgtatttcgacacttacaggcgtgctagattacctgcgaatctggttcaggcgcagagagatctctttggagctcatacatatgagagaaccgatcgtcctggtgcataccacactgaatggactaagcttgcaaggaagagtcagtaaagcatggacacagtcccttgatttgagggctttatttcatcatagaacacgaaaacaaattgtttcagcttatttttgttgagttat

SEQ ID NO: 166110 - DNA, 445 bp, Arabidopsis thaliana columbia
  unsure (1)..(445): unsure at all n locations
cttcactctctctaatcaaaaagcttttaacctttgccgttaaatctttctccgatcatgccgaccagaaacatcgccattggtggagtccaagaagaggtctatcaccccaacgcacttagggcggcgctcgctgagtttatctcgactttgatcttcgtcttcgccggctcaggctccggaattgctttcaacaagatcactgacaatggagcaaccactccttccggcctcgtcgccgctgccttagctcatgctttcggtctctttgtcgctgtctctgttggcgctaacatttccggtggccacgttaaccctgccgttacctncggtgtcttactcggtggtaacatcactctcctccgtggtattctctactggattgctcagcttcttggctccgtcgccgcttgtttcctccttagctttgccaccggtggcgagc

SEQ ID NO: 166111 - DNA, 450 bp, Arabidopsis thaliana columbia
gacaaaaatgagcggagtttcgacggcggtgtattttgcgcggcgagcggctcagaaggagagagttcgaatcctttaccgtcgtgcccttaaggatactctcaattgggctgttcatcgccatatcttctaccgtgacgcttctgatctgcgtgagaagttcaatgtcaaccaagatgtggaggatgtcgacagaatcgacaaactgattgctcatggtgaagcagaatacaacaaatggcggcaccctgatccttatatcgttccatgggctcctggtggctcaaagttctgtagaaacccgactccgcctgctgggattgagattgtgtacaactatggtctagaagacaacccataataaacctagcttccatattgtcacacccatcaataaaattgaagcatccggtggctatggtttggagataaattaaactgactttcaag

SEQ ID NO: 166112 - DNA, 399 bp, Arabidopsis thaliana columbia
  unsure (1)..(399): unsure at all n locations
ctcctcggaaaggctctcaaggatggggtgagataaaaagtggaacttgcgaccaaatttggaatcagttatgcagaggggaaaagagaggtcagaggagatcctgaatatgtaagggctgcttgtgaggcaagtttaaagaggctagatattgcctgcatcgatctctattatcagcatcgtgtcgatactcgtgtccctatcgaaatcactatgggagaactgaagaagctggttgaagagggtaaaataaagtacattggtttgtctgaagcctctgcctcaactatcagaagagcacatgctgttcacccaattactgccgtgcagatagaatggtccttgtggacgagagatgttgaagaagaaatcattccgacctgcanggaacttgggatt

SEQ ID NO: 166113 - DNA, 461 bp, Arabidopsis thaliana columbia
actccttcttctttctcggcgaggaatctccggtcgccgtcaacatcttatccccgaatcaaagctgaactcgatcccaacacggtagtcgcgatatctgtaggcgtagcaagcgtcgcattaggaatcggaatccctgtgttctacgagactcaaatcgacaatgcggctaagcgagagaatactcaaccttgttttccctgtaatggcaccggagctcagaaatgcagattgtgtgtgggaagtggtaatgtgaccgtagagcttggtggaggagaagaagaagtctcaaactgtatcaactgtgatggtgctggttccttaacttgcactacttgtcaaggctctggtgttcaacctcgataccttgatcgaagggagttcaaggacgatgactaaataccttgctctaaggaacatttcttttcttctcccttctcacatttcttcattgtacaatg

SEQ ID NO: 166114 - DNA, 454 bp, Arabidopsis thaliana columbia
actctttactctcttctcttctcacatcaattattcattgttctctcttctccggcaagaaaagatgcctatgaagtcgttgaggaatgaccatggaacccttaaggccatgatcggatccgatttcaacgagctcactatcgctgctaagaacctagctacacacgccttcacactcactggtttaggctttggtacctctgtcctcgaatgggttgcttcaatcgccgccatatacttgttggtgttggatcgaaccaattggaagacgaatatgctcacatcacttctcattccttacatcttcttcagtcttccttccttgatctttggtattttcagaggagaaattggtaaatggattgctttcgtagctgttgttgtacaactcttctttcctaaacacgccagagaatacctggaattaccggtggctttggttcttctcgccggg

SEQ ID NO: 166115 - DNA, 398 bp, Arabidopsis thaliana columbia
gtagcttccataagagtcttagttctaactatattttcacatatctcactctctctgatctccgcttctcttcgccaacaaatgtcgaccgctcctctctccggcttctttctcacttcactttctccttctcaatcttctctccagaaactctctcttcgtacttcttccaccgtcgcttgcctcccacccgcctcttcttcttcctcatcttcctcctcctcgtcttcccgttccgttccaacgcttatccgtaacgagccagtttttgccgctcctgctcctatcattgccccttattggagtgaagagatgggaaccgaagcatacgacgaggctattgaagctctcaagaagcttctcatcgagaaagaagagctaaagacggttgcagcggc

SEQ ID NO: 166116 - DNA, 431 bp, Arabidopsis thaliana columbia
caaaagaagaagagaaacaacaagaagtagtaatgtcttcctctatgctctcctccgccgctgtggttacatccccggctcaggccaccatggtcgctccattcaccggcttgaagtcatccgctgcattcccggtcacccgcaagaccaacaaggacatcacttccatcgcaagcaacgggggaagagttagctgcatgaaggtgtggccaccaattggaaagaagaagtttgagactctatcttacctccctgaccttagtgacgtcgaattggctaaggaagttgactaccttctccgcaacaagtggattccttgtgttgaattcgagttagagcacggatttgtgtaccgtgagcacggaaacactcccggatactacgatggacggtactggacaatggggaagcttccattgatcggatgcacc

SEQ ID NO: 166117 - DNA, 449 bp, Arabidopsis thaliana columbia
gacaaatcatacaatgatgatagagatcgcagttgaggaagtcagcttttactggaagactcgaaaagggatcctgaagagcggattattcctcgcagtgtagatgctgatgattctgatgttgatatcaaaagtgacgatgatagtgatgacgaaagtgacgatgatgatgaggacgacactgaagctcttatggcggaactcgaccagataaagaaagaaagagtggaagagaggctcaggaaggaaaaagagcagcagatggaagagctaaacgctaaggaagaggaacttctcaaaggaaacccattgcttaatactccaacgtcttttagcgtcaaaaggaggtgggatgatgatgttgtattcaaaaaccaggcacgtggtgaaatgaaagctgctaagcgcttcatcaatgatacaatcaaggatgacttccacagaaaatt

SEQ ID NO: 166118 - DNA, 455 bp, Arabidopsis thaliana columbia
gctctctctcttctacattgtttcttgaggtcaatctattaaaaatgggattatattcactaatcacaggaagaagaggaccaagtggatttggttcagcttcaacagctgaagaggttactcaagggattgatgcaactaatctcactgcaattatcacaggagggacaggaggaatagggatggagacagcgagagtgctgtcgaagagaggtgctcatgtggtgatcggtgcccgaaacatgggagctgcagaaaacgccaaaacagagattctcagacaaaacgcaaacgcacgtgtcactcttcttcaattagatctctcttccatcaaatccatcaaagcctttgttcgtgaatttcatgccctccatcttcctctcaatctcctcataaacaatgcaggagtaatgttctgtccataccaactctctgaagatggaatcgaaatgcag

SEQ ID NO: 166119 - DNA, 450 bp, Arabidopsis thaliana columbia
ctaaagaaaaacaaaaatggctgccatagctttttctctctctctttcttcaaccaaacctcagagacttttcgattcttccttccatggctcagccatctccgcagctcctatctccatcggtctcaaaccacgatctttctccgttcgcgccacaaccgctggttacgacttgaacgctttcacgttcgacccgatcaaggaatcgatcgtgtcacgtgagatgacgagaaggtacatgacggatatgatcacttatgctgagactgatgtcgtcgtcgttggtgctggatctgctggtttatctgctgcttatgagatcagtaagaaccctaatgttcaagttgccattattgagcaatctgttagtcctggtggtggtgcttggctcggtggtcagcttttctccgccatgattgttcgcaaaccagctcacttgttccttgacga

SEQ ID NO: 166120 - DNA, 359 bp, Arabidopsis thaliana columbia
cataaccaaaccatcatcatcatcatctcttgtgttacagaagaaaagagttgaggaacagagaaaatggcagcacaagcacttgtgtcttcttcacttacctcctctgttcagacagctagacagatatttggctcaaaaccagttgcgtctgcctcacagaagaagagttcctttgttgttaaagctgctgcaactccacctgtcaagcaaggagccaacagaccattggggtttgcttcatcgcagagtctctcttacttggatggcagcttacctggtgactatggattcgaccctcttggtctttcagacccagaaggtactggaggattcattgggccaagatggctagcata

SEQ ID NO: 166121 - DNA, 449 bp, Arabidopsis thaliana columbia
gagatgtctttgctaagcagatgggcttatctgtcaaagacattgtcgctttatctggtgcccacactctgggacgatgccacaaggataggtctggcttcgaaggtgcatggacatcaaaccctctaatcttcgacaactcttacttcaaggaactcttgagcggagagaaggaaggccttcttcagcttgtctctgacaaagcactattggacgaccctgttttccgtcctttggtcgagaaatacgctgctgatgaagatgcctttttcgctgattacgctgaggcccacatgaagctttctgagcttgggtttgctgatgcttaagctgtgacgtatgctctgtgtgtgtgtgtgtgtctccccgagagtcaatgctgtttttggttgggggctggaggggtcgcattgcatttgaactttgtcatatgattgcttaatgaactc

SEQ ID NO: 166122 - DNA, 422 bp, Arabidopsis thaliana columbia
gtaaagaagaacaatggcttcctctatgctctcttccgctactatggttgcctctccggctcaggccactatggtcgctcctttcaacggacttaagtcctccgctgccttcccagccacccgcaaggctaacaacgacattacttccatcacaagcaacggcggaagagttaactgcatgcaggtgtggcctccgattggaaagaagaagtttgagactctctcttaccttcctgaccttaccgattccgaattggctaaggaagttgactaccttatccgcaacaagtggattccttgtgttgaattcgagttggagcacggatttgtgtaccgtgagcacggtaactcacccggatactatgatggacggtactggacaatgtggaagcttcccttgttcggttgcaccgactccgctc

SEQ ID NO: 166123 - DNA, 462 bp, Arabidopsis thaliana columbia
aaggattgtaatctttgtcttgagagaagtcttgatttctataagaaatggtacaatgggaagagaggcaccattatattgcggccaagttgctttttccggtgggaattgtatactttctttggtgcttttgatagtattaatgctagacacccaccgcctcctccacgcccgctttcaccgccccctttaaagacgccttctgtaaccaaccaaaccaatattaccaagaagaatgatagtagaatctcaggaggaactatcgcggcgatagtcgttgtagttgttgttacaataatattgattgttgtaggcttggttatatgcaagagaagaaagcaaaagcaagaaattgaacttccaatcgttttaaatgaagcggaatctgttcagtttgatttaaagacaattgaagcagcaacgggcaacttttctgagcataacaagcttggtgcaggtgga

SEQ ID NO: 166124 - DNA, 328 bp, Arabidopsis thaliana columbia
tagagaggagtatgaaggtatcgaagaagcgcatattcgtataggattagagataggttgaggaaagaagttcttgtgccgttgcataaagcgcttgagtttccggagttgttcatgagtgctaaggaatggaatttgttgaagtataatagagttccttctgttgctatgaagaattacaagaagctgtttgaggaacatgatagcgagaggtttaccgagtttttggaggatgtgaagtccggaaagaagaagattgcggctggtgcgttgcttcctcatcagataatcaaccagctggaggatgatagtgggagtgaagctggtg

SEQ ID NO: 166125 - DNA, 386 bp, Arabidopsis thaliana columbia
atctgatgagaagctgatcaaggagagtgaagatatattttgcgggtgttcttgatgtctacgaggcacatctctcaaagagcaagtacttggccggtgacttcgtgagcttggctgatttggctcacctcccgttcactgattacttggttggtccgattgggaaagcttacatgatcaaagataggaaacacgtgagcgcgtggtgggatgatattagcagccgtcctgcgtggaaggagactgttgccaagtattcattcccagcttaagatgtgttcatcttcttggggatgtggtttgtgttttatgagaggtttaataaaagtggaactaaatgtacctcttaatgttatgttgccacctctgagttcttttttcttttg

SEQ ID NO: 166126 - DNA, 457 bp, Arabidopsis thaliana columbia
agttaactgcatgcaggtgtggcctccgattggtaagtttaagtttgagactctctcttaccttcctgaccttaccgattccgaattggctaaggaagttgactaccttatccgcaacaagtggattccttgtgttgaattcgagttggagcacggatttgtgtaccgtgagcacggtaactcacccggatactatgatggacggtactggacaatgtggaagcttcccttgttcggttgcaccgactccgctcaagtgttgaaggaagtggaagagtgcaagaaggagtaccccaatgccttcattaggatcatcggattcgacaacacccgtcaagtccagtgcatcagtttcattgcctacaagccaccaagcttcaccggttaatttccctttgcttttgtgtaaacctcaaaactttatcccccatctttgattttatcccttgtttttctg

SEQ ID NO: 166127 - DNA, 381 bp, Arabidopsis thaliana columbia
cggacgcgtgggctcttctccaatatccttaagtgggagagttttgggttgatcctcgaaggtctattgcaaaagcttatgagaagacggaccaagcgattctatcgaatagttctgacttgggtcgtggtggttctactgctgtgactgctatattgattaatgggagaaagttgtggatagctaatgttggtgattcacgagctgttctttctcatggcggcgctataacgcagatgagtacagatcatgagcctcgtactgaaaggtcgagtattgaagatagaggtggatttgtatccaatctaccaggtgatgttcctcggggaataaactatttcatctgttgtacacctggtcactgcagaaccaatggcggca

SEQ ID NO: 166128 - DNA, 459 bp, Arabidopsis thaliana columbia
  unsure (1)..(459): unsure at all n locations
agaatatctctcttctacagtaaacaaaaaaatggcaatgaatggtttgtccaagatggctgtagccgccgcaactgctcttctcctagttctgaccattgtcccgggcgcagtagctgtgacttacactattgaatggaccactggtgtggactactcaggttgggctaccggaaagactttcagggttggtgacattctagagttcaagtatggttcttcccacacggtggatgtggttgacaaagccggatatgatggctgcgacgcctcctcctcgactgagaaccattccgatggagacaccaaaatcgatcttaagactgtaggaataaactatttcatctgttctacacctggtcactgcagaaccaatggcggcatgaagctagccgttaatgtcgtagccggttctgccggacctncggccactcccacgccaccttcttcaactccggg

SEQ ID NO: 166129 - DNA, 447 bp, Arabidopsis thaliana columbia
actacttaaaaaagatattggtcttgaaatggatagttacttaacgaaatggtgtgtagtgcttgtgttgttgtgtttcgggtttagtgtagtaaaagcacaagcacaagctcaagttccatgtttctttgtttttggtgactctttggttgacaatggaaacaacaacggtcttatttctattgcaagatccaattacttcccttacggtatcgatttcggcggccctaccggccgtttctccaacggcaagactactgttgatgtgatcgctgagctacttggatttaatggctacattcctgcgtacaatactgtgagtggtcggcaaatactctccggagttaactacgcttccgcagctgctggaatccgagaagaaaccggtcgacaattgggacaaaggataagctttagtggacaagttaggaactaccagaccacagt

SEQ ID NO: 166130 - DNA, 452 bp, Arabidopsis thaliana columbia
cccgctacaccaaaattttgatttacctgcaccttttgtgttgcacacagattgccctcattattggcgttttcatcttccaggcgaaacggaagaggagttctcaaccagattagccaagaatttagaggatctaatcatcaaagaaggaccagaaactattggtgcttttatagctgaaccagtcatgggtgctggcggtgtgatacctccacctgctacctactttgaaaaggttcaagctgttgttaagaaatatgatatcttgttcattgctgatgaggtgatatgtgcatttggaaggctcgggacaatgtttggctgtgacaaatacaacattaagccagatcttgtgaccttagctaaggcactgtcttcagcatatatgccgattggagccattcttatgagccaagaagtggcagatgtcataaattctcatagcagcaagc

SEQ ID NO: 166131 - DNA, 345 bp, Arabidopsis thaliana columbia
agtatgcgtagaagcaagtaaacctcacctttttttgaatctctcccattttcttgactccactaggatgtagcaccaaaagaggatatgaatgtgtgtagactcgatcagcctcgagagtagagagccttatcctcacctttccaattcttgaatcttttcctcctccgttgtttttgtcaccaccgtgtagatggcagttatcgaacacaccaactgtaactacagtacacggatcaaaaacctcccaagtatattgctcgttccatcttggggtaaagctgtcaataattgtccgagttctgatccatttctgcccatactttgccacacaatacgcgtccg

SEQ ID NO: 166132 - DNA, 460 bp, Arabidopsis thaliana columbia
gagagagagaaatacaaagaaaaataaatggagaacggtaaatgcaacggagccacgacggtgaagttaccggagatcaaattcaccaagcttttcatcaacggccagttcattgatgctgcttcagggaagacgtttgagacgatagaccctaggaacggtgaagtgatcgcaacaatagccgaaggagacaaagaagacgttgacttggccgttaacgctgcacgttacgccttcgaccatggtccttggcctcgcatgaccggcttcgagagggcaaagcttatcaacaaattcgcagacttaatagaggaaaacattgaggaattggctaaacttgatgcggttgacggtggaaaattgtttcagttgggaaaatatgctgatattccggccacagccggtcattttcgatacaatgcgggtgcagcagataaaatccacggcgagacttttaaaa

SEQ ID NO: 166133 - DNA, 444 bp, Arabidopsis thaliana columbia
gccaactctctagcagacggctacaacacaggcaccggtactagccgcagagatcattggaacattcgttctcgtctacacagtcttctccgctactgatcccaaacgtaacgctagagactcccacgttccggttttggcgccacttccgattgggtttgcggggtttatggtacatttggccactattccgatcaccggaaccggcatcaacccggctaggagtttcggagctgccgtaatctataacaagagcaagccatgggatgaccactggatattctgggtgggaccattcattggagctgcgatagctgcattttatcaccaatttgtcctaagggcttcaggttccaagtcacttggatccttcagaagtgcagccaacgtttgagtttttgccacacaaaaaaaaacctatcataataacaacaattacaaaat

SEQ ID NO: 166134 - DNA, 414 bp, Arabidopsis thaliana columbia
gcactcccctaaagcccctaagctaccagttccttcgttgaccgtccctaagctaccagttcctccggtgaccgtccctaagctaccagtccctccggtgaccgtccctaagctacccgttcctcctgtgaccatccctaagctacccgttccaccagtgactgtacctaagctacccgttcctcctgtgaccgtccccaagctacccgttcctccagtgaccgtccccaagctacccgttcctccagtgacagtccctaagctacccgttcccccggtaactgtacctaagctacccgttcctccagtgaccgtccctaagctaccccttcctccgatttcagggctacccatacctccagtggtaggtcccaatctgccattgccgactttgccaattgtaggtcctattct

SEQ ID NO: 166135 - DNA, 439 bp, Arabidopsis thaliana columbia
tcttacgaagaagcaaatatggcggtcccattgtttatttagaaggttgtgaagaagaggtctgctaagttcatcagaccccagagtgaccgtagaatcaccgtcaaggaaagctggaggaggccaaagggtattgattcaagggtgagaagaaagttcaaaggtgtgactttgatgcccaatgttggttacggatctgacaagaagactcgtcactatcttcccaatggattcaagaaattcgttgttcacaacacaagtgagctcgagttgttgatgatgcacaacaggacttactgtgctgagattgctcacaacgtctccactaagaagagaaaggcaattgttgagagagcttctcagctagacgttgttgctaccaacaggcttgctaggctccggagccaataatacgagtgaagaagaatcttgcctacta

SEQ ID NO: 166136 - DNA, 456 bp, Arabidopsis thaliana columbia
aagaacaatggcttcctctatgctctcttccgctactatggttgcctctccggctcaggccactatggtcgctcctttcaacggacttaagtcctccgctgccttcccagccacccgcaaggctaacaacgacattacttccatcacaagcaacggcggaagagttaactgcatgcaggtgtggcctccgattggaaagaagaagtttgagactctctcttaccttcctgaccttaccgattccgaattggctaaggaagttgactaccttatccgcaacaagtggattccttgtgttgaattcgagttggagcacggatttgtgtaccgtgagcacggtaactcacccggatactatgatggacggtactggacaatgtggaagcttcccttgttcggttgcaccgactccgctcaagtgttgaaggaagtggaagagtgcaagaaggagtaccc

SEQ ID NO: 166137 - DNA, 447 bp, Arabidopsis thaliana columbia
  unsure (1)..(447): unsure at all n locations
gcagctcctttactgctccaactacgatttccactgttgcagagatattacatccttcgaattcaagttttgggtattgatcgtgagaattcaaggaacatcttttcttcgatgtgattacccaataagctgaaaacaaaaggcgtgattttgtgattactctggcgtaataatgcctcagtatgggtcaacgggtcaacactgcgagttcacggcggcgtcttacttctcgtggccgacttcaagcaggctaagcaacgccgcggaggaaagagctaactatttctcaaacttgcagaaagaggaggatgatgatgatgaggtttcttctgaacccagtctccacaaaagcctaaagggcaacgagccactactttacttgagctcatgaccataagagccttccacagcacgatgntgcggggttatagtcttggaacagctata

SEQ ID NO: 166138 - DNA, 453 bp, Arabidopsis thaliana columbia
accattctctccgactaagagagagaagcgaatttgtttttttttcttttgcgggttcaattcgaattgttttccctgagactcaagttactgtgtcattactctgcattgagcaatgggtagcaacgaagaaggaaaccccactaacaactctgataagccatcgcaagctgctgctcctgagcagagtaatgttcatgtgtatcatcatgactgggctgctatgcaggcatattatgggcctagagttggtatacctcaatattacaactcaaatttggcgcctggtcatgctccaccgccttatatgtgggcgtctccatcgccaatgatggctccttatggagcaccatatccaccattttgccctcctggtggagtttatgctcatcctggtgttcaaatgggctcacaaccacaaggtcctgtttctcaatcagcatctggagttac

SEQ ID NO: 166139 - DNA, 427 bp, Arabidopsis thaliana columbia
tacgtgaagacgtagctcgtgtttatttccagttattgatctcagccgttgatttctgtcatagccgtggtgtttatcaccgagatctgaaaccggagaatctcttgttagatgaagaaggtaatctcaaggtgactgattttggtctctctgctttcactgagcatttgaaacaagacggacttcttcatacaacttgtggaactccggcttatgttgcgccggaggttatattgaagaaaggatacgacggagctaaggcggatctgtggtcttgtggtgttatactttttgtgcttcttgctggttatttgccgtttcaagatgataatcttgtgaatatgtataggaagatttacagatgagatttcaaatgtcctggttggctttttctgatgctagacggcttgtgactaatcttcttgat

SEQ ID NO: 166140 - DNA, 444 bp, Arabidopsis thaliana columbia
agattccactggcgtgtgctctcctcacttcactcgttcttgaaacttgagcttcaattacaaagaatggctgcttcaagtgctgtcaccgcaaactacgtcctcaagccacctccattcgcactggatgctttggagccgcatatgagcaaacaaactctggagtttcactggggaaaacatcacagagcttacgtggacaacctcaagaaacaggttcttggaaccgagcttgaaggcaagcccttaaagcacattatccacagcacttacaacaatggtgatctcctccctgctttcaacaacgctgctcaggcgtggaaccacgagttcttctgggagtcaatgaaaccaggtggtggaggaaaaccatcaggagagcttcttgctttgcttgaaagagatttcacttcttatgagaagttctatgaagagttcaatgct

SEQ ID NO: 166141 - DNA, 448 bp, Arabidopsis thaliana columbia
accaaaccacaccagaacagaactcagccatggtttcttcttcttcttctcttctaatcctagccgttgcttgtttcgtctcgctaatctcaccggcgatttcacaacaggcttgcaaatcacagaacttgaactccgccggtccgttcgatagttgcgaagaccttccggtactcaattcctacctccattacacctacaattcctcaaattcatctctctccgtcgctttcgtcgccactccatctcaagccaacggtggctgggtcgcttgggctattaaccctacggggactaagatggctggttctcaagccttcctcgcttacagatcacggcggtggtgcggctccggtcgtgaagacgtacaacattagcagctacagcagtctcgtcgaaggtaaacttgcttttgatttttggaatctacgcgccgagtcgttaagcg

SEQ ID NO: 166142 - DNA, 451 bp, Arabidopsis thaliana columbia
atacctcttctcgtaggtctcctctcaactcctttttctcgtattcaagaacattcggtaacagctcttctaaacctctccatatgtgagaacaacaaaggagccattgtttcagctggagctattcctggtatagttcaagtgcttaagaaaggaagcatggaggccagagagaatgcggcggctacacttttcagtctatcagtgatcgatgaaaataaagtgactatcggtgccttaggagcaattccgccactcgttgtattacttaatgaaggtacacaaagaggcaagaaagatgctgctactgcactctttaacctctgtatataccaaggaaacaaaggaaaagctatacgtgcaggagtgattcccacgttgactagactcttgacagagcccggaagcggaatggtcgatgaggcactcgcgattttggcgattctctcta

SEQ ID NO: 166143 - DNA, 384 bp, Arabidopsis thaliana columbia
accatggcggctcaacttcaaccttattttattttcgagacctgtcacatctctcccccaaagggcaccgttgcatccaccactcttcctctcaccttcttcgatgccccctggctctctctcccactcgccgattctctcttcttcttctcttaccaaaactcaactgaatctttcctccaagactttgtacccaacctcaaacattccctctccatcactctccaacatttcttcccttacgccggtaaactgattatcccgcctcgtcccgaccctccatatttacactacaacgctggcgaagactctcttgttttcaccgtagcagagtctactgaaaccgacttcgaccaactgaagtctgattcccctaaagatatc

SEQ ID NO: 166144 - DNA, 434 bp, Arabidopsis thaliana columbia
gagaggagatagaagacatctcatcatcaatctccggatccaatccaattctgcatcgactcttcagagttttattgggtcattggagatttttttcggttgaggatggctaacaatgaggagcatcctcctcgagggaatgaatgggaagtcgtctcgctcacttcatcagcttatgctgctgctcctggtccgtataacgttgaatcaagagatgtgcgcaagtatgatgcttactatggagcggaaacttcacgtgatctgtacatgtctgaacactttgtattcccacctagtgagcatgagaatttacccattgatgaatctttattcgtggcggagcaaaaaaaggatggccgagacttgatgctggaaggtcaaggattggctgatcagtttcattatgaagctggaaacaaccaacagagtatcta

SEQ ID NO: 166145 - DNA, 461 bp, Arabidopsis thaliana columbia
cgctcaacatgcaagtgcactatatatcgttctctgcttatgcagattacgcgcagacgagcacgttcttgaaagagctcatgcctcctaacatcatccttgttcacggtgaagctaacgagatgatgaggctcaaacagaagctcttaacagagtttcctgatggaaacacaaagatcatgaccccgaagaactgtgagtcagtggaaatgtattttaattctgagaaattggcgaaaaccattgggagattggcggaaaagacacctgatgttggcgatacagtaagcgggattctggtgaagaaagggttcacttatcagataatggcacctgacgaactccatgttttctcacagctatcaacagcaactgtaactcagcgaattacaatcccgtttgtaggagcttttggtgtgataaaacatcgcctggagaagattttcgagagcgtggaattt

SEQ ID NO: 166146 - DNA, 451 bp, Arabidopsis thaliana columbia
gggttttcgtctctttcactcgtaaccggaagtgtaggtctatgatcctccactaatttcacaaaaagctcatctttttattcgttttcgaatcgattcgttatctgggttcaagtatcaaattctctggtttcgtttttcgtttttgatttgttctctctctttcggaaaaagtttggttttttttttgtttgaaacaatgggaagaggcaagttcaagggtaaacctaccggccaacgccgattctctagtgctgctgatattcttgctggcacatctgctgcacgtcctcgatcattcaaacagaaagaagctgagtacgaagaagatgttgaagaagagtcagaggaggaatctgaagaagaatccgaagatgaagctgatgtgaagaagaaaggagctgaagctgttatcgaagttgataaccctaacagagtaagacaaaagacc

SEQ ID NO: 166147 - DNA, 457 bp, Arabidopsis thaliana columbia
  unsure (1)..(457): unsure at all n locations
caaagagattacagttttgagcatttctcatctttcgttgctcttctctgtgtgtgtggcgatggctgctaattcgataatggcttcctccaaacccctaatctccctgtcatccaaccaacaaccaaaccgagtccaaattcccaaattcgccaaacttccccaaattcccaaatccctcacttcctccaccgatctccgtagcaaagcactatcactctcctccgccaccgccaaatccttagctttaatcgccgctttcgctcctccgtcgatggcggaggcgatggagaaagcacagctcttcgatttcaatctcacgcttccgatcatcgntgttgagtttctcttcttgatgttcgctctcgacaaggtctattactctccgcttggtaacttcatggatcaaagagacgcttccatcaaagagaagctcgcgagtgttaaggacacttcg

SEQ ID NO: 166148 - DNA, 459 bp, Arabidopsis thaliana columbia
  unsure (1)..(459): unsure at all n locations
ccgcttcaacggatcggtttggggcttttctttttatttatggctatggctgnggctgctttggtcgagctcaaacgtcttagaactgcacacgctcatggtccaacagtcaaaacgcttcctctagggttttatctactcatcccacaatatcttattgtcggtatcggcgaagcgttaatctacacaggacagttagatttcttcttgagagagtgccctaaaggtatgaaagggatgagcacgggtctattgttgagcacattggcattaggctttttcttcagctcggttctcgtgacaatcgtcgagaaattcaccgggaaagctcatccatggattgccgatgatctcaacaagggccgtctttacaatttctactggcttgtggccgtacttgttgccttgaacttcctcattttcctagttttctccaagtggtacgtttacaaggaaaaa

SEQ ID NO: 166149 - DNA, 460 bp, Arabidopsis thaliana columbia
caaggtcaagcaagcttaccaagctcgatacatgtaatcaatcgaggaagatgtcgcgcaacacacatctggtgaccttcgtaagctcttgcttcctcttgtgagcactttcaggtatgaaggagatgatgtgaacatgatgcttgcaagatctgaagctaagatacttcacgagaaggtctcagagaaatcttacagtgacgatgacttcatcagaatcttgacaacaagaagcaaagcacagctcggtgcaacactcaaccactacaacaacgagtatggaaacgccattaacaagaacttgaaggaagagtcggacgacaatgactacatgaaactactaagagctgtaatcacatgtttgacataccctgagaagcattttgagaaggttcttcgtctatcaatcaacaaaatgggaacagacgaatggggactaacccgagtcgtgactacacga

SEQ ID NO: 166150 - DNA, 352 bp, Arabidopsis thaliana columbia
  unsure (1)..(352): unsure at all n locations
gagaaagcggcgcagagcgtggcggtgaccgngttgacttcgggcgtggattcggcggtggacgtggaggtggccgtggccgtgatcgtggtccaagaggccgtggaagacgtggaggccgtgcctcggaagaaacgaaatgggttccagtgaccaaactaggtcgtctagtggctgacaataaaataacgaagctagagcagatctatcttcattctcttccagtaaaggagtaccaaatcatatatcatcttgtttgtactactttgaaagacgaggttatgaagattatgcctgttcaaaaacgaaccagagcttgtcaaaggactagattcaatgcttttgttgttgt

SEQ ID NO: 166151 - DNA, 456 bp, Arabidopsis thaliana columbia
agaacaatggcttcctctatgctctcttccgcttctatggttgcctctccggctcaggccactatggtcgctcctttcaacggacttaagtcctccgctgccttcccagccacccgcaaggctaacaacgacattacttccatcacaagcaacggcggaagagttaactgcatgcaggtgtggcctccgattggaaagaagaagtttgagactctctcttaccttcctgaccttaccgattccgaattggctaaggaagttgactaccttatccgcaacaagtggattccttgtgttgaattcgagttggagcacggatttgtgtaccgtgagcacggtaactcacccggatactatgatggacggtactggacaatgtggaagcttcccttgttcggttgcaccgactccgctcaagtgttgaaggaagtggaagagtgcaagaaggagtacccc

SEQ ID NO: 166152 - DNA, 444 bp, Arabidopsis thaliana columbia
caaaaatattggcctctttctctctttctctcttgctctctttctttgttgggttgatctcttcttccatggcgatccctacggagacacaacaccaggagaaggaggcttcagatgcttctgcagcagctgcacaaaagagatggactttaagcgatttcgacatcggtaagcctcttggcagaggcaaattcggtcacgtctatctcgccagagaaaaacggagcaatcacgttgtcgctctaaaggttcttttcaagagccagcttcaacaatcccaagttgaacatcagctcagaagagaagttgagattcagtctcatcttcgtcaccccaacatactccggctttatggctatttctatgatcaaaaaagagtttatttgatacttgagtatgctgctagaggcgaactttacaaggatcttcagaaatgcaaatact

SEQ ID NO: 166153 - DNA, 282 bp, Arabidopsis thaliana columbia
cgacggcgttgaaaaaaaacaaaaagtatagtgtgttacgtagcgccggacatggacgtatcggtaagcaccgtaagcataccggaggtcgtggaaacccaagaggtatgcatcaccacaggatccttttcgacaagtaccattcaagatacttcgggaaagatggtatgaggtattttcacaaactttgtaacaagatcttttgcccaatcgggaacctgggcaaggtatggtcacttggtcctggagacaaaggggctacaattaacgggggaaatgaat

SEQ ID NO: 166154 - DNA, 410 bp, Arabidopsis thaliana columbia
ctagcattcttgatctgttgttcttgtcacttgttttgttttctgggatcatcaatccaatggctcagatcttagcagcttctccaacatgtcagatgagagtgcctaaacactcatcagtcattgcatcatcatccaagttatggagctctgttgtgttgaaacagaagaagcagagcaacaacaaagtcagaggctttagagttcttgctctccaatctgataacagtactgtcaatagagttgagactcttctcaatttagacaccaaaccttactctgacaggatcattgctgaatacatttggatcggaggatctggaattgaccttagaagcaagtcaaggactatcgaaaagccggtggaggatccttctgagctacctaagtggaactatgatggttcgagt

SEQ ID NO: 166155 - DNA, 443 bp, Arabidopsis thaliana columbia
  unsure (1)..(443): unsure at all n locations
ggagaaaggagtgagtcaagctggtgtgcaattctaccacgacctcatcgacgagctcataaaaaatggtataactccattcgttactgtttttcactgggacactccacaagatttagaagatgaatatggcggctttttaagcgaaaggattgtgaaggatttccgagagtatgcagattttgttttccaagaatacggtggaaaagtgaaacattggatcactttcaatgagccatgggttttctcgcacgctggctatgacgtaggcaaaaaggcacctggtcgttgctcttcttacgtcaatgctaaatgccaagacggacgatcaggatacgaggcttacccttgtcactcacaatctccttatctctcacgcagaagcagttgaagcttaccggaaatgcgaaaagtgtaaaggtgngaagatcggaattgcacat

SEQ ID NO: 166156 - DNA, 294 bp, Arabidopsis thaliana columbia
  unsure (1)..(294): unsure at all n locations
cacgaacatgaagcaaagacttgtgcctggcagctcncttcctcatttgatcaacaagttcatctgcaattcgaagaggaaaagaagatcaagagataaatccattagtttcagctacatcagtggaagaggactcagttaataaattgatggggatggaatattgtggagaaggagatgaagaatgtttgaggagaaggatgatgacggaatctcacttagactatatttacacacagcaccataagcattgacattaattgttatcattttgattaattagcatacatatat

SEQ ID NO: 166157 - DNA, 402 bp, Arabidopsis thaliana columbia
  unsure (1)..(402): unsure at all n locations
agaagatgtcttggcaatcatacgtcgatgatctccttatgtgtgatgtcgaaggcaaccatctcaccgccgccgcaattctcggccaagacggcagtgtctgggctcagagcgccaaatttcctcagttgaagcctcaagaaatcgatggaatcaagaaggactttgaggagcccgggtttcttgccccaaccggactatttctcggtggcgaaaaatacatggttatccaaggtgaacaaggagctgtgatccgagggaagaagggacctggaggtgtcactatcaagaagacaaaccaagctttggtctttggcttctacgatgaaccaatgactggaggtcaatgcaacttggttgtcgaaaggctcggngattaccttatcgagtctgaactctaaa

SEQ ID NO: 166158 - DNA, 460 bp, Arabidopsis thaliana columbia
ctctctttcgatgaattctacaaacacaagttcttgaggctatgattgatttgtccttgagagagctgccacactgggcatagaagattttccttttcttggccgtataaagaacagtagggtttgggtcaaggacacaacattttcttcaagatttgcggatctagttaattgattgtattattcatcagtattgggatacatccaataatattgagtcgtcttgtttcagacaacatggaacaagggaaagaaaagtggctacaattaacggaagacttcaatttgacctttcacaggatgcatacctcccacagaggcttcttgaaaacctgatgtatatttacaatactattgaaatggctcgtgtaactggagtccctacctcctaccttatttcaagaggagagagcatcaaggttctatctcaactacttaggaaagctaaacagaaaacctg

SEQ ID NO: 166159 - DNA, 439 bp, Arabidopsis thaliana columbia
aaaagtcttcctctgacatttaagccagaatgtttcgtttaactctatatgggattcagcaagttggagaagctatggggaggaatccagcccctcacaaatctaaagaaaataaatttgggatattcctctaatttgaaagaaatcccaaatctttcgaaagccactaacctcaagacgttgacgcttaccggttgtgagagtttggtggagattccatcctctatttggaatctacagaaactggaaatgctgtatgcgtcaggatgcattaagctacaagttattcccaccaacatcaacttagcatctcttgaggaagtcaacatgagtaattgctcacgtctgagaagttttccagatatatctagtaacattaagcgtctctatgtagcaggcacaatgattaaagaatttcctgcatccattgttggacact

SEQ ID NO: 166160 - DNA, 442 bp, Arabidopsis thaliana columbia
gaagaaagagaaaaaaaagagatggagagaaactctccggtgagaaaccctcacacttccaccgccgatctgctttcttggtcggaaactcctcctcctcctcaccactcaaccccttccgccgctcgttctcaccagccgtccgatggaatcagcaagattctaggcggtggtcagatcacagatgaagaagcccagtcgcttaataagctaaagaattgttcagggtacaagttaaaagagatgactggtagtggcatatttactgataagggaaaagttggatctgaatccgatgctactactgatccaaagactggactccgttactatcagcagactctgaatggaatgagtcagatattctttcagtgctgacggtaatggtttcccggagaaaccaaccactttaaccgaggttgcaaagcaaagagagctgagc

SEQ ID NO: 166161 - DNA, 348 bp, Arabidopsis thaliana columbia
  unsure (1)..(348): unsure at all n locations
ccaggctcaatgaatgttactgacctacctcncttcttgtcggatatggttttggtgcttcgtttgttgccttatttgctcagttgggtggtggaatatatactaagggagctgatgttggggcagatctcgttgggaaagttgagcagggaattcccgaggatgatcctcgaaatcctgctgttattgctgatttggttggagacaatgtgggggactgtgctgctagaggtgctgatttatttgaaagtatagcttgataaattatcagagcaatgatactaggtggaactatggctaacaagtgcaaaattgaagatccatcaggctttattcttttttattcta

SEQ ID NO: 166162 - DNA, 453 bp, Arabidopsis thaliana columbia
cgtcgatcctcttgagtgatttgattttagactttctagttatcaaactcgaaagatggattctgtccttgtagtgggcattgcatcggttattctcggtgcgttgatcgctgtactcttcttcggtagctacttccggaagcggacatcggaggtgcaatccatggccaaagcggagcctcaggatccgatccggaatccaaagtcgaatcatcctgctccgaagaagaatcatcccaaatctcaagcgtccgataagaatcagaacaaacggcatcatcctttagatttaaacacgttgaaaggccacggtgatgctgttactggactctgtttctcgtccgatggaaagagcttggccacagcttgcgctgatggagtaatcagggtgttcaagctagatgatgcatcaagcaaaagcttaaaattttaaggataaatcttcctgctgga

SEQ ID NO: 166163 - DNA, 439 bp, Arabidopsis thaliana columbia
aaattactcttcctctctagccatggccgtctgttactgcttcctccaagctccaccactctctcgcatactcctaccggttttatctcgccgagctactactctctctgccggttatggtcggctcaaatccacggtcacgttctgctctactgtgaaccggaccagtcctctgacatcttcggtccgcgcagaagtaaagcgcgtctcgcgtaaagacgataaagtagcttcagctactgatgttcaatttgagacgcctttgaagattgttgagtatccggatcctatactacgggctaagaacaagaggattgatatttttgacgagaatttaaagaacttggttgatgctatgtttgatgttatgtacaaaacggatggcattgggctctcagcaccacaagtaggtctcaatgttcaactcatggtgttaaat

SEQ ID NO: 166164 - DNA, 433 bp, Arabidopsis thaliana columbia
ccttcttcttcccatggctgcttcagctttttttttcgctctctcttccttcaaccctaaatctcttcctttcggcgtctccagacctgcctccgtttccctcttatctccttccctctcctttaaactcaattccgactccgtttccttctccatcgccgccaaatggaactctcccgcttctcgcttcgcccgtaacgttgcgattacctcagagttcgaggtggaagaagatggtttcgctgacgtcgctccgccaaaagagcaatctttctctgctgaccttaaactcttcgttggtaaccttcctttcaacgttgacagtgctcagctcgctcagctctttgagagtgccggaaatgttgagatggttgaggtaatctatgacaaaattacaggaagaagcagaggttttggattcgtgactatgtct

SEQ ID NO: 166165 - DNA, 274 bp, Arabidopsis thaliana columbia
cggcctagaaaatatggacaagatggtggttcttttttgttggcattggctccttctatctccaacgtttccccgaactctaacaaacgtggccgtggaagacctcctggctccggcaagaagcaacggctatcttccattggtgaaatgatgccttcatcaactgggatgagcttcacaccgcatgtaatcgtagtttccattggtgaagacattgcttcaaaggttaatatcgttctcgcatcaaggtcccacgagcggataatgtgtttta

SEQ ID NO: 166166 - DNA, 406 bp, Arabidopsis thaliana columbia
caatcttctaacgacacttttcctaccgtcatgtacatttcagctgcaaccgagattaattcgaggctcatccctagtttaaaaactttgcatagcactttggaatctaagtccttcgagttcaaagatattgtgaaaattggaagaactcacactcaagatgctacacctttgacactaggacaagaatttggtggctatgctactcaagttaagtatggactaaatagagtcacctgcactcttcctcgcctctatcagcttgcacaaggtggaactgcggttgggacaggattaaacactaagaaagggtttgatgtaaagatagctgctgcagtagctgaagaaacaaacttgccatttgtcactgcagaaaacaagtttgaagctctggctgcacacgatg

SEQ ID NO: 166167 - DNA, 422 bp, Arabidopsis thaliana columbia
aagaaaaccatggcggaagaagagaaaagcgtgttgaatcaagtgatggtggcgattgatgaaagcgaatgtagtaaacgcgctcttcaatggacgctcgtgtatctcaaagatagcctcgccgattccgacatcatcctcttcactgctcaacctcatcttgatctcagctgcgtctatgcttcctcttatggcgccgctccgattgagcttataaactcattgcaagagagtcataagaacgctggattgaatcgtcttgatgaaggaaccaaaatttgtgctgagactggggttactccaagaaaggtgttggaatttggaaatcctaaagaagcgatatgtgaagctgctgagaagcttggtgttgatatgcttgtggttggaagccatggtaaaggagcattacaaaggacttttct

SEQ ID NO: 166168 - DNA, 293 bp, Arabidopsis thaliana columbia
ccaagaagtacataccaggtaccaagatggtgttccctgtgctaaagaagccgcaagaccgtgctgatctcatcgcctacttgaaggaatctactgcgcctaagtgaatctgatggtggattgattctgagttgttaagtctctctcagatgaggcttttttactttgctatattcttttgccaaataaaatctcaaactttttttgtttatcatcaattacgttcttggtgggaatttggctgtaatgtgtgctgaggctcactttatcgagtacacaataaaaaaacaaaa

SEQ ID NO: 166169 - DNA, 355 bp, Arabidopsis thaliana columbia
aagaagttctcctaaaggaagcaaaagtgtgttgtcatacataaggagaaaacttccagcgatacttcgccggtatattttcagccagaggcagcaaaaaacgtagcttgtggagttaaattaggcaatggattgatctgtgagagatctccggtaaaaggacgtaagagatgtgaagagcataagggaatgagaatcacctaacctctgcatcacttgtttatgttatttgttacctaaccagaattgtttgtaccaaaaccgttttggtttcggtattggtttgctgaacaatcatctgtactggatgactcacaatctcatgttttataaatttaaaatcagttttgattag

SEQ ID NO: 166170 - DNA, 270 bp, Arabidopsis thaliana columbia
cagacacaaaggcagagaaacaaattcttgtattaatggcaggcagagagattctccataagatgaaggttggattatgcggatctgacacaggcagaggtaaaaccaaggtgtggaagaacatcgcacacggttatgactttgtgaaaggcaaagcgggccatccgatggaggactatgttgtgtctgagttcaagaaagtagacggccatgatttgggtttgtgtgctatctttaatgggtcattttaaggcatgatgttgcacaagt

SEQ ID NO: 166171 - DNA, 302 bp, Arabidopsis thaliana columbia
aaataaattcaacagcgatatatcttcatctctctctctctcgccagattttcatcgactcgatttcagatttaagatctcagatacaaaactccgacatgtctacgttcagcggcgatgaaacagctcccttcttcggcttcctcggcgctgcagccgcactcgttttctcctgtatgggagctgcttatggaaccgcaaagagtggtgttggtgtggcttctatgggagttatgagacctgagttggtgatgaaatctattggccctgttgttatggctggagtgttgtataactatgga

SEQ ID NO: 166172 - DNA, 436 bp, Arabidopsis thaliana columbia
cctcgatctcgaactcttgaaccgtaattctgatgaaaatatcttaagaattgcggattttggttgttctattggacccaacacgttcgaagtagtccaaaatattatcgatacggtgaagcaaaaaaacctaaaagaaaacaatgcctatattggtgctcctctcgagttccaagtttgcttcaatgatcaaccaaacaatgattttaacacactttttagaacccaacctatctcttccaaacaagcatatttatcggttggagttccaggatctttccatggtagagtattaccaaaaaatagcctccatatcggtcacattacctatgcgctccactggctttctacagttccccaacatgtttgcgacaagaaatctccggcattgaataaaagctacattcaatgtaataatttaatagaggaagtgact

SEQ ID NO: 166173 - DNA, 429 bp, Arabidopsis thaliana columbia
acaaatcttaaacgttttactttgtgctgcactactcaacctcaatggccgcctcaacaatggctctctcctcccctgccttcgccggtaaggccgtcaagctttcccccgcggcatctgaagtccttggaagcggccgtgtgacaatgaggaagactgttgccaagccaaagggcccatcaggcagcccatggtacggatctgaccgtgtcaagtacttgggtccattctctggcgaatcaccgagctaccttaccggagagttccccggagactacggatgggacaccgccggactttcagctgaccccgagacattcgcaaggaaccgtgaactagaagttatccacagcaggtgggccatgctcggagccctaggctgcgtcttccctgagcttttggctagaaacggagtcaagttcggagagg

SEQ ID NO: 166174 - DNA, 388 bp, Arabidopsis thaliana columbia
tctctcttcatgcccgaacgcatcgggtctcaataaccattgatacagacatcgatccttgtcaactagtactgatctataaatcttataaaaatctgtagagatatggccgccgcagccgtttcctctaaccctcgcaccgttgaagagatcttcaaagattattccgctcgtcgtgccgctcttcttcgtgctctcactaaagatgttgatgatttttactctcaatgcgatccggaaaaggagaatttgtgtttgtacggacaccctaatgagtcatgggaagtgaatctaccagcagaggaagtgcctccggagctacctgagcctgctcttggtatcaatttcgctagagatggtatgcagaggaaaagatggctttctcttg

SEQ ID NO: 166175 - DNA, 428 bp, Arabidopsis thaliana columbia
gtttagaagaagcaatggccacttcagcaatccaacactcttctttcgctggccaaacgaccctaaagccatccaacgatctcctccgcaaaatcggagcctccaatggcggtggccgcatcatcatgcgtcgtaccgtcaagtctactcctcagagcatctggtacggaccagaccgtcccaaatacctaggaccattttccgaaaacacaccatcatacctaaccggagaataccctggagactacggttgggacaccgctggtctctcagccgatccagaaacattcgcaaagaatcgtgagctcgaagtgatccacagtagatgggcaatgttgggagctttaggctgcaccttccctgaaattctctcaaaaaacggagtcaaattcggtgaagccgtgtggttcaaggcaggatctcaaatc

SEQ ID NO: 166176 - DNA, 438 bp, Arabidopsis thaliana columbia
accggaaatcgatttgtttggaagatggtatatttatgcagaagcaagccgagatcattgatcagctcgtgaagcgagcttctacttgcaaatccgaggctctgggcccgctcatcatcgaagccacatcgcatccttctctcttcgccttctccgagattttggctctacccaatgttgcccagcttgaaggaaccacagattctgtgtacctggatctactacgcttgtttgcccatggcacctggggagactacaaatgcaatgccacccgtcttccgcacttgtcccctgaccaaattcttaagcttaagcagctcactgtcctcacccttgctgagtctaacaaggtattgccctatgatacactaatggtcgagttagatgtttccaatgttcgcgaactcgaggactttcttatcaatgaatgcatgtatg

SEQ ID NO: 166177 - DNA, 439 bp, Arabidopsis thaliana columbia
ttctcccataagaaaaaaaaaaataatctaatcctcctcctctgcttcaccaccaaaaagcatattcttctctcgtcttctccggttaatcaaaatctctccgtgtgaatcgtttgtgaatggtggaaactaatccgatcggtggtaagtttacgctctccctttccatcaaaagggcgagcttttctcttcctctctcgacatcctctgttttcgctttcggatcttgcaaagaaggctggtactttcgctgccttggcctcgacccgtgaacgattcgcccctaaaattcacaacccggaaccctaatttcctaaaaagtggttctttttttattgattctgttacttgtgagatttgctctgttttttggtctctcgatttcgaaaatgttgctctacaacaagcagaagaagacccaaacgctaatggaatagga

SEQ ID NO: 166178 - DNA, 240 bp, Arabidopsis thaliana columbia
ccgatttccggtcgaccacgcgtccgcaagccatcgatgtttctggacccgacggcgctcccgtccaaggaaacagcggtggtggttcatctggcggacgcggcggtttcggtggaggaagaggaggtggaccccgatctggaggtggattccgcggtggtggttctcttttcctatggttttttacattttttaccatttgttgttttggttctttcttttcttccttttgctttcaga

SEQ ID NO: 166179 - DNA, 425 bp, Arabidopsis thaliana columbia
gttgatcctatcaacaatgactaatttagagcttcgagctttggggaacacagggcttaaggttagcgccgttggttttggtgcctctccgctcggaagtgtcttcggtccagtcgccgaagatgatgccgtcgccaccgtgcgcgaggctttccgtctcggtatcaacttcttcgacacctccccgtattatggaggaacactgtctgagaaaatgcttggtaagggactaaaggctttgcaagtccctagaagtgactacattgtggctactaagtgtggtagatataaagaaggttttgatttcagtgctgagagagtaagaaagagtattgacgagagcttggagaggctttagcttgattatgttgacatacttcattgtcatgacattgagttcgggtctcttgatcagattgtgagtg

SEQ ID NO: 166180 - DNA, 428 bp, Arabidopsis thaliana columbia
cacaagtgaaggttcaagatacaacctcacttttaccttaggcgatgctaacgatgcgtgcagaggacatttcgtggtgggtgctcaagctggctccgtaactcaaaacttcacattggagagtaatgggactggctctggtgagaagtttgggttagtgtttgaagcagacaaagatgcagcacagataagtttcaccagctactcagttacaatgacaaaagagaatgttgtttgtggtcctgtgattgatgaagtgatggtacatcctcttggtggaacagcctcagtaaaacccacttggctgctacttattttcgctttgttgtatgttgcagttctctgattgaaactgtttgggagagaggtcataaagaagatatttttgcaaggagatgtgataatcattctagcttcatgatttatat

SEQ ID NO: 166181 - DNA, 428 bp, Arabidopsis thaliana columbia
gacgacatcaacgtctgacttcgcttcttctcttacatggctctacctaaccaacaaaccgtagattatcctagcttcaagctcgtcatcgttggtgatggaggcacagggaaaacgacctttgtgaagagacatcttactggggagtttgagaagaagtatgaacctactattggtgtggaggttcatcctttggatttcttcacaaactgcggaaagatccgtttttactgctgggatactgctggacaagagaaatttggtggccttagggatggatactacatccatggtcaatgtgcgattataatgtttgacgtcacaggaaggctcacatacaagaatgttccgacatggcatcgtgatctttgcagggtgtgtgaaaacatcccgattgttctgggtggaaacaaagtcgatgtgatata

SEQ ID NO: 166182 - DNA, 423 bp, Arabidopsis thaliana columbia
catcaatataaagagaagagagtggtagagttatatattatcacacataaacttagatatagtagtgttatattcttgattaagtaataaagatgaaaggtggaagcatggagaaaattaagccgatattggcgataatttcactgcaatttgggtatgcaggcatgtacatcatcaccatggtctcgttcaaacatggcatggaccattgggttcttgctacataccgtcatgtcgtagccacggttgtcatggctccctttgctctcatgttcgagaggaaaattaggcccaagatgacactagcaatattctggaggcttcttgctcttggaatattagagcccctcatggaccagaatttgtactacataggattgaaaaacacatcagcatcgtacacttctgcctttaccaatgcac

SEQ ID NO: 166183 - DNA, 276 bp, Arabidopsis thaliana columbia
cgtccacatctttctcctttggtggcaaacacatcgactgatagagagaaacgatggcgtcgaactcgcttatgagctgtggcatagccgccgtgtacccttcgcttctctcttcttccaagtctaaattcgtatccgccggagttccactcccaaacgccgggaatgttggtcgtatcagaatggctgctcactggatgcctggcgagccacgaccagcttaccttgacgggtctgctcctggtgactttgggtttgacccacttggacttggag

SEQ ID NO: 166184 - DNA, 417 bp, Arabidopsis thaliana columbia
gtcaaaggctttttccgtggatgggttcctactcttttgggttacagtgctcagggtgcctgcaagtttggattctacgagtactttaagaagacttactctgaccttgctggacctgagtacactgccaaatacaagactctcatctaccttgctggttctgcttctgctgagatcattgccgatattgcactttgcccatttgaagctgtgaaggttcgtgttcagacacagcctggatttgctagggggatgtctgatggatttcccaagtttatcaagtccgaaggatacggaggcttgtataagggtcttgctccactctggggacgtcagattccttacactatgatgaagtttgcttcctttgagaccattgttgagatgatttacaagtacgcaatccccaacccaaag

SEQ ID NO: 166185 - DNA, 446 bp, Arabidopsis thaliana columbia
ggcgaacataatattcttggatcagcctattggttctgtcttctcctactcaagaatcccacttattgatacgcctagtgacacaggcgaagttaagaatatccatgagtttctccaaaagtggttaagcaagcatccacagttttcttccaatcctttctatgctagcggagattcttattccggtatgattgttccagccctcgttcaagaaatttcgaaaggaaattatatatgttgcaaacctcctataaatctacagggctatatactcgggaacccaataacatattttgaagtcgaccaaaactatcgcattccattttctcatggaatggcacttatttcagatgaactatacgagtcaattaggagagactgcaaaggaaattatttcaacgtggatccacgtaacacaaaatgtttgaaacttgttgaagaatacc

SEQ ID NO: 166186 - DNA, 446 bp, Arabidopsis thaliana columbia
gactcagaacctgctgcttggggttctcagggttataattaattctgaaactgagtcaggtcctgctgcttggggtgcttgggacaaaaagaaatcggaaactgaaccaggtcctgctggttggggtatgggggacaaaaagaattctgaaactgaattaggccctgctgctatgggtaattgggacaaaaagaaatcggatacgaaatcaggtccagctgcttggggatctacagatgctgctgcttggggttctagtgacaaaaacaactcggaaactgaatcagatgctgctgcttggggttctaggaacaaaaagacttctgaaattgaatcaggtgctggcgcttggggttcgtggggacagccaagtcccactgcagaagacaaggataccaatgaggatgatagaaatccgtgggtttccttgaaggagaccaaaagta

SEQ ID NO: 166187 - DNA, 437 bp, Arabidopsis thaliana columbia
agagatttcacttcttatgagaagttctatgattagttcaatgctgctgcagccactcagtttggagctggctgggcctggcttgcttattcaaatgaaaaactcaaagtagtgaaaactcccaatgctgtgaatccccttgtgctcggctctttcccattgcttaccattgatgtctgggagcatgcttactaccttgacttccagaaccgaagaccagattacataaagacattcatgaccaatcttgtgtcttgggaagctgtaagtgccagacttgaggccgccaaggctgcttctgcttaagcaaatttctgaacaatttgacttcagtgacagtgagttctgcatcaccgaagtctcttataaaatattggtcgctgtaataaggacacagctctcttgttgtgtatgtgtcacagagttcttcattttgc

SEQ ID NO: 166188 - DNA, 442 bp, Arabidopsis thaliana columbia
gtcaagagagcaaagatgcaactgagcgggctaataatatttttccatggatggttcatggggcctctaacagaaggtaaatacccagacatcatgagggaatatgttggtgatcggcttccagagttcagtgaaacagaagccgcacttgtaaagggttcatatgattttcttggtctcaactattacgtcactcaatacgcccaaaataatcagacgattgttccttcggacgtacacactgccttgatggactcacgcacaactctcacatctaaaaatgcaactggtcatgctcctggtccaccgttcaatgcagccagttactactacccaaaaggcatttactacgtaatggattactttaaaaccacttacggtgaccctttaatatatgtcactgagaatggatttagtaccccaggtgatgaggactttgaga

SEQ ID NO: 166189 - DNA, 230 bp, Arabidopsis thaliana columbia
attaaatcttaaagcattcagaatttctttcttattctatttatttcttatcttttttcgaaatagatattatatataatatatagaaatggaaataatagataaatatcaatatagatatatttatattgcgtccaataggatttgaacctataccaaaggtttagaagacctatgtcctatccattagacaatggacgcttttcgcttttttttactttcctattgtt

SEQ ID NO: 166190 - DNA, 408 bp, Arabidopsis thaliana columbia
  unsure (1)..(408): unsure at all n locations
cttagctactacatcaacaagttcaagccttcttaaattgttcaaccttctaccccctccgtcacagaagccccaccggtggccgagctagaaacttcactgccagaaactccatcggtggctcagcaagaaacctcactgccggaaactatggctagtgaggctcagccagaggcgtcttctgttccaacaacaagtagtacctcttaggggcttagcctaggattatatctttgtgtaaaaatgagatgaagcatataccaagattatgcattctgttaatattcggatatacctatatgtatgtatacactctgtcactcttctctttgagtgaatgattatatcaaatctcaaatcctattatttttgctnnnnnaaaaaannnnnnnnnnnnnnnnnnccccc

SEQ ID NO: 166191 - DNA, 446 bp, Arabidopsis thaliana columbia
tcttcttcttcttctgatcaaccatggctgctgttataagtgctgcagtctctttaccttcctccaagtcatcctctctcctcaccaaaatctcctctgtatcccctcaaaggattttcctcaagaagagcacagtgtgttacagaagagttgtgtcagtgaaggctcaggtgacaacagatactaccgaggcaccaccagttaaagtagtcaaggagtctaagaaacaggaagaagggattgttgtcaacaaattcaaacctaagaacccttacactggtcgctgccttttgaacaccaagatcaccggtgatgacgctcccggtgagacttggcacattgtcttcaccaccgaaggtgaggttccgtatagagaaggacaatcgataggagtgattccagagggaatagacaagaacgggaagccgcacaagctcaggctttac

SEQ ID NO: 166192 - DNA, 197 bp, Arabidopsis thaliana columbia
gtatacacacatgaaaatagtttttagtctttacttaacaattacaagaaactagaagggtgaacacttttgattcatgttctcacatgaaaatggaaatgagaagacgaaagattgattcttccttcagagtgaaagaccagattctttatcctcctcgagagatgaagtgttaacgattttatgtaagatcaaga

SEQ ID NO: 166193 - DNA, 339 bp, Arabidopsis thaliana columbia
gaaaaacctttccaaaaatggcaaagaaccgtatcttagtcttcttcttaggggtattagcgtcttttacactctccagtttcccggtaactgtttccggcgagccccctatcttattcactttcggcgactcttcctacgatgtgggcaacacgaagttcttctcgtcggagttcgatccagccaccacgtggccttacggcgattccatcgatgatccctccggtcgttggtctgacggccacattgtcccagatttcgtcggtaaaaactaaaagtcttacactttcttttagggttctttgaattgattccaatttcattgctattaagtcgatt

SEQ ID NO: 166194 - DNA, 379 bp, Arabidopsis thaliana columbia
gaactaactaacgacgccggagatggccgccacttcaaccgccgctgctgcttcttcaatcatgggtacccgggtggtttccgacattagctccaattcaagccggttcacagcccggttcggattcggaaccaagaaagcatctcccaaaaaggctaagacggttatctcagaccggcctctatggttcccaggcgcaaaatcacccgaatatctcgacggttcacttgtcggggactacgggttcgatccttttggtttaggcaaaccggcggagtatctccaattcgatttggattccttggaccagaacttagccaagaacttatacggagaagtgatcgggactcgtaccgaggcggtggaccccaaatcgacg

SEQ ID NO: 166195 - DNA, 438 bp, Arabidopsis thaliana columbia
gacagctaaactaaatacaaagaaacagagattgtttggttacagaggaggtgagagctaaggcagagatgtacaccggagatgagatatgtagagagaagacaaagtgtttcctcaaggaaatatctatgcccaatggtttattaccattgaaggatatagaagaggttgggtatgacagagagtcaggtgttgtatggctgaagcagaagaagagcatcactcacaagttcacagagatagataagcttgtctcctatggaaccgaagtcacagccattgttgagaccgggaaaatcaagaagctcactggagtcaaagccaaggaacttcttatttgggtcactatcaatgagatctataccgaggaaccctctaccaagatcacgtttaatacaccgaccacactgttcaggacttttccggtcacagctttta

SEQ ID NO: 166196 - DNA, 450 bp, Arabidopsis thaliana columbia
ccaaaaaagaaaacacaaaaacaaagattataatggctttctcaaccatggctttgtcctcccctgccttcgccggaaaggctgtgaagcctgccgcatcagatgtcctcggaagcggccgtgtgaccatgaggaagactgtcgccaagccaaagggtccatcaggcagcccatggtacggatctgaccgagtcaagtacttgggtccattctccggcgagcccccgagctaccttaccggtgagttccccggtgactacggatgggacaccgctggtctatccgccgacccagagaccttcgccaggaaccgtgagctagaagttatccacagcagatgggccatgctcggagccctaggctgcgttttccctgagctattggctaggaacggagtgaagttcggagaagcggtttggttcaaggccggttcacagatcttcagcgacg

SEQ ID NO: 166197 - DNA, 450 bp, Arabidopsis thaliana columbia
aaaaggtccaaaaacgaataaactgtatctctcattcgtcggagtttccagccgtttctttccgattctcggatttttcctgggaatcaaacgcatcgccgagaatcggaagagagggataaggttatggctcctcatggagatggattaagtgacatcgaagaacctgaggtcgatgctcaatcggagattcttcgaccgatctcctcagtcgtcttcgtcatcgctatgcaagcggaggctcttcctttggtcaacaagttcggactctctgaaactactgattcgccgcttggtaaaggattgccctgggttctgtatcacggcgtgcataaagatcttcgaatcaatgtagtttgccccggaagagatgcagctttagggatcgatagtgttggaactgttccagcttctctcataacttttgctttcatccaagcattaaaacct

SEQ ID NO: 166198 - DNA, 321 bp, Arabidopsis thaliana columbia
gaaaaagaaaaccagagatggcgatgactacagcttctacggtatttgttctaccggccaatgtcacctcggtcgccggcgcttcgtcgtccaggagctccgtgtctttcttgccgatgagaaacgccggttctaggctcgtagtcagggcagccgaagatcctgctccggcttcctcttcttcaaaagattctccggcagctgccgctgctccggatggagctactgccaccaaacccaagccaccaccgattggtcctaagagagggtctaaggtcaagattctaaggagagaattctattggttcaagaacgttggat

SEQ ID NO: 166199 - DNA, 357 bp, Arabidopsis thaliana columbia
gtcttcttcctccttcaatctctctcgttcgtatcatctgctctgcgatttcaatggcgagccgttggttgagacctgaggtgtatcctttgttcgctgctaccggagttgccgttgggatctgtgcgttttccttgatcagaaacatcaccggaaaccctgaagtcagatgcaccaaggagaacagggctgctggaattttggataaccatgcagagggagagaagtataaggaaaatttcctgaggaagtttgttcgcaacaagaaacctgaaatcatgcctggactcaacaagttcttcactgatcctacatactgaaaccatctttgcacacccgtttgtcgtattgtttctg

SEQ ID NO: 166200 - DNA, 328 bp, Arabidopsis thaliana columbia
aaaacaagtagaaactttaaaacgagagagagatataagaaatggcgacatcgggaacgtacgtgacggaggttccgttgaaaggatcggcggagaaacactacaagagctggaagagcgagaaccatgtcttcgctgacgccattggccaccacatccaaaatgtcgttgttcacgaaggcgaacatgactctcacgggtctatcaggagttgggactacacatatgatggaaagaaggagatgttcaaagagaagagagagatagatgatgagaataaaacattgacgaaaagaggactggatggtcacgtgatggagcattttaa

SEQ ID NO: 166201 - DNA, 427 bp, Arabidopsis thaliana columbia
ctttctccttcttcttcttcttcttcttcttctttttcttcttcttcttcttctttttctttagaaacaacacaaaccccaaaaacttaaaaaataactctacagagatggctgttggaatccttgaggttagtctgatcagtggcaaaggtctcaagcgctctgattttcttggtaagatagatccatatgttgagatccaatacaaagggcaaacccgcaaaagcagcgttgctaaagaagatggaggtagaaatccgacatggaatgataaattgaaatggagagcagagtttcctggctccggcgccgactacaaactcatcgtcaaagtcatggatcatgatactttctcctctgacgatttcattggcgaagccacggtacatgtgaaagagctattggaaatgggagtggagaaggaacg

SEQ ID NO: 166202 - DNA, 343 bp, Arabidopsis thaliana columbia
gtaaagaggaaactctgaaagttgtgttttataataaaactagaatcatggcggcgtcaatgacgaaacccatctcaataacttctctcggtttctattctgatcgaaagaacattgctttctctgattgcatttcgatttgttctggattcagacattcccgaccatcttgcctcgatttggtcacaaagtcaccgagtaataacagtcgtgttttacctgtcgttagtgcccaaatatcttctgattatattccagactcgaaattttacaaggtggaagcaattgtcagaccatggagaatccagcaaggttcattggctttactgaaaatcgggattcg

SEQ ID NO: 166203 - DNA, 444 bp, Arabidopsis thaliana columbia
cgcacttttatctacattcttgttcctgtatcatattgtctggcttgggagatcaggaatatataagaacaaagaacgagctgagttacttggacgtatatctctcttctgctggatgggatcttctgtctgcacaactttagtcgaggttggtgagatgggaaggctttcttcatcaatgaagaagatcgaaaagggactcaagaatggaaacaagtatcaggatgaggattatcgtgctaagctaaaaaaatcaaacgagaggtcacttgctttgatcaaatcagctatggacattgttgtagcagctggtcttcttcagttagctccaacgaagatcactcctcgtgtcaccggagcttttggattcatcacctccatcatttcttgttaccagttgcttccgacacgccccaagaacaaaacaccctgaagtcaatcgag

SEQ ID NO: 166204 - DNA, 391 bp, Arabidopsis thaliana columbia
ccagaagaagtcatggctcagaacgatacagtgtagctgttaggttcttggtctagcccttattcccttagggcacgtgtggctctacacttgaaatctgtcaagtacgagtacttagacgaacctgatgttcttaaagaaaagagtgaactccttctcaaatctaaccccatccacaagaaagtccctgtcctcctccatggtgacctctccatctctgagtccctcaacgttgttcaatacgtcgacgaggcttggccctccgttccttcaatccttccttctgatgcctatgatcgcgcatctgctcggttttgggctcagtacatcgatgacaagtgttttgcggcgggtgatgcgggggtcggaaccaaaagacgacgaaaggaaa

SEQ ID NO: 166205 - DNA, 382 bp, Arabidopsis thaliana columbia
caaaaacacacgacggaatggatctgaccagattttcttcttaggaactgattgcgaactatggtcttgacggctacactattgactttattggacacgcagcgggactttacacgaatgaccagacatcttgaccgacgccgcctttgatactgtgatgagaatgaagctctatgcggaatctcttgcacgtttccaaggaacatctacatatatttatcctctctatgggttgggagaactaccccaggcatttgcacgacttagtgctgtctatggtggcacatatatgttgaacaaacctgcgtgcaaggtagagtttgacgagggaggtaaggctattggtgtaacatctgagggagagactgctaaatgcaaaaag

SEQ ID NO: 166206 - DNA, 452 bp, Arabidopsis thaliana columbia
gaaaaataaaaaaaaaaaacagagaaaaggagatttggtttcaatcggagtccttatgatgtgccccatgtcctcctacctcgagaacgagcttgagaagcgcttcaaccttcttcgcttctggacttctccggagaaatccgtcctcctagaaactcatcggaactccatccgcgccgtcgttgggaatgcttctgccggcgccgatgctcagctcatcagcgatctgcccaaccttgagattgtatccagcttcagcgtcgggctcgacaagatcgatttggggaaatgcaaagaaaaagggatccgcgtcaccaacacccccgacgttctcaccgaagacgtcgcagatctcgccatcgggcttatcctggctctccttcgacggctgtgtgagtgcgatcgctatgtaaggagcggaaaatggaagcaaggtgaatttcaactcacta

SEQ ID NO: 166207 - DNA, 399 bp, Arabidopsis thaliana columbia
ctgcttttgaatttcaaaccttcacataaaaaaattacttttgaatccgtgtttcattcatcgaatctttttccgataactatggctgaggaaatcaagaatgttcctgaacaggaggtgccaaaggtagcaacagaggaatcatcggcagaggttacagatcgtggattgttcgatttcttgggaaagaagaaagacgaaacaaaaccagaggagactccgatcgcttcagagtttgagcagaaggttcatatttcagagccggagccagaggttaaacacgaaagtcttcttgaaaagcttcaccgaagcgacagttcttctagctcctcaagtgaggaagaaggttcagatggtgagaagaggaagaagaagaaggagaagaagaagccaactact

SEQ ID NO: 166208 - DNA, 425 bp, Arabidopsis thaliana columbia
  unsure (1)..(425): unsure at all n locations
cccaattcccaacactgtcactcaaaaagaatcttcaaacaatgaatctcaacgtcgtcgttttactcctactccttctaatctcatccgccacgtgttgtccgccgtcagaccgccgtgcacttctagctttccgatcagctcttcacgagccttacctcggcattttcaactcatggacaggccaagactgttgccacaactggtacggtattagctgcgactcgctcactcaccgagtcgccgacataaatctccgcggcgagtcagaagatccaatcttcgaacgagctcaccgaaccggttacatgaccggacacatctncgcctcgatatgtgagctcacttcgtctctccgccattacaatcgcccgattgaaaggtatctcccgcgaaaatcctaaatgtatcactcgtctttcttt

SEQ ID NO: 166209 - DNA, 387 bp, Arabidopsis thaliana columbia
aaaaaaacacaaaaagtttcaatggccgtttcctatatggctctctcctcccctgccttcgccggaaaggctgtgaacctttcccccgcggcatctgaagtcctcggaagcggccgtgtgacaatgaggaagactgttgccaagccaaagggtccatcaggcagcccatggtacggatccgaccgagtcaagtacttgggtccattctctggcgagtcaccgagctaccttaccggagagttccccggagactacggatgggacaccgctggactttcagctgatcccgagacattcgcaaggaaccgcgagctagaagttatccacagcaggtgggctatgctcggagccctatgctgcgtcttccctgagcttttggctaggaac

SEQ ID NO: 166210 - DNA, 440 bp, Arabidopsis thaliana columbia
gttcaaatctggtcaagagaggaaagatgctgctgaacatactcttactgcttacaaagctgctcaggatattgctaattctgaattggctccaacgcatccgattcgtcttggtcttgcgttgaacttctctgtgttttactatgagattctcaattctccagatcgtgcttgtaatctcgctaagcaggcgtttgatgaagcaattgctgaattggatactcttggtgaagagtcatacaaggacagtactttgattatgcagcttcttcgtgataacctcactctctggacttctgatatgcaggacgatgttgctgatgacatcaaagaagcagcaccagcagcagcaaaacccgctgacgagcaacaatcctaagtcgtcttaccgcaacctttgtgtcatttcagtatctaaaacctctccaataatatggttt

SEQ ID NO: 166211 - DNA, 448 bp, Arabidopsis thaliana columbia
agagaagctctaaagattctttgtctctttctctgtcgcattgatttgtaaaaaagtgtggcagagagaaaccatggctatggcggaaatggcaacgaagtcttcactatctgcaaaactcactcttccttcttcttctactaagaagacactgagtctgagacaagtctctgtttcacttccaacatcaacttcaatctctctgttatctctctttgcatctcctcctcatgaagctaaagctgctgtttccattcccaaggaccaaatcgtctcctctctcactgaagtggagaaaacaatcaaccaagttcaagaaactggttctagtgtatttgatgcaacgcagcgtgtgttccaagtagtaggagatgctcttaaaccagctttggacactgctttacccattgcaaagcaagctggtgaaaaagctatgaagcttgcttct

SEQ ID NO: 166212 - DNA, 390 bp, Arabidopsis thaliana columbia
gtttaaggcaaattaagatcatcttcatatatcttctcagatctcttccaattttctagaaaaaacatgtcttgctgtggtggaagctgtggttgtggatctgcctgcaagtgcggcaatggttgcggaggttgcaaaaggtaccctgacttggagaacaccgccaccgagactcttgtcctcggtgttgctccggcgatgaactctcagtacgaggcttccggcgagactttcgttgccgagaatgatgcttgcaaatgcggatctgactgcaagtgcaacccttgtacctgcaaatgaagaacttcataaaccctaagtctgtaataaccctaatgttatgttaggtttgcttatatgtaataattggctggtttttccggcagtttt

SEQ ID NO: 166213 - DNA, 410 bp, Arabidopsis thaliana columbia
aaattagaaaccatggcattgcaaaagtttcctctcctggggcttctttttctcataaccattgtcgtctcttcgacaatagccgtcgatgatcctgtgtgcccaacgacgtccaaactaagccgagcaagtttccctaatgggtttgtgtttggcacagctactgctgcgtttcaggttgaaggtgcaattaatgaaacttgtcgtggacctgctctatgggatatcttctgtaagagaaatccagagagatgtagtggccacaacgccgatgtggccgttgatttcttccatcgttataaggaagatattcaactaatgaagaatctaaacacagacgcattcagactctcaatcgcatggtcaagaatattttctcatgggagaaagggagaaggagtgagtcaagc

SEQ ID NO: 166214 - DNA, 445 bp, Arabidopsis thaliana columbia
aatggccacaagcgcatcagctttgctctcaccataccacattctccactgcaatctcccacaaaaaccctaactccatctcattccatggccttcgtcccctccgtctaggtggctcctcctccgccctacccaaactatcaaccaccgggagaaaatcctcctccgctgtcgtgagagctgagctaagcccttccatcgtcataagtctcagcacaggtctctccctcttcctcggccgtttcgtcttcttcaacttccagagagagaacgtagcaaaacagggcttaccggagcagaacggaaaaacccatttcgaagctggagatgatcgtgctaaggagtacgtcagtctcttgaaatcgaacgatccaattggattcaacattggtgatgttcttgcttggggttctattggacacatcgttgcttactacatcttggc

SEQ ID NO: 166215 - DNA, 442 bp, Arabidopsis thaliana columbia
gtatggttggggagtagctgcaaagatcacaccttccgttctgctattgaccggcgttgccttcttctctctgatactgtttggtggcccattcgcaccattggttgccaagcttggtatgacaccgctactcgcagcagtgtacgttggtgccctccagaatatcttcagcaagagtgccaagtacagcttgttcgatccttgcaaagaaatggcttatatcccattggatgaggacaccaaggttaaaggcaaagctgcaattgatgtggtctgcaacccattggggaaatcaggcggtgctctaatccagcagttcatgatccttacattcggctcactcgccaatttcacaccttaccttggagtcatcctgctcggtatagtcactgcatggttagcagcagctaaatcgctggagggacagtttaacactctcatg

SEQ ID NO: 166216 - DNA, 401 bp, Arabidopsis thaliana columbia
cacaaagcaaaacacttacttagaaagtccagattcattcattaacacatatggctaaagacgtggaaggacctgatggatttcagacgagagattacgaagatcctccgccaacaccgtttttcgacgcagaggagcttaccaagtggtctttatacagagcagtcatcgccgagttcgtagccactctcctcttcttgtacgtcaccgttttaactgtcattggttacaagattcagtccgacacaaaagccggtggagttgactgcggcggcgtcggaatccttggcatcgcgtgggcttttggtggcatgatcttcatccttgtctactgcaccgtcggtatctcaggtggtcacataaaccctgcggggacgtttggtttagtcttagcccggaag

SEQ ID NO: 166217 - DNA, 452 bp, Arabidopsis thaliana columbia
ctttgaacatattcagacgcctcctagaaaaattgaggactatgtctcttctagtttcgttatggtaatctctctaactctcttttcgatacaaattatttctctctctatcctctttgcaattgaattcattaataattaacccacaagaaaagattgagaagtttctttttgcatagtatattaagattagacttggttgtgtattattgtctattgataactcaatatttctttttttagttataacttataaggaagattcagagatcttctagtatcaacaatgtttacactataatatttgatggatataacacgtaaatatgtttttgaaacggtttacgatagggaaatattagaggcatgggggatcatcaaatccaaatacaagaaggtggtgaacaaaaagtgacgctgatgagaaatctcattgacggaaacaacaacaa

SEQ ID NO: 166218 - DNA, 423 bp, Arabidopsis thaliana columbia
acatcactgatccttctctcatcctcagaaagattggctcaaaccatgctgcttacttcaggcgtcaccgccggccattttttgaggaacaagagccctttggctcagcccaaagttcaccatctcttcctctctggaaactctccggttgcactaccatctaggagacaatcattcgttcctctcgctctcttcaaacccaaaaccaaagctgctcctaaaaaggttgagaagccgaagagcaaggttgaggatggcatctttggaacgtctggtgggattggtttcacaaaggcgaatgagctattcgttggtcgtgttgctatgatcggtttcgcttgcatcggtgcttggtgaggcgttgacgggaaaagggatattagctcagctgaatctggagacagggataccgatttacgaagc

SEQ ID NO: 166219 - DNA, 452 bp, Arabidopsis thaliana columbia
cacaaggagagaagagagaaagagagaaagagagtcagattataatggcgtacagtgcgtgtttcctacaccagagcgcattggcttcatcagccgcacgatcatcatcttcctcctcatcccagcgtcacgtgtcgctctccaaacctgttcagatcatctgtaaagctcaacagtctcatgaagacgataactccgccgtctcccgccgtcttgctctcactctcctcgtcggcgccgctgctgttggttccaaagtatctcctgctgatgccgcctacggtgaagctgcaaacgtgtttgggaagccaaagacgaacacagacttcttgccatacaatggagatgggttcaaagtgcaggttccagcaaaatggaacccaagcaaagagattgagtatccaggacaagtccttaggttcgaagacaacttcgatgctactagcaatctc

SEQ ID NO: 166220 - DNA, 446 bp, Arabidopsis thaliana columbia
acaacatgattgtgaggagagccaaccttttctttttcaagggaccaactttttttgaggctctggaccagatcaacgagcctaagaggccatcagacacgccccttagatttacacttgatgatgtctacaagattggcggtattggaacggtgccagtgggacgtgttgagactggtatgatcaagcctggtatgggtggtacctttgctcccacaggtttgaccacttaggttcatgatgtgtgaggatcagcatgggtctgttcttgaggcacttaccggtgacaatgttggattcaatgtcaagaatgttgctgtcaaggatcttaagagaggatacgttgtctctaacttcaaagatgatccaacttagggtgctcgcaactttacctcccaggttatcattatgaaccacccttggcagaatgggaacggttacgcccc

SEQ ID NO: 166221 - DNA, 422 bp, Arabidopsis thaliana columbia
gagataataaggacttgtgtatttttccatcgttaaaaggcatttcaaagagacaatatgtcaggtgatgaggctgcccctgttgttgttcctccccccgttgctgagccagcggccatcccagaggacatggacttaatgactgcattggagttgactcttaggaaagctcgtgcttatggtggtgttgttcgtggtctccatgagtgtgctaagcttattgagaagcgtgtggctcaactcgttgtcttggctgaagactgcaaccagcctgattatgtcaagcttgtgaaggctctctgtgctgatcacgaagtcaggttgctaacagttccaagtgccaagacccttggcgaatgggctggtctctgcaagattgattctgagggtaatgccaggaaaggttgttggatgctcatgtc

SEQ ID NO: 166222 - DNA, 445 bp, Arabidopsis thaliana columbia
agagaaccctaattcgatcgacattctttctcgttctacttgaagaagttctccttagattgcccacgaaatcgatcctcaaatgcagaatcgtctcaaaacaatggaggtcactcctggaatcgagtaggttcgcggagaggcatatgagtcttcaaaacagccgccggagaatcttagctgcttacaactgcgactgcggcggacggaggaagctcctacccgagtcacggtttgaaggggacgaagagattgtctatctgcactgcgacgcctcacgaccctcgatgacttgccaaggtgtgatctgcttccccgagcaagattggatcatcgttttgaacccatcgactagccaacttcggcgattcccttccggcttgaaccataactgcagatttagaattggattatggaagactttctctctcggaaactgggtaat

SEQ ID NO: 166223 - DNA, 446 bp, Arabidopsis thaliana columbia
cgagggaacgcaaaggtaggggccagattctgttttaccttcttcgcctacctactctctttcccgaatttatttgccggcggtgatcaatcagaacgggattttagcctgagtaatcggtcactgggaagagaatttcgacggtgagagaagatgaagatatttgtgaaaactctcaaggggactcacttcgagatcgaagtaaaacccgaggattcggttgttgatgtgaagaagaacatagagagtgtgcagggcgcagatgtgtatcctgctgcaaaacagatgcttattcaccaaggtaaagtgcttaaagatgagacaactattgaggaaaacaaagttgctgagaacagttttattgtcattatgatgaacaagagtaaacctgcttcagctgcagcatctagtgcatctgctggcacatcgcaagccaagtcgatacc

SEQ ID NO: 166224 - DNA, 380 bp, Arabidopsis thaliana columbia
gttattcagatcgccgaatttgcagtaaggagactaaaatatggtgcacgtttgctactaccgcaactatggaaagaccttcaagggaccacgtcgtccttacgagaaggagcgtcttgattctgaattgaagctggttggtgagtatggtctgcgtaacaagcgtgagctctggagagtgcagtactctcttagccgtatccgtaatgctgctagagatcttttgactcttgatgagaagagtccaagaaggatctttgaaggtgaggctttgctccgtaggatgaaccgttacgggcttcttgatgagagccagaacaagctcgattacgtcttggctttgactgttgagaacttttttgagcgtcgtctttagacta

SEQ ID NO: 166225 - DNA, 430 bp, Arabidopsis thaliana columbia
ggcaaacttgtgtacacttgttggttttcttgttattatcttcttcaatgtgtttgcacctgcctcttctgccagtcaccccgtcgaatggtcgctcgggaaagactatagctcgttggctaccggaaagtccttcgcggtcggcgataccatcgtgttcaactacggcgcgggtcacacggtggacgaagtgagcgaaagtgactacaagagttgcacattggggaacgcaatttcttcggacagtagtgggaccacaagtatagctctcaagacacctgggcctcactacttcatctgcggtatccccggccactgcactggcgggatgaagctctctgtcattggtccagcaacttcatcagggcggagtactggagacggtaccactgtcaaaaatacacccgtacaagaaggaaaaactacaccc

SEQ ID NO: 166226 - DNA, 436 bp, Arabidopsis thaliana columbia
gaacgattttctaaccccaaaggcgattgcgaattgaattaaagccaaaggacttcaaaagcttcgatggtattgtcagatgtgtcagaaacaatgccgagacgagaatggattcaagtgtcattgtatgagcgaatctcaccagaggcagatgcaagtttttgggcagaatccgactcgtgttgtcgatggttactctgaagaattcgagcagacgtttctcgatctgatgaggcggagccaccgtttctctcgtatcgctgccactgttgtctacaatgagtatattaacgatagacatcatgttcacatgaattcgacggagtgggcgacgttgacggagtttatcaagcatcttgggaaaactggtaagtgtaaggttgaagaaactcctaaaggttggtttattacttatatagatagagattctgagact

SEQ ID NO: 166227 - DNA, 213 bp, Arabidopsis thaliana columbia
gaatgggactatagctattgtggaagctgtttctcctgaattgggtaaccgggttgagagagtacgtgttcagctaccgggtttaagtcaagagcttctacagaagcttagggctaagaatattgattttgcagcacataatgctcaggaagatcaaggttctgtgttattcaacttgattggtaatcttgcttttccggcgcttttgattgg

SEQ ID NO: 166228 - DNA, 445 bp, Arabidopsis thaliana columbia
cctcacgccgctgcaccgggaagctctactccgttatcaatgactccgccgggaggagcccactcgcctaaatcttcctcccctgtttctccgacgacttctcctccgggatcgactactccgcctggaggagctcactcgcctaaatcttcatcagctgtctctccggcgacttctcctccaggatcaatggcgcctaaatccggctcccctgtttctccgacgacttcaccaccggcaccacctaaatccacgtcccctgtttccccatcctctgctccgatgacttcaccgccggcaccaatggcacctaaatcatcttcaactattcctccgtcttctgctccgatgacttcaccacctggatcaatggcacctaaatcttcatcccctggttcaaactcacccaccgtttctccatcgttggctccggaggctctacttc

SEQ ID NO: 166229 - DNA, 425 bp, Arabidopsis thaliana columbia
gctctccctctcctctccctttgagaaatccctaactctttgctcttctcttcccggcgatctatctctccgatttgggtattgaaatggcaactcctatggttgaagatacgtcaagcttcgaagaggatcagcttgcttccatgtccaccgaagatatcactagagctactcgtcttctcgacaacgagattcgaattctcaaggaagacgcgcaaagaacaaatctagaatgtgattcttacaaggagaagattaaggagaatcaggagaagattaaactcaacaagcagctgccttacttggttggcaacattgtcgagattttggagatgaatccagaagatgatgctgaggaagatggtgcaaatattgatcttgactcgcaacggaaaggaaaatgtgttgtgttgaaaacgtctaca

SEQ ID NO: 166230 - DNA, 442 bp, Arabidopsis thaliana columbia
tgttgatggaagctatgttttcgtcaaaggaattgttcaaaaggtgccagctactcctatggaggccctgaaatcttctctcatgggcatatttgagaaacgtcgagccggcaagtttttcagttttgttcaagaatacgatgagaaggacccaaaaacacacgatggaatggatttgaccagagttacaacaaaggaactgattgcgaaatatggtcttgatggcaacactattgactttattggtcacgcagtggcacttcacacgaatgaccaacatctcgaccaacccgcctttgatactgtaatgagaatgaagctctatgcggaatctcttgcacgtttccaaggaacatctccatatatttatcctctctatgggttgggagaactaccccaggcatttgcacgacttagtgctgtctatggtggcacatatatg

SEQ ID NO: 166231 - DNA, 462 bp, Arabidopsis thaliana columbia
aattggagttccggcccagacccacgcgtccggttcaatcatcccctattactgcttgtttacgttagacaaaaaaacaaaacaaaacaaaagtcagctcaggcgaagaacagatggctcgtaccaagcaaaccgctcgtaagtccaccggaggtaaagctccaaggaagcaacttgctactaaggctgctcgtaaatctgcaccaactactggtggagtcaagaaaccacatcgttaccgtcctggaactgttgctctccgtgaaatccgtaagtaccagaagagtactgagttgcttatcaggaaactgccatttcagaggctagtccgtgagattgctcaagatttcaagactgatttgcgtttccagagccatgctgtcttagctctccaggaagctgcagaagcatatcttgttggtctctttgaagacactaacctttgtgccattcatgccaagc

SEQ ID NO: 166232 - DNA, 449 bp, Arabidopsis thaliana columbia
ctcggctctcgcatcgatgaagaacgtagcgaaatgcgatacttggtgtgaattgcagaatcccgtgaaccatcgagtctttgaacgcaagttgcgccccaagccttctggccgagggcacgtctgcctgggtgtcataagcgtttactgtgagtctctcaaagaaaccaaaggcagagaaaagagataacacacacaaaaaaaaaatggcatcaacctcactcctcaaggcttctccggtgttggacaaatccgaatgggtcaagggacaaagcgttctcttccgtcagccttcttccgcttctgtcgtcctccgcaaccgtgccacctccctcaccgtccgtgccgcttcctcctacgccgatgagcttgttaagacagcgaaaactattgcgtctcccggacgtggaatcttggcgatggacgagtcaaacgcgacttgcgggaaa

SEQ ID NO: 166233 - DNA, 442 bp, Arabidopsis thaliana columbia
ctccatttgcttaatctcattttcgtttcaccgttgtctctctctatatcaaaatgggtcgccgtagctcaggaggaagatctgcccctcgccctcgtcctgctgctgcacgcagcccagctcctcaacctgtacaccgtgcacctcctccagctccagctcaggccagcggtggtggtggtggcatgttctcaggcattggttcaaccattgctcagggtatggcttttggtactggaagtgcagttgcacacagggctgttgattctgtgatgggtccacgaaccattcagcatgaggctgttgaggctgcttctgcatctgcagcccctgctggaagcgccatgctttctagcacctgtgacattcatgctaaggcttttcaagattgcatcggcagctatggaagcgagaatagcaaatgtcagttctacatggacat

SEQ ID NO: 166234 - DNA, 425 bp, Arabidopsis thaliana columbia
aaacatctttgtcatccgacctttgccatgacatgtgctcttgcatggcaggtcaccaaaatccttaataaaaaaaaaaaaaagtttcgtgttgtcgaggggagttcgcacgggggattttttttgcccgggttctcccctcttgcgtgtgtgtcttgcttctcgctcttcgtacacactacctttgatctcgattcattcacgtaaattctctcaataccacagaaatattctcgatccggatcttaagatcagcggatctggagacaagctggccaaatcttaatccaacatcctccaaccaaggtaccttcaattttgagtttaaattctccgttattctctttatttgcatcatataacaaacctgacaccaaatatttattacaatctcgaatcggcctttatttttgagcatggaaata

SEQ ID NO: 166235 - DNA, 248 bp, Arabidopsis thaliana columbia
cttcgttcaagccatcgtcactggtaagggacctatagttaaccttgctgaccatttggccgatccagttaacaacaacgcatgggccttcgccaccaactttgttcccggaaagtgagccaagttttatctgtattttgcttcagtctttgcttcgtgagtgtgagaggagaaagagagcttgtttagatgtaaaatttgcaagactttgtatttttttcattaatcaaataactcgtttttctctc

SEQ ID NO: 166236 - DNA, 444 bp, Arabidopsis thaliana columbia
ccgctgaccgtttcatccccagttcccgttttatttaagcagctgaggattcccctgtttggtgaattcacctgccaaaatgctatcttggccgagcggttcattgaaggaggtagcccctacgtcctgaagaatgagaaagctgatgtgtatcgtctaccatatttgtcaagcggagggcctggctttgccttgctcgagactgcgaagaagatcaactttggagacacattgagtcaaattgcaaatgggttttcatcaggcagctgggataaacctacgcttctggcttggggaatagctgataaatatctgcctcagtctatagcagaggaatttgagaaacagaacccccaaaatgttaagcttcgactcatcgaaggtgctgggcatttgcctcaagaagactggccagagaaagtagttgctgcccttcgagcattt

SEQ ID NO: 166237 - DNA, 428 bp, Arabidopsis thaliana columbia
gaagaacaatggcttcctctatgctctcttccgttactatggttgcctctccggctcaggccactatggtcgctcctttcaacggacttaagtcctccgctgccttcccagccacccgcaaggctaacaacgacattacttccatcacaagcaacggcggaagagttaactgcatgcaggtgtggcctccgattggaaagaagaagtttgagactctctcttaccttcctgaccttaccgattccgaattggctaaggaagttgactaccttatccgcaacaagtggattccttgtgttgaattcgagttggagcacggatttgtgtaccgtgagcacggtaactcacccggatactatgatggacggtactggacaatgtggaagctttccttgttcggttgcaccgactccgctcaaagtgtgaag

SEQ ID NO: 166238 - DNA, 461 bp, Arabidopsis thaliana nossen
tcgcgcagctgtctagggtttttcgcctctttctcaactctcttctcgaaaacctagcagtcgtctctttctcagttctccatgggaaaggctaaatccgccaccaaagttgttgcagagattaaggccactaagcctttgaagaaaggcaagagagagcctgaagatgatattgacaccaaagtgagtcttaagaagcagaagaaagacgtgattgctgctgtccagaaggaaaaagctgtgaagaaggttcctaagaaggttgagagctctgatgattcagattctgaatctgaggaagaggagaaggctaagaaagtcccagccaagaaggctgcttcaagcagtgatgagtcatctgatgactcttcttcagatgatgaacctgcacccaagaaggccgttgctgctactaacggaactgttgcaaagaagtctaaggatgactcatcatcatctgg

SEQ ID NO: 166239 - DNA, 454 bp, Arabidopsis thaliana nossen
ataagaaaaaaaaataatcaaatcctcctcctctgcttcaccaccaaaaagcatattcttctctcgtcttctccggttaatcaaaatctctccgtgtgaatcgtttgtgaatggtggaaactaatccgatcggtggtaagtttacgctctccctttccatcaaaagggcgagcttttctcttcctctctcgacatcctctgttttcgctttcggatcttgcaaagaaggctggtactttcgctgccttggcctcgacccgtgaacgattcgcccctaaaattcacaacccggaaccctaatttcctaaaaagtggttctttttttattgattctgttacttgtgagatttgctctgttttttgttctctcgatttcgaagatgttgctctacaacaagcagaagaagaaccaaaacgctaaagggaataggattctcattagcgttacggtttt

SEQ ID NO: 166240 - DNA, 454 bp, Arabidopsis thaliana nossen
ccaaatatgcataagcttttgttttctcttctctccgtcgtctcactctcatttctcctcttcttccatggcgccgaggcacgccagcgagaggcgccgtttccaaacgcctgccatttcagccaaatcaacagcctcgcgcccgctcaggcgacgaagttcgaagccggtcagatggaagtatgggaccacatgagccctgagctccgatgcgccggtgtaacggtggctcgcatcacccttcagcccaattccattttcttgcccgctttctttagcccacctgcccttgcttacgttgtccaaggagaaggagttatggggacgattgcttctggttgtcctgagacttttgcagaagttgaaggatcatcaggaagaggaggaggaggagacccgggtcgacgttttgaggacatgcaccaaaaggtgggagaatttccggcgaggggat

SEQ ID NO: 166241 - DNA, 436 bp, Arabidopsis thaliana nossen
tcgtccacgcgcaacggaggagagaaaagagagattctcaaaccggttaaagccgccgctgctgaaggtggagataccgctggggaagctaaagttggattcctcgccaagtatccatggctagtcactggattcttcttcttcatgtggtacttcttaaatgtgattttcaacatccttaacaagaagatctataattacttcccttatccctattttgtatcggtgatacacttgttcgtgggagttgtttactgcttgatcagctggtccgtgggtcttcctaaacgtgccccgattgactcgaacctcctcaaggtattgataccaggcgcagtctgtcacgccttaggccatgtcactagcaatgtctctttcgcttgcggtgctgtctccttcactcacaccatcaaagcacttgagccattcttcaatg

SEQ ID NO: 166242 - DNA, 397 bp, Arabidopsis thaliana nossen
catggatgatctctccaagcttctcttcttcctcctcctcactatctccattaccaccgcattacccgataaacccgggtcgggtcaaataaactcaaactccgtcctcgttgctcttcttgactcacactacacagaactagcagagctcgtcgaaaaagctcttcttctccaaaccttagaagaagctgttggtcaacacaacatcacaatctttgctcctcgtaacgatgccttagaaaaaaatcttgatcctgaattcaaatctttcttactccaaccgaaaaacctcaaatcattacaatctttattaatgtttcacattctttccaaaagaatcacttctccacaattctcctccgccgtcgttagccaccgtactctcttcaacgaccac

SEQ ID NO: 166243 - DNA, 451 bp, Arabidopsis thaliana nossen
agaaagcagcacgaacaccaactcttaaggaaaacatctaagttatggttaagtaattgcatgcaatttaaagctacgtgtccagcttaagacactcaagtctcacatctgtccctttttacttcgacttcgcttcttttggcttcttttaaactctctctatctctctctttcttcttcacactttgttgttaatttcaagtgtttgatcataatggcaacatcagctcgtagagcatacggtttcggtagagccgatgaggctacacaccctgactccattagagcaactttagctgagtttctctccacttttgtcttcgtctttgcagctgaaggctctatcctctctctcgataagttgtattgggaacatgcggctcatgcggggacaaacacaccaggagggctgattttagtagcgttggctcatgcgtttgctctgtttgct

SEQ ID NO: 166244 - DNA, 461 bp, Arabidopsis thaliana nossen
gccaaacaggcctaagactaagccacggttgaaagttaaaaccatgattgatatctatgcttctgcgaaagaaggcacattagaagatcttgataaaagaaatggcacaaagtgggctatgatttcgagctactctaaccgtgttgtctctgatgataagcctgaagtgtccaacaaagtaaagaagcgaagcgtgtcgcgtgctcgcattgatgaagatgctgctggcattggacctgtttacattgatgctaagggccaaaaactgcggattttatctaagtttaacgagaaagcttctgatccatcaagaagagagcatgaagaagtttgtgagaagaaatcttctagtgaaggtaaagggggcaaaagctttaggaaaaaactttggggagagaaacattacaagcatcgtaaactagttcctcaaaacagaaaactcactgttcgtaaaagcaatg

SEQ ID NO: 166245 - DNA, 461 bp, Arabidopsis thaliana nossen
cggacgcgtgggcttaactggtcaaaatttaatatcttcattggcattacttgtcagttgatatcttctatggcactgaagtgatcaatgaaggagttgtatggaaccaaagtgatcaattaaatagctgtttcaccaaaacaaaaagttatgttatgtcattttcaaatttttctttgaattcctaaaatacttgtaaaggttgtaggttaggttatttgaaattcaaaatgtaagtggattagtatgttaaaatcaaaaaaaaatgaagagaagacatgcgaatagccaaaaaaataggcaagaactaaaaagcacatacaaaaagtgacgacaccaaaccaaacatcatttaggtatggttttaacgtctgcatcaaagttgctctgcgtattatctgcttgaaatgactcattcaatagtataatctaattaataggaacacttcaaataggtgaaa

SEQ ID NO: 166246 - DNA, 402 bp, Arabidopsis thaliana nossen
cgcgctcaacgagatttgcggtattgccactctctgttctccttctcgttctcttgttcctctgcactgagtcgttggctaagtcggaggagtctgaagaatacgacgtcgctgtgccttcatgttgcgggttttcgtctcctcttctgattaagaaagatcaatggaaaccaatcttcgagacgaagtttggacagatttcaaccgttcaaatcggcaatggatgcggtggaatgggaccttacaagatacattccataacgttggagccaaacacaattttgctccctcttcttcttcattccgacatggtcttcttcgttgactctggaagtgggattctgaattgggttgacgaggaagcgaagagtactgagattagactaggggacgtttacaggc

SEQ ID NO: 166247 - DNA, 539 bp, Arabidopsis thaliana nossen
  unsure (1)..(539): unsure at all n locations
gcgacgccgacgtcgtccgagtagagggatgggnngtcaaacgaccggatgatgtatgtgagtagaggacccgcaatggcttatcggtgggcttccgctatgtcgcgcggtcatcttacacatcgcgcgtgcgtcgtgttagaccttaggatagatagaaacttcctatatacctctatatgccaagtagcatgtgcatagcaccatgacatgagtaacacctcgtaccggaacctccagtgccgatatagaattacggaccttagtagtgtcttcaacaagcattgggtctccttctctcgatnactcgatgatatatgggcatcatttaacccttgggaagaacctactctggactggcgaatggcttggtttcaatatcaattgggtcggcttataatagccgctgttatcaacctgacccttagctatgccactcttccggngtgggtaccttcacctttcttccctatatacatacacaacatacacatgtcaaagcatggaagtgattcaaaacatatgacaatgaaggaggg

SEQ ID NO: 166248 - DNA, 338 bp, Arabidopsis thaliana nossen
gtattacaacacaagcataatatagtgatctttaatgtgtttggacgtaagaaggctgataataagaagatgcaaatttgtacatgccacattaaaaatcacgagcattattatgtacattcataatcacgtataagcaaacacatctcatcattgtctttttttaatgaattggaccgcaaacatcaaaagttgtctactttaacttaacgaaaaataatactactccaattcaaaagtaaacatcgaatgtatacatgttttcgatatttgtatttatgaaattgatcttatgaatataccttacgttttgtggattgtgtgtattataacttttt

SEQ ID NO: 166249 - DNA, 453 bp, Arabidopsis thaliana nossen
catggctgctctacaataccttgaatcgcagaaaaatgcgcacccagagcttggtgagtggtacaattcgctcgcagatctggaccagaagaagctctggcatcagctcactcttaagctcgagcagttcatcgctctctctgtctttcaggctggagatgctttaatacagctttacaacaatttcatcactgactttgagacgaggatcaatcttctgaagcttgcgcatttcgctgttgtagtctcccgacagtatcctgagaaagaagctgcagttagttatcttgaaggagtgattgagaagcttaaaggctactaaagagtcaagggttaattaagccaattagctatatagaaacacaaatagctttggtcaagcttgagcaaggtgaccagaaggagtgcaagaaaatcttggacgatggaaaaagcctgcttgatagtatgact

SEQ ID NO: 166250 - DNA, 453 bp, Arabidopsis thaliana nossen
ggcgaatcttcccaccgttctcgtcaccggcgctagtggcagatcaggccagattgtgtataagaagctgaaggaggggtcagacaagtttgtagcaaagggtttagttagaagtgctcaaggaaaagagaaaattggaggagaagctgatgttttcattggggatataacagatgctgatagcattaaccctgcgtttcaaggaatctatgcgcttgtgattctcactagtgctgtgcctaaaatgaaacctggttttgatcccactaaaggtggaagacctgagttcattttcgaagatggacagtatcctgaacaagttgattggattggacagaagaatcaaattgatgcagccaaggttgctggtgttaagcatattgtcgtggtcgggtcaatgggtggtaccaatccggatcatcctttgacaaactggtgaatgtgatatactgg

SEQ ID NO: 166251 - DNA, 463 bp, Arabidopsis thaliana nossen
cttaagatagctatgcgccatctgattcctcgagttctagatcagcatgggcttagttccgagttcctcaagattccagaggctatggtaaagaatataattcagaggtatacaagggaagccggtgttcgtagtctagagaggaacttggctgctttagctcgtgcagctgctgtgatggtggcagagcatgaacaaagtcttccgttgagcaaagatgtgcagaaacttacatctcctctgcttaatggtagaatggccgaaggaggcgaagtggaaatggaagttattccaatgggtgtaaatgatcatgagattggaggcaccttccagagtccctcagctttggtggtggatgagaccatgcttgaaaaaatcctcgggcctccaaagtttgatgacagtgaagccgctgatcgagtggcgtcagctggcgtttcagtgggtctcgtttggactactt

SEQ ID NO: 166252 - DNA, 382 bp, Arabidopsis thaliana nossen
cgaatatgatattttctgggcatttttactaatatcaagtgctattcctgttttggcatttctaatttccggagttttatctccaattaggaaggggccggagaaactttctagttatgaatcaggtatagaaccgatcggggatgcttggttacaatttagaatccgttattatatgtttgctctagtttttgttgtttttgatgttgaaactgtttttctgtatccgtgggcaatgagtttcgatgtactgggggtatctgcttttatagaagctttcattttcgtgcttatcctaattcttggtttaagtttatgcatggcgaaaaggagcattggaatggtcttagttcgtttaccgaatacttgatacaattataat

SEQ ID NO: 166253 - DNA, 453 bp, Arabidopsis thaliana nossen
aaccatcttcttgtttgctccgaacaatcaagagatcgaaaatggctgatgttcacaaaggaaaggtttgtgtaaccggtgccggagggtttttgggttcgtgggtcgtcgatcttcttctctctaaggattacttcgtccatggcactgtcagagaccctgataatgaaaagtatgctcatttgaagaagctcgagaaagctggtgacaaactcaagctcttcaaggctgatttgttggactacggctctcttcaatctgctattgcaggttgcagcggagtcttccatgtcgcttgcccggttccaccagcttcagtccctaatcctgaggtagaattgatcgcacctgctgtggatggcacgctgaatgtgcttaaagcatgcattgaagcgaatgttaagcgtgttgtgtatgtttcctctgtagctgcggctttcatgaaccctatgt

SEQ ID NO: 166254 - DNA, 454 bp, Arabidopsis thaliana nossen
gtactgttgaaaaaaacaagatcccttacatgattgttgtcttcaccaccgaggaataatcagcaccactagctttcaatatctcccccatgtttttgagtacctttgatattccataagataatagaagcaagtagataaaatcaggaaggaaaaacagagcaactcaaccttgctacaactacactggaacaagttaatttgaagactaataccaaccaaatcaagaattttaaagcaaaacccaaaagtttcaaaggcttagttttgtatcatgaaagtttatatcccaataaactcagctagaataaggcacattaagttgtcatccctcactacattttcaccaacaaacaacatcatgacgacctagaggctagacctccttttctgtggataatcatccaccaaaacagagaagcaagtggaaagtactctaaacataaccaatttt

SEQ ID NO: 166255 - DNA, 459 bp, Arabidopsis thaliana nossen
agtaaaatgacgttcccttctctttctgtctcatttctcttctttgccttcatattcgttacgcatgcattcgacctcagcatcatccagatgcaacagggaacatgtccgtacacggtggttgtcatgacaagctgtctttctccggagtcgacaagagatcagatcagcattgtttttggcgatgccgacggtaacaaggtgtatgcaccgaaactagggggtttggtaagaggaccagggggtttggggaagtgttcaacgaacacattccaagtcagaggtcaatgtttgaatgaccctatctgctctctctatatcaaccggaatggacccgacggttgggtcccggagtccattgagatctactcagaaggttcaaagtccgttaaattcgatttcagcaagagcgtccctcaactaaacacttggtacggccacaacaactgcaacaccaca

SEQ ID NO: 166256 - DNA, 447 bp, Arabidopsis thaliana nossen
atttctttttctcgtcagtggttagaaacttacaattttaaaaatcttatcttaagctctcctctcttctctctccaaaatctttcagagaggagagcttgataatcgttttgtctccggtttgatccggatttgtttatattctcgtctctatgcgagatcaataatttccgattacatatcggatcttctgttaccggctatgaccggtcttttctccgtttttaacggaacttgatctctatctccatcgttgctcacccatcgatctcaacgttttcttccaagatttttgttgtctccatttcttcgtggattaacatcttcgtcacctccgattgctcaagacgcaagagcaaaaatggactttagactacatcaagatagatgtagtcggtggtggagtctcccgaaactggtgattccaaagaatttatgaagcagctc

SEQ ID NO: 166257 - DNA, 455 bp, Arabidopsis thaliana nossen
cttggattacagtttcctctttctctgtctgagctatggagattactgtaatcgcttcttcctcaatcgatgaaggaattggaagttgggatctcaaaaccgggacagagcagcttcaattcaagccgtgtgcttctccgtcgcatggtctcaccgccgtcggcgagaaattcctcgcctcctctcagctctcagcgagaaatacctctggctcgattttttactggtcttggactaagcctcaagctgaagtaaagagctacccagtggaaccaataaaggctcttgcagcaaacaatgaaggaacttacttagttggtggtggaatctctggagatatctatctttgggaggttgcgactggcaagttgcttaagaagtggcatggtcattatcgttcagtaacatgtttggtgttctctggagatgattctttgttggtttcaggatctcaa

SEQ ID NO: 166258 - DNA, 462 bp, Arabidopsis thaliana nossen
  unsure (1)..(462): unsure at all n locations
gcggtttgaatttatttggaagaatttagctgggacaacaaaaattaatgagttgaacagcgtangggttaaggggggtggcggatgcattatttcggataaggctggaactggtaagacacgtttgaccgtcgtttttcttcagtcatacttaaaacggtttccaaatagccatcctatggtcatagctcctgcaactctaatgcgtacttgggaagacgaagtcaggaaatggaacgtaaacattccattttataacatgaatagtctgcagttatcagggtatgaggatgctgaagctgtctcacgtttagagggaaataggcatcataattccatccgtatggttaagctagtttcgtggtggaagcagaaaagcattcttggaattagctaccctctgtatgagaagctcgcggcaaataagaacactgaaggaatgcaagtgtttaggaggatgtt

SEQ ID NO: 166259 - DNA, 450 bp, Arabidopsis thaliana nossen
gcgacttaatgcgttctccgactggagaagttatttttggaggagaaacaatgcgtttttgggatctgcgtgctgggtggttagaaccttgaaggggtcctaacggtttggacttgagtaggttgaaaaaagacatacaaccttggcaagaacgacgttcggcagaatatatgactcatgctcctttaggttcgttaaattctgtagggggcgtagctactgagatcaatgcagtcaattatgtctctccgagaagttggttatctacctctcattttgttctaggatttttcctattcgtgggtcatttatggcacgcgggaagggctcgggcagcggcagcgggatttgaaaaaagaattgatcgtgattttgaacctgttctttccatgactcctcttaactaaagtagtaggtaaaacaaataggttcataataaaaagtcttctt

SEQ ID NO: 166260 - DNA, 437 bp, Arabidopsis thaliana nossen
gcagtatcttttatgattggttgaactttttaatagtaaatattcttaatctgcgtgcttttatctaaaacaatttatattgtaaaacagagaaagtattaatttgatttgttctttctttcgtttccacttctttcatttgaataatatcctttgttgttttgttcaatctttcatttttgtattataacgaaactcaaaagaaggtattttgaccactaatgttgttgttaaagttttaaacatcctttttggataatttaatttttattgtaaaggcaagaaatacataaatatttaatctgctaatctccttttttttcttgcctcgaatccgaattttaacatataaagaagcgagacaggttcgaattaaataatctctcttttaaagagatctttatagaatacataaaaaaaaatcaaactatttatag

SEQ ID NO: 166261 - DNA, 462 bp, Arabidopsis thaliana nossen
caaagggctacacaagtcttccttctctctctccctcttcctctctttagatggaataatggatcaatgcttgtaaaggtttgaaatttgatcaagttttggagaagcaaattgaaaaagaaaagagaagacatggaggtggagaagaggattgtagtgaatggaggaatgaaattgccaataggatacagatttcacccaaccgagcaagagcttatccttcattacttgctcccaaaggcctttgcttctcctttgccttcctccatcatccctgtctttgacctcttcttctctcatcctcttagtttcccaggggaccaaaaggagaagcagaggtacttcttttgcaagaagagagaagtgtcaagtaatgagcatagaatcaagatttcctctggtgatggttattggaaacctattggtaaagagagaccaatcattgcctgtggtaaaacattt

SEQ ID NO: 166262 - DNA, 454 bp, Arabidopsis thaliana nossen
cagcgattctccaattcgacggtgatacgaaaatgctcgcagacgctgaatcgtttctgtttcatcttctaaaggcggtgccttgtgcgtttactcgtcttaatgcgttactctttagagctaattactatccagagatctcaaaccataacaaaaatcttcagacgttggatttggcttgtacagagcttaggtcacgtggcttgttcgtgaagctattggaagcgattctgaaatctggaaacagaatgaatgcaggaacagctagaggagatgctcaagcttttaatctcaccgcgcttttgaaactttctgatgttaagagtgttgatgggaagacgactttgcttaactttgttgtggaagaagtggttaggtctgaaaggaagcgatgcgtgcttaaccgaaggactaaccgtagctttagccgtagtagcagcagttcgatctccga

SEQ ID NO: 166263 - DNA, 455 bp, Arabidopsis thaliana nossen
aaagaagtagagaacactgacacctgtatatctgggagagaatcacgagaagacaggctgtgctgactctgtaaccatgcgcagaccggaaaatatatgacaaaaatgttaaatgagattaaaagaatgagcaagttgaaactcgggaatatgtagcggaagattcacctatctgtaaccatatccaaaacagctccaaatgtagagactgaaaggaaaagagttgtgtgttacgttcaatcgtttctgataatgtagaacaagaataaactgtgtatgggactaaaaatattgatcaatgagacaaatgacatgaaatgtcatatttaatcaatgtcaggatcatagaggaagcataagtaatgagttagttgaagctaagaaaagagatggggagaatgaaaagagcaccttggttaaatttacgagcgcaccatccatccacagcatcacaa

SEQ ID NO: 166264 - DNA, 440 bp, Arabidopsis thaliana nossen
accaaagctgccatctttctccttttgggttttgattagatctccgattttgggtttctatatattatgcgagctcacttttgttcggtctgattatctgacaatgatattctccaagcttggttcttccctcgctcgatcctcacgttctaagggatttgtgtacggcggtggtgtgagatcggcggtatttaaccaagggaggttacgagcgccgcagaatctcgaggcggccgtcaatcaggtggatggtgggattagggtttttgaggcggcacttttgcttcttttgctgctcgaaagggactagaagccggtgatttaagccgtgctttcgctaaccctagattgcgtcggttcttttctagtctaaccccatagaagaagaattatgagaactactatccaaaagacagtaaggaagcccccatgaatgagca

SEQ ID NO: 166265 - DNA, 443 bp, Arabidopsis thaliana nossen
cccacgcgtccgaatggtttagaggagactttgtgcaccatgcgatgcactgaaaacctggatgacccgtcggatgctgacgtgtacaagccatcactcggatacattagcacacttaacagctacaatcttcctatcctcagacttctccgccttagcgctcttcgtggctccatccgtaaaaacgctatggtgctaccgcaatggaacgtaaacgcaaacgcggcactctacgtgacaaacggaaaggctcatatacaaatggtgaacgacaacggagaaagagtgttcgaccaagagatctccagcggacagttactagtcgtgccacaaggcttttcggtcatgaaacatgccataggcgaacagttcgagtggatcgaattcaagacaaacgaaaacgcacaggtcaacacactcgcgggccgtacctcagtcatgag

SEQ ID NO: 166266 - DNA, 441 bp, Arabidopsis thaliana nossen
aatgaattgggtgatattcattgttttgacttggctagtgaacagtggaaggctgtggagactaccggggatgtaccggcggcgagaagcgtgtttccggcggtttcttacgggaagtacattgttatttatggtggggaggaagagccgcatgagcttatgcacatgggagctgggaagatgtctggagaggtttatcagcttgatacagagacgttagtgtgggagaggattgtgtgcgggaatgaagaggagaagccgagccaacgtgggtggtgcgcgtttacgaaagcggttaaggatggtgaggaaggtttgttggttcatggtgggaattctccgaccaatgagcggcttgatgatttggtgttttggggtttctctcatcttaatgtcaattaatgactagctgctttgtgtctttcgtttataaagtgttta

SEQ ID NO: 166267 - DNA, 395 bp, Arabidopsis thaliana nossen
aatttctcaaaatcttaaaaactttctctcaattctctctaccgtgatcaagatgcagatctttgttaagactctcaccggaaagacaatcaccctcgaggtggaaagctccgacaccatcgacaacgttaaggccaagatccaggataaggagggcattcctccggatcagcagaggcttattttcgccggcaagcagctagaggatggccgtacgttggctgattacaatatccagaaggaatccaccctccacttggtcctcaggctccgtggtggtatgcagattttcgttaaaaccctaacgggatagacgattactcttgaggtggagagttctgacaccatcttcaacgtcaaggtcaatatccaagacaaagaggtgtatttcttcg

SEQ ID NO: 166268 - DNA, 456 bp, Arabidopsis thaliana nossen
  unsure (1)..(456): unsure at all n locations
cagttgggcaagttgagaaagtacctgaggttattgaagtgttaaagcagaaaaaggtttctccggatatttttacttataatttgtggctaagttcatgtgctgcaacctttaatatagatgagcttagaaagattcttgaagagatgaggcatgatgctagttccaatgagggttgggttcggtatatcgatcttactagcatctacataaacagtagtagagtaactaatgcagagtctactttgcctgtcgaagctgagaaatctatttcgcaaagagaatggatcacatatgacttccttatgattctgcacactggtctagggaacaaggttatgatagatcagatttggaagtctntgagaaacaccaaccagatattgagtagtagaagctacatttgtgttctttcatcttatctaatgcttggtcatttgagagaagccgaggaga

SEQ ID NO: 166269 - DNA, 460 bp, Arabidopsis thaliana nossen
agctacagtagacgatggtccaattcattacccatcaatcgattcaacaccagtcgatctcccatgtgctgcttctcttccagcttcaacagaaggtgaaaggaaagaagacgggaacactggaacgtgtgcgatatgtctcgatgctccatctgaagcagtctgtgtcccgtgtggacatgtcgcgggatgtatgtcttgcttgaaggagatcaaatccaagaattggggatgtcccgtctgtcgagccaagatcgatcaggttattaagctgtaccgtgtctgaaaacaggtatcaacaacaacatgggattatctatatccttcattgaactattgaaactatatctctctatttacacagctaaaatcaataccatgttttctttttatcaaaagctaaaacgatatgtttgtaatttggaacttgataaaaaacagttccagtattttgtatata

SEQ ID NO: 166270 - DNA, 420 bp, Arabidopsis thaliana nossen
gtccgaaagctcgagagagttatttacatttgctattgagaagggaactcgtatgacgtgaacctgaaagaacatgtgtggttattgaccgggagttgggggcacacgcaccccttcttttacatatgtactcgctcttactgtctagttgctccaccttaatcaaactgtgtaccgtttgaacatttctcgctatgtatgtctcacttagaaagcactcaaatcccctatttggtgttaccccgtctgtcgtgctcttgatctatcacgtctttataactgcactgttgtttcgatacaactcattcatctcctacttgtggataactctattttccttcgtttaacctatctgaattctcctcttccttctttttttcacatcctattcttcaatatccactttctgacttttttatt

SEQ ID NO: 166271 - DNA, 427 bp, Arabidopsis thaliana nossen
  unsure (1)..(427): unsure at all n locations
ctggggatatacctccgcacgtaagttccatatatcatggggcagtgttactcctccaaaacaataatttatcaggggttattccagacacactactactgaatgttattgtacttgatctgagaaataaccgactgtctgggaatcttccggagttcatcaacacccaaaacatcagtattcttcttttgcgggggaacaattttacaggacagattcctcaccagttctgcagtctaagtaacatccaacttctggatctttccaacaacaaattcaatggatcgataccatcatgtcttagcaatacatcatttggtttgaggaaaggggatgattcttatagatatgatgtcccttcaagatttggcacagctaaggatcctgtatattttgaatctttactcatgatagatgaatntaatat

SEQ ID NO: 166272 - DNA, 454 bp, Arabidopsis thaliana nossen
cggacgcgtgggtgcagctttcatgatctttcctttacctttgcagggtcagcaacaaatattctggagatcaaatggcgacattcaggagatatgtgaacataatccggaatagcatactgaacattcaggattctctgagcaaatattttcacaacagaatagattgtttagctagcaagtaataaaatccatagttacatttttcaactattgaagcatgaagaaagtgaaaggctcacatgtatagttttcctgaaattctttggttcctcgggatcttcgaaaggatatgctccaaccagcatgacatacagagtaaccccacaagaccaaacatctgcaacctgaaaaaaaagaagaacaattaggatgcatttgactaattcaaccaaaactcaagaattatcagtttacaaatcagactcttaatagctttcttcaccaaaattct

SEQ ID NO: 166273 - DNA, 230 bp, Arabidopsis thaliana nossen
gtctcaagactccaaagacaagaaagatgcattcagaaagaaacaccagtgcggaaaatttattcagagagaaaaaatccgatagaatcacacaataaagaacatatatagcaatgaagcgctaagtcgctaacagacactagacaatcctattgatctatcccgttaaccagaaacaacaaaacaggcacaataagcagatatccccaagaatctagccaagtgcaaaa

SEQ ID NO: 166274 - DNA, 452 bp, Arabidopsis thaliana nossen
atttgtcccaaagcagaaatcagcaatcaagtggtacgggaaatacctcaacaaccctcttggacgcatcatgatgttaaccgtccagtgttgtcctcgggtggcccttgtacttagcctttaacgtctctggcagaccgtatgacgggttcgcttgccatttcttccccaacgctcccatctacaatgaccgagaacgcctccagatatacctctctgatgcgggtattctagccgtctgttttggtctttaccgttacgctgctgcacaagggatggcctcgatgatctgcctctacggagtaccgcttctgatagtgaatgcgttcctcgtcttgatcacttacttgcagcacactcatccctcgttgcctcactacgattcatcagagtgggactggctcaggggagctttggctaccgtagacagagactacggaatcttgaacaag

SEQ ID NO: 166275 - DNA, 442 bp, Arabidopsis thaliana nossen
ccaacgtaaaacactaactaagagatcaatatggctggagtgatgaagttggcatgcatggtcttggcttgcatgattgtggccggtccaatcacagcgaacgcgcttatgagttgtggcaccgtcaacggcaacctggcagggtgcattgcctacttgacccgaggtgctccacttacccaagggtgctgcaacggcgttactaaccttaaaaacatggccagtacaaccccagaccgtcagcaagcttgccgttgccttcaatctgccgctaaagccgttggtcccggtctcaacactgcccgtgcagctggacttcctagcgcatgcaaagtcaatattccttacaaaatcagcgccagcaccaactgcaacaccgtgaggtgatgagcgacggtcaaatgaagctactagcggatgtttcgaatattatataatcgat

SEQ ID NO: 166276 - DNA, 414 bp, Arabidopsis thaliana nossen
caactagactgatcaaaccgatgagtaactccagcactacagttgtagtcatggttgttgattgtgtagactttgatggttcgtttgggaaacgagctgccaagtctctgtttcaagtgcttcaaaaagctgaaaatgatcctaagggtagcaaaaacctcccaaaacttgtacttgttgcaacaaaagtagacttacttcctacacagatttcaccagctcggttagaccgatgggtgcgccaccgtgccaaggctggaggagcacctaagctaagtggggtttatatggttagtgctcgcaaagatattggtgttaagaatctgttagcttacattaaagagttggctggtccaagaggaaatgtgtgggttattggagctcagaacgcggggaaatctactttgattaatg

SEQ ID NO: 166277 - DNA, 459 bp, Arabidopsis thaliana nossen
cggacgcgtgggaaaaaaaatatatatatatatatagaaataacacacatttttggtcatgtctttattgggagaagttttttaaaattatactactttccaaaaatatcatttttatccattttcaaaaataccacaaatatttagagttttttaaagttataaaatataccaaaaatattactatataatttagtttatgaatatattattatgagttttggttattaagaccttatataggcatatagcatgtatattaagctcataatatatcctgttactatataatttagtttatgaatatatatgagttttggttatataaataaataaatcgatcagaccgtattaaaaaggtgttcataagtaaaactttactacgatattagacgtacaaatgttagtgtactgtttatatttttgaatttagatccacatatattcttgtttattaaa

SEQ ID NO: 166278 - DNA, 416 bp, Arabidopsis thaliana nossen
agttatcggaggtgttttcgatttctatttcatcgccggaccgtcgccgttaaatgttgttgatcagtatactcagttaatcggaagacctgctgctatgccgtactggtctttaggatttcatcaatgtagatggggataccataatctatcagttgttgaagatgtggtggataattacaaaaaggctaagatcccacttgatgtgatttggaacgatgatgatcacatggatggtcacaaagatttcacgttgaatcctgtggcttatcctcgtgctaagctattggcgttcttggacaaaatccacaagattggaatgaagtatattgtgatcaatgatcctggtattggtgtcaacgctagctacggtacatttcagagagccatggctgctgatgtgtttattaagtatg

SEQ ID NO: 166279 - DNA, 453 bp, Arabidopsis thaliana nossen
aaacatactatctctgagaaaagcagggaagatagtaaagtatcgagctttggtggtttgaggtctggctcaagggttgcaccttgtagtgacgatggtgattctgtagtcaagaattgtaaagatgatgttgaagagagcaagaaagatagtgaggaactgtctttgatacgggaacagcttgctctgattgagaaccaacagtctagtctcttagacttactacaggtatacacttggtctttaataagcatagtgtccctttatgtagataaattgtttggttatgaatgttgtagatagctcaatcctcactgattttttttttcattttggatgtagaaattcatgggaacctcacagagtggaattcagtctctggagtctcgtgtaagcggtctagagatggcgttggatgaaatatcgtgcgatctggcggtttcaaacgggaga

SEQ ID NO: 166280 - DNA, 467 bp, Arabidopsis thaliana nossen
gcggacagaagttcctctgaaagggtcagcgaagaaccactacaagaggtggaagagcgaaaaccaactcttccctgacgccattggccatgatatcggaaggtgtcaccgttcacgagggcgactgggactcccacggggccatcaagtcctggaactacacatgcgatgggaagcaagaggtgttcaaggagaagagggagttagacgaccagaagatggcggtgacgtttagagggctggatggtcatgtgatggagcagcttaaggtgtatgacgtcatcttccagttcgtccctaagtctcaggaaggttgcgtctgcaaagtcactatgttttgggagaagcgctacgaagactctccagagcccatcaagtacatgaagttcgtcacgagcttggctgctgacatggatgaccacattctcaagaaccagagcaaggcttaatcatcatagtgaccatac

SEQ ID NO: 166281 - DNA, 446 bp, Arabidopsis thaliana nossen
aacatagactatggaatcaagtaacatttaggtcacttatattttaatgcaccgcatctaacgcgattagtcattaatacacggatcgtccgatctaaaataaaatttgtttttattttatatatacagtatataacctttctcattatttcttcttaaatcattacaatcatcacaaagccatcgcaaattagaagagatttaagatggccaacaacatctcctttccttgcgccatcatatttttctctatcaatattttcttcttaatcaagtcatcacacgcaatgccatcgtttaacgtccaaaggtacggagctagaggtgatgggagagcagatgcgaccaagtcctttttgacagcttggtcattagcctgcggctcacgggctcgagccatggtctacgtttcccgtggaacatatttggtcaaaaacctagtcttt

SEQ ID NO: 166282 - DNA, 390 bp, Arabidopsis thaliana nossen
  unsure (1)..(390): unsure at all n locations
attttcactgagcgcataacatttttgagacaagagactctctctctctctcttctctctttctcgccccctctctccggcgatggggggtgctatggaccaacgcaccaatgtgaacggagatcccggcgccggagaccggaagaaagaagaaaggtttgatccgagtgcacaaccaccgttcaagatcggagatataagggcggcgattcctaagcactgttgggttaagagtcctttgagatcaatgagttacgtcgtcagagacattatcgccgtcgcggctttggccatcgctgccgtgtatgttgatagctggttcctttggcccttttaattgggccgcccaagggaacactnttctgggccatctttgttctcggccacgac

SEQ ID NO: 166283 - DNA, 454 bp, Arabidopsis thaliana nossen
aaaacaagacccatcgataacagcgatcatggtggctaaagccttagcacagctgataacatgcatcatcttattctgccacgttgtagcttccgtagaagacctcaccatacgccaagtcacggccgacaatcggcgaattcgcccgaatcttctcgggactcacacagagagtaaattccggcttttcatgtccgattacggcaagaactactccacgagggaggagtacatccaccgcctcggaatatttgccaaaaacgtccttaaggccgcagagcaccagatgatggacccctccgccgtccacggagtcacacagttctctgacctcacggaagaggagttcaagcggatgtacactggagtagccgatgttggcggcagccgtggcggtacggttggagcggaggcacctatgggtgaggttgatggattgcctgaagatttgact

SEQ ID NO: 166284 - DNA, 223 bp, Arabidopsis thaliana nossen
gcaagatatatccatgctcataattgcgttaagatattcaggaaaaggagcctgctttaagaatatagagaaggctgaaggggccatagcactattgtccatcttacttctgatttcttcagtcacggattagtggccagtatttatattttcaccttctgctgtaccttttcacttttttcttgaccttgtaatttttaaaaccttaagtcattcgttttat

SEQ ID NO: 166285 - DNA, 437 bp, Arabidopsis thaliana nossen
gggacaacaaggccaaccatggggtggacagggaacaaaaggaacacctgacccaatgctggttcaaactttgaatcgaactttaactttttgagcagaggtattgcatcagaatcttttggatagttgacgcgaggcgcctttatccgattcagaggtaggaaggtcacacgtccacccttgagagaattcaggtgtctaattatcttggttgaaatatcatcattctcaactaccacgttaaacaggctggtcgtagaacaagagatgacaagagtagatcataagataaaaagtagattcacagtaattgtaggtgtgaggtaaactcagtaggtttcctgcatacctgtttccagcagtgacttcaactgcagtgaaaaacttttcatcgcaatcaaccaactcaacaagtggaccaaaaactccattgattc

SEQ ID NO: 166286 - DNA, 446 bp, Arabidopsis thaliana nossen
  unsure (1)..(446): unsure at all n locations
aaggattttgatttcttctgcaaaattcgatcgatagtgacgaggaagatcataagatggcgaccgcaagcgagagttcttcatctaagagatggcttccacttgaatctaacccagatgttatgaatcagtatctctggggacttggtcttgcccctgatgaagcagagtgcaatgatgtgtatgggttagacgatgaacttctagagatggttccaaagcctgttcttgctgttctcttcctttacccaatcaccaaaaagagtgaagaagagagaatcgagcaagacaaggaaattaaggaaaaggtgcatagtgataaagtttactttatgaaacaaactgttggtaatgcttgtggaaccattggtcttcttcatgctattgngaatattacctctgaaatcaaactctccgacggatcattcttggatagattcttcaaa

SEQ ID NO: 166287 - DNA, 436 bp, Arabidopsis thaliana nossen
cgcagacctttgctacacatcaactcacacatacgtcccccctccggtttattcgacgtctccggtacaatctgctgagacggttggctcacagtgacggtggtttctacagatacattgttccgcggaggcgataacatcggctgatggaaattattgttccgcgcggcgaggacaacgccgttactctcgagtttggaatcaattgcgttttcgattgactcgatgtgcttctgaatatcatcgaattggcgtttgaatgtttccactgcaactgaaaacgcagctaattcgtctatggatttcaaaaattgaggctgcttagattgaccgatcgtaatgtccatacttgtagactctgtttcgacaatcttcggtaattctcttcgtcgctgttcagattgatgtaaaccttgtagattaatgtccatacttg

SEQ ID NO: 166288 - DNA, 398 bp, Arabidopsis thaliana nossen
gttttaacccgcggtttaccgcgggcaatcggtttatttggtttttatactaaatatttgaataaatttgatatcctaaacttataaatataaatttctagtgattagtgaagaatcgtaatatatgatttggatattattgattattgatttcgtgattgaatatagtgtttttagggatggaatgtgatcatattttgatttcaaaaaggacatagattccttaattttattgaacggtttagattgaatcagatcatataaagtttaggagattgttaataccaaattgcccttaatgattttaaatagcaaagaccataatccaaaattgaaatcaaaattgagaccaaattagaaaaaaaattcaatttgtactttccttttaataataaagg

SEQ ID NO: 166289 - DNA, 435 bp, Arabidopsis thaliana nossen
tagagctatatattcgcacatgtactcgtttcgctttccttagtgttagctgctgccgctgttgtttctcctccatttctctatctttctctctcgctgcttctcgaatcttctgtatcatcttcttcttcttcaagtgaaaaatggccgatggtgaggatattcagccacttgtctgtgacaatggaactggaatggtgaaggctggttttgctggtgatgatgccccgagagcagtgttcccaagtattgttggtcgtcctaagcacactggtgtcatggttggtatgggtcagaaagatgcttacgttggtgatgaagctcagtccaagagaggtatcctcactctgaagtatccaatcgaacatggtattgtaagtcactgggatgacatggaaaagatctggcatcacactttctacaatgagcttcgtg

SEQ ID NO: 166290 - DNA, 451 bp, Arabidopsis thaliana nossen
ggatttttgattgagtaagttcaacaaagtctttttagactatctttctttattttttccttatataaaaaatatattaaaaactcaatcaaaattaaattatccacaagaacaccaatttttgttatgcttaatatatttaatttgatctgtattttttttaattctacccttttttcaagcacttttttagtcgccaaattgccagaggcctacgcctttttgaatccaatcgtagatgttatgcccgtaatacctcttttctttcttctcttagcctttgtttggcaagccgctgtaagttttcgataaaattcttaatactgtcttaaacaaattcacgattttgatttttccaacaattcaaaagatccaaaaaatcttgacgtatgaacgaactctcaattcaaacatttaatttttttggtagccatactaaatctggatcatt

SEQ ID NO: 166291 - DNA, 438 bp, Arabidopsis thaliana nossen
caagaacaaaaaaatggcggatacagctagaggaacccatcacgatatcatcggcagagaccagtacccgatgatgggccgagaccgagaccagtaccagatgtccggacgaggatctgactactccaagtctaggcagattgctaaagctgcaactgctgtcacagctggtggttccctccttgttctctccagccttacccttgttggaactgtcatagctttgactgttgcaacacctctgctcgttatcttcagcccaatccttgtcccggctctcatcacagttgcactcctcatcaccggttttctttcctctggagggtttggcattgccgctataaccgttttcttttggatttacaagtacgcatcgggagagcacccacagggatcagacaagttggacagtgcaaggatgaaggtgggaagcaaagc

SEQ ID NO: 166292 - DNA, 457 bp, Arabidopsis thaliana nossen
gaaagagagatttgtaataatcaaatcatggggaagagaagaggtgtctccgccgtgaacgttgttttcgggtggctgcgacaacaatcgaacaaggttaaaatagctttaggaattatcatctctttgatcctcgtcgttcttctgaaattcaccgttaggaatcacaatcactttttcatcgcctccgagctcatccacgccgccggaatcttgatcctcatctacaaactcactcgccaaaagacttgctccggtctttctttaaaatctcaagaagtgacagcaatatttctagcggtgagattgatatgcagcataaacatggaaggtgatatccatacagttctcgatttcgccaccttggtttcgactctatgggtcatttatatgattcgatacaagctgaaagcatcttatataaagtctctcgacacttgctacaattactatgtgc

SEQ ID NO: 166293 - DNA, 360 bp, Arabidopsis thaliana nossen
ttaacctaatgtagttatacaaaataaattagacggtacgcttttggaaatgttacagaattaagatgacatttaatcaattatttttaaaaaattaacgagtgatgaagaatatatagtatttttacgtttcatgcacatatctctcccacttgctttatatatgacgccacgtctatgacgtaggccaaaacagtaacatcggatactaccagtcgcacattcatttatccaaaaacaacgattatcgactatcattaaagtgatcccaaacagccaaaaccgcaaaagatcgagattttccattctttcaatccggctcaatagcccatgccgcgaaattgatccctaacgctcaaa

SEQ ID NO: 166294 - DNA, 452 bp, Arabidopsis thaliana nossen
  unsure (1)..(452): unsure at all n locations
gtgttaaaccagagtaaagcttgaaactttggactaaaagaatggcgtctttgggtgtgtcggaaatgcttggtactcccgttaacttcagggcagtttcaagatcgtctgctccgttggcatcaagcccatccacgttcaagactgttgctctcttctctaagaaaaagccagctcctgctaagtccaaggctgtctctgagactagcgatgagctcgccaagtggtatggtcctgacaggagaattttcttgcctgatggtcttttggatagatcagagatcccagagtacttaaacggtgaagttgctggagattatggttatgacccatttggtcttggaaagaagcctgagaactttgctaaataccaagcttttgaattgatccatgcgagatgggctatgttaggagcagctgggttcatcattcctgaagctntaaacaaatat

SEQ ID NO: 166295 - DNA, 450 bp, Arabidopsis thaliana nossen
gtgatactccaaaggagaagcgtcctagattaggaactcccgctcttgtggctgaagtaaaagacacgagtatgaagattgttgatgatccagacttggggaaaccgcctcagactggtgttcttaacctcggtgtttcagagaatacttttaacattggaaagagtaccagagaggagaacaaacccgatccactccgaatgaagagaaccggtttgcaaaagcaaggatcaaaagtgatttttggtgtccctaaacctggaaagaaaaggaagttcatggacgtgagcaaacactatgtttcagaggcaagcactaaaactcatgaacggaaggaaccagttaagcctgtgagatcaattgtgccccaaaattctggaataggtagctggaaaatgccttctaaaactatctccatagagaaacagacaacaatatctaggcccaaga

SEQ ID NO: 166296 - DNA, 447 bp, Arabidopsis thaliana nossen
gataaaggcggagtctctctccagttattttgctcatccatcgattcttagagttcaaaatggttgatcaagttcagcaccccactattgcgcagaaagctgccgggcagttcatgcgttcaagtgtttccaaggacgttcaagtgggttaccagaggccttctatgtatcaaagacatgcaacctacggaaactactccaatgctgcatttcaatttcctccgacatcccggatgttggcaacaactgcttctcccgtgtttgtccaaaccccaggagagaaggggttcactaactttgcccttgactttctgatgggtggtgtttctgctgccgtctccaagactgctgctgctcctattgaacgtgttaagcttttgatccagaaccaggatgagatgattaaagctggcaggctttctgaaccctacaagggtattggtgact

SEQ ID NO: 166297 - DNA, 462 bp, Arabidopsis thaliana nossen
aagaggaagaaaaatgggtcgagtctcatctattatctctttctctttgacactcttgatcctcttgaatggctacactgcccaacagtggcccaacgagtgccagctcgatcaactcaatgcgctcgaaccatcccaaatcatcaagagcgagggtggtcgcatcgaggtctgggaccaccatgcaccccagctccgttgctccggctttgcctttgagcgtttcgtcattgagcctcagggtcttttcttgcccactttcttgaacgccggcaaactcacgtttgttgttcacggaaggggtctaatgggaagagttattccgggatgcgccgagacgttcatggagtcaccggtatttggagaaggtcaaggtcagggtcagagtcaagggttccgtgacatgcaccagaaagtagagcacctacggtgcggtgacaccattgcaacaccatctggtgt

SEQ ID NO: 166298 - DNA, 459 bp, Arabidopsis thaliana nossen
gttcattgcaatagcaattgtctcatgagtttctcttgagattgctccaagagacattccacctgtacaaaaccgttccacgatagaggaagcaggctcaaccttcccaacagggatagggttacggtcacttttgaactcaagaagatcgcggaaaacctacaacaagaatatacaaagaatcatattcacttgttccagaaaacagacaatcagatttgaagatgagattatagcactcaccgtaataggacggttggctaaatgctgctgatagactgcataggctgtctcactcttttcgcggacggctttatgaagtaatttagacatttctgggttgtttccatgatattcacctttcatataacaaaatatactaaattagagataatactggaaaagcttatagggataatgaatggtagcaatttaatccactaaaaggacagtaaaata

SEQ ID NO: 166299 - DNA, 410 bp, Arabidopsis thaliana nossen
gtttgtttgtttccttctgttgtattatacttgatctgtaaaaagatcatgagtttattaagagtgtttgatttcagactcctctttgttataagtctattactagttgttgtctcttagtttcttttatcaatagagttgagttatatggaataacaagttgaaaagaaaccaggttcttgttgatgtgtgggttggagaaaaaaagttctttgattatatatgtaacatttatgcattactgtttaatgtaacgtctaatgagtatgatgaagggagattgaatcaatcccactctcacatcatgtttgagatgacaagtacaatgccacaaatattctgaaaatcaccactgttcttcacagctgaaggatcaactttgaaatccgccatgtcttgttcacatgttg

SEQ ID NO: 166300 - DNA, 456 bp, Arabidopsis thaliana nossen
atctccataacctccaccaaagttagagcgagagtcaccgaaccgcttcgatggggttgtgaccgagtttggttttttaggctctgccttctttatctctacctatacaaatacagggcagatgtcagtgttctgattatagctacaaagtctaagaatctcaacaatatttgtaagagcggctagttacctgagtccctgaaagctcaattctgttccctttcgccaagagatgatcaaccatatcttcactttcatatgtaacaaacccaaagccacgtgatcttccagttgagtgatcacgcataatctgatgttccttcagctctccaaattgcataaagaactccttgaattcatctatacaaacaccaatcaccagatgagaaacttagtaaataaaaacatgattctgaaataataaaatcatattatgggagagtgtttaccatcatc

SEQ ID NO: 166301 - DNA, 454 bp, Arabidopsis thaliana nossen
cactaaatttgcaaattattcaaaagaaaataatttatttgacacgaatttacatcctacgggcagatatagttgcgaaggggagacaattctctgctcctcaaaaggaacaatcctgtaaacttgatcgcaaacaatgaccatttatttgcttattcgttgagaaatactcttcactaggtaaatgagaacctaaaaacgaaacaaatgagttcataatctctacatagtagtaacagatgatccctcagcttgcaagctatggtcattgagccacgagataatatcggacaagacacggagaatcatgtcgtctggttcgccttcgagcagagaatgataagcattttcatacaaaactatcttcttgtctggacttttggctttctcgtacaactctctgctcactgaaggatctgccactggattagctttctcatgtagaatcaatatc

SEQ ID NO: 166302 - DNA, 424 bp, Arabidopsis thaliana nossen
gtttgtctaaacataaccggtaaccactccttggttaatagaaccgaggggaaacacttaaccggtaaaggacgagtcaaacaaggaacttccagctcagtagtgtccgagtccttgaggtcactaacgtcatagttcttaacgtcgtaaaggtattcaacatgaacttgcaatccaagaaacgttgcgttggatgtgtaaaacatgtaactgggaacaccaaactcattagcgacatcaatcatcatcatgcaaaacatatccaccacgaatccagcaagacgcgacggcgaatctggtggacccgggtcagtaagtttttccaccgtggctttgacctgcggcttgaagttatcaatgtaatcgaaaaaatgtggtttggtgtcatcggagtctggtttatcaaggacggagagaacgttgt

SEQ ID NO: 166303 - DNA, 113 bp, Arabidopsis thaliana nossen
gggacgtgattacaaactgaccatactttattaagaaaaagaaaaatatgtgtctgcggcacctcacttgtaataacactttcttctcataaataaaagggaagtttcgagtt

SEQ ID NO: 166304 - DNA, 459 bp, Arabidopsis thaliana nossen
ctcctccgcacaactccgccgtaacttctacgccggaagttgtcctaacgtcgaacaaatcgttagaaacgccgtacagaaaaaagtccaacaaactttcaccaccattcccgccactctacgcctctatttccatgattgtttcgtcaatgggtgtgatgcatcagtgatgatagcgtcaacaaataataataaggcggagaaggatcatgaggaaaatttatcgttggccggagatggattcgacaccgtcgttaaagctaaagaagctcttgacgctgacccaaattgtcgtaacaaagtttcttgcgctgatattctcacgatggccactcgtgacgtcgttaatcttgcgggtggacccaccatacgacgtggaattgggaaggctagatggactatcatcaacagccggttagcgtcggagggaagttgccgcatccgaccgacgatgtcaat

SEQ ID NO: 166305 - DNA, 348 bp, Arabidopsis thaliana nossen
cacacatagcaaaaaatggcaaacaagttgttcctcgtctgcgcagctctcgctctctgcttcctcctcaccaacgcttccatctaccggaccgtggttgagttcgaagaagatgacgccactaaccccataggcccaaaaatgaggaaatgccgcaaggagtttcagaaagaacaacacctaagagcttgccagcaattgatgctccagcaagcaaggcaaggccgtagcgatgagtttgattttgaagactacatgtagaacccacagggacaactgctggatcaacatctattccagctgcgctggtactagctttgcctggtttagccttattgtgtttgttct

SEQ ID NO: 166306 - DNA, 465 bp, Arabidopsis thaliana nossen
gtctctcgcaatcttcgctcttctctttgctctctctctctcaacgcggttcagatccgagtttgggagattcaagctccctgaaaaaaagccctttactctcgcttaccaactttgctccagcatggcaggatctgcaccagaaggcacacagtttgatgcacgtcagtttgaccagaaactcaatgaagtacttgagggacaagatgagttcttcacatcctatgatgatgttcatgagagctttgatgccatgggtcttcaagagaaccttctcaggggtatttatgcttatggttttgagaagccttctgctattcagcaaagaggaatcgtccccttctgtaagggtcttgatgtgattcaacaggctcagtctggtactgggaaaacagcaactttctgctctggtgtcttgcagcagctggacttctcccttatccagtgtcaggctttggttctagc

SEQ ID NO: 166307 - DNA, 416 bp, Arabidopsis thaliana nossen
ggcgtctcggagagtcttatcatctcttctccgttcatcttccggtagatctgccgccaaattaggcaaccgtaaccccaggcttccttctccttcacccgcgcgtcacgccgctccatgtagctacctcctcggccgcgtcgccgagtacgcgacctcttcacctgcaagctcagctgcgccatcttctgctcctgctaaggatgaggggaagaagacctatgattacggtggcaaaggtgcgatcgggcgtgtttgccaggtcattggtgccattgtcgatgtgagatttgaggatcaggaaggattgccaccaatcatgacatctctcgaggtgcaggatcaccccacaaggctagtgcttgaggtgtctcatcacttgggtcagaatgtcgtcaggaccattgctatggatg

SEQ ID NO: 166308 - DNA, 455 bp, Arabidopsis thaliana nossen
gatagggttaagcctccttcacgacccttgctttcttctcctcgatgaacccacttcgggtttagatagtaaatccgcttttgacgtcattcacatcctcaaatccatcgctgtgtcaagacaacggaccgtgatattgtccattcaccagcctagcttcaagattctctccatcatcgatcggttgttacttctttcaaaaggaactgttgcgtaccacggaagacttgactccctcgaaggtttcttgctcttcaagggatttactgtccctccgcagctcaattcccttgaatatgcaatggaaatacttcaagaactacgagaatccgatggaaacaccgacgctactgatctcccttcaatcgaaaaccggaaacagagagaaaaacagagtattgttcgatatagaaaatcaaagatcaccgagataagccttctcgcgagaagattct

SEQ ID NO: 166309 - DNA, 456 bp, Arabidopsis thaliana nossen
tcgctcaaaacaagacccatcgataacagcgatcatggtggctaaagccttagcacagctgataacatgcatcatcttattctggcacgttgtagcttccgtagaagacctcaccatacgccaagtcacggccgacaatcggcgaattcgcccgaatcttctcgggactcacacagagagtaaattccggcttttcatgtccgattacggcaagaactactccacgagggaggagtacatccaccgcctcggaatatttgccaaaaacgtccttaaggccgcaaagcacccaatgatggacccctccgccgtccacggagtcacacagttctctgacctcacggaagaggagttcaagcggatgtacactggagtagccgatgttggcggcagccgtggcggtacggttggagcggaggcacctatggttgaggttgatggattgcctgaagattt

SEQ ID NO: 166310 - DNA, 370 bp, Arabidopsis thaliana nossen
  unsure (1)..(370): unsure at all n locations
ttcggtgggcagaaccaaaataagttaacaaaaaataagtttgttttctggaagtgttttctgaaattttcgcgatttttggtgaactccancgcaacttcaatggcatctgctcactccatagccgccgtttctgttctcgatgcggcctccaagcaagcaacacttccttcttcttcttcttcttcctctgcgctctaccctctttcttctcttcgatctaaacctcgccagcagcttctctccctacgcagtgtcgctctcaaaggtcgagtaaaggcgcaggcaaaagaagcagaagctagtccaagtccagtgggagtgggagacgcattcagtaatgtgaagcatcttctcctgccggtgattg

SEQ ID NO: 166311 - DNA, 368 bp, Arabidopsis thaliana nossen
ctatgcggtggataaggcagtttaagctaaagataagacagcggagaaggcgaagggggctgctaattatactgcggataaggctaaagaggctaaggacaagacggctgagaaggttggtgagtataaggattacacggtggacaaggccgtggaagctagggattacacagcggagaaggctattgaagcaaaggataagacagctgagaagactggagagtataaggactatacggtggagaaggcgacggaggggaaagatgttacggtgagtaagctaggagagctgaaggatagtgccgttgagacagcgaagagagctatgggtttcttgtcggggaagacagaggaggccaaaggaaaag

SEQ ID NO: 166312 - DNA, 317 bp, Arabidopsis thaliana nossen
  unsure (1)..(317): unsure at all n locations
gttaaaacaattttttctaaatataanacacccaaaaaggcgaatgaggcggtttattattctttcaaataancctaaanagcctacagacaagacggctgataaggttaataagtatatacattacacggcggacaaggccatacaagctccggattacacaactgagaatactattgaatcaaaggataagacatctcataaaactggaaagtataacgactatacggtgaagaaagcgacccaagtgaaagacgttacagtgagtaaactaagatagctgaaagatcgtacccttgatacaactaatagagcta

SEQ ID NO: 166313 - DNA, 358 bp, Arabidopsis thaliana nossen
tacgttcactgctatctcaagccagccaacgtcctcgtctggccttccggcacttttggagagccatgggatcttaagcttgctgatttcggttcatctaaagagccttctacggattctaggtcgttatttcctggtacgctgcagtacatgccaccagaatctcttggacatgatggagtgatgggaccggccgttgatatatggtctctagggtgtgtggttattcagatgtttggaggttgtccagtgatgaccagagactgttacatgtgggggcttcccaaacttatatctccggtggccaacgacttcttgatgcggtgcttggcgttgcagccgtcacgtagggccaccg

SEQ ID NO: 166314 - DNA, 339 bp, Arabidopsis thaliana nossen
  unsure (1)..(339): unsure at all n locations
canacaactattcccccctactttaacaccacccacacctaattnccccgcggcttcagcaatctttcaatctctcaaacaaaacaananaaactaataatccgcaaaagctcacacacacaaacagaggaatctataacgaacgcttgcttcttgcttatcaacaaaagcggaaacaaaacatcaagatatacgtgacactatgcaacgtataaaccatccatctactaaaaacccagatgggatctgcgcttattgacttcaagaaaagctacaaaagctagcaacttcatctttcccacttccaaaacacctaacatcctcttcaacttcttcctc

SEQ ID NO: 166315 - DNA, 368 bp, Arabidopsis thaliana nossen
cttctccaaaataatttcaaaccctagcttctcgatttctctcctctgcgctccaatggcattttcccatggctatttccgctccagccgcttgttcttcctcctctagaattctctgttcctactcctctccttctccttctctctgtcccgccatttccacctctggtaaactcaaaaccctaactctctcttcctccttcctcccttcttactcattaaccaccacctccgcttctcaatccactcgtcgctccttcaccgtccgcgccgctcgtggaaagttcgagaggaagaagcctcatgtcaacatcggaaccatcggtcatgttgaccatgggaaaactactttaaccgcagctctaacc

SEQ ID NO: 166316 - DNA, 359 bp, Arabidopsis thaliana nossen
caagcttctccttttttggtattttgtcttaagcttccttgcttctctgggttcttcttctctactctgtctctctatttcaaaccttcgttttctttccttttttgtaaaatcttaaaatcaaccaagacaatggaaatgaaattgctctttacatcggctttcacccaaatgttcggctactcgaaccatatggatcaagccagcaactgccaaagcacccgcaacaaaattataaagatgatgaagaaagaagaattcccaagtggattccaagtccctcttcactaccctaaatactccaagtctgattacgaagttatggatgatctccgccttgacttgctcctcaaacaata

SEQ ID NO: 166317 - DNA, 367 bp, Arabidopsis thaliana nossen
gataaaccaccacatccttccttgaaacccttaccacaacaatcgccggcgtctctagggatatccatccacctacttcggctttgtttatcagattttgatgaaaccagatcgggtcttcctctagatccgttctaggttttctatttccaccgtcttatcattatcatcatcatcaattcatcatcatcatcatcaataatccagatgctcaccaaattcgtcattcatagacatgtctctgtttctgaaagacgattcgattcaaattcgcgaagtctggaacgataaccttcaagaagaaatggatctgatccgagatgtcgtcgacgacttcccttacgtcgccatggacactgagttcccc

SEQ ID NO: 166318 - DNA, 368 bp, Arabidopsis thaliana nossen
  unsure (1)..(368): unsure at all n locations
cntacccgtggtcaagtttattttcatctattctcacacctactgcagcgaagcctaggaccttttctgctttatctactcnnncaanaactagatctacccctagcaccaccacaaaatctgcaggtccttcaaggtccaccacacctctgtcaagatctactgccagatcttcaacaccaacttcaagacccacacttcctccatctaaaaccatatcaaggtcatctacaccaactcgccgtccaattgcttctgcaagtgctgcaactactacagcaaatcccacaatatcccaaatcaagccttcttctccagcgccagcaaagcctatgccaacaccatctaagaaccctgctttatctcgt

SEQ ID NO: 166319 - DNA, 367 bp, Arabidopsis thaliana nossen
gtttcattgaaaatttcaagaaccctagttaataacgataatgggttcgggagttttggcttccttctttgttttcttaatcttcacggtcatcacattgcctcccacgatccaagcttgcactccttgtactcgtcctcatcctccggttccgaaacctccacaacacggcggtggtggaggtggtggtagcaagccgcctccacatcacggtggaaaaggtggtggtaaacccccaccccacggtggaaaaggtggaggaccgccgcatcatggtggaggaggaggaggaggagggaaatcaccgccggttgttagacctcctcccgtagtggtgaggccaccgccaatcataagacctcctccg

SEQ ID NO: 166320 - DNA, 367 bp, Arabidopsis thaliana nossen
cttacaacaacaaatcttaaacgttttactttgtgctgcactactcaaccgcaatgggggcctctacaatgtctctctcctcccctgccttcgccggtaaggccgtcaagctttcccccgcggcatctgaagtccttggaagcggccgtgtgacaatgaggaagactgttgccaagccaaagggcccatcaggcagcccatggtacggatctgaccgtgtcaagtacttgggtccattctctggcgaatcaccgagctaccttaccggagagttccccggagactacggatgggacaccgccggactttcagctgaccccgagacattcgcaaggaaccgtgagctagaagttatccacagcaagtg

SEQ ID NO: 166321 - DNA, 360 bp, Arabidopsis thaliana nossen
gaaaagtgtctttctaatcgtaactaaatcttcagttctattcattggggggtatagaaaaattgaagcaaaatagctattaaacgagaactttggtttactaaagacatcgacatattatattgttttagctcggtagaaaccaaatacttttcctaaggattccgttaaatagaaataaagaacgaagtaactagaaagattgttcgagttggcccgatctatcttctagaaggatcatctagaaagcaaaattttctgtgaaagtacccagacggaaaaaagctcacatagatgttatgggtcgaatttttatttcgttcccgtctttttttatttgggaatttctccatccatcat

SEQ ID NO: 166322 - DNA, 362 bp, Arabidopsis thaliana nossen
  unsure (1)..(362): unsure at all n locations
ctgacgcgtgggatgaaattggctgatattatgacgatacgcgggagcagagatttaattatggtagaagttgatcgntaaaatgataatttatgcaacagcagtccaaactataaattcttttgttaaattggaatctttaaaagaggtctatggactcatatggatatttgtccctatattttctcttgtattgggaatcataacaggtgtactagtaattgtgtggttagaaagagaaatatctgcagggatacaacaacgtattggacctgaatacgccggcccgttgggaattcttcaagctctagccgatgggacaaaactacttttcaaagaaaatcttcgtccatctagaggaa

SEQ ID NO: 166323 - DNA, 361 bp, Arabidopsis thaliana nossen
ttaagagattaagaacggacggctcgcgatgcttgctttcgttgggttctgtttccaagctacctacactagccaagatccaattgagaatctcatggctcatctggctgatcctggtcattgcaacgtcttttcggtgagttaaaattgttatgatcatttatcatagattcatggtgatgatatgtgttatgtgtattgataagacttcattggtacgtacttcttttgcaggcatttacatcacattaatgaggattagcttggggcgaatataatattttttatatatttatggatgttgaacttttgtatagtgtcactcgccgttgttacaacttctgcttacttaattaacatg

SEQ ID NO: 166324 - DNA, 238 bp, Arabidopsis thaliana nossen
  unsure (1)..(238): unsure at all n locations
ccggggcgatctccacgcgtctcgaaacaacatattaataccaaatttatacaccccttaaaaaaagaaaaaaacgaagggctgggaagtattaagatcttcaaaaacaacaaccaanaatgaggagtctccatgaatcatcaccatcaactccacaaatagtgagattcataactccccctactaacatcctaacactcctcgtgctctcaggactaacactaaccgtaacggtgat

SEQ ID NO: 166325 - DNA, 371 bp, Arabidopsis thaliana nossen
tcgacaaaataaagtccaaaaaagagttaccacaggcttagcagttgatccaggagtgcatgggattatgagatattactcgtacatgctttcttaagaagttttaacttggaacggtgaattgtcaatgttaattggtgtgttgtgctgcagattcttccaagggaacaaaagaagcatgagtacaacgaggctgtgaagaaccggtacaagcatctttctgaggttaagcgcattgtgaggtaaatgaccaatgaaaactgtggttttatcccatgctttaactctggagattgtcaaaagataactatagtaacatggtaacgttttggttattgtgaattacagacacaggcacttgccaaaaccaa

SEQ ID NO: 166326 - DNA, 373 bp, Arabidopsis thaliana nossen
  unsure (1)..(373): unsure at all n locations
cggggcgtctccacgcgtccgacaaaagtgtttaatcacaatttttttctcattccactaatatgttaaaggaggcatggaattttttagttactcatatctacatncccatttaagaagttaatcaccctgtcggaatatctacaaacccgatttatgtcctctattgactagcacagctgcacctcaaataaatacatttgtcgcagattattgttacaacataaaacaaattctttgatactctttcctctttgttacacaactctccccgtcaaaactgaaaaccacacgattacctatccaccgatacgtccaacatactctatagttacacttgacttttcctcgtacatatcatgctagattcaat

SEQ ID NO: 166327 - DNA, 371 bp, Arabidopsis thaliana nossen
  unsure (1)..(371): unsure at all n locations
attctgttttctaacatttacactcctcaagaatcgccgccatgtgtggaggggctatgatattttattggattccaccgccnaggtctcgccgtgttactagcgagtttatttggccggatctgaagaagaatttgaaaggatcgaagaaaagctcgaagaatcgttcgaatttcttcgattttgacgctgagttcgaagctgatttccaaggtttcaaagatgattcgtctatcgattgcgattatgatttcgacgtcggtgatgttttcgccgatgtgaaaccattcgttttcacttcgactccaaaacccgccgtctccgccgctgcggaaggttcagtttttggtaagaaagttactggcttggat

SEQ ID NO: 166328 - DNA, 352 bp, Arabidopsis thaliana nossen
  unsure (1)..(352): unsure at all n locations
cttatccaatttttatgaacctaccttgacctctctactagccgncttgcaatttttatgtctcactaaacccccactccctagggtntgaaagaccctctgcgtactctgttcttcttctctcttcagataaaacaagtcctgcaaaattaacacctgacgtctcatcgattgctaactacggataaggaggaactagttacatcaccttgtttgaaagaacataaccacttcagactctctgattgatcctctattgatagctcaactattcccaatgttgttgggaagagcaaactcaattccaaagctaccgaactgaagctaggtcttcctgagtctcaatctcctg

SEQ ID NO: 166329 - DNA, 360 bp, Arabidopsis thaliana nossen
gtagaacaatgtcttcctctatgctctcttccgctactaggggtgcctgggcgtttcaggcctctatggtcgctcctttcaacggacttaagtcctccgctgccttcccagccacccgcaaggctaacaacgacattacttccatcacaagcaacggcggaagagttaactgcatgcaggtgtggcctccgattggaaagaagaagtttgagactctctcttaccttcctgaccttaccgattccgaattggctaaggaagttgactaccttatccgcaacaagtggattccttgtgttgaattcgagttggagcacggatttgtgtaccgtgagcacggtaactcacccggatactatg

SEQ ID NO: 166330 - DNA, 356 bp, Arabidopsis thaliana nossen
ctgacgcgtggtctgtagggttttagtcggaggaagcaaggggcatgcgggttattactacacctgagggcttttcccgacggagttgagcttagaagctttctctccggtttacctacaacgggagttttcgaatcttcgtcccaagattatatctcctgaacctcagtcgatgattaaatatgggacgaatttgaagttgaaattttcggtcaccggagaagttacgactccggcgaaagtgactatggtatttccgacgttcacgacgcatagcttcgcgatgaatcagagggttttggttttggacaatgttaagtttacgaggaaaggcaaatcgccgatgtatgaggttc

SEQ ID NO: 166331 - DNA, 337 bp, Arabidopsis thaliana nossen
ctcaaacatattataactactttttgtaaaactcgacatagggacagcggggatcttttgcggattccgatccaaagactgcaccatcacaagtgtgaaggacaaaaccacactcagggtcacaatacatggttgattgaataacgctagccaaatgaaacaattacctaccgatataacgaattgaactgtaccaagaaccacaccgaactgattgagattgtgacttgccccatccctgagtatacacacatgtataagaacatgatctaactcaatataaccaatgaaagacatatcaggaataatataaaccagccaaacggtaaaggttgac

SEQ ID NO: 166332 - DNA, 365 bp, Arabidopsis thaliana nossen
cgaaaagaaggaatagtgcgtatttttcgttggggatttcgtggaaaagggcgtcgcatctttttacgattctttatgaaagatattcagtccatcagaatagaagttaaagagggtgtttctgcccggcgtgtcctttatatggaaattcgaggtcaaggggctattcctttaattcgtactgatgagaattttactacacgagaaattgagcaaaaagctgctgaattggcttacttcttgcgtgtaccaattgaagtattttgaaatgaattaattaaatgctttggcagtaggaagaaaaaacgaaagaatttctttcttttttttttcaattgaatattcatctcttcttttatgctcgg

SEQ ID NO: 166333 - DNA, 361 bp, Arabidopsis thaliana nossen
  unsure (1)..(361): unsure at all n locations
aaaaaatacatttacataatttcatcacaatttccaaccaacattacaggaagnaaggagattttaaagatatataaaacccccaaccnccccnttaaccatagcattaacgcaactcttcatcctgatcatctctgcacagacactactgttacctaaagtcctgcttttcaacgagatccaatgtggctcaatggcaaggaaatatatctttctggaagtatgtaccaaaattacttgaggtaaataccaaatcttgctccagatatttaagacataaaaaaaggtatcaatataaggaaaaaaaataaggaaaaactgaatatacatattcttctcataaaaactaccctacaactgc

SEQ ID NO: 166334 - DNA, 370 bp, Arabidopsis thaliana nossen
cataattctaatattttcgttttctcaagactcctttcagattcttactgacagctttgggtttttaggggtttcacattaacattgcggtcattggtcatgttcattctggaaaatcgaccacaactggtcacttgatctataagcttggtggtattgacaagcgtgtcatctagaggttccagaacgaggcttctcagatgaacaagacgtccttcaagtacgcatggctgttgtacaaacttaaagccgagcgttagcgcggtattaccatccatattgctctatggaagttcgagaccaccaagtactactgcacagtcattgatgccccatgacatcgtgatttcatcaataacatgattactgg

SEQ ID NO: 166335 - DNA, 372 bp, Arabidopsis thaliana nossen
agagaaccccgtcccgtgtttaaaccctccggcgacaaagctcagatagagaaccgctccacccttgtcgttcgctgcagccatgtacggcggagatgaagtgtcagctattgtggttgacttgggttcgcacacttgcaaggctggttacgccggtgaagatgctcccaaggccgttttcccttccgttattggggcagtagatggtgtagaggcaatggatgtggatgttgattctacaaagactaattcgaactctgaggattcgaagaccgagtctgaaaaggaaaagggcaaacgcaagctctatgtaggatctcaagccatgagctaccgcagagatcatatggaggttttgtcacctataaaaga

SEQ ID NO: 166336 - DNA, 385 bp, Arabidopsis thaliana nossen
  unsure (1)..(385): unsure at all n locations
cggggggacccacgcgttcgatagaaccccatcccgtgtttataccctccttcgacaaagctcanatagggaacctctgcacctttgtagttctctggatccatatacagcggatatgaagtgtcatctattgtggttgacttgggttcgcacacttgcaaggctggttactcctgtgaagatgctcccaaggccgtttttccttccgttattggggcagtagatggtgtagaggcaatggatgtggatgttgattctacaaagactaattcgaactctgaggattcgaagaccgagtctgaaaaggaaaaggtcaaacgcaagctctatgtaagaactcaagccatgagctaccgcatagattatattgaggttttgtcaccta

SEQ ID NO: 166337 - DNA, 316 bp, Arabidopsis thaliana nossen
atctaaacctttttcctctactttaaaatccttctcacaagagcaaccggggctttctaggattttaaaggaatccaaccgcgaatgggaaacccacatcctaacaactctgacaacagcaaccaacaatttctcgacaaaccctacatcaaatagaacaatgcaattatcgcacaggacaaacattcgcccatgtaccatcaaatgaaccagaatcgcaatgctgaatacatcgctggagatactacccacaactcaatcaaaaaagcccacaacatactcaaagttcctgtgtctaccatgcacatcgaatcca

SEQ ID NO: 166338 - DNA, 295 bp, Arabidopsis thaliana nossen
ctaaaccacaatttaacaatgctctgtatactcacctttgggggcccatgagatttttataattttaaaccattaacaaaagactattcgacgcacgacaacattgatggagcataacttgaatatctacaaagacttatatgtcattgtgacccctacaacttcttacttcattttaatccattccttattaaaccaaatatcaaatttaagatccctattttacttgccatgtactcttatatatccacatgtatattaactactgtttaaactactataactttacaaacat

SEQ ID NO: 166339 - DNA, 368 bp, Arabidopsis thaliana nossen
  unsure (1)..(368): unsure at all n locations
aaacatccaaaaaccctcttttttttgctcttctcatcacttcaancacgcggcacagggaatttccaaatcttttaacactnacannggaacgaaacaccttgcttagtacttgaaactatataggatgagtgtttaaacttactggaccgtaattggatattgcctttacaccaccagttcctccaagataagcgcgtggaatcacctcctccacatacatgttcaacgccgttgtgcctttctatacaagcaatcaaatttaagaccaagactctttgctacaaataaaacaataatacctcttcaaggcgattaagaccttgaagtagttttgaacaggagagccaaacacaagaaacgtttac

SEQ ID NO: 166340 - DNA, 253 bp, Arabidopsis thaliana nossen
  unsure (1)..(253): unsure at all n locations
atttaatatatatattttaaaaatcttttacaccttaaaagaggctacgagaattttaaaattattaaaaacncaaaacattgcaaccctcactcaaatattcacttaaaacaaaaccaaacacgattcttctatcttctatgcaaacctccttaatcaacactcacactacatacctaaacaatttttatagccataccaccaaaaaccatctaccgatagttaacctctccaaataccactcatataccta

SEQ ID NO: 166341 - DNA, 252 bp, Arabidopsis thaliana nossen
  unsure (1)..(252): unsure at all n locations
gtttaatatatttatattaaaattaatatccccctcaaagggagcaacgggaattttaaaaattttaaaaacncaaaacancgcancncncccctaaatattcactgaaaacaaaaccaaagacgattcaaaaatcttctatccaaatctccttattgagcactcacaacacatacctaaacaattcacatagacataccaccacaaaccacacacatatactcaacctatccaattccaactcataaacct

SEQ ID NO: 166342 - DNA, 359 bp, Arabidopsis thaliana nossen
cgcgtctcgacctttgaattcttcaaatccctaattccaaggtcctctgggatcttaaagagtttgtgataacataacatgtcctcttctcgcaaagagaatgtgtacttagccaagttagctgagcaagctgaactttatgaggaaatggttgtgttcatggagaaagttgcaacgactgttgtcaccgatgagcttactgtccaagagagaaacctctcgtctgttgcttacaacaacgtcattggtgctaggagagcttcctcgaggatcatatcttgcattgaacagatagaagaaagcagacgtaacgatgatcatgttttcattatcaaggactacacacgaaagatcgaaac

SEQ ID NO: 166343 - DNA, 320 bp, Arabidopsis thaliana nossen
gtttactaaagacatcgacatattatattgttttagctcggtagaaacggaatacttgtcctaaggattccgttaaatagaaataaagaacgaagtaactagaaagattgttcgagttggcccgatctatcttctagaaggatcatctagaaagcaaaattttctgtgaaagtacccagacggaaaaaagctcacatagatgttatgggtcgaatttttatttcgttcccgtctttttttatttgggaatttctccatccatcataaaggagccgaatgaaaccaaagtttcatgttcggttttgaattagagacgttaa

SEQ ID NO: 166344 - DNA, 369 bp, Arabidopsis thaliana nossen
gtgaacatgtccttacacggtttttgtcatgtcaagctgtctttctccggggtcctcgggagatcagatcatcattgtttttggcaatgccaacggtaacaaggttaagtaactagatttttttgtatatagttccagttaagtcgacatcttatttgctttaaagtggtttagataccttgcatgtgtgctcagtgcaagtaactttatagtgatttaaataaaaatgttaaatatctctgttgttttaggtgtatgcaccgaaactagggggtttggtaagaggaccagagtgtttggggaagtgttcaacgaacacattccaagtcagaggtcaatgttttgatgaccctatctgctctctctata

SEQ ID NO: 166345 - DNA, 451 bp, Arabidopsis thaliana nossen
  unsure (1)..(451): unsure at all n locations
cggacgcgtgggttgcttttgatctctgatgctgctcaagctgataactatgagaaaatattctctcacatgaagccaaacagcattcttggtttatcacacgggtttctactagggcatttacagtcctcgggactcgatttcccaaagaacatcagtgtggtcgctgtatgccctaagggaatgggtccttctgtgaggaggctttacgtccaaggaaaagaaattaacggtgctggaatcaacgcccagttttgcagtcaccaggatgttgacggtagagccgccgatgttgcattgggatggtcagtagcacttggttctccgtttacttttgctactactcttgaacaggagtacaggagtgacatctttggagaaagaggaatnttgcttggtgctgttcacggaatcgtggagtctctgtttagaagatacaccggaaatggga

SEQ ID NO: 166346 - DNA, 430 bp, Arabidopsis thaliana nossen
caagattttctctcaggtgactgaacaacagagaaaaacatggcgaaaaaagggaaagaagtgttgaacgctttggacgcagccaaaacgcagatgtaccatttcacagcgattgaatcgcgggtatgggttttttcactgatgcttacgatctatttagcatctccctcgtcacgaagctcctaggccgcatatactaccacgttgatagctccaagaagcctggaacgctcccttctaatgttgctgccgctgttaatggtgtggccttctgcggtaccttagcaggccagctcttcttcggttggctcggtgacaagctcggccgcaagaaagtttacggtattaccttgatgctcatggtactatgttctctcgggtctggtctatcatttggtcactcagctaacggagtaatggccacactttg

SEQ ID NO: 166347 - DNA, 499 bp, Arabidopsis thaliana nossen
aaatcatttacgttttgatcgacaaaaatggagttgataaacgactttctcaacctaactgctgctttcttcaccttctttggtcggtgcttcttcttgcctcctttttacttcttcaagttcttgcagtctattttctcgacaattttctctgaaaatctttacgggaaagttgttctcatcactggtgcttcctccggtataggcgagcaattggcatatgagtacgcatgtagaggtgcatgtttagccctgacccgcccgaaggaagaaccgtctagaggaagtggcagagattgctcgtgaactcggatctcccaatgttgtcaccgttcatgctgatgtctccaaacctgatgactgtagacgaatcgttgatgacaccatcacccattttggcagattggatcatcttgtaaataatgctgggatgacgcagatttcaatgtttgagaacattgaagatataacaaggacaaaagcagttttggatactaac

SEQ ID NO: 166348 - DNA, 504 bp, Arabidopsis thaliana nossen
  unsure (1)..(504): unsure at all n locations
ctagggttttctttgcacactactcgctccaatgggattgggaacagggagtttcggtaagaggaggaacaagagtcacacactctgtgtgagatgtggtcgtcgtagtttccacatccagaagagtcgttgctcggcttgtgcttacccagctgctcgcaagaggacttacaactggagtgtgaaggccatcaggaggaagactactggtaccggaaggatgaggtatctccgtaatgttcctcgtcgggtcaagactggattcagagaaggtactgaagccaagccaaggaacaaggcatcagcttcatcagcttaaagagccagttcgagtagtctctcaggaaggactaaagcttagcattttttgcattcaactagttgaagattacttttcatgtggatctcatacattatgttatgtgggttntgtttcttttgttattcacttataaagttttgaacttggtttaaatatcatcttacatttgcaacctttaaaat

SEQ ID NO: 166349 - DNA, 510 bp, Arabidopsis thaliana nossen
agcgacgcgcacggagtactttgctgcgccatatccccttcccaaaatggatatgattgcaataccagattttgctgccggagctatggagaattatggttgagttacataccgtgaaacagctcttctctatgatgaacaacattcagctgcttctaacaaacagagggttgccactgtagttgctcatgaactggcccaccagtggtttggcaatcttgttactatggagtggtggactcatctatggctgaatgagggttttggtacttgggtcagctacttggctactgatagtttgttccctgaatggaaaatctggacccagtttttagatgaatctactgagggtctaaggctagatgggcttgaggagtctcacccgatagaggtggaggttaatcatgctgctgaaattgatgaaatatttgatgcaataagctacagaaagggtgcatctgtcatccgcatgctacaaagctatcttggtgctgaggtttttcagaagtc

SEQ ID NO: 166350 - DNA, 223 bp, Arabidopsis thaliana nossen
gaaagataactagttccaagaattaaaaaaattcaattttaattttgggaattatcaatcattataggtggtatgaacaaaaatggagggggataaaaagaactcaatttattgttcaagaaaatggactaactccagaataagattaacggacttataattgaatttttgggggagatcttgtcaagcataattatcattaaaaaatactctttatttactt

SEQ ID NO: 166351 - DNA, 505 bp, Arabidopsis thaliana nossen
cctctttctcaccttttctcgctcctgggaatctgaagcagttcttctccgacgcctggatcgtgatttgattcgaactttcacataagatggctatggtagatgaaccgttgtatcccattgctgtgcttatagatgagcttaagaatgatgatattcagcttcgtttgaactcgatccgtcgcttatctactatagctcgtgctcttggagaggagcgtacaaggaaggagttaatcccttttttgagtgagaatagggacgatgacgatgaggtgcttcttgcaatggctgaggagttaggagtttttattccgtttgttggaggaattgagtttgcgcatgttcttcttcctcctttggaatctctatgtactgttgaagagacttgtgtgagagaaaaagctgtggaatcgctttgtaagattggatctcagatgaaagagaatgatcttgttgaatcttttgttcctcttgtgaagaggttagcgggtggtgaatggtt

SEQ ID NO: 166352 - DNA, 501 bp, Arabidopsis thaliana nossen
  unsure (1)..(501): unsure at all n locations
agaacactttctttctctctctaaaaagcaaaagtagtctagtcactgatttcttctaatcctccggtggagtgagagatgatatctccgacgttgtttcctctcctctgcgctttatttctatgtcttccagtggctgttatcttcacagtccagcgagaactcacctgcgttatctcgccggagtttggtttccgctctctttccgtcttctctctttactctcgaaatgtccccgactcttcttcttcttctccggccggtcgggattcgacagccgattcccaaagaagacgaccctcttcttcgactatcttctcgggttaacccgaatctacctcccggttcgacccggaaaatagcttttatgtacttaacgacgtcgcctcttccgttcgcgcctctntgggagatgttcttcgacggaatctccaagaatctttacaatgtctacgttcacgcggatccgacccgagaatacgacccgccgttctccggcgt

SEQ ID NO: 166353 - DNA, 503 bp, Arabidopsis thaliana nossen
  unsure (1)..(503): unsure at all n locations
agcacaatgactagatttgcggtattgccactctctgttctccttctcgttctcttgttcctctgcactgagtcgttggctaagtcggaggagtctgaagaatacgacgtcgctgtgcctaatgttgcgggttttcgtctcctcttctgattaagaaagatcaatggaaaccaatcttcgagacgaagtttggacagatttcaaccgttcaaatcggcaatggatgcggtggaatgggaccttacaagatacattccattaacgttggagccaaacacaattttgctccctcttcttcttcattccgacatggtcttcttcgttgactctggaagtgggattctgaattgggttgacgaggaagcgaagagtactgagattagactaggggacgtttacaggctacgtcccggttcggttttctacttacagagcaaaccggtggatatcttccttggaaccaaacttaagctntacgcaatcttctccaacaacgaggagtg

SEQ ID NO: 166354 - DNA, 351 bp, Arabidopsis thaliana nossen
ctgcggaggagcttcttcttcgtagggtgttcatcgttattaacgttatcgcccctacgtcagctccatctccagaaacatgggtgcaggtggaagaatgccggttcctacttcttccaagaaatcggaaaccgacaccacaaagcgtgtgccgtgcgagaaaccgcctttctcggtgggagatctgaagaaagcaatcccgccgcattgtttcaaacgctcaatccctcgctctttcttctaccttatcagtgacatcattatagcctcatgcttctactacgtcgccaccaattacttctctctccttcctcaggctctctcttacttggcttggccactctattgggc

SEQ ID NO: 166355 - DNA, 499 bp, Arabidopsis thaliana nossen
gaaagataactagttccaagaattaaaaaaattcaattgaaaatttgtgaattatcaatcattataggtggtatgaacaaaaatagagaaagataaaaagaactcaattcatcgtctttggcatctgcactatctcaggagtcagaattaacgtaacttattaattgaaaaactctttaagaaattaatcataaaaaaaaataatacataaaaaaaataactctattatctaacttcaatcaaaacatataaactttttttgaatgaatatgtaaaaatttgaaaataagttgtttgattctttttttttattgaccttagaacctagaatacgcctctttctactttattaaaattgaatttactaaaatttgaactcattagattaaattaaatagtagagcagttttcctcatttaatctatcgaatgagactaaaaagaaaagaggtatcctacacggagaacgagattagtaaaaaaaaagatttatttatttt

SEQ ID NO: 166356 - DNA, 510 bp, Arabidopsis thaliana nossen
cattgttactctttggggataaaatttttatcttgtataagcttatccatcaggttcgaaaatggatcgaattgcgtctgcgactttctcttgccctgcgatttcattgtcccgcgtctgtagaatcagcccttttggcttaaacattaaaaccaaccatagaaagagattctcgtgtcgagtagctgtagcttctggagagacttcggccagggtcgtcgtcgacaatgaacttgacttagaacacaagaaacacgatctactgagagctgttcaagacactcaacgaggactcactgccacttctgatcaacgatctatcattgaggaggctctggtgactgtggaagggtttaatggcggtgaagaaattgatccagtgaagttagatggaacatggaggctacaatatacatctgcacctgatgttgttgttctgtttgaagctgcttcaaagacttccttctttcaggtagggcaggtctttcagaagtttgagtgcagagatag

SEQ ID NO: 166357 - DNA, 414 bp, Arabidopsis thaliana nossen
ggcaaaaaggctcgagccacagagatctgagtttctcttcttcgagatctgatcgccgaatctcataatctcccatcgaagcagaatggagacttttctattcacatctgagtctgggaaccagggacacccaaaccagctttgggaccagatctctgatgcagtcctcgatgcctgccttgaacaagaccctgacagcaaagttgcttgtgagacatgcaccaagaccaacatggtcatggtctttggcgagatcactaccaaagctactgttgactacgagaagattgtccgtgacacctgtcgcgccattggattcgtctctgatgatgttggtcttgatgctgacaaatgcaaagtcctagtcaacattgagcaacagagcccagatattgctcaaggagttcacggtca

SEQ ID NO: 166358 - DNA, 495 bp, Arabidopsis thaliana nossen
  unsure (1)..(495): unsure at all n locations
ctcaagctgagttttttttttttaatcattggtctcctccttcttcactctcgtacttctcttcttgaagtctctcttgatcgattcgattctacggtttctctcgatccgagggtttttgattgaaccttttattggtctctttgataatgaagaaattattcaaccctaatgtcaaattacttaactttttgttattgtagactggtcaatttgaagaatgtcgcaatcaaccgtagatgtgccgccaaagggtggggttagctttcgatctgtgtaagagaaatgatatgcttacacaaaagggtcttaaagctccgtcttttttgaagactggaactaccattgttggtttgattttcaaggatggtgtgatactaggggcggatacccgagcaactgaggggccaattgttgctgataagaactgtgagaagattcactatatggcaccaaacatatattgctgtggtgcaggaactgcngctgatactg

SEQ ID NO: 166359 - DNA, 495 bp, Arabidopsis thaliana nossen
aaaaaaatgtgtgggtgtgattgtgtgaacaagcgtgtgattgatcttaaacgcaaacactaacaaaaaaaaaaaaaaaatttcttgttgttgcgttttccagaacaaaccagtttcaatcaaattctgttttcttcatctccacaaagataactaaatccgatctcgtcttcgcaatcatcaaccatcaatggaagttgaagaagaagttaaacaaatcatagatgaggtcaaagagcttcatgactcccccgcttttttcatctaatcttcttctaaacaagagctctctctccgtcaaaaagcctccgccgttgattcctctatccgtcgtctccactctactatcgtctccaacaaaaatctcgatcctaagctcgtcgaaaagcttgaggaagatctgcatcgtgctatatgcatgctttgtgacagagaaacatcttcatttctcccattcaaaccacaaggacgctttgtgagaatgttttgtggacc

SEQ ID NO: 166360 - DNA, 505 bp, Arabidopsis thaliana nossen
cgagttcatttcgcgatgaacttggagttcaccgaggcggagttcttcttgaaaggggctaccggaaaaggacttgatgcctataacgcgacacttgctaaaggcggaccaccgccggtaggggccaagaaagccaaccttgatcctataactaaccgaatcatcgaggagtttggttatcaagaaatcggtcatcttagggcgattacggatatgacgggaggaattccacgtccgctaataaatctgacgaggagagaatttcgcagtgtttatggacagagcggttggacgcaaatctaatccgcggtttgatccttacgccaactcactcaactatctcttagcttcgtactatatcccttatgttggccttaccggttatgtcggaaccatcccttaccttgtctacttcaatatcaaaaagctagtggcgggtctattgggggtggaatcgggtcaagacgcagtgataagaacgcttctgtacgagagacagaatgag

SEQ ID NO: 166361 - DNA, 451 bp, Arabidopsis thaliana nossen
tattttcactgagcgcataacatttttgagacaagagactctttctctctctctggtctctttctctccccctctctccggcgatgggtggcgctatggaccaacgcaccaatgtgaacggagatcaccggcgcgcggagcaccggaacgaaagaagaaaggtttgatcgcgagtgcacaaccaccgttcaagatcggagatataagggcggccattcctaagcactggtgggttaagagccctttgagaacaatgaggtacgtcgtcagagacattatcgccgaggcggctttggccatcgctgacgtgtatgttgatagctggctccttcggcctctatattgggccggccaaggaacacttttctgaggcatctttgtctctggccaccactgcggacatgggagtttcttagacatatctctactgaatagtgtgggtggtcacatt

SEQ ID NO: 166362 - DNA, 307 bp, Arabidopsis thaliana nossen
gcgttggaaaatgcggaacatgttgacccagagagacctgttttggtcgataaatatctttctgaggccatcgacatcgacgttgggaccctcactgattcctatggacatgttgtgattgatcgaaacattgtagcatatacataaaaaccgacgcgcattctagagactcaggtcgagtgcttgcaacacaaaccatgacagcttctagtttgcaaactattcgaacatcgaccactaagctcgcgaagaaactaaatgtgtgtggcctgatagactgtcagtacgcactcacagcatctggtga

SEQ ID NO: 166363 - DNA, 449 bp, Arabidopsis thaliana nossen
gagagatagtcttcttgtttagaacatgttgtttccaattattctaagaatggcgttttaggtaaatgatcacagcttattacggatggaagagaagctgactcaatttgtggttagatttgtcaaagaggatcgtgtggaatctgaaaattttcaattttcactaaaaataggattagagttaaaaaggaggaagaagaaatggggaaacacaaatctttcagaagcaaagcagtgcactttgtaaccgatctcaccggtggcttcttaatcccatctctgataaaccctcctccggtcatcctcctcctcctattccggatgaggaagatgagtctaagagaaatcagctagagtctacaactgctgagcagcctaaggatttgttgacgaaccagacacttcttctttctctgcattccttggttcactgttatcttcagatccca

SEQ ID NO: 166364 - DNA, 300 bp, Arabidopsis thaliana nossen
tgaattccaaaatcaagtatgtggagagtcagtttgcatccacccttgctccaaagcatcctcggcaacttccagggaaagcagttcagaatcctaaggactatgctactacaaatgctatcacaatccaccaagaagatgagtctccaccaaatcatcagactccaaatactgaggacagtatgattcaggagggggggattcaactcaaattcctgcacttgtcatccaacaattcatcaagactattaagcacacacctttgctgaatactcaccactctaaaaaacatttcaaaaa

SEQ ID NO: 166365 - DNA, 492 bp, Arabidopsis thaliana nossen
gagtactttgctgtgccatatccccttcccaaaatggatatgattgcaataccagattttgctgccggagctatggagaattatggtttagttacataccgtgaaacagctcttctctatgatgaacaacattcagctgcttctaacaaacagagggttgccactgtagttgctcatgaactggcccaccagtggtttggcaatcttgttactatggagtggtggactcatctatggctgaatgagggttttgctacttgggtcagctacttggctactgatagtttgttccctgaatggaaaatctggacccagtttttagatgaatctactgagggtctaaggctagatgggcttgaggagtctcacccgatagaggtggaggttaatcatgctgctgaaattgatgaaatatttgatgcaataagctacagaaagggtgcatctgtcatccgcatgctacaaagctatcttggtgctgaggtttttcag

SEQ ID NO: 166366 - DNA, 460 bp, Arabidopsis thaliana nossen
  unsure (1)..(460): unsure at all n locations
cttccgcatctcttttaatttctctctaatttctcgatctctccgtccaactatgtctgccttcaccagcaaattcgccgatgagttgatcgccaacgctgcctacatcggcacacctggaaaaggtattttggctgctgatgagtccactggtaccatcggaaagcgtcttgcgagcatcaacgtcgagaacgttgagaccaacagacgtaacctccgtgagcttcttttcaccgcccctggtgctctttcatgcctaagcgntgtcatccttttcgaagagactctgtaccaaaagagttccgatggtaagcttttcgttgatatcttgaaggaaggaggagttcttccaggtatcaaggttgacaagggtaccgttgaactagctggaaccgacggtgagaccaccactcaaggtcttgacggtcttcgtgacagatgcaagaagtactacgaagct

SEQ ID NO: 166367 - DNA, 491 bp, Arabidopsis thaliana nossen
  unsure (1)..(491): unsure at all n locations
ttcatgaccaccgtcaacacggccgctcgttctctcgtcttcgtcgcttccaccgcctctacaccagagattccttctaggcgaggggcggcttcggaccacctcaggttcatgtctatgatgatgacgtggcttaccctttggatccttagagttttcttggactatcttcctcttcctctcatctcttcttcttcttctgcttattcttattcttatcctccctttagtttcgcttcgggtctttttacccacggttgcggagaacgcggtggtcccggcttaaggcttcctcgtcgtcgaccacgtcatcaactgcgttggtgaagtattcagggtcgtcagatttgggtatgatgatttgcgacggcgttgatgagccttctgttaactctctcggtagagctctttgtcacgcattagcgcttatgaacgagattccagtaacctcaagaaaatatcaatntggcatgggaatggatgacaagatc

SEQ ID NO: 166368 - DNA, 482 bp, Arabidopsis thaliana nossen
atttctcacattttcgtagccgcaagactcctttcagattcttacttgcagctatgggtaaagagaagtttcacattaacattgtggtcattggtcatgttgattctggaaaatcgaccacaactggtcacttgatctataagcttggtggtattgacaagcgtgtcatcgagaggttcgagaaggaggctgctgagatgaacaagaggtccttcaagtacgcatgggtgttggacaaacttaaggccgagccggagcgtggtattaccatcgatattgctctatggaagttcgagaccaccaagtactactgcacagtcattgatgccccaggacatcgtgatttcatcaagaacatgattactggtacctcccaggctgattgtgctgttcttatcattgactccaccactggaggttttgaggctggtatctctaaggatggtcagacccgtgagcacgctcttctttgtttcaccctt

SEQ ID NO: 166369 - DNA, 436 bp, Arabidopsis thaliana nossen
ataaaaatgggtaatacctattgtatcttacgaggttgcattgaacatgctaacgtcggtgtggtcgagcgttggtgtatatcagagcatgagtgctgaaccggacatgtcatttataaaccctctcgccggtcaatggctgatcggagttctgtccactaggatcgaatctcttgatgtcaaaattgaaacccaacctaaagttaatgtgactgtgcagctggtttgtttgattcagtatcgcgtaccgaaaagctatcccgatgattcgttttatgagcttaaacaccctatagagcagatccaagcttatgactttgatgtgcttagggccttggtcccaatgatgacgcatgatgctttttttgaacaaaaaggtgaagttgccaagtatgttattgaggagcttgtgaaggtgatgggttcttatggatac

SEQ ID NO: 166370 - DNA, 479 bp, Arabidopsis thaliana nossen
aacacttcaaaaaacatagcaacttcacttcttcctcctccttcctagtttctcgtttggtctcattctctttaattacctcctcctctgttctgctcatcccctgtttttatagttttatataaaatggtgagccaaaacgtcgtcgtatcagacgccaagaccgggatcataacggtctctacagtctctaactcctctgtctttactcctaccgctcaaaaaccaccgactgctcctggttacatctcagttttcaggaaaaaactcctcataaaccttgaaatcaatggagctgatcaaagtcaaagacttaactcttgggttgactccatgagagcttcttctcctacccatctcaaatcactttcctctttctcttccgaagaagaacacaattcttggatcaaacgacatccatcagcacttaacatgttcgaacgaatcatcgaagaatcaagaggaaaacaaatcgtcat

SEQ ID NO: 166371 - DNA, 224 bp, Arabidopsis thaliana nossen
gagtgaagccggtcagatcgagtactgggaccacaaccaccctcagctccgatgtgttggtgtttccgttgctcgttatgtaatggaacaaggcggtctttacttgcccaccttcttcacttccccaaaaatttcctacgtcgttcaaggaacgggtatcagcggaagagtggtccctggatgtgccgagaccttcatggactcgcagccgatgcaaggacaac

SEQ ID NO: 166372 - DNA, 503 bp, Arabidopsis thaliana nossen
cataaatccaaaaccactcatttttctattactgaaatttttcttagagaagaagaagaagaggcaaaatggccacaagcgcatcagctgtgctctcaccaaccacattctccactgcaatctcccacaaaaaccctaactccatctcattccatggccttcgtcccctccgtctaggtggctcctcctccgccctacccaaactatcaaccaccgggagaaaatcctcctccactgtcgtgagagctgacctaaccctttccatcgtcataagtctcagcacaggtctctccctcttcctcggccgtttcgtcttcttcaacttccagagagagaacgtagcaaaacagggcttaccggagcagaacggaaaaacccatttcgaagctggagatgatcgtgctaaggagtacgtcagtctcttgaaatcgaacgatccaattggattcaacattgttgatgttcttgcttggggttctatgggacacatcgttgcttactac

SEQ ID NO: 166373 - DNA, 477 bp, Arabidopsis thaliana nossen
gtaaaacactaactaagagatcaatatggctggagtgtttaatttggcatgcatggtcttggggtgcatgattgtggccggtgcgggcacagcgaacgcgcttatgagttgtggcaccgtcaacggcaacctggcagggtgcattgcctacttgacccgaggtgctccacttacccaagggtgctgcaacggcgttactaaccttaaaaacatggccagtacaaccccagaccgtcaacaagctttgccgtttgccttcaatctgccgctaaagccgttggtcccggtctcaacactgcccgtgcagctggacttcctagcgcatgcaaagtcaatattccttacaaaatcagcgccagcaccaactgcaacaccgtgaggtgatgagcgacggtcaaatgaagctactagcggatgtttcgaatattatataatcgatgagataatattaaataaagatgttcgaatggctgtact

SEQ ID NO: 166374 - DNA, 493 bp, Arabidopsis thaliana nossen
  unsure (1)..(493): unsure at all n locations
cggacgcgtggggaacaaagtgcctagccacatcacggcaaggtggtccccataaagcacaatgcacatcatgccaaggcatccgtggatgctttttacgctctaattcatctttcaaagcatnctcccaagtattgggttcagactctctggaaaattttaagtacgttcaaaccaaaaaatcagagggttgaattcggaaaggtgaaatgactaatggacatcctggtttgtatttaatacaaaaatttaatttcatcacagctaaaaataactagcaagtgacacataagttcttagtttttattacatctaaaaatcaactctttattcgcataaagaaggaaattcttacctggggttgtaatagtcctttccaggccatgtcacagaagggttatctccaactttatgttcaaacgtgtcatatcggccaaaacacaagtctagcccttcgataaagcaaacctgattatcgacgatgacgagtttt

SEQ ID NO: 166375 - DNA, 451 bp, Arabidopsis thaliana nossen
  unsure (1)..(451): unsure at all n locations
cttcatgcttcgatcaatcaaaccatcatcaaacccattagaaagagaccaacagtgttcctgtaggaagcggcaaactttcagctctgttctcttgaaatggagaaaacagtgagatgtgttcggtgagggttattgaggttaataccctcttctgataattgcatcgacgcaattaacacttattttcaacaggttcttagttatgggaggaagagaaaagtgattctagaagcaccactcttggataaagattgtgttttggcaacattntagctgctcatttcctttcttcatctgatccttccagagctaattcctatgttgaagctgcggcatctaatcttgaacaatctacaccttatgagaaagcggtttacgaggctgttacttacctaatctccgaggatagggatgacgacttggcttttgaaatgcacaccaagctact

SEQ ID NO: 166376 - DNA, 428 bp, Arabidopsis thaliana nossen
acagatctcagttccttacagaagaatctccgactcgtttctttgccttcattctcagatttccggatactagccatgagcagtgatgggtccggcggaaaggcggttgttgaagccaaaggattgaaccctggattgatagtgctgcttgttattggaggtctgcttgtgacatttctcatagccaattacgttatgtacatgtatgctcagaagaatctacctccaaggaagaagaagcctctttccaaaaaggaagctcaagcgtgagaagctgaagcagggagtccctgtgcccggcgaatagattccagcttctttaacagtctgtgtttaacctgtaatcacaatgtcattgagacttttgtatgggagagtagcaaacgtcccttgttctgttttggttagactacaaaaattgaatctca

SEQ ID NO: 166377 - DNA, 234 bp, Arabidopsis thaliana nossen
cagacaccagaacatgaatattatgctgtcagcggatgttttttttcgaacaacgaccttcctgatgggttttgtataaaaactgggactggtcctgttactatacttaatactagaaataaccatttcccattggtcaagagtatatcgcgcttctttgatccatttacgaatctatattttgctatgtaactaatcaactaagtgtgactactacagctttatctgggaata

SEQ ID NO: 166378 - DNA, 481 bp, Arabidopsis thaliana nossen
  unsure (1)..(481): unsure at all n locations
aaacgtttgggagacccggttacgatcctatagtattgttcttttcaccgttgaagttctatgggggggttgcttattacggagggggtgagtgttgtttggtgacagctgttagggatgtggatgaaatcttatanccttatgacgtacatacgtttctcgtcaaggaaatgagaaactggacaaaattctgaagctgtaggcgaataatcgtaacaagaaaagcatgctggtggtttctgaatttattggttgctctccatcgctaagcggagccattcgtgttaatccatggaatgttgatgcattagctgatgcaatggatagtgcccttgaagtatctgaaccggagaagcatcttatacatgagaagcattacaagtatgtgagcacacatgatgttggctattgtgctcgtagcttcctccaagatcttgagaggagttgtggtgagcatgtacgatagaggtgttggggaatt

SEQ ID NO: 166379 - DNA, 392 bp, Arabidopsis thaliana nossen
cggacacctggacggaaccattataaagctcttgtagacgattatttttttttacgaaaccctcaaatgatggaagattctcgaaatggggggggagttagttttgaaaattttggaacatagttgtcatgaggacaacaatcaacgagccttatgttattagtgatgtgtcctacgtcacgtgcatcaaggtggttagactgtgctctacaagggtgaatacagcgatgttaagccggtgaactggtccctggagccttacatggcattactttactttcttctataccatgctgtggcaaacaagacttgctaatatgtatcaaaactttactagatggtaatattgggatagtcctatgttctaggtggcttgagccttacaactctac

SEQ ID NO: 166380 - DNA, 489 bp, Arabidopsis thaliana nossen
gttcttcgtcctcgctcgtcgtcgcgttctctctctcaaactctcatatatacttgacctatactaggccctgagtctgattgcgagaatcgctggcaaaaaaatgcaattttcttgtgatcctgatcaagaaggagatgagctgccacaatatgaacacatttatcaaaatgacttctcttatcgaaagcacatgaaacaaaaggaagaagatatatctatctgcgaatgcaagtttgatttcggagaccctgacagtgcttgtggtgagagatgcctcaatgtcattaccaacactgaatgtactcctggttactgcccctgtggtgtctattgcaagaatcagaagttccaaaaatgtgaatacgccaaaacaaagttgatcaagtgtgaaggtcgtggttggggactagtggctcttgaagagatataggcggtgcaatttataatggagtactggggtgaagtaatatcatgggaagaagcaaa

SEQ ID NO: 166381 - DNA, 453 bp, Arabidopsis thaliana nossen
caatctaatcccaaaaatcaaaagatgaatgccacaaagtttgttgtgcttctcgtgattggcgtttggtgtgccattgtcaccgcaaggcaggtcaaagatttgtccacggagaccaaattagggtgcctctcttccaaaaactactaccaaaggcattggagctcagctttctgcaactggcacaacttacagcaccagcagtgtcgttagctatgctaatggttttaacaatcccaaaggtccaggggcccaatgcattcgaaagtgccaacacatttaccagcggacaagtcactgccaagggtcgcaaggcaagagtttcttctacaagtgcttctgccgctgaaggcgatgctgcagctgcagtgactcgcaaagctgctgctgcacgtgcaaagggtaaagtagcttccgcatcaagggtgaagggttcctctgagaagaagaaga

SEQ ID NO: 166382 - DNA, 418 bp, Arabidopsis thaliana nossen
agagaagaaagatagagaaaaaaaatgggaggcacaggtgttattatggtggcgatactttgcctttgggcactctctgcaacagctggggcattaacataggctgagccagttcgatgatgaacttctacaaggacacgtgtcctaaggccgaagacatcgttcgtgaacaagtcaaactcctctacaaacgccacaagaacaccgttttctcttgggtccgtaacatctttcatgactgccccgttgattcatgagaatgcgacgcttttgctggattctacaagacaagagcttggagagaaagaacacgacaggagcttcggacttagaaactttaggtacaatggagagataatggaagctctccagagggagtgtcctggtgttgtctcatgttctaacattctcgtcttgt

SEQ ID NO: 166383 - DNA, 477 bp, Arabidopsis thaliana nossen
gtcagttccatcatcatatgcatgtctaacaaagatgaagtctccatggacaagggaaggtcttctctcagcaaggccaggaacttcgagggacaaatagataccccttctcttcattgaaacattctccatatcataagctcgcatgtcttcctaaacaaccaaaaaattacaagaaacatgattcatggtacaagaggtttattgagttattaacaaaaatctgaaacaatgaggatacctcgaggttgtaatctttccataatcagtaaagttttatagtagttagcatagttccttgctgtaagaccttcgttcaaatcatcagggaattccttattctcgatcatctctctaatctcctttggaatttcatacagaggaagcctatttctaaaactacgttcaaccacctttgaagggcgtgatcccttcacataatcatccacagcaaaatctttcttcggagcccttcta

SEQ ID NO: 166384 - DNA, 508 bp, Arabidopsis thaliana nossen
cttattctctctctctcgctatctctccctctttaagtttttttttaaaacagactctccctctaagggattcggtcgcaattaaaaaagaaaacaaaatctttataaattttgattttctctttttcacccgattattttgatttgactgttttacgacagtcaatatttcaattttattattgggtgctgacgtggcatgcatccaatagagtatcaccatgaacaccaaaacgatgcgtcttcccccacgtcgcgttcttaccggcggttaagcgcaaagaacgagacgccttcatctcctccgtcaccgataatccgccggaaatcgccaagtttccctctccgccgccgaaacttgttcctccgccggttaatcccatttccaagaaatcttcaaccgcagcagccgagccgatcggctcgaaccaactgatgttagccggttatctgagccacgagttcctcacccaaggcacactcttcggagagcaatggaacccggctc

SEQ ID NO: 166385 - DNA, 309 bp, Arabidopsis thaliana nossen
cgatactaacagagccttcacagagagatgtttcgattcaatttccgttgtgaaatctccaaatataccggagtttatcaccggaagatgcacagcggtctataagatgccggtccgatggcgtctcgccttaaatcacgttccgttgtccggtttagcggaccggatacggttaagtttcttcaaggtttgttaaccaacgatgtacggagattcggctaatcctccggcaagaagaactcggcggctcctacgcctaacatggcttccgttacgaatcctcctatgtacacagcgttgctaactgct

SEQ ID NO: 166386 - DNA, 316 bp, Arabidopsis thaliana nossen
gccaaagttgaccactacttgtagtaaacaaaacctttggctttaactctctcctgcaaatcccagatctttctctgtctctgacccgcggaggcccctagagattgatcaccatcactcttgtacgcttcctcagtactcacctatgagcgtcatgctatgctctcgttaacgcctaacacctctctcttctccatggatctgccaacgctcctttgctcacacctgtgctacttcttattatcctccttcagtgtcccttgggaatccttgccgttgcttatctccgactagcttgttaaaaccgccaaaagca

SEQ ID NO: 166387 - DNA, 465 bp, Arabidopsis thaliana nossen
cgtaggatgagaaggaatgatcggtcaacggacggtagagatgatactgatctgtagtgagataaggcgggcataatgaatgatcctggggctctctctatctctcttatttttcgcagattcttttgacaactaaccttacttaaaggatcgtttatttataaggaggatttatccaaccaacgaataacgcgtttgtgtctgtttactgctatatggaaacacggcgtcgattaaagatacgaatccttcataatcggaaccttatcttttagattcgcctctatataacacgtcaaattttagacttgcataaatatctatatatcgtatctcatttcttggtggggaagcatcataaatagagaaaccatgaattataatctcaagtatatataatacaacaacgtgaagctgataaactgaacaaaatcttctttttgactatttatctccctcgaaaca

SEQ ID NO: 166388 - DNA, 488 bp, Arabidopsis thaliana nossen
cgacgattttagttattcggccggaaaggttgataatttcgtgtgattaatctatggagttggaatttgaatcaaagtacgagattaaccgtacggcggagttcattattagcaaaagcttaccagaattgctttacagttcccggatgagttgttaaaagattcgactaaggtcgtgagtgctcttaagagcaaaactcgtttgcttactgacagagaagtcaggttctttgtaatggctgacacaacttaatggaagttgctgtattgatgaagttggagctttgcatattgattctgaatgtgttgttcattacggtcaaacatgtctaagcccgacatcagttcttccagcattcttcgtttttgggaaagcttcgataaacgtctccagctgtgttaagcatttgatagattatgcgtcaaagagcgataagcctatcatgattctttatggtctagaatacgcgcatgtaattccacaaatc

SEQ ID NO: 166389 - DNA, 463 bp, Arabidopsis thaliana nossen
  unsure (1)..(463): unsure at all n locations
gccgtgtttgtcggtgtaccgataggaggaacgctgctgactatagccggtttgacattagccggttcggttataggactaatgctagcattcccgttgtttctcatctttagtccggttattgtacccagcagtcctttgtcatnncggtctagctatganctgtgattcctggcttcaggggccataggtctcaccggactatcatccatgtcgtgggtactcaactacatccgccgggccgggcagcatatccgggaggagcttgaggaagcgaagcatcgtttggctgacatggccgagtatgtgggacagaggactaaagatgctggacaaaccatagaagacaaagctcatgatgtccgagaggccaagacttttgatgtccgagaccgagacaccaccaagggtactcataatgtccgagacaccaagactacataaagcgtgtggtttgagtgaa

SEQ ID NO: 166390 - DNA, 217 bp, Arabidopsis thaliana nossen
ctttcatctaacttagctggaatctaagtttatagattagctttttacttttagattcatcgttgcatagttggtcgagcttattatggggtgtgggggagctcatcataaggagctaaatattgtactctggaatcaaattgctgcatatgaattgctttcaattatcttatcaatatttctggacgactaggatgaagataactctgaattcatt

SEQ ID NO: 166391 - DNA, 384 bp, Arabidopsis thaliana nossen
gcgcggacgcgtttgtgaagctgtttaaattatttggattgtaccgaggaggaacatccaaagttaaaacatactatgagcgtggggtaataattccatattgattcgaaccaacccataggctcccatttttaataagattccagcgagaagcatacaggtactgtaatgtgcctcaccgtgggtgtcaggtaaccaagtatgtaaaggtataatcggtgatttgacggcaaaagcaataagaaatccaatataaaatagtatttcaagtgtaacaggataggatttattagctaagagttctaaatttaatgttggttcgttcgaaccatataaacttatacctaaaactcctattaataaaaaaatagaacttcctgccgt

SEQ ID NO: 166392 - DNA, 257 bp, Arabidopsis thaliana nossen
ccggcgcggacaaagtttttttttttgttcgaaatccgacaacaaccgtagtttttaaacttaatagaccactgcctgcatagaggcaatgtacatgtgatttttgctggaaaatggacaaatcccagaagaatcctacttcccaaatcggaacttcaactcccaaatccaaattcgaggattctccagtgttcaactacataagcaacctctctccaattgagtcggtcaaatctatctccactgctcaaaccttt

SEQ ID NO: 166393 - DNA, 296 bp, Arabidopsis thaliana nossen
  unsure (1)..(296): unsure at all n locations
acacacatnccaactctggtgggagatgtttgagcgtggaatacactgagaaagttggagagattgcgaagagacatggcgtgaagctccatatcgacggagcccgtattatcaatgcttccattgcacttggagttccagtccataagcttgttaaggctgcggactccgttcatgcgtgtctctctaaaggtcttgtagctccggttggatctgtaatcgttggttcgcaaagcttcatatagaaggcgaaaactgttaggaaaacattaggtggaggattgagacaaataggt

SEQ ID NO: 166394 - DNA, 384 bp, Arabidopsis thaliana nossen
gcggtgttgttgaattcagaaatggaggtttcgtcttcactcaagctctcgggagcgttatctccttccatcatcaaacttcagggttcttcatcaagtattgatataaaattctctaagtacacttcacttcctaaaccgtttcttcaacttgatgataaaagccgacgtcttcgtgaccaacaagtttcacattctctcgagctaaagtcttacagaaaacgggtcactgcgaaatcaggttctcaaggttgggactttggtagattcgtcaaaacattgtactttttcaatggaccaccatctcctctaaagtttgtttcatcggtgtttgagaaacttactaacggagcaacggaggaaccggttgctgaaatgggaact

SEQ ID NO: 166395 - DNA, 385 bp, Arabidopsis thaliana nossen
gcgacggaatggtatacaaagtcaacagatcgtaatgaatacaaaataagagttggggcttcacaaactgtggaagatagttctagatctggtccaagaagcactactgtagggaagttattgaaaccattgaattccgaatatggtaaagtagctcccggatggggaacgacccctttgatgggtgttgcaatggctctatttgcggtattcctatctattattttggagatttataattcttctgttctactggatggaatttcagtgaattagactgagaagaatcttgaagttctagcttttagctcgatacaaaaaagtaaagtatgcaagtctaacaattttagcctattctcctttggtagttcgaccgcgaaatttt

SEQ ID NO: 166396 - DNA, 382 bp, Arabidopsis thaliana nossen
gcgctcagtgccccattgttgagaggctcaccaactctctcatgatgcacaggaggatcaacggttagaaattgatggctgtcaggatcgtcaagcacgccatggagattatccacctcttgtctgacttgaacccaattcaagtcatcattgacgccattgtcaacagtggtccacgtgaagatgctaccagaattggatctgctggtgttgttaggagacaagctgttgatatctctcctctaagacgtgttaaccaggctatcttcttgattaccactggtgctcgtgaagctgctttcagaaacatcaagactatagctgagtgccttgctgatgaattgatcaacgcatccaatggctcttccaacagctatgccat

SEQ ID NO: 166397 - DNA, 373 bp, Arabidopsis thaliana nossen
atggacttgtaggccattgatgcagctattagagatcctaaagggagggcgttttatccatcaacaaggttgattcgcttggagaacacacatgccaactctggtgggagatgtttgagcgtggaatacactgagaaagttggagagattgcgaagagacatggcgtgaagctccatatcgacggagcccgtcttttcaatgcttccattgcacttggagttccagtccataagcttgttaaggctgcggactccgttcaggtgtgtctctctaaaggtcttggagctccggtaggatctgtaatcgttggttcgcaaagcttcatagagaatgcgaaaacggttaggaaaacattaagtggaggaatgagac

SEQ ID NO: 166398 - DNA, 162 bp, Arabidopsis thaliana nossen
  unsure (1)..(162): unsure at all n locations
cccccnnaaaacacacatcccaactctggtgggagatgtttgagcgtggaatacactgagaaagttggagagattgcgaagagacatggcgtgaagctccatatcgacggagcccgtctttgcaatgcttgcattgcactaggagttccagtgcataagctt

SEQ ID NO: 166399 - DNA, 371 bp, Arabidopsis thaliana nossen
attcgaagtggacgccatcggtattcttaatgtgaaagcagaggggagggcgtgtggttaatcagagaacattacaatcacaaacgagaagggtcgcctgacccaagaagagattgaccggatggtgaaagaggcagaggagtttgcagaggatgacatgaaggtgaaggagaagatcgacgccaggaatgccctggagacatacgtgtacaacatgaagaaccaagtgaacgacaaggacaagctagcagacaaattagaaggagatgaaaaggagaagatcgaagcagcgaccaaagaggccttggagtggctcgacgagaaccaaaactcagagaaagaagagtacgacgagaaactcaaggaggtag

SEQ ID NO: 166400 - DNA, 382 bp, Arabidopsis thaliana nossen
gcgacaaataacagatactcttttttttttttttaaaggatatgtgagtaggcagatcttttactttaagcaaataccatatctaattaatactactaataactatacttgcatgattggttaatataatctattttctaaaacatttttgacatttttttttattctaacctttaaaactcctagaaatatattttatatttatagtcaataagaattagttaaacactttctttgaattttactaaatatgtaattctttgcacttttaatttttttttatggtttatttgagttattaaactttttaattaagttaactattatcaaattcaaagttcaaacgataatgacaaaataattttgtttcgttacattgatt

SEQ ID NO: 166401 - DNA, 361 bp, Arabidopsis thaliana nossen
tcagaagcatttttagtttgtgtttggcctcctctgcttctacaaacggggggtcctaattggtttcatcatcggccgcccttctaatggggtccaaaatgcgcatattgtacacctataccgccggcaatctagaaatattctccaccggtgctgtatacaccaccgatcaagaagtatccactcgtcaccatgcgagcattcaccgctgaagtatccaactacgagcaaaacttacccttatccgccagtgaagtattctgcaccagaacatgttccaccacctattaatattgatgctgctgctgtacaagatccaacgacgatttatgaagtatcctccaccataacagtattcacc

SEQ ID NO: 166402 - DNA, 367 bp, Arabidopsis thaliana nossen
gtgaaaaaagcttatcgctgcgattagttcccggcgaagaagaagaggggaggttagaatatggcgactcatggatctgctatgctcaacgcaactctctcagaaagaaactgatgtcaggatgatgtgtgccgctcaggttcatcttggaaccaaaaattgcaattaccagatggagcgtttcctcttcaaaagacgcaaccatggtatttacattttcaaccttggcaaaacatgggaaaagctccagatggctgctagagttattgttgccattgagaacccacaggacattatcgcccactcaactaggccctatggaccaagagctctcttcaagtttgctcactacactggagcccatgcc

SEQ ID NO: 166403 - DNA, 359 bp, Arabidopsis thaliana nossen
gccgccgtcacttgcaaagccgactccgacgctctttgcgtcactagtgagtgcgatatccactctgctaatccactcgctagccgccacgaacgtgtccccgtcgaaactttcttcgactccgccgaaaccgccgtcgccaaaatctcagcttcttcgacttttggtatccttggctcgtccgccaccaccgttgatttaaccgctgttccggttatggctgatgatctcggtttatgtccgtggttacttcctaatgatttcaacgaaccggctaaaatcgaaatcggaactgaaaacatgaaaggttcttctgactttatgcttgctgattccgagcggcttatagattccgagtt

SEQ ID NO: 166404 - DNA, 162 bp, Arabidopsis thaliana nossen
cgaaattgttgttgactaatttctttatcagcccaattgttcttaatggggcgtatcagtcagtatgatggaacaaatataaagtctgatacgacccattaagaaaaattgggctgataaagaaattaggcccagcgataatcacgtagtggtggtgagaat

SEQ ID NO: 166405 - DNA, 380 bp, Arabidopsis thaliana nossen
aaaaacctctctactctctcctcaaaaactcaaaagagcaaaaaaaagagaagaagaatcaaaatcccacacaatggcaacacactctttctttaacccaacaaccccctcttttttttaatggtcttctatccctatccttcgtctcaattcttggggcattttaacaccacccaaccgggcccggttcgtctgtagactgttcgactcttatactcaacatggctgactggttattcttcgtttcgagccgaggcacggtggcgaaaccggaaggtacatgttgctctggtcttaagacagagcttaaagctgactctcagtgtctatgtgaagcgtttaagagcagtgcttctcttggagttactttgaatatcact

SEQ ID NO: 166406 - DNA, 382 bp, Arabidopsis thaliana nossen
  unsure (1)..(382): unsure at all n locations
ctcatcggagtctctcgaattcgtctttgaagaggaagagaagagaaggggggagggagatatggattgggacaacgtaccagctgaggatgtgattgaggcgcttagagaagttgaatggtcgacgcctcctcgttcgtttggcgagttcttctctagattcgcgttccctcgctctttctctaaatggaagagccgtctcaaatgcaatctctactactataggacgaattactttatcttggtgattttcgttctgggtcttgcgcttgttacgagacctctggctcttgtgggtgctgctctaacagctttaagtatagctttccttaacgacagttntgcagctagttttaatgagaagtttataagaacgattagg

SEQ ID NO: 166407 - DNA, 384 bp, Arabidopsis thaliana nossen
gcgacaaattcaagcattatcactggctacaacatcagtgccagttgcaaaagggggagttcctgtaaagaaaacaacagggaactccacttcgagagcagacctaatggtaactgctaattcagtagctgctgcagcctgtatgtctggcctggcaaccgctgtaacagtgcctaagattgaaccaggaaagaatgctgtttctgcgttggtgccgaagactgaacccgtaaaaaccgcttccacagtttctatgcctcgtccttcaagtatatcatcagcactgaatactgagcctgtaaaaaccgctgtggcagcctctttgcctcgttcatcaggtattatttcagcaccaaaggttgagcctgtaaaaaccgctgcttc

SEQ ID NO: 166408 - DNA, 381 bp, Arabidopsis thaliana nossen
tgcgattcccaccgacatgataaaaaaccttatgagaaccaaaagccagtggatgtgagggagacgagccaggaaatcccatgctaccgggagaacctaagtgaaatcctgaagattctggagattcagctacatatgcctgtcttctatcccaaaaaggtgagtttaataccggggcagatccaatgtggtggtgcacaggcgatgatgccatgttcaccattaaaggagatgctctagagaatgcagtaacaggtgggatgcgctgagagggaacgccgttgacgcgagatggtgagttaggccacatcatgccacttgactgattatgttgctgactgttagagttactccataagttgaggttaccacgatgggatc

SEQ ID NO: 166409 - DNA, 348 bp, Arabidopsis thaliana nossen
aacgcaagctaccacagatttagagtttatccaccttatctttcgccgagatccaacaatggctgatgtggaaccagaggttgcagcagcaggagttccaaagaagagaacgttcaagaaattcgccttcaaaggagtcgatctcgatgctcttctcgacatgtctaccgatgatcttgtcaagctcttctcttcccgtattcgcagaaggttctctagaggattgacgagaaagcctatggctttgattaagaaactccgcaaggcgaaaagagaggcaccagctggtgagaagccagaaccagtgagaacccacttgaggaacatgatcattgtgcgctgaatgat

SEQ ID NO: 166410 - DNA, 379 bp, Arabidopsis thaliana nossen
gcaccctcaacgccagcatgaaggaggcatcaaagtcctttatcctcagagtggcccttcttccactcaggtgctagccgtgtttgtcggtgtaccgataggaggaacgctgctgactatagccggtttgacattagccggttcggttataggactaatgctagcattcccgttgtttctcatctttagtccggttattgtaccagcagcctttgtcatcggtctagctatgactggattcctggcttcaggggccataggtctcaccggactatcatccatgtcgtgggtactcaactacatccgccgggccgggcagcatatcccggaggagcttgaggaagcgaagcatcgtttggctgacatggccgagtatgtg

SEQ ID NO: 166411 - DNA, 371 bp, Arabidopsis thaliana nossen
cagaaaggtaagagggaacggcatagacattcacgtagcaatccaagggccctccgatggtcctatagtcctcctcctccatggtttccctgagctttggtactcatggcgccaccagatccctggactcgccgctcgtggctaccgtgccgtcgctcctgacctacgtggttacggtgactccgatgctcccgctgagatctcttcctacacatgcttcaacatcgttggtgacttaatcgccgtcatatccgccttaaccgcctcagaggatgagaaggtctttgtggttggacatgattggggagctctcatcgcttggtatttatgtctcttccgaccagatagagtcaaagctctggtcaacctca

SEQ ID NO: 166412 - DNA, 385 bp, Arabidopsis thaliana nossen
gcggccaattcataggaaaggcattacattcaaccttacactccatcaaaagagggttctccacattctagtctctctcccttactctctccctaccaatcttccataaaccgaaacattaaaataacaaaaaaaggatataaaaatatcatcttcgtttaaattaacatattcttttccatttctcgttctcatactccctaaaaacttcaaatactaaaccaaaacagtatagcaatataaaacgaagaaaactcaaaagtaaaacataaattctaaatcaagctttccccttttggtctcaactctgaagtacacaaatgaaataaacataagactgaatgactgatacacaatatttctatttattatttcttttaccatg

SEQ ID NO: 166413 - DNA, 378 bp, Arabidopsis thaliana nossen
gcgcaacgatcgcataaattccctttttgtctgctcgattcctgatctctagagtttgtgttcctgagacgaagggggtgtttcgtgtgtaattgagatattgagattattgctttgtaaaactcaaaatctatggcggtttctagcgccttcgttgttacaccgaagctgtacaagctgttagcgaatcaccataatccaacgtattcttcttctccggcccctttggatgtaattgggatacttgctcttccgatgaacaatttgaacaagcgaggtctgatccacaaagcgcgttgcgagatttctccggctaataatgcagcttgcatctcacctcttgagcaactcaaaacttcttctttttgacccatacac

SEQ ID NO: 166414 - DNA, 364 bp, Arabidopsis thaliana nossen
atgaagtcttgtctagctacttttgctctcgcagtgttagtaacacaagggggcatttttagtttgtgtttggcctcctctgcttctacaaactctgttcctaattggtttcatcattggccgccgtttaaatggggaccaaaatttccatattctccacctaaaccgccgccaatcgagaaatatcctccaccggtgcagtatccaccaccgatcaagaagtatccaccgtcaccatacgagcatccaccggtgaagtatccaccaccgatcaagacttaccctcatccgccggtgaagtatccttcaccagaacagtatccaccgccgattaagaagtatcctccaccagaacagtttcacc

SEQ ID NO: 166415 - DNA, 348 bp, Arabidopsis thaliana nossen
gcgtgccattggaggtcatatcaaatggtttccagatctctcccgaggaagggaggaagatcaagttcaacacacttgagaccactttgacccgcgctgccggttggcaacaacaacagttgatcgaggagattgtcgaggcttaaatcaaaacgtttttctttttcttaataaagtatggtcagtttgtaatcacgtccctttacctttaacgtacgtgtaaaatatgtgtctgcggcacctcacttgtaataacactttcttctcataaataaaagggaagtttcgagttaaaaaaaaaaaaataaaaaaaaaaaaaaaaatataataaattattaaaaaatttta

SEQ ID NO: 166416 - DNA, 381 bp, Arabidopsis thaliana nossen
gtgggttttctgggttgttgccttattcaagtctcgatgcttacagaggtagatcgcacactattgtggcgggtgctactctttggtgtgatgtgcaactaacgaaagatgcaattggactttgcttccctgatgtgaagatgatgaatgcttccaatattcaagatgtttaccctaaacggaaaacttcttacttgcttaatggagtccctactcaggattggttcaccattgatttcaacttcaaggatctgacaaaagttatcttgaaacaaggaatattatcacggtcagcggcattcgatggaaacagctacgggatattcgacagttaaagatatatctacgcagttaaaacctgagggtttttggttaaatgtt

SEQ ID NO: 166417 - DNA, 378 bp, Arabidopsis thaliana nossen
gcgcaacgatcgcataaattccctctttgtctgctcgattcctgatctctagagtttgtgttcctgagacgaagggggtgtttcgtgtgtaattgagatattgagattattgctttgtaaaactcaaaatctatggcggtttctagcgccttcgttgttacaccgaagctggagaagctgttagcgaatcaccataatccaacgtattcttcttctccggccccgttggatgtaattgggatacgtgctcttccgatgaacaataggaacaagcgaggtctgatccagagagcgcgttgcgagatttctccgtctaataaggcagctagcatctcagctctcgagcagctcaagacttttgctatggaccgatacact

SEQ ID NO: 166418 - DNA, 183 bp, Arabidopsis thaliana nossen
  unsure (1)..(183): unsure at all n locations
gcgacaacagttgatcgaggagattgtcgaggcttaaatcaaaacgtttttgtgggtcttaataaagtatggtcagtttgtaatcacgtccctttacctttaacgtacgtgtaaaatatgtgtctgcggcacctcacttgtaataacactttcttctcataaataaaagggaagtttcgngtt

SEQ ID NO: 166419 - DNA, 334 bp, Arabidopsis thaliana nossen
  unsure (1)..(334): unsure at all n locations
gaattaatgcggggttccacccatgcgtgctaaaacctacatatcaagtctttatccatgcactggaaaaccaaggagagtttacccctaccagtgatcttgataattangagaaccttaaaacaacattatcagtatattcaaacactttgcatcatttcatgtacatagctccaaatgatcatactgatagaagataataccctcatgatactgagcctgcacatgacacacaaacttttctaagtacatgagattctgttttaaaaacaatgatcggatttaagttactagactcacatttgatttcttcaagcataaagaaagtttcttg

SEQ ID NO: 166420 - DNA, 383 bp, Arabidopsis thaliana nossen
gcgcgattcttcttctccagtttcaatcaaactcaatttcttctcaacgaggcctaatttccaacaaatcggattcagtttcttcttcggagactaatcgaatcgcaatggctaagagttccttcaagatctctaaccctctcgaggcaaggatgagtgaatcttctcgaatcagagagaagtaccctgacagaattcccgtgattgtggagaaggctggacaaagtgatgttcctgacattgacaagaagaagtatcttgtaccagctgatctaacagtgggacaatttgtatacgtggttcgtaaaagaatcaaacttggagctgagaaagctatttttgtctttgttaagaacacattgcctccaactgctgcattgatg

SEQ ID NO: 166421 - DNA, 331 bp, Arabidopsis thaliana nossen
gattagtttccgagaagttttcctagagattggcctggtaatcgcatggaagtttttcaaacactaagagcttgaataggtttgacttgtgacagatgctatatagactaagtagcttgtggactacatcgtttttatgtttatcattcacgacataaattttagatatgtactatatatgcaagaaaaaaaaaatcttaagaaaaaaaaactaaaataaataaatatatatgaaatgcatcgtattgttgttcataccatataattttcaaatagattaagtaaagaagagaatcatgttatcccaaacctaactttttcttaaagccca

SEQ ID NO: 166422 - DNA, 381 bp, Arabidopsis thaliana nossen
cttttgagttatggggttatggacttttggggttagaaatgattgatggtggttgtgaaaaagattgttgatgtgtgggcaggtattgacttcttggagtttagagcttcagagattgctgctgcagttgctctttctgtttctggagaacactttgacaaattctccttctcttcttccttctcaagccttgaaaaggtaagagaagtcaccaaaagtctccttcatttacaaaagtagtggttcaatagattgtcaaaaatatggaaaatcatgagacatagatataggcatacattaatgcacacattgtcttttaatgtcccctctttgaaatccctttttattcgaaaaactagtttgtgtgtagaccaaaaagaa

SEQ ID NO: 166423 - DNA, 380 bp, Arabidopsis thaliana nossen
  unsure (1)..(380): unsure at all n locations
gccgacacttcaacccctccgtgctcaacctcagccgncaaatggctgggctcgaaagcacccaagctgcctactgtacctctagcggtatgtcggcgatatcgtcagtgatgctgcaactgtgcagcagcggaggacacgtggtcgcggcaagcacgctctacggaggaacacacgctttgctctctcatttcttgccacggacatgtaacataaccaccttcttcgttgacataacggaccatggcgcggtggcaaacgcgatcgttgagggtaggacacaggttctctactttgagtcggtggcaaacccgacgctgactgtggctgacatacctgaacttgaccgtatggcacacgataagggcgtgaccgtggtg

SEQ ID NO: 166424 - DNA, 341 bp, Arabidopsis thaliana nossen
gcgatctccttcagtaacaataacaagtaagcgtgtgagaaaaccctacaaatgggatcaaagctacagtagtagcagattgcaaaaccataattaagagatacacgtttcataagaatctgcatccgaatggaatcaaaactatgagctcctggatttcttctaagcaatcataggttcccagaaatggcaaacctaataccacaacaaaaagagagaaagagctcaggttgaacatacataccagtttcagctgaaaaaggcctgacccatctttgcagggttgaagaaactaaactcgccgacctcgagatgcccgagttccctgctagtgggataca

SEQ ID NO: 166425 - DNA, 382 bp, Arabidopsis thaliana nossen
cacgcgcagctcttgaaagtctcttgtgcaaagccctacaaggtgaagaggagaaaagtgttatgctgaaactgagaaagtttggtcaaaacaatcatccggattcttcttctgatgtgtgtgttctcgttaactcctgcacgagtcgggattatactgaaaatatcatcggtgtctgcttcgttggtcaagacatcactagtgagaaagcaataacagatagattcatcagattgcaaggagattacaagactattgttcaaagcttaaatccgttgattccaccgatatttgcttcagatgaaaatgcttgttgttctgagtggaacgcagcaatggaaaagcttacgggatggtcaaaacacgaggtgattgggaaaat

SEQ ID NO: 166426 - DNA, 383 bp, Arabidopsis thaliana nossen
gcgggttgaagaaagaattggcgtaccagtaatgatcacaaatcacaagtggctgagctttgttgccgacacgtaacccaaaactctcacccaacaccgaccctctttttcatgatgtttacaaggagaatgatacgactcttctttgcttttagataacatcaccattacaaattcgtcttaattatcgtatatatattattgacacacaaagagagagatatgtgtaagagactaatttggcgttgcccaccaacctaacttcccttctacttcatcaacaactcgtgtccactttctcatactaaccttggttcaagattataattataaacacgcctcccgcgtgaatagacaacgcaaacatcataaaaacatcataa

SEQ ID NO: 166427 - DNA, 383 bp, Arabidopsis thaliana nossen
gggctgctaaatttggaactaatcaatcgtgctgggggcaagatatggggggccatgaagatctctctctttttggtttataaaagtcatactttttgttgtcaatttgaacaaaggaccaacggtgggatctgatcatgtttgatgtttctgacaaaaaattatattcgaaatagatttgattttgcctttctttctcatttcttatgttattgctaacgatcggttcaaatttatttcatttcacatcccccatgcgcaagagatatgcaatcatgcgattgagtataatctattttcccgttttcataatatttaattagaacaggctcacaaaagagctattgagtctcttttttttttttttgttaaccatgatcttt

SEQ ID NO: 166428 - DNA, 387 bp, Arabidopsis thaliana nossen
aaacaacaagaaaaaatggcaataaccaacaaattaatcataacacttgttggccttatctccatagctgtcgtccactgcttatccttccgtgtggagatcgacgagttcgagccaccacagcaaggagaacaagaaggtccccgtcgccgtcctggtggtggctctggcgagggatgggaggaagagtcgacgaatcatccataccacttcaggaagcggagtttcagtgattggttccagtcaaaggaaggttttgtgagagtgctgcctaagttcacaaaacatgcaccggctctcttccgaggaatcgagaactacagattctcgttggtggagatggagccaacaactttctttgtgcctcaccatttggatgccgatgct

SEQ ID NO: 166429 - DNA, 378 bp, Arabidopsis thaliana nossen
cttgactcaagccttctcatctttattcgtcaaggtgaagcaaccctgggagtgatatgcaaagacgaattcggagagaggaaactgaaagcaggagacatctactggattccggctggttctgtcttttatttacataacacaggcctaggtcaacgccttcatgtcatttgcagcattgatccaacgcagagtctcggcttcgaaaccttccaacctttctatataggtggagggccttcgtctgttctagctggatttgatcctcacactttaacttcagcattcaacgtttccctacctgagctgcaacaaatgatgatgagtcaattccgtggcccgattgtacacgtcaccgaagggccacaaccacaacca

SEQ ID NO: 166430 - DNA, 373 bp, Arabidopsis thaliana nossen; identical to SEQ ID NO: 131857

SEQ ID NO: 166431 - DNA, 386 bp, Arabidopsis thaliana nossen
gcggtgatgcgtcgcttttgctgtattcgacaagaagagagctaggagagagagaacacgacaggagcttgggacttagaaactttaggtacatcgaggagatcaaggaagctctcgagagggagtgtcctggtgttgtctcatgttctgacattctcgtcttgtccgcaagagaaggcatcgaagcagtaagaggaccttatattcctttgaagacaggaaggagagatggacttaaaagcaggacggatatgctcgagtcatatcttcccgaccacaacgagagtatctccgtcgttcttgaaaagttcaaatccatcggtatcgacactcccggcctcgtcgccctcctagggtcacacagcgtgggaagaactcactgtgtc

SEQ ID NO: 166432 - DNA, 428 bp, Arabidopsis thaliana nossen
  unsure (1)..(428): unsure at all n locations
gccgataaataataatccacaccaagagttctgatatttagtagatagaaaatctttatgtgagtgtaatttaagagcatgtatccacgaacatcgatatatcagctctttagtgtcttaaccccttagttaaatttctctcaatcgatatttcaaagcatttctagtgtcatagtggatagaacaatttacatattnctcctctgcaggttcttcttcaacgactagggaacaacatatgtgtttttgaacatgcttttcattgtgtggacaagaaaaaaaacaaaatgtcatcgtatatacctcgtagaattcatcagagatcagtgccattttatgagcaaatggaacgcggtagttacaatcatatacacagtctgttaacgggttaccgagcacatagccctgaagatttattggacgattgc

SEQ ID NO: 166433 - DNA, 385 bp, Arabidopsis thaliana nossen
gcggctagcattcccgttgtttctcatctttagtccggttattgtaccagcgggggttgtcatcggtctagctatgactggattcctggcttcaggggccataggtctcaccggactatcatccatgtcgtgggtactcaactacatccgccgggccgggcagcatatcccggaggagcttgaggaagcgaagcatcgtttggctgacatggccgagtatgtgggacagaggactaaagatgctggacaaaccatagaagacaaagctcatgatgtccgagaggccaagacttttgatgtccgagaccgagacaccaccaagggtactcataatgtccgagacaccaagactacataaagcgtgtgttttgagtgaaccatgttg

SEQ ID NO: 166434 - DNA, 392 bp, Arabidopsis thaliana nossen
gcgcagcactcctttcctttcccccacaaactaaacaaaaaaccattcacagagaaaatagagagaatcatctgagagagtagtagtgatgatatgatcgcttcttctcctacaatctcagaaacctccgatcacggttttagatatcttctacaacggatacaatggagagcaccgattcttccggtggtccaccaccgccacaacctaaccttcctccaggcttccggtttcaccctaccgacgaagagcttgttgttcactacctcaaacgcaaagcagcctctgctcctttacctgtcgccatcatcgccgaagtcgatctctataaatttgatccatgggaacttcccgctaaagcatcgtttggagaacaagaatggtacttcttt

SEQ ID NO: 166435 - DNA, 372 bp, Arabidopsis thaliana nossen
gtatatttaggagattataattcttctgtctactggatggaattgagggaattagactgagaagaatcttgaagttctagcttttagctcgatacaaaaaagtaaagtatgcaggtctaacaattttagcctattctcctttggtagttcgaccgcgaaatttttttctgcattgatatttccggaatatgagtaaagtttatgattggttcgaagaacgtcttgagattcaggcgattgcagatgatataactagtaaatatgttcctccgcatgtcaacatattttattgtctaggcggaattacccttacttgttttttagtacaagtagctacgggatttgctatgactttttattaccgtccaaccg

SEQ ID NO: 166436 - DNA, 377 bp, Arabidopsis thaliana nossen
ccgcaatggaacgtaaacgcttacgcggcactctacgtgacaaacggggaggctcatatacaaatggtgaacgacaacggagaaagagtgttcgaccaagagatctccagcggacagttactagtcgtgccacaaggcttttcggtcatgaaacatgccataggcgaacagttcgagtggatcgaattcaagacaaacgaaaacgcacaggtcaacacactcgcgggccgtacctcagtcatgagaggtttgccgcttgaggttataaccaatgggtaccagatctctcccgaagaagctaaacgagtaaagtttagcacgattgagaccacactgacccatagcagtccaatgagctacggaaggcctatggcttg

SEQ ID NO: 166437 - DNA, 208 bp, Arabidopsis thaliana nossen
gctgtacattgctaacatcatgaaatgaaaaaatcgggaatcccgaggagactggaaaagccgctaaagtggctaaagtagtaataaatcccgtcagtaaaatagttcctatagaaagtccatctattcccattctccagtaaaaatcaaaaaaatcgatccatttataatcttcggacagttgaattaatggatcgtccattttaaa

SEQ ID NO: 166438 - DNA, 329 bp, Arabidopsis thaliana nossen
gaaaaattgatttttattttcctctcgcttggttggtgcatgcacgaggaaggtgttttatcttttttttttttctctcaaaaaccgacttgacattgtatctatcggagtgttgtaaattatgcaacctcttttgataaagacgagactctttttcatcgcaacaatgacatatcctaattcttagaaatccttatttggctgctatagaagaacaacatatttttttctttttccaccagccattctcccatctactcgttggtgcaatattcacatggaaaacagttggatttaaaggagattacaaaacttaattcataaaatcg

SEQ ID NO: 166439 - DNA, 378 bp, Arabidopsis thaliana nossen
cactattctgatattcaaattcgatagagattaaattgaaacagcagagggggtttatttcatatttttggattaggaaatccgccgatatctcttattgaatcttcttgtttctatatatttcataggaaatatattgcgttcctgcctagagaaagagagtctttttgcaaagtaataactaaaagggcgtttcaatattttttttgattcgagaacataacaagatcctacattctctttgtattaagaatcaatttgtattaaaaataaacaaaaatcgaatcataatcatggcttcagatatcaattaaatatttccatattgatgcatccgagatgacaatgtaatgtgatcgaaggtgtatgtgagaaaga

SEQ ID NO: 166440 - DNA, 379 bp, Arabidopsis thaliana nossen
gcgaaaacgtgaaagtcggaagctcctttgcttctcttggaaacaagtgcggagatgcttgctccatggttgaagctgagctcagtcgtttcttcgccggtcaatgtttcaactccaccgccgtttgatgcagtgcatggtaaggacttgtgggcgttcgcacaggataatctgtgccacagccagctgatcaacgaggccatggcttgtgatgcaaggcgcgtggtgccacgtgtagctggagcttgtcaaggcttgtatgacggcgtggctacggtggttgacgtaggaggaggtaccggagagacgatgggaatacttgtaaaggagtttccttggatcaaaggatttaactttgaccttcctcatgttattgaag

SEQ ID NO: 166441 - DNA, 383 bp, Arabidopsis thaliana nossen
gagaactcggtggcgctgggtcttttgatgcagaagaatgccactgcaagaggcaataatgagataaggatggtgaaaatatactctcggataaaatcgaagagcatactcgggatcagctacaatctgtatgagaagcttgcaggagttaaggacgaggacaaaaagacaaagatggtgagagaagtgaagccagacaaagaattagatgatatcagagagatacttatgggaaggcctggacttcttgttcttgacgaggcacacacacctcggaaccagagaagttgtatatggaaaacactatccaaagtggaaacacagaaacgaatcttgctctctggaactcctttccagaacaacttcctggagctgtgcaatgt

SEQ ID NO: 166442 - DNA, 391 bp, Arabidopsis thaliana nossen
ggcggaatccaattttagcttgggttcaacctaggtgctacagcttggtgagcagaactactgaatttctgagaggagcaagatccatggatttcccgcgggtttgtgcacaagtgtaggcataggtgggtatatgacaggcggtggatacggtaccttgatgaggaagtatggtcttgcgggagataatgttctagacgtaaagatggttgatgcaaatggtaaattactcgacagagccgcgatgggtgaggacctattttgggcgattagaggaggcggtggagcgagtttcgggatagttctagcatggaagatcaagcttgttcctgttcctaagactgttaccgtcttcactgtcaccaaaacgttagaacaagacgcaagattg

SEQ ID NO: 166443 - DNA, 384 bp, Arabidopsis thaliana nossen
  unsure (1)..(384): unsure at all n locations
cacatccaatcacaacctcatcatatatctcccgctaatcttgggaagttgatctttttttttttagcttattatcccctngactttgatctcccatcagttcatcttcttcttcttcttctgatcaaccatggctgctgctataagtgctgcaatctctttaccttcctccaagtcatcctctctccccaccaaaatctcctctgtatcccctcaaaggattttcctcaagaagagcacagtgtgttacacaagagttgtgtcagtgaaagctcaagtgacaactgatactaccgaggcaccaccagttaaagtagtcaaggagtctaagaaacaggaagaaggaattgttgtcaacaaattcaaacctaagaacccttacac

SEQ ID NO: 166444 - DNA, 391 bp, Arabidopsis thaliana nossen
gccgaaaaaaaaacctaatctcgctttactctcctcggttccatctttggatggggccagtacgtgtgcagggatggctaccgagggagttgttccttcagcgcaggatattgctgctgaatttgtgagacagtactatcatgttttaagacagcttcctcatgaagctcgtaggttatatgttgatgctagtgttgtcagcagacctgatgttactggtactatgatgtcttttacttccgttgaggctatcaacaagcatatcctgtcctgtgactttgagaatactaaatttgaagttctgagtgttgactctcagaattctttggaagatgggatttttattatggtgatcgggttcatgactggaaaagacaaccagaggaggaag

SEQ ID NO: 166445 - DNA, 385 bp, Arabidopsis thaliana nossen
gcgaagcctctcaacgtgttttttatatatattttgaaaatcttttacgccggagaaggatctacgattattaaaaaaaaaatggcaacggaatgcattgcaacggtccctcaaatattcagtgaaaacaaaaccaaagaggattcttcgatcttcgatgcaaagctccttaatcagcactcacaccacatacctcaacagttcgtatggcccgaccacgagaaaccttctacggatgttcaacctctccaagtcccactcatagacctagccggtttcctctccggcgactcgtgcttggcatcggaggctactagactcgtctcaaaggctgcaacgaaacatggcttcttcctaatcactaaccatggtgtcgatgagagcc

SEQ ID NO: 166446 - DNA, 382 bp, Arabidopsis thaliana nossen
cggactcgtgggcggacgcgtggtaaaaatgggtcgagtctcatctaggaagacggtctctttgtcactctggatcctcttcaatggctacactgcccaacagtggcccaacgagtgccagctcgatcaactcaatgcgctcgaaccatcccaaatcatcaagagcgagggtggtcgcatcgaggtctgggaccaccatgcaccccagctccgttgctccggctttgcctttgagcgtttcgtcattgagcctcaaggtcttttcttgcccactttcttgaacgccggcaaactcacgtttgttgttcacggaaggggtctaatgggaagagttattccgggatgcgccgagacgttcatggagtcaccggtatttggagaa

SEQ ID NO: 166447 - DNA, 390 bp, Arabidopsis thaliana nossen
gtttgtttgtacacactgagtgattaccagagcgattcatgtagttgggactggtgacataacataaagagaagaaaagataatccttcattagaaaataaagatccaatcagagtcaaagagatgagtttaagaaacattctacagtaagaagtccgacacccttaaaagactaaaccagatagaaacctaaaactgactccaataacaacttcaacaccataagaagctgggaagcgctatgtagctcaatcaattgtaactttccttgatggcttgggggtcctgtcagataatatcccactaggaaccgtctcttccatcacctttgggactgtgaaattgaaatctccaagcagtgcatacttgtaatcctgattggcatcgatg

SEQ ID NO: 166448 - DNA, 471 bp, Arabidopsis thaliana nossen
  unsure (1)..(471): unsure at all n locations
cggaattncccgggtgcgacgccatcgcgtgccagagtgtattttcactagatgcgccataatctatttttagaggacaaaggannnactctctcatggtagtcnncgttctctcttttctggtccgccncctctctccgagcgatagggttgttaggctatgagacccaacagcatccatatagtgaatcgagatgattctccgagcgccggatgacccggaaagaaaagaagaaaagagtttgatcccgaagtgcaccataccaccgttcaaagatcaggagatatatagggcgagcgattcctatagcactagttgggttaaagaagtcctttgaagatcaatagagttaccgtcgtcaagagacattatcagccgtcgcgagctttggcccatcgctgccgtgtatgttagataagctggttcctttgtgcctctttattagggccgcccaagagaacaacttttct

SEQ ID NO: 166449 - DNA, 391 bp, Arabidopsis thaliana nossen
  unsure (1)..(391): unsure at all n locations
gccgccacgccgtccggtcaccgtaggctgaaagatagagagagattgagaaggaggagagagggtagagagagtcccaagataatctaaccatatnctccattttcntctttactgttttnttctttagcttcttcctncctttttatacctacccgtgtgtgctcaattcgtgtaacaatttcttattggagcgtgttattcaagcataagttattttaggattttttttttgtcaatctctaaacacaattgtaaatgtatcctactttcgtatgtcataagtatatatgcaatgaaattcctaacaactaaactgtcttttgttagtagaattttatacaagtattatactattatgtgtgtttgatatgtttacaaaacactttac

SEQ ID NO: 166450 - DNA, 383 bp, Arabidopsis thaliana nossen
gcgctgtcctggctattgagtccattcataagcacaactatattcacagaagtatcaatcctgattatctgctacttgacaaagacggccacatgaaattgtcagattttggattatgtaaaccattagactgtagtaatcttcaagagaaagacttcacagttgcaagaaacgttagtggggctttacaaagtgatggtcgccctgtggcgacaagacgcacccaacaagagcaattactaaactggcagagaaatagaaggatgcttgcttattccacagttggcactcctgactatattgccccagaagttctgttgaaaaaaggatatggaatggaatgtgattggtggtctcttggtgccattatgtatgaaatgctt

SEQ ID NO: 166451 - DNA, 379 bp, Arabidopsis thaliana nossen
attttaatttgaagatccttccctttctttctttctctctctctggtagtcgcctggataaatcgctgtccaaatctccggtcatttctccgaggatctcttctatcaatccaacggttttgttttcatcttctcagatctcacagaacaatagtcaaagactgatgcacaagaagcgttagtacaaggtttttgttggaaagcaattgaatctgaattcatctttcattttcacgctttgatccaatttgagttctctcttccactgaatccctcatacgtaaaacctaaggtttctaaattagggttctcctgaggtctgtttatagtgcgtaaagccatgtttaagaagatcatgaaaggggcaaatcgaaaagcc

SEQ ID NO: 166452 - DNA, 242 bp, Arabidopsis thaliana nossen
gtgtgcctaaaagcgatggcgtctgagaaacaaaaacaacatgcacaacctggcaaagaacatgtcatggaatcaagcccacaattctctagctcagattaccaaccttccaacaagcttcgtggtaaggtggcgttgataactggtggagactctgggattggtcgagccgtgggatactgttttgcatccgaaggagctactgtggctttcacttacgtgaagggtcaagaagaaaaaga

SEQ ID NO: 166453 - DNA, 374 bp, Arabidopsis thaliana nossen
ctacgctatataattcatatttaaatctggtagactatctgaagaagttgcacacaaacaaaataaatgataccaaaacggttgatgtcaataaaataacaagttatacaagaaatggttgttgctaccaaaatagaaattatgtaataatatattttgcagatagatattgaaaaagaaccttaacaaagctaatacttggaaaaggtacattttatttctatcctaataatataattatttagtaaataactaatcaacttggttaaactaaaataaacccaaagttgaattggtcagcatttgacctatagtaaacaccaccacttatacactctgaaactatatattcttaatgaagaccaaagactttc

SEQ ID NO: 166454 - DNA, 336 bp, Arabidopsis thaliana nossen
  unsure (1)..(336): unsure at all n locations
gctagttttgttacgttaaatactgttctgagaacaacaagcgggtcattggcttttctacctgtgaagtttatngaaaaaccattggaagctttcttcctaaggatcatcctctgcgtgatgatcctgctttctatgttcttaaagaagatatctccccttgcatatttggttcaattgagaagcagaggtggtcatatgcgtgtgcaaagcaactgatcgagagacttgtttacgctgagggtgctgagaatgggcttgagttcaccatcgtacgaccttttaactggattggacctaggatggatttcatcccccgcattgatggtcctagcg

SEQ ID NO: 166455 - DNA, 381 bp, Arabidopsis thaliana nossen
cttcttctctccgatctaccaccgccgcttctcttctcctccgctcctgctcctcgtcctccagatccactctcactctctccgcttcctcctccctctccttcgtcagatctctcgtctcttctccacgtctctcttcttcttcatccctctctcagaagaaatatcgaattgcgtcggtgaatcggagtttcaactccaccaccgccgctactaaatcttcatcttcagatcctgatcagttgaagaacgctagagaagatatcaaagagcttctcagcaccaaattctgccatccgattttggttagattaggttggcatgatgctggtacgtataacaagaacattaaggaatggccacaaagaggtggagctaatg

SEQ ID NO: 166456 - DNA, 373 bp, Arabidopsis thaliana nossen
ggcgattaaaaaacgaaaccccaattttacgtttccacatcaaagtgaaatacggaacttcattctgtttttgtttcatttcatgcctattggcgttccaaaagtaccttttcgaagtcctggagaaggagatacatcttgggttgacatatacaaccgactttatcgagaaagattattttttttaggccaagaggttgataccgaaatctcgaatcaacttattagtcttatgatatatctcagtatagaaaaggataccaaagatctttatttgtttataaactctcctggtggatgggtaatatctggaatggctatttatgatactatgcaatttgtgcgacccgatgtacagacaatatgcatggga

SEQ ID NO: 166457 - DNA, 366 bp, Arabidopsis thaliana nossen
agcaaaatgactagtaaggtcgtcttccttcttctcctctctctcgtcgggctcctcctccctctctacgcctctgcggcggcccgtgtcggtggttggagtcccatcagcaacgttacggaccctcaagtcgtagagatcggtgaattcgcggtctccgagtacaacaaacggagcgaatcaggactcaagttcgagacggttgttcgcggcgagactcaggtcgtctctggtacaaattaccggcttacggtggcggctaatgacggcgacggagtgagcaagaactacttggcaatcgtatgggacaagccgtggatgaaattcagaaatctcacttccttcgagcctgccaataatggtcgc

SEQ ID NO: 166458 - DNA, 369 bp, Arabidopsis thaliana nossen
gtcggctgaggatttgaggaaagtaaagataaagaaagctacgattgaatcagcggcaagaagactaggcggtggtaaagaagcgatgaagcagcttttaaagctgattcttgaatgggtccaaactaatcacttacaaagaagacgcaccaccaccaccaccaccaacctctcttatcaacaatcattccaacaagatccatttcaaaaccctaaccctaataacaacaacctaatcccaccgtccgaccaaacctgtttctcaccttcaacatgggttcctccaccaccacaacaacaagcttttgtctcggacccgggttttggatacatgcctgctccaaactatccgccacagccagagttcct

SEQ ID NO: 166459 - DNA, 377 bp, Arabidopsis thaliana nossen
cgattattttcactgagcgcataacatttttgagacaagaggcgctctctgtctctcttctctctttctctccccctctctccggcgatggttgttgctatggaccaacgcaccaatgtgaacggagatcccggcgccggagaccggaagaaagaagaaaggtttgatccgagtgcacaaccaccgttcaagatcggagatataagggcggcgattcctaagcactgttgggttaagagtcctttgagatcaatgagttacgtcgtcagagacattatcgccgtcgcggctttggccatcgctgccgtgtatgttgatagctggttcctttggcctctttattgggccgcccaaggaacacttttctgggccatctt

SEQ ID NO: 166460 - DNA, 373 bp, Arabidopsis thaliana nossen
  unsure (1)..(373): unsure at all n locations
ggaagcagcttgctacaaaggctgcacgtaagtctgcaccggccactggaggagtcaagaagccccatcgttaccntccaggaactgttgcactacgtgaaattcgtaagtaccagaagagtaccgagttgctgatcaggaacctccttttcaaaaggctagttcttaaaattgccaagatttcaagactgacttgcgtttccagagccatgctgtgcttgcactccaggaggctgctgaagcataccttgtgggtctctttgaggacactaacctctgcgccatccatgccaagcgtgtgaccataatgcccaaagacattcagctcgctcgcaggatcagaggagaacgtgcttaattgtgattgggaagt

SEQ ID NO: 166461 - DNA, 373 bp, Arabidopsis thaliana nossen
cctacatgttatttgcataagcaaaaagaaaaaaaaaacaggcacatggtaagtttttcagcaaatcacgttcccctaattcattgttcagaatatttctccttttctgagtttatagatattatttaaaatttataaatatttttaattatacatattgtaaagcctagacatcctccatacaaaattatagttaaaaaatagaaacaaccagaaaatgaagctatatgcctatatatgatgaggatcatataagaagacaatcctccataaggctaacaatagtgtctctgagggtttcttctataggagtagtgaactcaattcccaaactcttcactttctccacacacactttgtatgccatttcatg

SEQ ID NO: 166462 - DNA, 371 bp, Arabidopsis thaliana nossen
cggacgcgtgggtaaaaattcaagataataagacaattgaaataaatatgttactatactatttgaagatgatagagacgggatatacgaggccgcatggaagaaaggaatagaaacatgaaaaattgatttatttaaacgatgattagaagcttttttcaatacatgcatatgaaattaatgtgttctttccaaaatgcgcacaaataaatttggacagatgcttcttgggaaatagatatcaaaatactaataacataaataaatatgagttttttcgattttggaaacggacccatttgtcgaaaacttgaaatctaatccagagaatccgacagaaagagaagcatccggatccataaaattttagc

SEQ ID NO: 166463 - DNA, 391 bp, Arabidopsis thaliana nossen
gggcgtccacgcgtgcggacgaaacctatttcagaccgtttcctgcacacaatgaaagaaacaacggagttggatcagtttctccgacaccagaaacatacaaccatcaaacatatggtggaggtggcagatcaatgggaaatccaacagaaataaatagacggcaatcacgtgatcatgtcccggcgcggccaatacgcaatcttagagggcaaagtagtgaaagggtatgcataactttaccattttatagtacaaaatatgtgtcacaactcataaatatatatcgctaagtaagtgtatttttctcaattaggtggcgactattcctccatttcctggaacgggttctaacatggaaaatcagagttacacacttatctttgacaaa

SEQ ID NO: 166464 - DNA, 369 bp, Arabidopsis thaliana nossen
gggtcgagtctcatctattatctctttctctttgacactctgggtcctgttcaatggctacactgcccaacagtggcccaacgagtgccagctcgatcaactcaatgcgctcgaaccatcccaaatcatcaagagcgagggtggtcgcatcgaggtctgggaccaccatgcaccccagctccgatgctccggctttgcctttgagcgtttcgtcattgagcctcagggtcttttcttgcccactttcttgaacgccggcaaactcacgtttgttgttcacggaaggggtctaatgggaagagttattccgggatgcgccgagacgttcatggagtcaccggtatttggagaaggtcaaggtcagggtca

SEQ ID NO: 166465 - DNA, 368 bp, Arabidopsis thaliana nossen
tgcatttgtctcaacccaaatgtttgaattttcatactgtatatttaaagtgcataattcaatttttttatttatttattaataatattgtaaaccacaaacacatgtcttgggttttttaggtttttcttttcatggttttgtttgaattatgcaatttaaacatagaatttaatacgttaattaattttttgaatcaaactaaaaccgaaccaaattaaaaccaaaccaaatcaaaccaaaccaaattaaaactgacccaaacactaaccaaaacaaactagttacggttgaatatggttagaattttacaaaatccaaataaactgaactgaaccgaacccaaaccgaacctgaagttaaaccga

SEQ ID NO: 166466 - DNA, 370 bp, Arabidopsis thaliana nossen
aaaagctttgtgcagagagagagagaagaagaaaaatgggttggcttacgaacaagattgagagagaagagctaaagccaggagatcacatctatacttacagagcaatcttcgcttattctcaccacggaatctttgtcggtgggtccaaagttgttcatttcagacctgaacacaaccccatggattcatcaacatcatcaatatcatcatcttcctctgaagatatctgttccatatttcctgattgcggtttcagacaaccggacagtggagtagtcctttcttgcttagactgtttcctcaagaacggctcactctactgcttcgaatatggagtcagtccatcggttttcctaaccaaagtccg

SEQ ID NO: 166467 - DNA, 376 bp, Arabidopsis thaliana nossen
aagaaaccaatgatatcggtttgttaactatgactctctaagggataggattatagtagctagtatacactcgagcataatcttaaattggtaaatattagtattaactaattgctatataaaatagatttgactggtgatattaaaaattagatatacttgggagtaacgaaatcgtaataaatgcatgttttctcattaaacaagataattaaaattgaatttgttttcattttatagttatgatagaatggttaaaaaattaataatttatttctaatgatgaaattgtaatatatgtctgctttggcaattcattcgttttatattaggtattgtttaagaagttaaaattttgttttatcataagtgtcgt

SEQ ID NO: 166468 - DNA, 327 bp, Arabidopsis thaliana nossen
cttcctctgtttcttcgccattctctcagcttttctccttcttcttcggctttgtgagagtgaatggagctgtggacagaagctagagccttaaaggcaagtctaagaggagaatctactatatctctcaaacatcatcaagtgattgtgtcggaagatttaagccgaacttcttccttgccggaagatttctccgttgagtgtttcctcgatttctcagaaggtcaaaaagaagaagaagaagaagttgtctctgtttcttcttcacaagagcaagaagaacaagaacatgattgtgtctttagttcacaaccttgcatctttgat

SEQ ID NO: 166469 - DNA, 372 bp, Arabidopsis thaliana nossen
caaactaatatggaattcattttcattctgaccgaacctttacgcgtgggtaagcgattccattcatagagaaagaaaaggtatagattattatatactgactgaactatgactattcatgattccatcattgaatcaattacacaaactagaggaatgttatggtaaaacttcgtttaaaacgatgtggtagaaagcaacgtacgacttgaattgaaggacattatctgctgtggattttttcatccgccacttttatttttatattaggaatataggtgctcttggctcgacattttgtattctattttacaagagtcctacacttttttgtaatataaaaaagagtacaggatggagctcgaggagaat

SEQ ID NO: 166470 - DNA, 374 bp, Arabidopsis thaliana nossen
ctgaacgacttcaaaactctttttatggtgaactattggatgcaggtgccaccgcttgttccagggcatcagtatgataagcttccaagttattacatcttcgcaggctttgtttgtgtacctcttacacagtcatacattgacagtactttgatttgcaattgtgcaattaaaaatatgcctgaaaaggctgctgaacaacttgtcataatttctcaggttcgttatttgaactacttagataaaaatatttggatgtttggttgtcatgaaggcattagacttactggatttgtcttcttggtgtaggtgttagctgacgacatcaatgcaggatacactgatttcaagaatttgaaggtaattaatgcatt

SEQ ID NO: 166471 - DNA, 307 bp, Arabidopsis thaliana nossen
gatgaagtccttgatggggaataagaattttaatccaaaaataaccaaggtggaattggaagttgccaaggaggacaaaaaggcggtggtggtggtggccaatgaggacaaaaaggctgtggtggtggtggtcaaagaggacaaaacggtggcggtggtggccaaggaggacaaaagggcggtggctgtggtggacaagggtgacagaaaggtggtggtggtggctgacaatgaggacagaaagttgtcggatgccaatgtggacataatggtggcggatgccaacgttgacataagtgcatttgtg

SEQ ID NO: 166472 - DNA, 371 bp, Arabidopsis thaliana nossen
gcgttttaaagtaaggatcacatgtgaatcgagaataactagatgcgtttagtatgggcttaaattccacggcccacaatggattagatatacaaaataaagctcacaagtcacaaattcatccatcaatgacactcctaacttcctatgtgacctttttagtttttagcatttgagtttgagcaacgtcctcgacatacttgagctgcccactaatactatcccttcagacaaaatcttgatgaaatctgcaataagcgttgtcgcaaaaaacataaaaacaatcgttaattccaacagatggaagtcattttctcagatgaacattagaaaatcacatttttgtaaagtactgattcaattttttctac

SEQ ID NO: 166473 - DNA, 376 bp, Arabidopsis thaliana nossen
  unsure (1)..(376): unsure at all n locations
ntgcgaacacaantctaatccaaaaaatcaaaagatgaatgccacaaaggttggggggcttctcgtgattggcgttttgtgtgccattgtcaccgcaaggcaggtcaaagatttgtccacggagaccaaattaggggcctctcttccaaaaactactaccaaaggcattggagctcagctttctgcaactggcacaacttacagcaccagcagtgtcgttagctatgctaatggttttaacaatcccaaaggtccaggggccaattcattcgaaagtgccaacacatttaccagcggacaagtcactgccaagggtcgcaaggcaagagttcttctgcaagtgcttctgccgctgaaggcgatgctgcagctgcag

SEQ ID NO: 166474 - DNA, 377 bp, Arabidopsis thaliana nossen
gccaaaaaccttgaaacctttaaaaaatcgaaactatggctaagctcaggctcgttttcgcaactcttgccctcttcatcctcctagccaacgcatccatctaccgcacagtggtggagttcgaggaagatgatgacgtgagcaacccacaacaaggtaagtgccagagggagtttatgaagcatcagcaactaagaggttgcaagcaatggatccgcaagagagctcaacaaggaagaatcggatacgaagctgatgactttgagctcactcttgatgtcgatcttgaggacgatgagaacccaatggggcctcaacaacagtcatctcttaaaatgtgttgtaatgaattaaggcaagtggacaagatgtgtgtg

SEQ ID NO: 166475 - DNA, 376 bp, Arabidopsis thaliana nossen
  unsure (1)..(376): unsure at all n locations
atggaaatgagcctctcatttttgttgcagccgcggatctgggcagcaggcagaaccaggttgaccggaaccttanaccatttttgatagccggaaacaacccacaagggcaggaatggctacaaggccgaaagcaacagaagcaaaacaacatcttcaatggcttcgcacctgagatcttggctcaagccttcaagatcaatgtcgagacggctcagcagctccagaaccagcaagataaccgtggcaacatcgtcaaggtcaacggacctttcggcgtcattaggccacccttgagacgcggcgaaggcggccaacaaccacatgaaatagctaatggtttagaggagactttgtgcaccatgcgatgcactga

SEQ ID NO: 166476 - DNA, 387 bp, Arabidopsis thaliana nossen
gcgcacaaacacaatctaatcccaaaaatcaaaagatgaatgccacaaagtggggtgcgcgttctcgtgattggcgttgtgtgtgccattgtcaccgcaaggcaggtcaaagatttgtccacggagaccaaattaggggcctctcttccaaaaactactaccaaaggcattggagctcagctttctgcaactggcacaacttacagcaccagcagtgtcgttagctatgctaatggttttaacaatcccaaaggtccaggggccaatgcattcgaaagtgccaacacatttaccagcggacaagtcactgccaagggtcgcaaggcaagagtttcttctacaagtgcttctgccgctgaaggcgatgctgcagctgcagtgactcgc

SEQ ID NO: 166477 - DNA, 371 bp, Arabidopsis thaliana nossen
gtactgttgaaaaaaacaagatcccttacatgattgttgtcttcaccagcgaggagtaatcatcaccactagctgtcaatatctcccccatgtttttgagtacctttgatattccataagataatagaagcaagtagataaaatcaggaaggaaaaacagagcaactcaaccttgctacaactacactggaacaagttaatttgaagactaataccaaccaaatcaagaattttaaagcaaaacccaaaagtttcaaaggcttagttttgtatcatgaaagtttatatcccaataaactcagctagaataaggcacattaagttgtcatccctcactacattttcaccaacaaacaacatcatgacgacct

SEQ ID NO: 166478 - DNA, 362 bp, Arabidopsis thaliana nossen
gcgaagaaaaatgggtcgagtctcatctattatctctttctctttgacactggggagcgtcttcaatggctgcactggccaacagtggcccaacgagtgccagctcgatcaactcaatgcgctcgaaccatcccaaatcatcaagagcgagggtggtcgcatcgaggtctgggaccaccatgcaccccagctccgttgctccggctttgcctttgagcgtttcgtcattgagcctcaaggtcttttcttgcccactttcttgaacgccggcaaactcacgtttgttgttcacggaaggggtctaatgggaagagttattccgggatgcgccgagacgttcatggagtcaccggtatttggag

SEQ ID NO: 166479 - DNA, 380 bp, Arabidopsis thaliana nossen
gaaaaaatggcaataaccaacaaattaatcataacacttcttctcctgaggtccggagctgtcgtccactgcttatccttccgagtggagatcgacgagttcgagccaccacagcaaggagaacaagaaggtccccgtcgccgtcctggtggtggctctggcgagggatgggaggaagagtcgacgaatcatccataccacttcaggaagcggagtttcagtgattggttccagtcaaaggaaggttttgtgagagtgctgcctaagttcacaaaacatgcaccggctctcttccgaggaatcgagaactacagattctcgttggtggagatggagccaacaactttctttgtgcctcaccatttggatgccgatgctgt

SEQ ID NO: 166480 - DNA, 379 bp, Arabidopsis thaliana nossen
cacaggtatcagatgattcaaagaatgtagattacacggctgctgcttggcatcgggatggtctcattctcggaaccggtacttctcaatctgttgttaagatttgggacgttaaaagtcaggcaaatgtggctaagtttgatggacacactggggaagttacagctatatctttctctgaaaatggttacttcctcgcgacagctgcagaggatggtgttaggttgtgggatctgcgcaagttaaggaacttcaaatcatttttatctgcagatgcgaactctgtggagtttgatcctagcggatcttatctcggtattgctgcatcagatatcaaagtataccagacggcaagtgtgaaagctgaatggaaccttat

SEQ ID NO: 166481 - DNA, 373 bp, Arabidopsis thaliana nossen
  unsure (1)..(373): unsure at all n locations
gcgatcaaaacgttttaaaacattttaagtatcgtagaaccatggggagccgtcgaacttaacgtgttacgcgaacttnaccgcgaaaggctcgagcagggagctgcgacatgggagaacagcacacaacatgtcttcatcgtctctaatgaagaaatcagacctgagattggttcaaaaagttccatgcaaaactctcaagaacattctctctaatcttcaaaaagtcattcttggtactaaacttactctcttatttctcgccatccctctcgccattcttgccaattcttacaactacgatcgtccgttgatatttggactgagcttgatagggctgacacctatagctgagcgagttagcttttttaca

SEQ ID NO: 166482 - DNA, 405 bp, Arabidopsis thaliana nossen
  unsure (1)..(405): unsure at all n locations
aatnnncagaagcccggggcgttccacgcgtgcgctctctctctttttttctgcataagaaaacaagctccccaagggcaccggtgcctttttaagtttattcgcacttctaaacctttctcaatcacgctggcgtaataaacggtatcgtttggtcatgaccaccaacaaagtcatagctatatgtcagtcaggaggagagtttgttactatcaaagatggatcgttgtcgtattctggcggcgatgcttttgcaattgacattgatcagaatacttcaatgactgatttcaagtctgagctcgctgaaaattttgggtttggtttggaggcaatgacccttaagtactttctccctggaaacaagaagacccttattaccatctctaaggacaaagatttcat

SEQ ID NO: 166483 - DNA, 374 bp, Arabidopsis thaliana nossen
gcgctttgacatttgtctaattttacaaagatgggtttcaaactcggctctgtcctccttctttttcttccacttctaacagtcacaatcttgtcgggagtcgagcaggcctttgcttccgacaaggcactcctcgtgaccggccgcaacatcacggctgacggtggaaggtcgtcactgagagggaagaagcagaggagagcatcaggatgtaacttgttccaaggccgatgggtgttcgatgcttcttaccctttctatgactcgtccaagtgtcctttcatcgacggcgagtttgactgtctcaagttcggccgaccagacaaacagttcctcaagtactcttggcaacctgaatcttgcaccatcccaag

SEQ ID NO: 166484 - DNA, 374 bp, Arabidopsis thaliana nossen
agagaagataaagaaggctatatcggagattgatcaaccagaggctcttgaaaagttggtttacgacggtcccggtgctcggaatattctcgagattcctccagtggttgttcaggtgaggggttgatcgattgatattatgttttgcttgctgttttgtgtgagtgaacgaacatgacctatactggatttggtccgatattggtttcaaataactatattatatagtagaattagattaatattgattttttaattatgcatgtacgtataaatacgctaattagtaagaaagaaaaagatccatactattattcactacaaaatacataaatttcataacttttaattcaaaagtatttatattggaacat

SEQ ID NO: 166485 - DNA, 371 bp, Arabidopsis thaliana nossen
cagcaatcctacttcaatgggtttaccaaagaagtcctctctaccagtgtcaacgtgccggaagaattgctagggagattggttacgagatcaaaagaaattggtcaagggattatccgaagaatttctccagaccaaatcaaggaacttgctgagcacgctacatctccttcaaacaaacacaaagccaaaaaagaaaaggaggaagacaaagacctaagaacgttgtggactcctttcaatctctttgcaatagatccaatctactccaacgactttggtcatttccacgaggcacatcctaagaattataatcaactgcaagaccttcacatagccgccgcttgggctaacatgacacagggatcctt

SEQ ID NO: 166486 - DNA, 304 bp, Arabidopsis thaliana nossen
aaacaagaacaaaaaaatggcggatacagctagaggaacccatcacgagatcatcggcagagaccagtacccgatgatgggccgagaccgagaccagtaccagatgtccggacgaggatctgactactccaagtctaggcagattgctaaagctgcaactgctgtcacagctggtggttccctccttgttctctccagccttacccttgttggaactgtcatagctttgactgttgcaacacctctgctcgttatcttcagcccaatccttgtcccggctctcatcacagttgcactcctcatc

SEQ ID NO: 166487 - DNA, 359 bp, Arabidopsis thaliana nossen
gcgcagtcaatttgctacaacttagaaaatggcggcggctacttcatccatcgcggcttctctttcatgcccatctccttcttcttcatccaaaaccctttggtcttccaaagccagaaccttggctctacccaatatcggtttcctctcgtcttcttccaagtctctgaggtcgcttactgccaccgtcgctggaaatggcgccactggatcctcccttgccgctcgcatggtttcttcgtctgcggtcaaagcccctgtttctctcgattttgagacatctgtcttcaaaaaggagaaagtttctcttgctggttacgaagagtacattgtgagaggaggaagagacttgtcaagca

SEQ ID NO: 166488 - DNA, 375 bp, Arabidopsis thaliana nossen
  unsure (1)..(375): unsure at all n locations
aaatcctagagagattgagagagcgaagagaagccatcatcagccatggcgatggagaatctactgtccctagctcgccgatctcagaggcgtttattcctcactcaagccacacgatcttcctcttcgttttcagctatcgattcggtgccggcttccgcatctccgacggctctatctccaccgccgccgcatcttatgccatacgaccacgcggctgagattataaaaaataagatcaagaagctcgagaatcctgataagaggttccttaaatacgcatctncacatccgatcctcgcttcccacaatcacatcttgtcagctccggagactcgtgtcactaccttgcccaatggtctacgagtcgctact

SEQ ID NO: 166489 - DNA, 355 bp, Arabidopsis thaliana nossen
gaacttggaggatcaatggccgacgttcgcacacactcgcacgagcttgaagtgcaccctcaacgccagcatgaacgaggcatcaaagtcctttatcctcagagtggcccttcttccactcaagtgctagccgtgtttgtcggtgtaccgataggaggaacgctgctgactatagccggtttgacattagccggttcggttataggactaatgctagcattcccgttggttctcatctttagtccggttattgtaccagcagcctttgtcatcggtctagctatgactggattcctggcttcaggggccataggtctcaccggactatcatccatgtcgtgggtactcaactaca

SEQ ID NO: 166490 - DNA, 372 bp, Arabidopsis thaliana nossen
gcggagaaaaagaacttacatcgaaccagagagaaactttctttctggtggggaaattggaaaagataaaaagacgactttggtcgacacagcttgtccttcaggattcaccatggattatctccaaggttaatagattgagatataagagtgtcatgggatagagattttggatgctactttctaacgacgtcgttttaggtactctgtttatttctatcctgtgaagcccaaaaacggcctaatatttacacattagggctttagaagaaaacgctagggttttaaaaattgggttttttctttctccttttcggcttgtcaattttgattttgggttacaaacttactgatctagataaaacccagacc

SEQ ID NO: 166491 - DNA, 375 bp, Arabidopsis thaliana nossen
gcgcgaagtctgtgtcatactttatagtcgtgacggagaactcatcaagacggggccggaggataaatccaaggttcgagacatggcagagaggtttagcaaactaaacgatagagagcgacgcaagaaaagaacaaacctttctctgtttctacgtaagaagaacctcgacgacaataaattgtctgagaaagccttagagatgaatgattcattagaaagtggtctacgggttctacaagataagcttctgttactagaacccgagaaaaaccagaccgagttaggtcagagccccgtcatcaacaatggacagaaccattggtgaatattggtgtgtcaaatacagagcaagacctatcgacgtcatcattg

SEQ ID NO: 166492 - DNA, 377 bp, Arabidopsis thaliana nossen
ggatgagaacagagagattgtctaaggtgttagagaagaagacgaaggagttggaggagattcggggagcgagaggttctagtccgacgtctaatatggttgaaccggagttgttgtttttgagagagagtgtgacgcaagaaacagaaaaacatgagagattgataagagagttaaacgacgccgtatcgatgagtttgcaagagtgtatggttcctgtctttgaggctttgggagatttttgttttgctaattttaaagcatatcagaacattgtaatcgttaccacataaactctatgattgcgtcaatcataaaaataaataatgtataggaaattaaataaagaatttcatcagatttcgtatattattata

SEQ ID NO: 166493 - DNA, 377 bp, Arabidopsis thaliana nossen
ggttcttgtgctgcagggttttttcaatgaacatgagcaataaacgtaagcagcaaccttcgtatattgctgatcatttcagcagtttggatcaggtgataacttctctgagagaagctggacttgaatcttcaaatctgattctaggaattgactttaccaagagcaatgagtggacagggagatattcattcaatagaaaaagccttcatgccattggtaaaagacagaatccatatgagaaagcaatatcgattattggtcgtactttgtctccctttgatgaagatgatcttataccttgtttcggttttggcgatgtaacaacgcgagatcaatatgtattcagcttttatcccgagaacaaaagctgcgac

SEQ ID NO: 166494 - DNA, 373 bp, Arabidopsis thaliana nossen
atcggaagccaccctttttttttattttacttcgaatattgggggcggtgcaataattcgtggcaatctcacaagccaagaatttaacagctatacaaaagtagttgttaatgcggcaggaccgttctgtgattccattaggaaaatgattgatgaagatacaaaaccaatgatttgtccaagcagcggagtacacatagtgctgcctgattactattctcctgaacgcatggggtagatagtccctaaaactaaagatggccaactcgtgtttatattaccgatgttcgcaagaacagtagcaggcactacagactctaacacttgaatcacttcactttcagaacctcatgaagatcatattcaatttata

SEQ ID NO: 166495 - DNA, 370 bp, Arabidopsis thaliana nossen
  unsure (1)..(370): unsure at all n locations
cggacgcgtgggttgcttttgatctctgatgctgctcaagctgataacgatgagaaaatattctctcacatgaagccaaacagcattcttggtttatcacacgggtttctactagggcatttacagtcctcgggactcgatttcccaaagaacatcagtgtggtcgctgtatgccctaagggaatgggtccttctgtgaggaggctttacgtccaaggaaaagaaattaacggtgctggaatcaacgccagttttgcagtccaccaggatgttgacggtagagccgccgatgttgcattgggatggtcagtagcacttggttctccgtttacttttgctactactctngaacaggagtacaggagtgaca

SEQ ID NO: 166496 - DNA, 215 bp, Arabidopsis thaliana nossen
gggaaaacccttttcgctccgcttagccctatccccctctaggagtatttgagtgatgggttctataggaactggacgatcctatttggtcaaatacctagcgacaaactcctatgttcctttcattacagtatttctgaacaagttcctggataacaagccgaaaggtttttttattgatgatatcgatattgatgatagtgacgatatcatca

SEQ ID NO: 166497 - DNA, 389 bp, Arabidopsis thaliana nossen
tccgcgggtcgcacgccacggcgtcacactgacggcattaccatactacattccgatcgcagattctgcgctacaggtacatgaactggacaacttattctacctgaagcactcaagcttttgccattatatactctcgccttaaccaaaggtgtggggttacgaatggacgggagaattgatgaccgatcattttggataaaccatgtgtcttcattgtccactcctttggctattccgctagtttatccaaggatgattgctgtccatgatcttgatgcaaatgataatgaagaaaatgtggttccttgtccaatcccattacaaagtgaacaccttagcgatgagggagtctattttcttgagaacggtgaagatggtttgatata

SEQ ID NO: 166498 - DNA, 371 bp, Arabidopsis thaliana nossen
gataaactattcataccaaacgggttatatccattgataaggggtgaagagtttaaccatagataatctcttaaccatcccatcaaataagtggaagattcattaaactgtgaaacgttaccctgccataatgtgatgtgtttccaatgccaataaaaagtaacccatccaatagtatttaacatccagaaaactgccaaataaaatgcgtcccaagccgaaatatcacaagtaccacctcgtcccggaccatcgcaaggaaaactatacccgaaatcctttttatctggcattaacttggaaccacgtgcatctaaagcaccttttactaagatcaatgtagttgtatgtaaacctaaagcaatagcatg

SEQ ID NO: 166499 - DNA, 370 bp, Arabidopsis thaliana nossen
gaactgttgttgttgtgctctttggtttcatcgagagagaacctaaacgccgatctgaaccaataacaataagaagacgaatggcgtcttcgtcgttctcagtcacatctccagctgctgctgcttccgtctatgcagtcactcaaacctcctcgcacttcccaatccaaaaccgctctcgcagagtttctttccgtctctctgctaagcccaagcttcgctttctctccaagcctagtcgcagtagctaccctgtggtgaaagcacaatctaacaaggttagtactggtgcatcatcaaatgctgccaaagttgatgggccatcatcagctgaaggaaaggagaaaaactcattgaaggagtcgtctgc

SEQ ID NO: 166500 - DNA, 379 bp, Arabidopsis thaliana nossen
atcaccatcgacatatcttataaccgcaaccaaaaaaaaagtacttatcgtgaaaaactaatctaaagagactaagcttcttttgagatggcaccaacggagatgaacatcgaaagaaaggtagaggctgacgtggcggtgattcctaatgatggaaaaagggcttacgtcactttcctagctggtaaccaagactattggatgggtgtggttggtttagccaagggacttcgtaaggtgaaagcagcttatcctcttgttgaggctatgctcccagacataccgaaagaacaccgtcaaatcttggtggctcaaggatgtatcatccgggagattgaacgcgtttatccgttcgaaaaccaagctggttatgctatgg

SEQ ID NO: 166501 - DNA, 378 bp, Arabidopsis thaliana nossen
cccgattctctaatcgaaaccgtttctctctttttgatcagatctcagatctttcgctctttgattcttcttccttagatcgattctctctagaaacaacaatggcgtctgggcgtgaagagttcgtatacatggctaagctcgcggagcaagcggagaggtacgaagagatggtagagtttatggagaaagtctccgccgccgttgatggcgatgaactcaccgtagaagagcgaaatcttctctccgtcgcttataagaatgtgattggtgctcgccgtgcctcgtggcgtatcatttcatcgatcgagcagaaggaagagagccgtggtaacgatgaccacgtcacggcgatccgtgaatataggtctaagatcg

SEQ ID NO: 166502 - DNA, 366 bp, Arabidopsis thaliana nossen
ctcactactcttactgtaatcccttagatcttcttttcaaatggcaatggcgtccgttgatgttgagtatcgctgcttccgcggaggtctagcatgggccactgatgacagagctcttgagactgccttcgctcaatacggcgacgttattgattccaagatcattaacgatcgtgagactggaagatcaaggggattcggattcgtcaccttcaaggatgagaaagccatgcaggatgcgattgagggaatgaacggacaagatcttgatggacgtagcatcactgttaacgaggctcattcacaacgaagctgtagccgcggaggccaccgtggaggtggtggcggtggatacctaatcagatg

SEQ ID NO: 166503 - DNA, 372 bp, Arabidopsis thaliana nossen
gcgcttatacttttgtttttcctgatcaatgagtatactatctacggtcacggccgagtccaagaccatcttcgcgaatagtggttgttgctgatgaccattgcaatttgtgttgtcattggaggaatttccaccgtcctctggcatgtaaacgctttcgacacaatcttctccatataactcggtgaagagatgaatcacctcagcatgtgacacgggaaaaccacgagaaaacgttaggaataccgtccgttctttatcagtcgcgacatggttagcgttccagccccaaagaccatgaggaaaaagaaatgaatttgtgtttggaagattatccctactagcaacgatattaggcaatacgttgatgct

SEQ ID NO: 166504 - DNA, 368 bp, Arabidopsis thaliana nossen
ctctacctaaccaatcctaagctcatctctctatctccaatggagtccgccgcactatcccgaatcggtctcgccggactcgccgtgatgggccaaaacctcgccttaaacatcgccgagaaaggcttcccaatctcagtctacaatcgaaccacttccaaagtcgacgaaaccctagatcgagccgccgtcgaaggaaacctcccagtctccggccaatactctccccgcgatttcgtcctctcgatccaacggcctagatctctcatcatcctcgtcaaagctggagctcccgttgaccaaacaatcgacgccttctccgaatacatggagccaggagattgcatcatcgacggtggaaacgaatg

SEQ ID NO: 166505 - DNA, 369 bp, Arabidopsis thaliana nossen
attaaggtttgatcctctcacttaaattaggattatatatgggtacatgtgctagaagagcatatggattcgggagagctgacgaggcgactcacccggactccattagagccactttggctgagtttctttccacgttcgtcttcgtctttgctggagaaggctcaatcctcgctctagacaagttgtattgggacacggcggctcacacggggacaaacacgcctggagggttagttctggtggcgttagctcatgcattggccttgttcgcggctgtttctgcagccatcaatgtctctggtggccacgtcaaccccgctgtcacttttgctgctctaatcggaggcaggatctcggtcattcgag

SEQ ID NO: 166506 - DNA, 369 bp, Arabidopsis thaliana nossen
aacaccaactcttaaggaaaacatctaagttatggttaagtgggggcgggcaatttaaagctacgtgtccagcttaagacactcaagtctcacatctgtccctttttacttcgacttcgcttcttttggcttcttttaaactctctctatctctctctttcttcttcacactttgttgttaatttcaagtgtttgatcataatggcaacatcagctcgtagagcataccgtttcggtagagccgatgaggctacacaccctgactccattagagcaactttagctgagtttctctccacttttgtcttcgtctttgcagctgaaggctctatcctctctctcgataagttgtattgggaacatgcggct

SEQ ID NO: 166507 - DNA, 368 bp, Arabidopsis thaliana nossen
cccccgagaaaacgaaaaccctagtttcagaggcatctccagacgaccgaaaatggcggaaggactcgttttgaagggcaccatgcgtgcacacactgacatggtgacggcaatcgccaccccaatcgataacgcagacatcatcgtctcagcttcccgcgacaaatccatcattttgtggaaactcaccaaggacgacaaagcctacggtgtagctcagaggcgtctcactggtcactctcacttcgttgaggatgttgttctctcctccgatggacaattcgcgctttccggcagctgggacggcgagctccgtctttgggatcttgctgctggtgtctacactcgtagattcgttggacacacca

SEQ ID NO: 166508 - DNA, 363 bp, Arabidopsis thaliana nossen
aatgattgcatcaccatactacattcctatcgtaaattctgcgctacaggtacatgaactggacaacttattctacctgaagcactcaagcttttgccattatatactctcgccttaaccaaaggtgtggggttacgaatggacgggagaattgatgaccgatcattttggataaaccatgtgtcttcattgtccactcctttggctattccgctagtttatccaaggatgattgctgtccatgatcttgatgcaaatgataatgaagaaaatgtggttccttgtccaatcccattacaaagtgaacaccttagcgatgagggagtctattttcttgagaacggtgaagatggtttgatatat

SEQ ID NO: 166509 - DNA, 155 bp, Arabidopsis thaliana nossen
atttttcactatttttatgattcagctccaaaaattccccaccaaatggagaaaatagcccaacgatggttttcgatgagcggcactagtagcagcggagatcatcagcagcaaccgctgcaaacaagaggaacgtctctgctagctgatcggaa

SEQ ID NO: 166510 - DNA, 373 bp, Arabidopsis thaliana nossen
caaagcctttctctttaaattcgttatcgttttttttattttatcaatggaatctttttatttgttttgttcttcctcgattcaacactcgatgctgtgacaaagcccagattttggccggaaagttttgtgtgtttccggcgaagaatgcgaagaaaccggaagaatctgtaacggaatctaagctaaaagttaaagtacgatgtcggtgtacgacgctgctttccttaatacagagctttcgaaaccgacatcgatttttggtctccggctatgggtcgtgatcggaatcttacttggatctctaattgtcatcgcactctttcttctctccctctgcttaacttctcgccggaaaaatcgaaagccgaga

SEQ ID NO: 166511 - DNA, 115 bp, Arabidopsis thaliana nossen
cgcaacccttccgcaggtaacaaccttatacctgttagcttttaacgagggaccaagaccggggctgggaaaagaacctcgcagctggacttgaaaagcttcatgaacactaatc

SEQ ID NO: 166512 - DNA, 314 bp, Arabidopsis thaliana nossen
aatcctcaaaacagagtaacccaaaaaacagagcagtctctaaaaaatgggaagaaacctcactaaaatgggttcaacggcagagacacaattaactccggtgcaagtcaccgacgacgaagctgccctcttcgccatgcaactagccagtgcttccgttcttccgatggctttaaaatccgccttagagcttgaccttcttgagattatggccaagaatggttctcccatgtctcctaccgagatcgcttctaaacttacgaccaaaaatcctgaagctccggtcatgctcgaccgtatcctgcgtcttctta

SEQ ID NO: 166513 - DNA, 370 bp, Arabidopsis thaliana nossen
ttgagttcgaatccacgcaaggaaccaaatcatctccagcggggataggggtttctttctttttctgatccttaatcgtcgcttgaggttttggttttctctttatgggaatttctaggggtttctaaattttccctgtttctttggaatctacaagttgtttcgttcccaatataatgtcagattgagaaattcgaatcaaacccatttcccaatttgttgtttttcattcaaagatcgaaactttgtgtttattgactgcattttcaaagatgtgtatttcaaaagaagacgaagaagatccatcaagaaatcgaaggaatcaatcaccattatcgcttcctcaaactctgaaacatttccaaaaaga

SEQ ID NO: 166514 - DNA, 375 bp, Arabidopsis thaliana nossen
gcggtttaatataaataaaacagtctctgtgtttgagacaactatgcgagtgcttggggggttactatctgctcatctgattgcaagtgattatgcaacgggcatgagaattccatcttacaacaatgaattactagttttggctgagaatttggcacggagaatgcttcctgcatttgatacaccgactggaatcccatttggatctgtgaatttgatgtacggtgttgacaaacatgaaagcaagataacatcaactgccggtggtggtactttgtctttagagtttggcgtgcttagtcgtttaacaaatgatcctgttttcgaacaagttgcaaagaatgcggtgaggggactatgggcacgtcgttcaaa

SEQ ID NO: 166515 - DNA, 373 bp, Arabidopsis thaliana nossen
gcggaatatgaatgttaatggtggtttgtttcatggtatccactgttctccgcacactgttcttgaagaacgtggttgttttcgtttacaaggagttgaaacagacaatgaaccaggaaggtgccgaagaacagatgggaagaagtggagatgcagcaaagatgttttgtctggtcagaagtactgcgataagcacatgcatagaggtatgaagaagaagcatccagttgatactactaactcacatgagaatgccgggtttagcccgttaaccgtggaaacagctgttagatcggttgtgccttgcaaagatggagatgaccagaagcattctgtttcagtcatgggaattacactgccccgagtttctgat

SEQ ID NO: 166516 - DNA, 374 bp, Arabidopsis thaliana nossen
gacgaaaggaaaagcatgtttaaactctgtctcgttctcgtcttggttggtgcaggagatgcaaatccggttaagtccggttcttgtagttgctccgggaatatatcagcgagcgatgtcgatcgagttcatttcgcgatgaacttggagttcaccgaggcggagttcttcttgaaaggggctaccggaaaaggacttgatgcctataacgcgacacttgctaaaggcggaccaccgccggtaggggccaagaaagccaaccttgatcctataactaaccgaatcatcgaggagtttggttatcaagaaatcggtcatcttagggcgattacggatatgacgggaggaattccacgtccgctaataaatctgac

SEQ ID NO: 166517 - DNA, 381 bp, Arabidopsis thaliana nossen
gcgagcttatcgcggcgattagttcccggcgaagaagaagaagagagataagagaatggcgactaatggatctgctagctcagcgcagctctctcagaaggaagctgatgtcaggatgatgtgtgccgctgaggttcatcttggaaccaagaattgcaattaccagatggagcgttacgtcttcaagagacgcaacgatggtatttacatcttcaaccttggcaaaacatgggaaaagctccagatggctgctagagttattgttgccattgagaacccacaggacatcatcgtccagtcagctaggccctatggacagagagctgtgttgaagtttgctcagtacactggagccaatgccattgctggaagacacactcc

SEQ ID NO: 166518 - DNA, 391 bp, Arabidopsis thaliana nossen
cgccccacccacccacgcgttcggtttaatatcaaatagaaacagattttgatactgtgtctacaaggggcatgggtcaatttttttatttatttattaataatattgtaaaccacaaacacatgtcttgggttttttaggtttttcttttcatggttttgtttgaattatgcaatttaaacatagaatttaatacgttaattaattttttgaatcaaactaaaaccgaaccaaattaaaaccaaaccaaatcaaaccaaaccaaattaaaactgacccaaacactaaccaaaacaaactagttacggttgaatatggttagaattttacaaaatccaaataaactgaactgaaccgaacccaaaccgaacctgaagttaaaccgaaatgt

SEQ ID NO: 166519 - DNA, 413 bp, Arabidopsis thaliana nossen
  unsure (1)..(413): unsure at all n locations
ccgggnncgacccacgcgttgcggcagctctgcattcttgttgttttcttctagtactcttgcagtcacacgaaatacgggcagtgaggagagagtagtagtgatatatggcaactcggacttaaacgagaatcgggagcaccgaagatgtgtcgatggctacaacaanaagatacaaacatcttcagtgagacacttggatgttccatgaccttttccatctacttccctccttctgcttcttcttcccataaatctcctgtgcttaactgcttttttggcctaacttgcacggacaaaaacttatttataaaataagagctcaacgtgctgcttctacttacggcattgctcttgatgctccagacacttctccaagaggactaaatgttgaaggggaggcaaacagttac

SEQ ID NO: 166520 - DNA, 373 bp, Arabidopsis thaliana nossen
gcggtttcgtttgatacacatttgaagaaagaaatggcatccaaccaacagagctacagagctggttagaccagaggcaaggcccaagaaaagactggacaagctatgggaacgatgagggacaaggctgaggagggccgggacaagacttctcaaacggcccaaacagcccaacagaaggcccatgagacagcccagtcagctaaagataagacatctcaaactgcccaagcggctcagcagaaggcccatgaaacggcccagtcagcaaaagagaagacatctcaaactgcccaaacggcacagcaaaaggcccatgagacgacgcaagcagcaaaagaaaagacatctcaagctggcgacaaagctcgcg

SEQ ID NO: 166521 - DNA, 357 bp, Arabidopsis thaliana nossen
taggaaccatcgaagaacacgaggcggagctatgacgccgctttctatatcggcagcgccttcgccgccgtggccacttctctctccgccactatcttcatcgtcgttaaacagagctgctccgtctattttttcccctttctctcgaatcaaccatggcttctcgtgctctttcatcgccgttcaacgcttcgctctaagccgcaagacaaggaagcagttacaggtggtggctatggctcctgaggaagagaagctcactcgtcgcaatcctctcgatttccctatcgaatgggagagaccaaagccagggaggagaccagatatattcccaaagtttagtcctatgaagtcacc

SEQ ID NO: 166522 - DNA, 374 bp, Arabidopsis thaliana nossen
gcgcttagaatgcaatcagctatggcgctttcgttctcccagacgtcgtttggaagaccaaaccacgtgctcggatcatctggttctgttttctctacgcccagaagtctccggttctgcggactccggcgggaagcgtttggtttctcaacgtcgaatcagttggctattcgcagtaaccgaatccaatttctaagtaggaagtcattccaagtctccgcttctgcttcaagtaatggtaatggcgctccaccgaaatctttcgattacgatttgatcatcatcggagctggagttggtggccacggagctgctttgcacgccgttgaaaagggacttaaaacagccattattgaaggagatgttgttggagg

SEQ ID NO: 166523 - DNA, 373 bp, Arabidopsis thaliana nossen
gcgttaagaaagaccaacacagacacggaagaagtagcttggttcttctctgtgtgaaggtgaatgcgggagatggggactggagattctgcttcgagactgattctctggttctgcttagggtttttgattctaggtgttggatttgtgcaatgtggagttacttatgaccggaaagcacttctcattaatggacagagacgaatcctcttctctggctccatacattaccctcgaagcactcctgatatgtgggaagatttgattcagaaggcgaaagatggaggcattgatgtgattgagacgtatgtgttctggaatcttcatgagccttctcctggaaaatacgattttgaagggagaaatgatttgg

SEQ ID NO: 166524 - DNA, 379 bp, Arabidopsis thaliana nossen
gcggataaactcaaatccatccatttctggagagtgagaagaggggaataggggaagattactgtttaagcgaaggaaccgagggaggaacaagcacaacaaaagacacgtcaacccatataaatgcttcaactgatgcaaatgctgccctaaggacaaggccattaagaggttcattgtgaggaacattgtggagcaggctgctattagagatgttcaggaagctagcgtctatgacggatacacattgcctaagctatatgcaaagacacaatactgtgtttcctgtgctataaacttatacgtggtgggagttcttaatcgcaaataaacgtaatattgtcccttatgccacgactaaaatttttgcagaatagct

SEQ ID NO: 166525 - DNA, 382 bp, Arabidopsis thaliana nossen
ccggatggagtcactttctctacaggaaaccaagataagacttgtcgtgtatgggacagtgcgtaacctatctcagtctgttgctgtcttgaagggtaacctgggagcaatccggtcaatccgctacacatcagatggaaaatacatggccatggctgaaccggctgactttgtccatgtctatgatgtctcaaacgggtatgaaacagagcaggaaatcgacttctttggggaaatctctggaatatctttcagccctgacacagaggcgctatttattggggtatgggaccgcacttatggtagcctccttgagtttggtcggcgcaggaactattcctaccttgactcgtatctttaagctagaagagaagtatacaca

SEQ ID NO: 166526 - DNA, 420 bp, Arabidopsis thaliana nossen
ccgcgccggaaccggtccggcgtacccagggcgcgacccacgcgtgcgtctaaaaccacaccaaccccttcctcctccattttttagtgggtgaaggggccttcttcttcttcacctaatacttcttctctatctctctcgccaaagaatcgtacttcttctctcaggttttaaggagatgggatctggtcaatggcacgttgagaaaaggtctacgtttaggaatgattcgtttgtgagagaatatggtatagttccagaaactgggtgtctttcaatcatagttcttggtgcttctggtgatcttgctaagaagaagacttttcctgctctttttaacttataccgtcagggatttctcaatccagatgaagttcatattttcgggtatgcgaggactaagatttctgatgaagagct

SEQ ID NO: 166527 - DNA, 381 bp, Arabidopsis thaliana nossen
aaaaagaaaatggttaagctcagcaatctcctcgttgcaaccttcgggggtctcctcgggcttaacggcgtgccttgcgaggcaatcacttggggttcctcctcagctacagaacgagtgtaacctcgacaacctagatgttctccaagccaccgaaactatcaagagtgaagccggtcagatcgagtactgggaccacaaccaccctcagctccgatgtgttggtgtttccgttgctcgttatgtaattgaacaaggcggtctttacttgcccaccttcttcacttccccaaaaatttcctacgtcgttcaaggaacgggtatcagcggaagagtggtccctggatgtgccgagaccttcatggactcgcaaccgatgca

SEQ ID NO: 166528 - DNA, 283 bp, Arabidopsis thaliana nossen
  unsure (1)..(283): unsure at all n locations
gaatggttngaccgatccaagctcaattgcagatgaatttctatgccaattcttgtcctaatgctgaaaagattgttcaagattttgtttcaaaccacgtttctaatgctccttctcttgctgctgctctcattagaatgcatttccatgactgttttgtccgaggttgtgatggatcagtgcttataaactcaacgtcaggaaacgcagagagagacgcgactcctaacctaacggttcgagggtttggcttcatcgacgcaattaaatctgtgcttgaagc

SEQ ID NO: 166529 - DNA, 383 bp, Arabidopsis thaliana nossen
gcgcgaaagaggcgaaattaagaccgaacattacttacctattcacagagaggcaccggcggtggttgatctagctactgggcaagaaatcctggccactggtattaaggttgttgatcttcttgctccttaccaaagaggaggaaagattggtctctttggcggtgctggtgttgggaaaactgtgcttattatggagctgatcaacaatgttgccaaagctcatggtggtttctctgtgtttgctggtgtgggagaacgaacccgtgaaggcaatgacttgtacagagaaatgattgagagtggtgtcatcaagctaggcgaaaagcagtctgagagcaagtgtgctctagtgtacggacaaatgaatgagcacccgggtg

SEQ ID NO: 166530 - DNA, 374 bp, Arabidopsis thaliana nossen
  unsure (1)..(374): unsure at all n locations
gcgattggttntacccaaactaaatgagatgcagacgaagttggtcttgcgggggctaacagtgtagctaccgaagcacttcatggagatatatctcagcatcaaagagagagaacactcaatgcttttcgtcaagggaaattcaccgtattagttgccactgatgttgcatctcgtggacttgacatccctaacgtagatctagttatccactatgaacttcctaatgacccagaaacttttgtgcaccgtactggtcgtactgggcgttcagggaaagaaggctctgccattctcatgcacaccagtagccaaaagagaacagtgaggtctctggagcgtgacgtatgctgacattttgaattcattagccc

SEQ ID NO: 166531 - DNA, 274 bp, Arabidopsis thaliana nossen
ccgggggcacacgggggcttggattggccaaggggttcttggtatcgcattgatcataactgtactacagattgttcatgtcccaaatcttaagggcgggacagatcttctcagctgtgccttattgtacgatatcttctgggtgtgtgtctccaagaagttgttccaccaaagcgtaatgattgtcggagctcgaggtgataagagaggagaagatggcatcccgatgctactgaagattccgcggatgttcgaaccgtggggaggctacagc

SEQ ID NO: 166532 - DNA, 385 bp, Arabidopsis thaliana nossen
gcggacaaaaggtcgtcggcatcttttgcagaatcaaaaggctatagctgagggtcatgaggggctagccctaatagaatatctctaacgaaagcaccaccttggtaccctacacaatccctatttttgatgagaacgattacatttgtgaccgtcggttgcaaactttgtaccgtgaggaaagaggtgagactcgctgtgtagctctgagtgagaacaagcactacaaaacaccagacaaccaccacaaaccttgctaaattgctcactacattctcacctatatacacatgcacaagttttcactttatcattaacaatcataaaataagttgagatatctaaaaaatattgacaatgttattatgtgttgagataaaagcta

SEQ ID NO: 166533 - DNA, 374 bp, Arabidopsis thaliana nossen
ctttcttaaaaatatgaaaattaacatcagagattccaccatggtccgggctgccaccgagacaccaatcactaatctttggaactccaacgtcgaccttgtcatccccagattccatacccctagtgtctacttctacagacccaccggcgcttccaatttctttgaccctcaggtcatgaaggaagctctttccaaagcccttgtccctttttaccctatggctggtcgcttgaagagagacgatgatggtcgtattgagatcgattgtaacggtgctggtgttctcttcgttgtggctgatactccttctgttatcgatgattttggtgattttgctcctacccttaatctccgtcagcttattcccgaag

SEQ ID NO: 166534 - DNA, 373 bp, Arabidopsis thaliana nossen
cggacgcgtgggtaccatcgctacaaggaggatatccagttgatgaaagagctgaacactgatggttttagactttctatttcgtggccaagaatatttcctcatgggaggatggagaaaggaataagcaaagaaggagttcaattttaccacgatcttattgatgagctccttaaaaatgacataacaccattagtaacggtttttcattgggatactcccgccgatttggaagatgaatacggtggctttttaagcgaacgtattgtgcctgattttgtggagtatgcaaacttcacgttccacgagtatggggacaaagtgaaaaactggattacgttcaacgagccatgggtctttagccgttcgggct

SEQ ID NO: 166535 - DNA, 360 bp, Arabidopsis thaliana nossen
gagaaaattcagcatttttgatagctcaatcacttgattctttccaaaggggtttccggagatcacaaaggccaagtaataatggcgaaaggagttgcagttttgaacagcagtgagggtgttacggggactatctttttcacccaggaaggcgatggtgtgaccactgtgagtggaacagtttctggccttaagcctggtcttcatggtttccatgtccatgctcttggtgacaccactaacggttgcatgtctactggtccacatttcaaccccgatggttaaacacacggtgcccctgaggatgcttatcgacatgctggtgatctaggaaacatcactgttggagatgatggtatg

SEQ ID NO: 166536 - DNA, 58 bp, Arabidopsis thaliana nossen
acgcagaccctctctctgactatatatctcctccttccataatttctgcaaaccctaa

SEQ ID NO: 166537 - DNA, 384 bp, Arabidopsis thaliana nossen
  unsure (1)..(384): unsure at all n locations
gcgctcacacaggcatnaaaagcagaaacaaatatatacatcaccataatcatcatcatcgtgagaaccttcatctttttgagcaacaaaattatgggtttctcgggaatttggttaaatctttatgtggtgtttggatctttaatggtttttgagagaatggtggtgatgaaggcacagccactggttccagcaattttcatatttggtgattcggtggttgatgtgggaaacaacaatgatatctacacaatcgtcaaagctaatttccctccttatggaagagattttacaacccatacacccaccggacgcttttgcaatggaaagttagctactgacttcaccgctgagaatcttgggttcaaatcatacccacaagct

SEQ ID NO: 166538 - DNA, 261 bp, Arabidopsis thaliana nossen
cccaaacaaaaaaaaacttcaacgccgtttcttcttccattaatctcgtctctcaatcaaccaaaagcttcccatctaaaagccgttggtttgatttcttaggcaaccattatttggccaccttgtttatgaaccgcttatgcgggaaacccaaccaggagactagtcctctccaaacgttagacaggctcaatgagactcttgagatgttagagaagagggagaatgtttttctcaagaaagctactggaggggttgaaa

SEQ ID NO: 166539 - DNA, 278 bp, Arabidopsis thaliana nossen
caggccctctctctgtctatctctctcctccttcaataatttctgcaagcgctaacttggtcattcggcgctcaagtgtctctccacctcttcgagatttggtgcgatgatgttgcgtgctgtttttaggagagctttcattagaggctcttcttctgcttcgggattgggaaaatcattgcaatcctctcgtgttgcagtgtctgctcaatttcattctgtttcagcaacagagacgttggtgcctcgtggaaaccatgctcatagcttacatcacc

SEQ ID NO: 166540 - DNA, 373 bp, Arabidopsis thaliana nossen
ctataacattgattgatgcctgttattccctacgcgcatgaggcatagcgggagctgtggcggaaagtggaatttcaaccaacagtctgtatagagcagacaagaggtcctccggctctgagaactattactagctctttacgctctcattaaggcctaacataccatgagctgctctttctatgaactgaagcgctggccaactctagcaagcgatataggacatgctgcaaatgaacctctttaatgattgacagacgaaagccggcaaacggctttgctggtggtggatatcgaatttagctacctcacgggtgcgttctgcaggagactccatcttgcacccgggagagagctaccatacccaagggat

SEQ ID NO: 166541 - DNA, 372 bp, Arabidopsis thaliana nossen
ataccttaagcatcttttccaagccccactctaaatatgggcataatgtataatattatagtggatttgttcaaccacaattacatgtaattattttccaaatttaaatccgaattttagatactaggttgaaaaaaccgaattttaatactcctttgggatgaagtacgatgtatttaaggctgctcattttctaactgaaataaatagttatcttatttttatgtagggactattaacaaaaaggctaaaaagagtttataagaagaaataggctaatcttttgataagaaaaatatacagtttctgattcaaggtttagaatttatatttgttggattagcttttaggcttctgagtttagttttaagg

SEQ ID NO: 166542 - DNA, 374 bp, Arabidopsis thaliana nossen
tattagtccatttgatgaagactgatgaatcgctgttctaggtcaatgggagcacaggataagcaaaaatatacctggataacacagagtatatcaggaatcttgttttgggactcatcaacaggacctgtgtttaaaagcagttaggaatagttctgaaaattaaacaggttgggaaaaggacaagctgcataccaagtaacacaaacaaatgatgagcaggagcatcagccagcagttgaagatcattaggagaattcttgtagtgagacgagacacatagcgccatcattctctgtaggatgcacttatatcagtctattgtcaaaataatgtacggatctcaatcaactacatttacctgtagaaacaat

SEQ ID NO: 166543 - DNA, 344 bp, Arabidopsis thaliana nossen
acctacctataccataaatgtatcctgtgtcaagcactacagaaccgggaacgggggcaatttataagatctatggtgtacctaccaaccgaacagcatctcgaatgtgctgttgcactacttagcattttgtctaacgaaaatgatgaaagcaagtgggccatcactgctaatggaggtatacctccactaagccaaattctatagactagaaacaccaaagccagggaagactcatcaactatccatatgaacttgcgcaatcatagcgaagatatacgtgcttgtgttgaatgtttctatgctgtccctgctctcttatggctactaaagaatggttgtgc

SEQ ID NO: 166544 - DNA, 374 bp, Arabidopsis thaliana nossen
taattaccaggagtaagcgttatagcctgtttccaatactcagcggctggagcgaaccaagcctccgccatttcagaatctccttgttgaatggcctgttctccacggtcggaataggcggatcaattccctccctgagaaccgtacttgagagtttcctacctcatacggctcgacaaccaactcttttgttttggtgtaccagttttttaactttaacctactttgaactttatatctaattgaatgtctaattgaatgagatttcttatagattttttgtttttcttggattaaacaaaagagagtaattacatgagtttcaaactttcattttgatttaattaatatattaattaatataataagtttta

SEQ ID NO: 166545 - DNA, 179 bp, Arabidopsis thaliana nossen
caaaaagactcatatatataaataattagagtcattaaatgtggattcagcattaaatgaaacaactcttcttctctgtacaatttctcttcacaccttcaccaaattctttgacttcaaaaatcttataaaatttatatatctccaaaaccataaaaccaaaacgagttttcacaaaa

SEQ ID NO: 166546 - DNA, 364 bp, Arabidopsis thaliana nossen
  unsure (1)..(364): unsure at all n locations
tcgctgatgagtaaacctccgatttttactcccaaacaacctcnccaaaccagaatcagcgaactttaacagaccattctctccaatcaacaaattattcggcttcatatccctaacaaccacaccaaaaacaaaccatcaacacaatcaaaatcaaatctttataaacctaaacataacttcttacctgtgaagaacccatttcttatgacaataagctaaacccttcaaagtcatcaacatataagacttaatatcaccaggagataaaaagatattacgatcacgaatcactgcttctaaatctgtttgcatatactcaaaaactagatgcaaactttcatcgtgagggaaagcatcaatg

SEQ ID NO: 166547 - DNA, 384 bp, Arabidopsis thaliana nossen
tctgaacccagtatgacactatgtaagtacaatcattacgaacacaacggacctaagagcaagcaataacattaagagaaatgtacctgtaactccactgccttatgtggctgaccataccattcttcatattctgcaatattacgcaaccggaagtcctgaaaagcgtattttagatgggcatataactgaaagaaaaggaacaaaaaagacatttcttcaaggattaccgctgaaagatcaacgatttttaatgccgtaggcagttccttaatgatttcctgttgaaatacacactcatttccgttaagctaagaaaagctttaagaaattgaaaaggaagaatgaaaggaaatgaacctgagttgttccgtgaggtaaaca

SEQ ID NO: 166548 - DNA, 385 bp, Arabidopsis thaliana nossen
  unsure (1)..(385): unsure at all n locations
gcgtnntcnttcattaaacagaatataatttagttattatacataaccaggggcggacccgggttgtaggcaggtttggcaagtatcccatactaactcttttaaatattatacaagctactactaaacattgtaattcagttagctcaaatgatttttcagcaacaactgctccatactaacccgacttcaagtgcccaaattgtcatttttgtatatattactataattctatttaagaaatataacatgttttcgttttacaatttttctttaatttttttttgggttgttactttaaagtataaactaagatcctaaacgttcatattcaaactaaacgtacattagtttctatattcctcatcatgctatattccgaaag

SEQ ID NO: 166549 - DNA, 289 bp, Arabidopsis thaliana nossen
cttcctcttgtctcttcaatgcctctgtatcttccttaaaccctaaacaggaccccagtgcgccgacaccggtcaacctttctactacgccaccgtcccgtggtcatctcctgtaccgccgatggcaacaacatcaaagcccccatcgagacagccgtcaaaccttcttaccgtacccaggataacattcaagatgaggcttgtcgtaatcgctccaactccgtgaaaccatatttagcaaaatacatttcagttaatgcagcatctgaatccacggagtcttactctt

SEQ ID NO: 166550 - DNA, 386 bp, Arabidopsis thaliana nossen
aatcaaacccagacttacgcaaaaacgactttgattttactgaacttcttggggagggcaaagatgataaagggcgtccaagtagaagtgatgaagtcaatcacgctccaacaattcctggttctagtaacacctctttgcctactcaaagcaatgcacccagaccgcttgtacctcctggttttgcaagcacaattttggaaaaaaagcaaggggaaaaacctcaaattgaaagttctcaatatgagcggagtcctttaaattccaaaggcattaatgtggtgaatggaacatcagttaataatggggggaaaccgttgggaattaagataggttcaagtgagatgctaatagaaggtgaagatgttcgtgtctcctccactgat

SEQ ID NO: 166551 - DNA, 374 bp, Arabidopsis thaliana nossen
cgctctctctcgattggtatctctcgctccgtccttcctcagatctggtcgtccgccggttttcacgatgccgtcttcctcctccgccgccgtcctcgtgttccttcttctcgtttcccttctcactcctacgttcgcatccgattcagatcacaagtatcaagccgaggagcaggtcaccctatgggtaaacaaagttggcccatataacaatccacaagaaacatacaactattacagtcttccattttgccgcccatctggaaacaatgttcacaaatggggtggtcttggtgaagttctaggtggaaatgagctgattgacagtgagattgcgataaaattcatgaagaatgtcgagagaagtgtcatct

SEQ ID NO: 166552 - DNA, 370 bp, Arabidopsis thaliana nossen
gtagcgtctgcgacaagacgttctcttcttaccaagctctcggtggtcacaaggcaagccaccgtaagaacttatcacagactctctccggcggaggagatgatcattcaacctcgtcggcgacaaccacatccgccgtgactactggaagtgggaaatcacacgtttgcaccatctgtaacaagtcttttccttccggtcaagctctcggcggacacaagcggtgccactacgaaggaaacaacaacatcaacactagtagcgtgtccaactccgaaggtgcggggtccactagccacgttagcagtagccaccgtgggtttgacctcaacatccctccgatccctgaattctcgatggtcaacggaga

SEQ ID NO: 166553 - DNA, 396 bp, Arabidopsis thaliana nossen
  unsure (1)..(396): unsure at all n locations
accgacgcgtccgataacgaactataacttaaatgttaactatataagaacataantcccgggccgggggagaagtatgacgatgtaaggagaaaccaccaatgtaaataacactccgatcatggggacgccggggaaggattccggagacaattttggcgagagcagccgtgtactggccaagtagctcagcaaatatcactattgcaaacattgtttagaaaaactaatcataggaataatgtagagtatcaaaaagttcttgtggacaaaataatataggatctctgtatattcggatgggtgaatatttttgggtgatggatatttaagaaagtgagtagtagttataggatggatagggattataggcgatgtggccggtcacgtgggtgt

SEQ ID NO: 166554 - DNA, 377 bp, Arabidopsis thaliana nossen
aaaacttctctctgaatctcagtgagttctcataaaatgagagggatggggagttttgccgtttgggctctctttgctgctttactctcacagcagctctttgcttctgttgcttccgtaaggtttgaggatgccaaaacatactacttatctcctccctctggctcacatggaactcctccatcacacacgcctccttcttctaactgtggaagtccaccttacgacccttctccttcaactccttctcacccttcacctccatcacatactccaactccttccactccatcacacactccaactccacacactccatcacacacgccaactccacacacccctccttgtaactgtggaagtccaccttcccaccc

SEQ ID NO: 166555 - DNA, 384 bp, Arabidopsis thaliana nossen
gcggacgatttcaacccctggtcgacaaatcctcggacccggtcgacgattgcgtcgtcctggtcgacgattcctcggacccgatagatttttctcgacgatttccactcctggtcgacgaatcgtcggacccggtcgatgaagtctcggacctggtcgacgatttcaacccctggtcgacaaatcctcggacccggtaaacttttctcgacgattccaagtccggatcgacgattcctcggacccggtaaacttttctcgacgattccaagtccggatcgacgattcctcggaaccgattattttccctcgacgatttcaagtcctggtcgaggaatcctggacgatttccgcaacaatcaccagttttcattttctctttac

SEQ ID NO: 166556 - DNA, 188 bp, Arabidopsis thaliana nossen
gcggaaagaaaaatgggtcgagtctcatctattatctctttctctctgacacggttgatccggttcaatggctacactgcccaacagtggcccaacgagtgccagctcgatcaactcaatgcgctcgaaccattccaaattatcaagagcgagggtggacgcatcgaggtctgagaccaccatgcacc

SEQ ID NO: 166557 - DNA, 365 bp, Arabidopsis thaliana nossen
attattttcactgagcgcataacatttttgagacaagagactctctctctctctcttctctctttctctccccctctctccggcgatggttgttgctatggaccaacgcaccaatgtgaacggagatcccggcgccggagaccggaagaaagaagaaaggtttgatccgagtgcacaaccaccgttcaagatcggagatataagggcggcgattcctaagcactgttgggttaagagtcctttgagatcaatgagttacgtcgtcagagacattatcgccgtcgcggctttggccatcgctgccgtgtatgttgatagctggttcctttggcctctttattgggccgcccaaggaacacttttct

SEQ ID NO: 166558 - DNA, 385 bp, Arabidopsis thaliana nossen
caatgtctatgggatgctgatggcaagatcaacttacgaagggatggagctagctgataagaataagcgaccttttgtattgacaagggctggattcataggtagccagagatatgctgcgacttggacaggagataacctttcaaactgggagcatctacatatgtctatatccatggtccttcagctggggcttagtggtcagcccttatcagggccagatatcggtggctttgctggcaatgcaactccgcggctatttggacgttggatgggtgttggagctatgtttccattctgtcgtggccattccgaggctggcactgatgaccatgaaccatggtcctttggagaagagtgtgaggaagtctgtcgtgccgcattg

SEQ ID NO: 166559 - DNA, 376 bp, Arabidopsis thaliana nossen
  unsure (1)..(376): unsure at all n locations
tagcaatgtcaatgtggtaccctctaccttcttcttcttcctccactcggtaaccaaatccagaatcaacaataatagaaaaagccctaactttctccgtcgatggctttcttcttctactttttcttcctcttgactctttcttctccttcttcttctgcttcctcttcaaactccttgacttacatcgtccacgtcgaccacgaagctaaaccctcaatcttccccactcattttcactggtacacttcctctcttgcctcactcacctcttctcctccctccattatccacacatacgacaccgntttccatggcttctccgctagactcacttcacaagacgctagtcaactcttagaccatcctcatgtca

SEQ ID NO: 166560 - DNA, 371 bp, Arabidopsis thaliana nossen
cgtaatttaatctatagaagaaacagagctctctgttttgttttaatcgtgttctgcttcccttaccggtttagcgctagaaacacgccggaggcggaacaatccacagcaaaagcaactcaaataatacacgtcagcaattccacgtggcatgatttctctcgtcttgtagatgtccaaataggtagccacgtcagcggcgtatcagagctcaaaagatacctccaccgattcggttacgtcaatgatggctccgaaatattttccgacgtgttcgatggtcctctggaatcggcaatctctctgtatcaagaaaatctcggtttaccaataaccggaagactcgacacgagtacagttactctcatgtc

SEQ ID NO: 166561 - DNA, 374 bp, Arabidopsis thaliana nossen
gtcttgtctagctacttttgctctcgcagtgttagtaacacaaggaaggatttttagtttgtgtttggcctcctctgcttctacaaactctgttcctaattggtttcatcattggccgccgtttaaatggggaccaaaatttccatattctccacctaaaccgccgccaatcgagaaatatcctccaccggtgcagtatccaccaccgatcaagaagtatccaccgccaccatacgagcatccaccggtgaagtatccaccaccgatcaagacttaccctcatccgccggtgaagtatcctccaccagaacagtatccaccgccgattaagaagtatcctccaccagaacagtatccaccgccgattaagaagt

SEQ ID NO: 166562 - DNA, 379 bp, Arabidopsis thaliana nossen
aaaattctgaaacgaacgttatcactatggacactaagagcggatctggggacgcgtgtaacccgaccaaccacgatatcggcggtcctccaaacggcggagtctccaccgttcaaaacacaagttcacttcactccaccaccgtcagcccctgcgacgcgactcttggccgttacctagcaagacggttagtcgaaatcggcgtcaccgatgtcttctccgttcctggtgatttcaacctgacgcttctcgatcacctaatcgccgaaccaaacctcaagctgatcggttgctgcaacgagcttaacgccggatacgctgctgacggttacgctagatctcgcggtgttggtgcgtgcgtcgttacgttcaccgtcgg

SEQ ID NO: 166563 - DNA, 383 bp, Arabidopsis thaliana nossen
gcgccttgaggtccgaaggtatgagttcatccctgaaagagagggtgagagggatttcaacagcgttagagagatggtagacgagaacacttttgcgatatttataatcaacccccacaatcccaatgggaactactacactgaggctcatcttaagcaggtatttacgtacgtattagtactcttggagaagtatatattcacatgattggctagatgatctagacttgagatcttttagtttgtgtttacgtttatattgacatggttttttctttaaattaaaagactacatctttgacttaattttataagaaatatatatttcaaacgttgtaaacgtaaccagcaaagcaatacacatttatttcgtttacaatttg

SEQ ID NO: 166564 - DNA, 387 bp, Arabidopsis thaliana nossen
ctccaattccatcttcccatgttgatttccgctccagccgcttgttctgcctcctctagaattctctggtcctactccactccttctccttctctctgtcccgccatttccacctctggtaaactcaaaaccctaactctctcttcctccttcctcccttcttactcattaaccaccacctccgcttctcaatccactcgtcgctccttcaccgtccgcgccgctcgtggaaagttcgagaggaagaagcctcatgtcaacatcggaaccatcggtcatgttgaccatgggaaaactactttaaccgcagctctaaccatggctctcgcttccattggttccagcgtcgctaaaaagtacgacgagattgacgctgcgccggaggag

SEQ ID NO: 166565 - DNA, 295 bp, Arabidopsis thaliana nossen
atcatacgtttccaaagatataaagtaaaaatgcaacaagaagagaattcactcaaattctattaaaagtaattttttgtaagcatcacctaaagcaaagcatctgcttctctctttttttttttttttttcctgcaagcatctgcttctcttatcccattccacttgtccttctttattcttctaattctttccacttacataaattcaggttttttgaaacaatagataagtaaatatataagggaaaaataaaaaaatataaataatatataataaaaatattaatataatt

SEQ ID NO: 166566 - DNA, 389 bp, Arabidopsis thaliana nossen
  unsure (1)..(389): unsure at all n locations
aaaaacttctctctgaatctcagtgagttcttataaaatgagagggatggggagtttggccgtttgggctctctttgctgctttactctcacagcagctctttgcttctgttgcttccgtaaggtttgaggatgccaaaacatactacttatctcctccctctggctcacatggaactcctccatcacacacgcctccttcttctaactgtggaagtccaccttacgacccttctccttcaactccttctcacccttcaccttcatcacatactccaactccttccactccatcacacactccaactccacacactccatcacacacgccaactccacacacccctccttgtaactgtggaagtncaccttcccaccctttcacgcctt

SEQ ID NO: 166567 - DNA, 390 bp, Arabidopsis thaliana nossen
gacgcccacgcgtcccgctcacgctttattacagtattgccactcattaaaaccgtaccatcgtaaccaaagcgatatcgcgtaccaccggttcagctatggaggatttattggaggagaggctaactcggactgactctgtcgggaataaacgagtcagagacgggttagacctcgactcgccggacgtgaagcggttaagagatgatttgttcgatgactcggggcttgacccagtgagtcaagatcttgactcggtgatgaagagtttcgagaatgagttatcgacaacgacggcggcgctaagctcccgtgaaactcaaccggatcttggataccttttcgaagcttctgatgacgagctgggtttgccaccgccgcttacgccac

SEQ ID NO: 166568 - DNA, 209 bp, Arabidopsis thaliana nossen
  unsure (1)..(209): unsure at all n locations
gcgntgtactactttttaaactactaaaaaaaaaaaccttttggataatttggaacataaatcttttattttgcttattaaaatattttattttgcttattaaaaacataaaactaacagaattcataaatttctgtttattttttagttaaaaatatattataggtgttttttgaccattaaatgtattttcaagctattaaaaataa

SEQ ID NO: 166569 - DNA, 353 bp, Arabidopsis thaliana nossen
  unsure (1)..(353): unsure at all n locations
aaaacaacaagaaaaaanggcaataaccaacaaannaancagaacacnggggcnccnnagcgccatagcgggcgnccacngcnnanccnnccgngnggagancgacgagggcgagccaccacagcaaggagaacaagaagggccccgncgccgncccggnggnggcncnggcgagggangggaggaagagncgacgaancaaccanaccacnncaggaagcggagnnncagngangggnnccagncaaaggaaggnnnngngagagngcngccnaagnncacaaaacangcaccggcncncnnccgaggaancgagaaccacaganncncgnnggnggagaaggagccaacaa

SEQ ID NO: 166570 - DNA, 370 bp, Arabidopsis thaliana nossen
tttcgattcccgaggctcgaaaaaaccctaaatctcttctccgttcactcatccaaccgaagatgcgtgagattcttcacatccagggtggtcaatgcggtaaccagatcggcgccaagttctgggaagtggtttgcgccgagcacggcatcgatccaaccggaaggtacaccggagactcagatctgcaacttgagcgcatcaacgtttactacaatgaagcgagttgcggtagattcgttcctcgtgcagtgctcatggatttggagcctgggactatggatagtctcagatctggaccgtacggtcagacctttcgacctgataacttcgtctttggtcaatccggtgctggtaacaactgggccaa

SEQ ID NO: 166571 - DNA, 379 bp, Arabidopsis thaliana nossen
accaaatccaacttccgtgaggttgctatcaaaggattctgggacatggatgacccagaggggtactcactatggttctgtgactacaagtacaacgacgagaacatggtctcctttgttacactcaacaaggtaggagggttccttcagcgtatggacttggcacgtaaatactcctttggaaagatgcttatttgcgggtcagagggtcctttcaaggtgaagggtttatggcttttccgtggaccagagatccctaagttcataatggatgaggtgtacgacatggagctgtacgagtggactaaggttgatatctccgatgaagcacagaaggagcgtgttagccagatgattgaagacgctgagccatttgaag

SEQ ID NO: 166572 - DNA, 247 bp, Arabidopsis thaliana nossen
caccaactctttataccagcctctgtaacgttcgatcagtggggattgaggtcaaccactcattggtgttagttagtattacgaacaatcaactatggcgacgaagagaagcgttggaactttgaaggaagcggatctgaagggaaagagtgtgttcgtgagggttgatctacacgatacttgggatgataactgtcacatcaccgctgacagcaggaaacactccgatgaagccaccatcaaggac

SEQ ID NO: 166573 - DNA, 378 bp, Arabidopsis thaliana nossen
tatcatggtctaaagttgaatgtatgatttagattttgcaggtgtgtaccattgtcaggggggttggtgatgatgtccaggaaaggttggtagacattaaaggcgacgagtctgaggcctgagtgtctattcatcagtaaccgggttgtgttctcaagtttagtattgaacatgatagcatcattgttcagtctctcaacacaacttttgtttcctgcaccgaaaagagtgatagctgcaggcaggcaacccatcggcggtagcgatatcactccgattctccttgctcctagttcatacagattctgttacaagtgacagtatgattcttgttcacacaaaaaagggtaaataactgatacgatttttttgtgtttc

SEQ ID NO: 166574 - DNA, 380 bp, Arabidopsis thaliana nossen
gaaaaaatggcaataaccaacaaattaatcataacacttcttctccttatctccatagctgtcgtccactgcttatccttccgtgtggagatcgacgagttcgagccaccacagcaaggagaacaagaaggtccccgtcgccgtcctggtggtggctctggcgagggatgggaggaagagtcgactaatcattcataccacttcaggaagcggagtttcagtgattggttccagtcaaaggaaggttttgtgagagtgctgcctaagttcacaaaacatgcaccggctttctttcgaggaatcgagaactacagattctcgttggtggagatggagccaacaaccttttttgtgcctcaccattttgatgccgatgctgt

SEQ ID NO: 166575 - DNA, 369 bp, Arabidopsis thaliana nossen
aaaattctgaaacgaacgttaccactatggacactaagatcggatctatcgacgcgtgtaacccgaccaaccacgatatcggcggtcctccaaacggcggagtctccaccgttcaaaacacaagtccacttcactccaccaccgtcagcccctgcgacgcgactcttggccgttacctagcaagacggttagtcgaaatcggcgtcaccgatgtcttctccgttcctggtgatttcaacctgacgcttctcgatcacctaatcgccgaaccaaacctcaagctgatcggttgctgcaacgagcttaacgccggatacgctgctgccggttacgctagatctcgcggggttggtgcgtgcgtcgttacgt

SEQ ID NO: 166576 - DNA, 213 bp, Arabidopsis thaliana nossen
tacttgttcagtcaatgcttaattccaaagcatagagaaccacacttgctcacctcttgcaggctaccatatgccattaggacaccgaaatagctgacatgtcgacatagcaacacagttagcttaataaaaaagtcaaagggaatgaaacaagatatactaaagtgaaagagaacagttaacaagaagcacttccaacccgatattagattt

SEQ ID NO: 166577 - DNA, 336 bp, Arabidopsis thaliana nossen
atcaatatgatcatctacagaggtgaagaagaagcagaactttaccaaagaatgcatcggcaagacaattgttctccaagtactcatagacaagaagcagctgggttttctcaacacagcatccataaagcttcacaagattcgggtgctgcagacaagcgattataccgatctcgtttataaactctttattgccttgacatgatttggaagatagcttcttgaccgcaatcaacgttccatttggtaagcgcccctgcattgttgagttttggttttaacgttacctgtttttaagaatactaacattgatttttctagagcttgagactcttt

SEQ ID NO: 166578 - DNA, 372 bp, Arabidopsis thaliana nossen
gacaaacacaatttatgcagcttcgctttaacagtctcaacttgactgggatatgatatatgagagttatagtgcagagtttactaaactttgagagtaatggtttttataaatatcaatcagtggcaactggcccactggccagtgtgtaacaacaagcaaagatccagaaagattgacacattaagagctaattaaattattcgaacctaattttcttgttcagatttgtttcacttttaatattcatagtcgtaaccttactcgaaaaagacatccacgttatttgtaagagttccggtgcatatcacccatcgcttgcaattactatctagttgctacaaagtttagaaatcaatgtcaaaaatgaga

SEQ ID NO: 166579 - DNA, 390 bp, Arabidopsis thaliana nossen
agagaataaaaggatttttgattgagtaagttcaacaaagtctttttagactatctttctttattttttccttatataaaaaatatattaaaaactcaatcaaaattaaattatccacaagaacaccaatttttgttatgcttaatatatttaatttgatctgtattttttttaattctacccttttttcaagcacttttttagtcgccaaattgccagaggcctacgcctttttgaatccaatcgtagatgttatgcccgtaatacctcttttctttcttctcttagcctttgtttggcaagccgctgtaagttttcgataaaattcttaatactgtcttaaacaaattcacgattttgatttttccaacaattcaaaagatccaaaaa

SEQ ID NO: 166580 - DNA, 369 bp, Arabidopsis thaliana nossen
aatatgcataagcttttgttttctcttctctccgtcgtctcactctcatttctcctctgtgttccatggcgccgaggcacgccagcgagaggcgccgtttccaaacgcctgccatttcagccaaatcaacagcctcgcgcccgctcaggcgacgaagttcgaagccggtcagatggaagtatgggaccacatgagccctgagctccgatgcgccggtgtaacggtggctcgcatcacccttcagcccaattccattttcttgcccgctttctttagcccacctgcccttgcttacgttgtccaaggagaaggagttatggggacgattgcttctggttgtcctgagacttttgcagaagttgaaggatc

SEQ ID NO: 166581 - DNA, 361 bp, Arabidopsis thaliana nossen
gttcggagctgtttctaagaatacaacaggtagttcggatcggagctacgcttgcaaaactcaaaacatggcgaggggtttgaagaagcatctgaagaggcttaatgcgcctaagcattggatgcttgacaaacttggtggtgcatttgccccaaagccgtcttctggaccacataagtcaagggagtgccttcccctcgtccttatcatcaggaacaggttgaagtatgctcttacctaccgtgaagtgatttcaatcttgatgcaaaggcatatccaagttgatgggaaagtcaggacggacaagacctaccctgctggtttcatggatgttgtgtctatccccaagaccaatgagaac

SEQ ID NO: 166582 - DNA, 360 bp, Arabidopsis thaliana nossen
ggatggccgacttggtccggttattcaactgttttcttccaccaccaagcagacgacggttggtggagcatcttccgggtagatataccggagaatttcacggaatataccgatttcccaatcacaccaatccgagtcactccatctggactccattgcttcactcctgcagctttccgcgacgggaaacgaatcgccttagcaactcgccgtcgcggcgtcaaccaccgtcacatcgagatttacgaccttgaaaacaaaacgtttcagccggtgactgagtcactcaatccgagtttccaccattacaaccctttcgtgtctccagactccgagttcctcggctaccaccgattcaga

SEQ ID NO: 166583 - DNA, 365 bp, Arabidopsis thaliana nossen
agcgtgacggagaacattacttgagcagagttactatcttgatgagtatcacaaagcaaggcttaaggaagaatttggtaagtatcatatccttatttcttctacttttttctttccatttcattatgtctgaacagcagactcaaattcatgctgcttattttgtttgttcagacgttgaaccatggagttttgatcaatgtgttggggaagcagtcatcctccctgctggatgtccataccaaattagaaagaataaggtattacttttagcacccaacacactctttccttcttttgtaatctcaaagttatgaatctttttaacataacttttgcatatgtttgctagtcttgtgtaaatg

SEQ ID NO: 166584 - DNA, 365 bp, Arabidopsis thaliana nossen
cggacgcgtgggttacaattttaaaaatcttatcttaagctctcctctcttctctctgcaaaatctttcagagaggagagcttgataatcgttttgtctccggtttgatccggatttgtttatattctcgtctctatgcgagatcaataatttccgattacatatcggatcttctgttaccggctatgaccggtcttttctccgtttttaacggaacttgatctctatctccatcgttgctcacccatcgatctcaacgttttcttccaagatttttgttgtctccatttcttcgtggattaacatcttcgtcacctccgattgctcaagacgcaagagcaaaaatggactttagactacatcaa

SEQ ID NO: 166585 - DNA, 366 bp, Arabidopsis thaliana nossen
gtgaattttcccgtgaattttcgcggagcttttctcgggaaaataatctaaagaagattcgagattaagacacgtcatctccggtttcgtagagagatctgaagaacgagtctcttctcttctccgatgggaacgctacagtcatggagaaaagcctatggagccctaaaagactccaccaaagtcggacttgtccgtgtcaacagcgaatacgccgatttagatgttgccatagtcaaagctaccaatcatgttgagtgtcctcccaaagatcgccatctcagaaaaatcttcgctgcaacatcagtgactcgtgctcgagcagatgttgcttattgtattcacgccctttcacggcgtttgcat

SEQ ID NO: 166586 - DNA, 263 bp, Arabidopsis thaliana nossen
  unsure (1)..(263): unsure at all n locations
ttctcctctattttacaccatcaacatcatcaagaacgaaagaaaatcgcagatagtccagctccttcaccactgccaccgcatctcatatctccaaagaagtcaaaccgtaaaggttcaatgactcctcctccacaatcgcaccatgctccttctcctcccattcctgattctntgatttctcctgctcacgctccagtctctttctctatgaaacgcatctncccggctctagcaccttctncaacccaagtgtttcctct

SEQ ID NO: 166587 - DNA, 418 bp, Arabidopsis thaliana nossen
  unsure (1)..(418): unsure at all n locations
accccggcacgtaccggccgcggaattcccaggcgtaccctctcgttcaaacatcttcatatagattcatgacgagtctcatcgaaagttcgaatctttcgtcatctgattagctttctcttagggtttatttcgatttcgatttagtgttctccatcaatggcgacacccatggttagttccgctggaggattactagcaatgctcaacgagcctcatcctgttttgaagcttcatgcgctctctaacctcaacaatttggttgaccaattctggcctgagatctccactagtgtccccatcattgagagtttatatgaagatgaagaattcgatctgcatcaaagacagcttgctgctttgctggtctctaaggttntctattacttgggcgagcttaatgattcgctgtcttatg

SEQ ID NO: 166588 - DNA, 409 bp, Arabidopsis thaliana nossen
  unsure (1)..(409): unsure at all n locations
gcgatcccatcgcgnntccgcaaaacatacaaggaataaaatgggcatataacccaacccaaatntaatcatgaacactgtgcgttctccttaatctccatagcgtagtcgtccactagggcttatccttccgtagtggagtatcgacgaagttcgagccaccacagcaatggagaacaatgaaggtcccccgtcgcccgtcctggtggtaggctctggcgaagggatgggaggatagagtcgacgaatcatccatatccacttcaggaagncggagtttcagtggattggttccagtcaaaggaaggttttgtgagagtgctgcctaagttcacaaaacatgcaccggctctcttccgaggaatcgagaactacagattctcgttggtggagatggagccaacaactt

SEQ ID NO: 166589 - DNA, 348 bp, Arabidopsis thaliana nossen
accactcattaccaaattcatggaaaaaaataccaaaaccccatttcaggtcaaatagcttctcagttttactaatctctctcatcttcttcccaacatcaaagaagacctttacttctggttagaatagaccaagaacactgagtacgacaaagaaccatgatgaatctttcttctcgtcgcgcctcttccactctcacattgagcttcactgttctccttttagcttccacaggttcgtatggctcaacattcacattcgctaatcggtgcggctacaccgtatggcctggaatcctatcgaatgctggctcacctactctctccaccaccggattcgagctccct

SEQ ID NO: 166590 - DNA, 347 bp, Arabidopsis thaliana nossen
gaacataaagattctcatcactgaccgtcattgtgcaaatcctttggcgaaaaatctcgcagaatgtggtgttgggaggtttggtcaagtggagcttattccaatagatcatggtctttgcttaccagatacactcgaagatccttacttcgaatggattcattggcctcaggcttcaatacctttctctgaagaagaacttgactacatacaaagtcttgatccagagaaagatcgtgaaatgcttcgaagagagcttccgatgattcgagaggcttgtctcagggttctagttctctgtaccgttttccttaaagaagctgctgtttttggactttgtcttgcag

SEQ ID NO: 166591 - DNA, 302 bp, Arabidopsis thaliana nossen
cttcttatacaaaacaaaacacacccaaatatgcataagcttttgttttctcttctctccgtcgtctcactctcatttctcctcttcttccatggcgccgaggcacgccagcgagaggcgccgtttccaaacgcctgccatttcagccaaatcaacagcctcgcgcccgctcaggcgacgaagttcgaagccggtcagatggaagtatgggaccacatgagccctgagctccgatgcgccggtgtaacggtggctcgcatcacccttcagcccaattccattttcttgcccgctttctttag

SEQ ID NO: 166592 - DNA, 367 bp, Arabidopsis thaliana nossen
cttcgatccgaaaacttcttcgccaatcttccttttcttctcacgaatgtctccttcaagctccgttcccagcaatgtcatggtacagaagaacaaaactcgtattcgattccctgcgacgcaacataaacccgaagattctacctcgatctcatgttacttcgagaatcaacaatccaattgggtcttctaatccctcagctaagttctcttcaatctcttcgcgagaagtaggattaagatcatggacatctctcggccgaaacacgaacagaatcgcgtataatccgtttctgagtcaacccaagagatattactacgttgatcgataccaagttcgtcatttcaagccacgaggaccaggacg

SEQ ID NO: 166593 - DNA, 370 bp, Arabidopsis thaliana nossen
tcgctttctacccttccttaaacgagctcaaacttacaaaaacttaaggaggtcttaaacgaacaaacctgtcttttctagatcactatcaatgtccagcctaaagagatacagaatgttcaagacgcacagatagaagagaaaactaatgctccaccagagcttcgacttccagatgtacttgatgctaaggtcgtaacatgttcacgtcatacaacatggcaagattacgtagactatttcaagtcaccaaatcaaaggaaacaaccagagagaaatactgaagatgaaagtgtactgattgcattttagtccttcaccctgagaatgttaagacgttgattatcaaatgacaccacaaactcagtcg

SEQ ID NO: 166594 - DNA, 369 bp, Arabidopsis thaliana nossen
cttctcccttgtgcgatatcttttgcgtgagatttgtctgaaaagtagctaaccatgggtaaagagaagtttcacatcaacattgtggtcattggccacgtcgattctggaaagtcgacaaccactggacacttgatctacaagttgggtggtattgacaagcgtgtgatcgagaggttcgagaaggaggctgctgagatgaacaagaggtccttcaagtacgcatgggtgttggacaaacttaaggctgagcgtgagcgtggtatcaccattgacattgctctctggaagttcgagaccaccaagtactactgcactgtcattgatgctcctggtcatcgtgatttcatcaagaacatgatcactggt

SEQ ID NO: 166595 - DNA, 371 bp, Arabidopsis thaliana nossen
caaaagtcgttaaaataagtgtcaattaagatatttatgcttttctaaaggtatgtatcctagaataaaaaaactaaaataaaaataaaagcgaaacaaaatcaagttaaccgtctcttgaaaacgtaatatatataatcgagaaagattcaaaattgatttaaaataataatcaaaccaataacagttatgcatgcaagaagttagaggaaacgcatcaggtatatagacgaggctacgaaagaaaagaatgatcaaatctagttacgcttaaatttggatatatctaaggtttcttcgtcaatatatggagcttacgaaaacgaaagagtgagctacgaggaactaaatcaatgaagataagaggaatg

SEQ ID NO: 166596 - DNA, 370 bp, Arabidopsis thaliana nossen
gtataatgacgttcccttctctttctgtctcatttctcttctttgccttcatattcgttacgcgtgcattcgacctcatcatcatccagatgcaacagggaacatgtccgtacacggtggttgtcatgacaagctgtctttctccggagtcgacaagagatcagatcagcattgtttttggcgatgccgacggtaacaaggtgtatgcaccgaaactagggggtttggtaagaggaccagggggtttggggaagtgttcaacgaacacattccaagtcagaggtcaatgtttgaatgaccctatctgctctctctatatcaaccggaatggacccgacggttgggtcccggagtccattgagatctactc

SEQ ID NO: 166597 - DNA, 379 bp, Arabidopsis thaliana nossen
atcaaaaaccctcgagcttttaacaatggagaccagcatcgcgtgctactcacgtgggatccttcccccaaacgtctcttctcaacgatcctctacattggtctctcctccttccttctccacatcctccagcttcaagcgtctaaaatcgagctcaatcttcggagattcactacgactagcaccaaaatcgcaacttaaagccgcaaaggctaagagtaatggtgcttcaactgtgaccaaatgtgaaattggccaaagcttggaagagtttttggcacaagcaactcctgacaagggattgagaactttgctgatgtgtatgggagaagcattgagaacaatagcttttaaagttagaacagcttcttgcggtgga

SEQ ID NO: 166598 - DNA, 370 bp, Arabidopsis thaliana nossen
acaagatctcgtgcactggaacccatggttatagactcgaatccattagtatggaacattttcttttccaagtgaaatcccctagtataggaaagagtgaaaaagtgctttcgttgttgtggaataagaagccttcgtattttaatgcatgtatttaatttattcggggctattagagcgggatccactttttggggaatatgagtcgaagcaataacaagaatatttctagtggaacatctttcacaatccctggagagagagttcaccaatagaccgagggctaagtaactcgactcattcacatcaagatcatgaatgtttggaatccatattatgcaaggagacattgcttttgctaattcgaatt

SEQ ID NO: 166599 - DNA, 354 bp, Arabidopsis thaliana nossen
tcgggtgagctctctctgagtgtcaagtctgtgaagtacactcgcggctccttcctctgccccggaggccagccttttcctcaccgcagcttctctgaagaagtctctgttcttgatgggcactttactcagctgggcttgaacagcgtagcctacttgatgggcaatgatgatgagactaagaaatggcatgtctatgctgcctctgcccaggactccagcaactgcaacaacaatgtctacactctcgagatgtgcatgactggtctggacagagagaaagctgctgtcttctacaaggatgaagctgacaagactgggtcaatgactgataactctggaatcagaaagatc

SEQ ID NO: 166600 - DNA, 323 bp, Arabidopsis thaliana nossen
gttgatcctaattcccatgttatcatacacaggctctggtgaaggagacctctgtccttctggtctatcatccaaaggcataccagactgcaacatcctactaatctcaagtaacctactattcaaagcttgaatctcaggatcaaactcaatacctccagtgaaatccttcatgaagtcaggtaactgaatttgcgtcctcggctcatcatctgcccatctcgacttacgcttcctagtcccagtaccggaatcagtacccccttcggcgctagggttattaatggactcagaaggcggaggatcccaccgacttcgacgct

SEQ ID NO: 166601 - DNA, 371 bp, Arabidopsis thaliana nossen
aacattgttagagagaaagagagagcgataatggcgatgaggggcttcgacgttgttttcgatccttgtgttgtctttgtgcgcttcgtctatcagaagcgaagagacggagacgaaggagttcgtgttgaccttggatcacactaacttcaccgataccatcaacaaacacgatttcatcgtcgtcgagttctacgccccatggtgtggacactgcaagcagcttgctcctgagtatgagaaggctgcgtcagctttgagcagtaacgtcccaccagtggttcttgctaagattgatgccagtgaggaaacaaacagagaatttgcaactcaatacgaggttcagggtttcccaacaatcaagattttca

SEQ ID NO: 166602 - DNA, 360 bp, Arabidopsis thaliana nossen
  unsure (1)..(360): unsure at all n locations
cggacgcgtgggcggacgcgtgggttattttcctaaatatataggacgactcattttcgattacttttaatattattttttgttaagattacttttagtcatttgggcaacatatgcataatcaaatcttgtaagaccactttagagatctgggctttgaggaagacaacaatgagaaagcttctttttctaatgtctatgtctttgaaatgttacaaggagcaattaaaatagtgggtaaaaagtttcattacatcagtggggctgtgtgttcaatgttagctactctgacacggctcatggtagatntattgaatagttgaagagagcacaccaattcttattggacatatttgacag

SEQ ID NO: 166603 - DNA, 373 bp, Arabidopsis thaliana nossen
gatgacatgaagaaaggatcatactattaaggttttaatattaactaacgtcgacatgtgattactaacagtgatgagaggaacacccggtggtcttgactggacaagattcataagagtatctgcattgtgaactgagcttttattgcaaagatttgctactgcttttgcaaatgcactaacagccattatcacagtattccttggaattcctcccaaatgatcagatcttgctgcccattccattatcttccccattagcttcaaagttctctcccttcaacaaattataacagaacctcaagctacttgcatacagggccggttctgatgtgcgaaccggaaattatcatatctgtgacaaaattcgatg

SEQ ID NO: 166604 - DNA, 354 bp, Arabidopsis thaliana nossen
gggactgattgcacatttccagtctgttcttcatatgggaccgacgattatatacaatgtgcctggtcgaacagggcaagatataccgcctcgtgccatcttcaaactttctcagaatccgaatttagctggtgtgaaggaatgtgttgggaacaagcgagtcgaagagtacactgagaatggggttgttgtgtggagtgggaatgatgatgagtgtcatgattccagatgggattatggagcaacaggagttatatcagttactagtaatttagttccgggtttgatgaggaagttgatgtttgaaggtaggaattcatctttgaactcaaagcttctacctttgatggcttg

SEQ ID NO: 166605 - DNA, 377 bp, Arabidopsis thaliana nossen
gcttttcttttccctgtatcagatttttttttttttttggctcaacatcaactttcatttaccaaatgattacatccaattaaaggtacataacattcccctctatcaaattggacccaaatgcaatggtttgatctagtatcaccctgaaacactatcggatccagcgctacctgatcgaggaaccattgcatttttaaaccacaatgagatagataatactctacaaatcagaatattatcatctctttgaccacctacagagactctaagcgacacgagaacaactactaaaacggaagagaccaaaacctagtctggagacaaccaaacatttaaccattgaagaaaagtggaaggcacaatcgttgcattgg

SEQ ID NO: 166606 - DNA, 365 bp, Arabidopsis thaliana nossen
tcggtcgtgggggaaaaattggactattcggtgtggctggcgtgggtaaaacagtactgggtatggaattgatcaacaacattgctaaagctcatggtggtgtatccgtatttggtggagtaggcgaacggactcgtgaaggaaatgatctttacatggaaatgaaagaatctggagtcattaatgaacaaaatcttgcggaatccaaagtggccctagtttatggtcagatgaatgaaccgccaggagctcgtatgagagttggtctgactgccttaactatggcagaatatttccgagatgttaatgagcaagacgtacttctatttatcgacaatatcttccgtttcgtacaagcaggatcc

SEQ ID NO: 166607 - DNA, 354 bp, Arabidopsis thaliana nossen
gagagatggggtcaaagacggagatgatggagagagacgcaatggctacggtggctgcctatgcgccggtcacttaccattgccgtgctcgtgttgacttggatgatagacttcctaaaccttatatgccaagagcattgcaagcaccagacagagaacacccgtacggaactccaggccataagaattacggacttagtgttcttcaacagcatgtctccttcttcgatatcgatgataatggcatcatttacccttgggagacctactctggactgcgaatgcttggtttcaatatcattgggtcgcttataatagccgctgttatcaacctgacccttagctatgccactc

SEQ ID NO: 166608 - DNA, 325 bp, Arabidopsis thaliana nossen
aagagtttcattgaaaatttcaagaaccctagttaataacgataatgggttcgagagttttggcttccttctttgttttcttaatcttcacggtcatcacattgcctcccacgatccaagcttgcactccttgtactcgtcctcatcctccggttccgaaacctccacaacacggcggtggtggaggtggtggtagcaagccgcctccacatcacggtggaaaaggtggtggtaaacccccaccccacggtggaaaaggtggaggaccgccgcatcatggtggaggaggaggacgaggagggaaatcaccgccggttgttagacc

SEQ ID NO: 166609 - DNA, 373 bp, Arabidopsis thaliana nossen
  unsure (1)..(373): unsure at all n locations
ttntcgggttatctatgaanctcaagatcttctntctctttggcgttccgagaatgttgacaatgagcttcagctggttaagacattccgttccttggaatatcggtttcctaccaagaagctcggcgaaaatgcaaccaacagaccaaacatcaatggatgttccatagttgtcacaacagaggagaagctctggggctcggtaccaacgagtcacaacatattcagtcatgaactgacccttggtgttgctcgcacgcgctagtccaaaatcgcatatctttaaatcgcagtttgcgttgacaagaaggttaccaggtttcaaatctcggtgcaggatattggctgaatgaatatacttgagccctcgaag

SEQ ID NO: 166610 - DNA, 371 bp, Arabidopsis thaliana nossen
ctttcttggttcctaaaggaaagacttatctccttaagtctactcgatttagaggcccatgcaaatccttacgtaactttcagatcctaggcactttatcagcatctacgaaacgttcagattacaaagacaaaaaccattggcttatcttagaggacgttaacaatctatcaatcgacggtggctcgacgggaattattaatggcaacggaaaaacctggtggcagaactcatgcaaaatcgacaaatctaagccatgcacaaaagctccaacggctcttactttatacaatttaaagaatttgaatgtgaagaatctgagggtgaaaaatgcgcagcagattcagatttcaattgagaaatgcaacaaa

SEQ ID NO: 166611 - DNA, 332 bp, Arabidopsis thaliana nossen
aagacgcagagcatttggactggccaatgagactgagaatcgtaatgggaatagcttactgtatggaacatatgcacaatctaaaccctaaacccatctctcacaccaacctcaactcttcttcagtctacttggcaacagattacgcagccaaagtctcagactttacgttcctcagctccacaccacttgaccccatgaccaacgtatccagctttggcgcccttctacaagagatcatcaccggaaagatcccggatccagattctctgctccaggaagaaaccaaacccgttgcagacccgactctgaaaagctttcaagaggaggtc

SEQ ID NO: 166612 - DNA, 353 bp, Arabidopsis thaliana nossen
cttcttcaatgtagtttcatgtccctagaaattttcgttttcttctctgtgaatcatctatcgttttctaagaaattgagttcactcttcggcgatggagcgaaactcgtcggacgacgaagaagaccaccagcatttgattccccaaaacgacactcgaatccgtcaccgggaggattcagtttcctccaacgccaccacaatcggcgggaatcagagatcggcgtttcagatcgacgacattttacatcgagtccaacaccgtgggaagatctcgctcaacaagcgttacgtcattgtcttcgtttctctaattatctcaatcggtcttctcttcttactcactgatcctc

SEQ ID NO: 166613 - DNA, 352 bp, Arabidopsis thaliana nossen
aatctttaatgtaaaaaaaggtatctaccccgcttaatggatactcatttgaaataattgtgggttttttaaaaaatggagtcgatcggattcgcaccaacgtaaaccataagtctcagacacaatacagcatatgaacgatctatatttcgacaataatgaatcgagctcgtacattctattttattcatacgtactgatccgcgatatttataaaagaatttcctttttatgtgtcaacctattatctaaacgagtcgcacatacgacgaagtacatgttcctcgtcactgaaggcattcccgaagcgctagtgatttcatgacgcttctgattggctgacttgtatctc

SEQ ID NO: 166614 - DNA, 376 bp, Arabidopsis thaliana nossen
acggagagttgtatgctgcgttcgggaaggatgaatcgctcccgaaaaggaatctattgattctctcccaattggttggaccataggtgcgatgatttacttcacgggcgaggtctctggttcaaatccaggatggcccagctgcgccaaggaaaagaatataagaaggatctgactccttcatgcatgctccacttggctcgggggatatagctcagttggtagagctccgctcttgcaattgggtcgttgcgattacgggttgggtgtctaattgtccaggcggtaatgatagtatcttgtacctgaaccggtggctcactttttctaagtaatggggaaaaggaccgaaacatgccactgaaagactctactg

SEQ ID NO: 166615 - DNA, 360 bp, Arabidopsis thaliana nossen
attaaatatatatacaatagacgcatagtggttagtagctcatttgggaactagaaatgagaatttgaattgacttcaaatttacttaacggggtattttttgcttttttaatattggatttgataaatatccatgcaatgaatttttttttaatagcctaccgcatcgaacgaaattaatttgatttatacatgtactcagcaagttgacatacacccaagatattttatcttgacatgtgatgaagagatacggattatcctctgaacaataattttctaaaaaaaaaaaaagcaaatttttgataacttaacttataaatccacctttttccctaattagaagatggattctggctg

SEQ ID NO: 166616 - DNA, 362 bp, Arabidopsis thaliana nossen
gcggaaagaggaggagaaagcggcgcagagcgtggcggtgaccgtggtgacttcgggggtggattcggcgttgtacgtggaggtggccgaggccgtgatcgtggtccaagaggccgtggaagacgtggaggccgtgcctcggaagaaacgaaatgggttccagtgaccaaactaggtcgtctagtggctgacaataaaataacgaagctagagcagatctatctccattctcttccagtaaaggagtaccaaatcatagatcatcttgttggtcctacgttgaaagacgaggttatgaagatcatgccagttcagaaacaaaccagagctggtcaaaggactagattcaaggcctttgttgt

SEQ ID NO: 166617 - DNA, 368 bp, Arabidopsis thaliana nossen
cagagatctattccttttagcttaatctgttatttagttatagtgtcttaatctttctagtatgaaatgttaattggtcttaacaagttttaacctttgggttgattttctgatatatatataggaaggatcctaactacaagagaacagtaatggcctgttttattcaagcagcttacttgcttgaactcgacagacaagagaatcgaaacgagcaaaacgctctcgcaccaaaatggtggattccattcaagtacaagttatcacaaacgctcattgacgagagagatggatcaatatttggtgctgttcttgaatgggacagagcagctgcaatggcagatttggttgtcatcagaccaagtggg

SEQ ID NO: 166618 - DNA, 360 bp, Arabidopsis thaliana nossen
acggagagttgtatgctgcgttcgggaaggatgaatcgctcccgaaaaggaatctattgattctctcccaattggttggaccataggtgcgatgatttacttcacgggcgaggtctctggttcaaatccaggatggcccagctgcgccaaggaaaagaatataagaaggatctgactccttcatgcatgctccacttggctcgggggatatagctcagttggtagagctccgctcttgcaattgggtcgttgcgattacgggttgggtgtctaattgtccaggcggtaatgatagtatcttgtacctgaaccggtggctcactttttctaagtaatggggaaaaggaccgaaacatgcca

SEQ ID NO: 166619 - DNA, 368 bp, Arabidopsis thaliana nossen
caaaggctctctctgtctctttctcaaaatcatctgcaggaagtgaatcgtcaaaaccgagtttggaggatctgtcttgaggagtttttttttgttgagaaatggcttcgaaaaggatcttgaaagagctcaaggatctccagaaggatcctccaacttcctgcagtgctggcccagttgctgaagacatgtttcattggcaagctacaataatgggtccatccgatagtccttattcaggcggagtctttctcgtaaccatccacttccctccggattatcctttcaaaccaccaaaggttgcattcaagacaaaagtgttccaccctaatgtcaacagcaatggaagcatttgccttgacattttg

SEQ ID NO: 166620 - DNA, 361 bp, Arabidopsis thaliana nossen
cgaaaaagccggttgcaaaacctttgctaatttgcttgtctcaagtggagtactcaagacttacgaatccgccgttgaaaaaggcttgacggtttttgcaccgtccgatgaagcttttaaagctgaaggtgtaccagatctgacgaagctcacacaagctgaggtagtctcgctcttagagtatcacgccctcgctgagtataaacctaaaggctcattgaagactaacaagaacaatatctccacgttagccactaacggcgccggaaaattcgatctaacgacctctacctccggcgacgaagttattctccacaccggcgttgctccgtcgagactcgcggacactgtgctcgacgcg

SEQ ID NO: 166621 - DNA, 289 bp, Arabidopsis thaliana nossen
atcagatggggcaatggttgcaagaggtgatcttggtgcagagcttcgaattgaagaagtccccattcttcaggaggagatcattaacctgtgccgtagtatgggaaaagctgttattgttgcgactaacatgcttgagagtatgatagttcatccaactccaacccgggcagaggtctcagacattgctatcgctgttagagaaggtgctgatgcggtaatgctttcaggagaaactgctcacggaaagttcccattgaaagctgctggagtgatgcacactgttgca

SEQ ID NO: 166622 - DNA, 239 bp, Arabidopsis thaliana nossen
cacggtgaccctctccactcacccatacgggtgccgtgttattcagagagtattggaacactgccataaccctgatacacagagtaaggttatggaagaaatcctgtccactgttagtatgctggcccaagatcagtatggaaactatgttgttcagcatgtactggagcatggaaagcctgatgagcgcactgtgataatcaaagagttagcggggaagattgttcagatgagccaac

SEQ ID NO: 166623 - DNA, 365 bp, Arabidopsis thaliana nossen
gaggattgttctaggattgcctcttgatggtcccatcaaggttgatgatgttaagaatgcgtaagtctttaaattgcttccattgctcccgagaaaccgaaaaagagtgttcattgaaggtttcttgttttgcagcttccgatcttctgcgttgaagtggcatccagataagcaccaggggccttctcaggtatggtttttaaaacaaatattggattgtttcagtttttttatttgaagttcatgtgttgataaattgttttcggtaatgttgtggaactcgcaggtggcagcgcaagagaaattcaaactctgtgttgatgcatacaagtccctctgttctgcactcgcttgacgttacacat

SEQ ID NO: 166624 - DNA, 345 bp, Arabidopsis thaliana nossen
aatggaaacaatggttatgatgagatccgtgctgccattagggaagctaaggctgtaacagacaagcccactttgattaaggtcactactacaattggttatggttctcccaacaaggcaaactcatacagtgtccatggagctgcgcttggtgagaaggaagttgaggctacccgaaacaatcttgggtggccatatgagccgttccatgtacctgaggatgtcaaaagccattggagccgtcacacgcccgaaggggctgctcttgaagctgattggaatgccaaatttgcagcttatgagaagaaatatccggaggaagctgcagagttgaaatctattatc

SEQ ID NO: 166625 - DNA, 288 bp, Arabidopsis thaliana nossen
aacggaaacaatggttgtgatgagatccgggctgccattagagaagctaaagctgtgacagacaagccctctttgattaaggacactactacaattggctatgggtctcccaacaaggcaaactcatacagagcacatggagcagagcttggagagaacgaagttgacgctacccgaaacaatcttgggtggccatatgagccgttccatgtacctgaagatgtcaaaagccattggatccagcacacgcccgaagagactgatctagaagctgattggaatgccaaa

SEQ ID NO: 166626 - DNA, 340 bp, Arabidopsis thaliana nossen
cagccgcatcatccttctcccttgtgcgatatcgtttgcgtgagatttgtctgaaaagtagctaaccatgggtaaagagaagtttcacatcaacattgtggtcattggccacgtcgattctggaaagtcgacaaccactggacacttgatctacaagttgggtggtattgacaagcgtgtgatcgagaggttcgagaaggaggctgctgagatgaacaagaggtccttcaagtacgcatgggtgttggacaaacttaaggctgagcgtgagcgtggtatcaccattgacattgctctctggaagttcgagaccaccaagtactactgcactgtcattgat

SEQ ID NO: 166627 - DNA, 348 bp, Arabidopsis thaliana nossen
gtttttgtgtgttgaaaatcaaaatggcgtcgagcgatgagcgtccaggagcgtatccggcacgtgacggatcagagaacttacctccgggagatccaaagacgatgaagacggtggtgatggataaaggagcggcgatgatgcaatcgttgaaaccgatcaaacagatgagtctccatttgtgttctttcgcttgttatggtcacgatcctagccgtcagattgaagtcaacttctatgttcatcgactcaaccaagactttcttcaatgtgctgtttacgattgcgactcctctaaaccccatctcatcgggatcgagtatattgtgtcggagaggttatttgaga

SEQ ID NO: 166628 - DNA, 367 bp, Arabidopsis thaliana nossen
gttcaaacctttactctctctgtctgcaaaaggttcatcatctagggtttatacaagtttacagagagtttacgattctgaatcagtgattttagaagaaaccccaatcagctgaagatgaggagattgtttgcgatttcatcgacgggaaacagatttgttcatcggagtcttctcggaaaaggtaaatgtggaactgctcctccttcctttagccattgcagtttctgggtacgagatttctctggtgttagttatgattacagaaagatatcgagaaataggctgaatgatttgaagctagatgatgcggttaatctgttcggtgacatggtcaagtctcgtcctttcccttcgattgttgagt

SEQ ID NO: 166629 - DNA, 366 bp, Arabidopsis thaliana nossen
tcccgctccttttctctgattttgaatcgaacccttaatacccagaaatctcacggttccgaggagtgggtttttgggggttagggttttcgagagatgttgaatgtcaggttcattgatgaatctgttttctctctgcttcaagccattcgggcacgtctgtgataattccgaagctggatcgggtggtggtggtggcgtttctggtggaaccggcggtgaaggcaaagacggattgctttggttccgtgatctcggtaaatattgcggcggagatttctccatggctgtgattcaagccaatcaggttcttgaagatcagagccaggtcgaatccggtaattttgggacttttgttggtgttta

SEQ ID NO: 166630 - DNA, 353 bp, Arabidopsis thaliana nossen
gacagagatgccagaaggagtttcagcaatcacaacacctaagagcttgccagagatggatgagcaagcaaatgaggcaaggacgtggtggtggtccttccctcgacgatgagttcgatttcgagggcccccagcagggataccagctactccagcagtgctgcaacgagcttcgccaggaagagccagtttgcgtttgccccaccttgaaacaagctgccagggcagttagcctccagggacagcacggaccattccaatccaggaaaatttaccagtcagctaagtacttgcctaacatttgcaagatccagcaagttggtgaatgtcccttccagaccaccatccctttc

SEQ ID NO: 166631 - DNA, 358 bp, Arabidopsis thaliana nossen
gtaggatgctttgccaaccttccctgatgcagaggcatttgcttgcattgagagagagttggatttgtcgctagagaccattttctcgtctgtatctcctgagccaatcgcagcagctagtcttggccaggtttacaaagctcagctgaggtattcaggtcaggttggtgctgtcaaagttcaacgccctgggatcgaagaagccattggccttgatttttaccttattaggaggagtggggaaactcattaccaagtttgtaaactcaataactaccgatgtccttacccttatcgataagtccgcctgcagagtttatcaggagctaaactatgtccaggaggcccaaaatgccag

SEQ ID NO: 166632 - DNA, 351 bp, Arabidopsis thaliana nossen
aagaatttcttcagaccaaatcaaggaacttgctgagcacgctacatgtgcttcaaacaaacacaaagccaaaaaagaaaaggaggaagacaaagacctaagaacgttgtggactcctttcaatctctttgcaatagatccaatctactccaacgactttggtcatttccacgaggcacatcctaagaattataatcaactgcaagaccttcacatagccgccgcttgggctaacatgacacagggatccttgttccttcctcattttaactctaagaccacatttgtaacgtttgtggagaatgggtgggcccgcttcgagatgggtactccttataaattccaaagagg

SEQ ID NO: 166633 - DNA, 352 bp, Arabidopsis thaliana nossen
gttattacacgctgaccaagaccccgaacgcacttattacatggctggcagagcttaccaaagcggaaatatcgatttcaacaactccactaccataggaatcttaagttacacctcttcatgcaaagctaaaacatcatcgttttcaggatattacccaacccttcctttttacaatgacacctcagcagcttttggattctttaccaagatcaaatgcttattctccggtcaagttcctgtccaaatctctcgtaggataatcacgacggtttcaataaatcttcgcatgtgtcctcaaaactcgtgcgaaggtccaaatgggtcgagattagcagcgagtatgaacaac

SEQ ID NO: 166634 - DNA, 207 bp, Arabidopsis thaliana nossen
acgcgaaagagaaaatcagttcattcgtctatggaacttgtacttccacacgctacaaactcatgtcctctcactgttcttgggttgttagaacgagccgactctgtctttggcgactgtccttcactcctgcacacaaccactggtcatacgtggactggaactcattctctgtgtctacgcgtgaactccactttttcttgcgct

SEQ ID NO: 166635 - DNA, 361 bp, Arabidopsis thaliana nossen
  unsure (1)..(361): unsure at all n locations
gttcgaatactttgtgatctatttgatctatttcgtgctccagatactcgaatgaatatccgacgaagtaaaaccatcttgataaagatgacagaccccattctctgtactatccatagggtcaattctaacaagtcacacactcatattccggaaatatacaatgcagaaaaaaatttcgcggtcgaactaccaaaggagaataggctaaaattgttagacctgcatactttacttttttgtatcgagctaaaagctagaacttcaagattcttctcagtctaattcactgaaattccatccagtagaacagaagaattataaatctccaaaataatagataggaataccgcanatagag

SEQ ID NO: 166636 - DNA, 352 bp, Arabidopsis thaliana nossen
cttaaagataaccccaaatgattcttgcaatattagcccttgtaatagccacctttctatacggtggagccaccacggtccaagctggatgcagagacactctgaccagcctttccccttgtctttattacctcaacggtggctcatcgtcaccttcttggagttgttgtcgtcaattttccacggtggttcaatcttcaccggaatgtttgtgctcagtggttaatagcaacgaaagctcattttatgggttcaaatttaaccggactttggctctcaatctccctaccgcttgcaatgttcaaactccatcacctagcctgtgtaacaccggtggttacgtaccaaccac

SEQ ID NO: 166637 - DNA, 359 bp, Arabidopsis thaliana nossen
atcgaagattttttctgtattcgaaaaaattcgtaacaaaatttaacatttttttttattatgagaacaaatcctactacttcaaatccagaggtttcgatacgtgaaaaaaaaaaacctgggacgtatcgcccaaatcattggtccggtactggatgtagccttccccccgggcaaaatgcctaatatttacaatgctctggtggttaagggtcgagatactcttggtcaagaaattaatgtgacttgtgaagtacagcaattattaggaaataatcgagttagagctgtagctatgagtgcgacagagggtttaaagagaggaatggacgtggttgatatgggaaatcctctaagtg

SEQ ID NO: 166638 - DNA, 359 bp, Arabidopsis thaliana nossen
gttagagcttctgctggcaatattacctgataacaacggttcactttatggtgatcttaagagaatctgtgaaaccgagcttggtttgatatctcaatgttgtctcacaaaacatgtgttcaagattagcaaacagtatctggcaaatgtatcccttaaaatcaacgtaaagatgggaggaaggaacacagttctagtagacgccataagctgtagaattccactggttagcgatataccgacaatcatttttggcgcagacgtgactcacccagagaacggggaagagtcaagcccttcaatcgctgctgttgttgcttctcaagactggcctgaagtgacaaaatatgcgggtttag

SEQ ID NO: 166639 - DNA, 346 bp, Arabidopsis thaliana nossen
gcagctgagagttgacagactcttcaacgagtttagtttgagggcagagggagagggagagagcaagcaaagcgtacatctgctcattcttcttgagtaattgctcgtactgaggtgacttttgatggtactgcttagtcttgaaaatgtagaggagaatcttgttgaactcacgaacagcatcgacatacctccgcaacataagggtggcaaatccatagtggtagatagtagcgatatggcaaccaatgacactggtgtaaacacctggctgagtgatgtcaatgggctgcaaccatttgagagcagtgtggtagtcaccgaggaggcagtgaacacgcaagag

SEQ ID NO: 166640 - DNA, 197 bp, Arabidopsis thaliana nossen
tttcttcttcacaaaaattcttctttcaccaaactcatcttttcctttataaaggagtaatatcttcaccgcccattgaagagacctacaacatatgtattaggtgaaactttccttttaagactatattgagagatctctgaatttatttcaaagtggtggcatggaatcttcaggtgatggaatccccccaatta

SEQ ID NO: 166641 - DNA, 349 bp, Arabidopsis thaliana nossen
gaagaagccagctttcactaaggttgatcagctgcgtcctgggactagcggacacaatgtcaatgtgaagattgtcagcacgaaaatggtgttacagaaaggtcgtgctgatggtcctcaagctcgccagttgcggatttctgaatgcattgttggtgacgagacaggagtgatcgtctttaccgcaagaaatgaccaagtggacttaatgaaagagggatcaactgtaactctacgcaatgcgaaaatcgacatgtataaaggatcaatgaggctagctgtagacaagtggggtcgtgttgaagtcacagagcctgcgagcttcaaagtgaaagaagacaccaacatg

SEQ ID NO: 166642 - DNA, 351 bp, Arabidopsis thaliana nossen
tgccgctttcttcttcttcatcatctctctctcaaaatcaccccttttaaagttggttcctttatacgcaaaagtgaacgcagatcttaatgcagctactgtgatttcgattcttagggtaaatatattcttttactcattggattggcactcctcagcatctgggtttttgcaaagcattcttattacttccactgattcaaacatgtggaagtttaaaccttttgctcaaaaagaacctgcgggtctcgaaggtcgatttctcgagataggaaatctgaaagttcaagttagaaatgtcattgcggaaggaggtttctccagtgtttacttagctcaagatgtaaatca

SEQ ID NO: 166643 - DNA, 262 bp, Arabidopsis thaliana nossen
acttaaatacttcggtgtctttccagacacccgcaaggctaacaacgacattacttccatcacaagcaacggcggaagagttaactgcatgcaggtgtggcctccgattggaaagaagaagtttgagactctctcttaccttcctgaccttaccgattccgaattggctaaggaagttgactaccttatccgcaacaagtggattccttgtgttgaattcgagttggagcacggatttgtgtaccgtgagcacggtaactca

SEQ ID NO: 166644 - DNA, 347 bp, Arabidopsis thaliana nossen
  unsure (1)..(347): unsure at all n locations
cacatcaacaaaacaacaagaataaatgtctataaccaacaaattaatcagaacactggttatccttatgtgcatagctatcntccactgcttatccttccgtgtggagatcgacgagttcgagccaccacagcaaggagaacaagaaggtccccgtcgccgtcctggtggtggctctggcgagggatgggaggaagagtcnacgaatcatccataccacttcaggaagcggagtttcagtgattggttccagtcaaaagaaggttttgtgagagtgctgcctaagttcacaaaacatgcaccggctctcttccgaggaatcgagaactacagattctcgttggtgg

SEQ ID NO: 166645 - DNA, 347 bp, Arabidopsis thaliana nossen
gtctaatttagcccatgagatgactgcagagttccgtggtctctgtgctgaagaggcttaccttcaacaggaactagagaaacttaacgatttgagaaacaaagtgaagcaggaaggagaagtgtgggatgaccttgtgtctagctccagtcagaattctcatctagtttcaaaggcaactaggttatgggattctataatggctcgtaaaggtcagcatgaagttcttgcgtcaggtcccattgaggacttgatagctcacagggagcatagataccggatttcaggatcggccctacttgcagcgatggatcagagttctcaagttcctcgagcagaattactct

SEQ ID NO: 166646 - DNA, 347 bp, Arabidopsis thaliana nossen
gctgatgtcacgaacttatatctttccgccatccacgagacaggggccggatggtattttgacatgttctctccaaaaggaattcccaaaagtaggccttccagttgagagtttcatattagaattaatgtaaaactcgtatttttaaggagaccacaaaagtaaacaagtctcataatttatggatgtggaatcatgacattgttctgctaaacaactgctgcctatcatcatacatgagcgaataagaagtgctagaggggattatataccctccaatatcaaggtaacagtaacacaattaaagaacatccttactgttacataagaaaatgttttgatatatc

SEQ ID NO: 166647 - DNA, 345 bp, Arabidopsis thaliana nossen
agatcgacgagttcgagccaccacagcaaggagaacaagaaggtgcccgtggccgtcctggtggtggctctggcgagggatgggaggaagagtcgacgaatcatccataccacttcaggaagcggagtttcagtgattggttccagtcaaaggaaggttttgtgagagtgctgcctaagttcacaaaacatgcaccggctctcttccgaggaatcgagaactacagattctcgttggtggagatggagccaacaactttctttgtgcctcaccatttggatgccgatgctgtttttatagtcctacaaggtaaaggagtgatcgagtttgtgacggataaaacaa

SEQ ID NO: 166648 - DNA, 350 bp, Arabidopsis thaliana nossen
ctgtaatcccttagatcttcttttcaaatttcaatggcgtccggtgatggggagggtcggtgcttcgttggaggtgctagcatgggccactgatgacagagctcttgagactgccttcgctcaatacggcgacgttattgattccaagatcattaacgatcgtgagactggaagatcaaggggattcggattcgtcaccttcaaggatgagaaagccatgaaggatgcgattgagggaatgaacggacaagatctcgatggccgtagcatcactgttaacgaggctcagtcacgaggaagcggtggcggcggaggccaccgtggaggtggtggcggtggataccgcagcg

SEQ ID NO: 166649 - DNA, 344 bp, Arabidopsis thaliana nossen
atcaaagtctaatatcacaaagaaagagtttttttaactagctgagctcggagtgtttgcttaagacaagaagaacatggcgtcttaccagaaccgtccaggaggtcaggccactgacgagtacggaaacccgatccagcagcagtatgacgagtacggaaatccgatgggaggaggaggatacggaactggtggtggtggaggagctacaggtggccaaggatacggaacaggtggccaagggtacggatcaggtggccaagggtacggaaccggtggccaaggatacggaaccgggaccgggactgaaggctttggaactggcggaggagctaggcaccacg

SEQ ID NO: 166650 - DNA, 352 bp, Arabidopsis thaliana nossen
gattagcctcagagtgctctgatcaaggttttggagggtgcatttgagtgagaagatgttttcggctcagcataagattcataaggagaagggtgtggaactttctgaattggatgagcaagttgctcaggctttctttgatttggagaacaccaatcaagaattgaaaagtgagctgaaggatttatacgtcaactcggctgttcaagttgatatctctggaggacgcaaggcaattgttgtcaatgttccttacagactgagaaaagcttaccggaaaatccatgtaaggcttgttcgtgaacttgagaagaagttcagtggaaaggatgtgatcctcattgctacaagg

SEQ ID NO: 166651 - DNA, 348 bp, Arabidopsis thaliana nossen
cccgaacccaaatgatcctcttgtgccggagatagctcatctctacaaggtagataaatccaaatacgagtcaactgcacaaaaatggacacagaagtacgcgatgggatgataagacaaaggtggtctagacaaggaaaggatgtcttacttggcaatggaaatagaaaactgaagaaaaaacatttaccttttctgttttttggttagttttagcaatggctgctatgatgtgacgatcataatcgaaagacttttttagctgctcttttttacttgtcttcagtgctctgatcatattcttatttttccaattccattttaattggaaactgctattgcaacaac

SEQ ID NO: 166652 - DNA, 347 bp, Arabidopsis thaliana nossen
  unsure (1)..(347): unsure at all n locations
tncgagaagaaaaagattttttttttgaattgcaaggagaggaaggcaaaacggcgacgtattgcgtgacgggtgcaagtggatacatcggttcttggttggttaagtctcttctccaaagaggttacacagtccatgccactctcagagatcttgcaaaatctgaatactttcaatctaaatggaaggaaaatgaacggctcagattattccgagcggatcttcgagatgacggcagctttgacgacgccgttaagggttgtgacggcgtcttccatgtcgccgcttccatggagtttgatatctcatcagatcacgttaatctcgagagttatgtccagagcaaa

SEQ ID NO: 166653 - DNA, 312 bp, Arabidopsis thaliana nossen
  unsure (1)..(312): unsure at all n locations
aaaaaaaggcccccccgagctaggtgtgtactcttttttgtctcgtctctccnacaacgtcttcctctttgttctcttaatctcgctagttgccatctccgccgcgagaacacatcctcattatgttatcaaactcccttcgcactcttctcacttcttccgtccttctgaaaacgacaaccattctaactcctgtactatatcagctgctctattcgcccgatctaccctatattggaattacaagcatcactctcatatattccatgcctatcaactttttaggaaaggtggattgaaatacgacaatat

SEQ ID NO: 166654 - DNA, 353 bp, Arabidopsis thaliana nossen
  unsure (1)..(353): unsure at all n locations
ctttgatcaaaccagagagccgtcagggagagcaaaacaaanatcggaggggatgaggaccattctttcgtgcgaaacgatggacatccccgacagtgttaccatcaaggttcacgctaaagtgatcgaagtcgaaggacctcgcgggaagcttgttcgcgatttcaagcatctcaacctcgatttccagctgatcaaggatccagagactggaaagaagaagcttaagatcgattcgtggtttggaacacgcaaaaccagcgcctccatcagaaccgctcttagccacgtcgataacttgatctccggtgttaccagaggtttccgttacaagatgaagatcgtgtacgccc

SEQ ID NO: 166655 - DNA, 352 bp, Arabidopsis thaliana nossen
gatcaatataatctagaaaaaaaaagagaagagagaagagagaaatgtcgagagctttgtcagtcgtttgtgtcttgctcgccatatccttcgtctgtgcacgtgctcgtcaggtgccgggagagtctgatgagggaaagacgacgggacatgacgatacaacaacaatgcccatgcatgcaaaagcagctgatcagttaccaccaaagagcgtcggcgacaaaaaatgcatcggaggagttgctggagtcggtggattcgccggagttggtggtgttgccggcgtgggaggtctagggatgccactcatcggtggtcttggcgggatcggtaagtatggtggcataggcgg

SEQ ID NO: 166656 - DNA, 306 bp, Arabidopsis thaliana nossen
  unsure (1)..(306): unsure at all n locations
gtttcattgaaaatttcaagaaccctagttaataacgataatgggttcgagagttttggcttccttctttgttttcttaatcttcacggtcatcacattgcctcccacgatccaagcttgcactccttgtactcgtcctcatcctccggttccgaaacctccacaacacggcggtggtggaagtggtggtagcaagccgcctccacatcacggtggaaaaggtggtggtaaacccccaccccacggtggaaaaggtggaggaccgccgcatcatggtggaagaggaggaggaaganggaaatcacc

SEQ ID NO: 166657 - DNA, 341 bp, Arabidopsis thaliana nossen
ttcgagaagaaaaaaaagaagtgatgagagagcagagaaatgtcgggagctcggtcagtcgtttgtgtcttgctccccatatcctccgtctgtgcacgtgctcgtcaggtgccgggagagtctgatgagggaaagacgacgtgtcatgactatacaacaacaatgcccatgcatgcaaaagcagctgatcagttaccaccaaagagcgtcggcgacaaaaaatgcatcggaggagttgctggagtcggtggattcgccggagttggtggtgttgccggcgtgggaggtctagggatgccactcatcggtggtcttggcgggatcggtaagtatggtggcat

SEQ ID NO: 166658 - DNA, 348 bp, Arabidopsis thaliana nossen
atcagagagttatggaagaggagagaaacaatccgcatcattcgggcgcgggtcttctttcttggtctgagatccgccgtcctgactattccaccgccgctaatcgctctaaccagccgtctgatggaatgaacgatgtacttggcggcggcggtcagatcactaacgcggaaactaaatcacttaatacgaatgtttcgtataggaagaattgttctgggcataagctaaaagaaatgactggtagtgacatattctctgataatggtaaagatgatccaaatcaccagacaagaatccattatcatcaggatcagctgagccagatatcattcagcggcgaagaga

SEQ ID NO: 166659 - DNA, 344 bp, Arabidopsis thaliana nossen
attaatataaatttaagaaaaacaaataatactggagttatgttgcactaaaatatatatattttaatatatatatatatatatatatatatatattgataagtttatacaattgttaatttatgatattaatgagacaatatgtttacatatgatttattatcttattaatttatcgatatgtatcaatttttacactagtcccaacacagaaccaaaataattgattaatttaaagaggtttatcgaatattaatttatagatgttctactatatatcatatctttttttaaaaagaatcttcattgtttatgtgtagttttttttctaaatgagtcatgat

SEQ ID NO: 166660 - DNA, 331 bp, Arabidopsis thaliana nossen
  unsure (1)..(331): unsure at all n locations
atcggagagagtgggaaacatggagaaaaacaagagagctatcggatttgtacttctggtcgtacttatcaatggagttatgatgacgagatcaaatgggtatgaaggagaagaagagtggggaggagcaggaggaggagagtggggaggagcagaaggaggaggagcatggggaggaggaggtggaggatgttgcactaggtgcggcacaggaccaggaatagttgagtaatttaaagaggtttatcgaattttaattnatagatgttctactatatatcatatcttttcttaaaaagaatcttcattgtttgtgtgtagttttttttat

SEQ ID NO: 166661 - DNA, 352 bp, Arabidopsis thaliana nossen
  unsure (1)..(352): unsure at all n locations
ttcaagaaccatgaaatacacaaaattcttctcgagtcagatcttttcgggcaaggggaagatgttttggctctgttcttanctaancggtatttgaacatgtgtctggtatacctaataaatgaaagataaagacaatggttacctatccttgtaagctgaggccaggtttgcgtgagcttcagccattgtaggccggaagtttatagcatgcatgtaatcctgaattgcttcagttaccctcccgatctctttgtaagtattccctctattaaccagagcgtcagctgccaatgggtcaatacgaagaacctcattatagcaggatatagcatccgagtaatttccctgt

SEQ ID NO: 166662 - DNA, 347 bp, Arabidopsis thaliana nossen
aaaaaaaattctctgtttcagtaagaattttatggagttttgagaataatgttcggagtacattggaaacgcaaaacacttaaaaagtgttgacaaaagtataggaatctgcttcggtagaagattcgagagaggagaggaagcatcggtggttttggagttccttattcttctcttctttccaaagttttgtcattcgccaagattccttaaaaacttgttcacacatcataattatgcaccaataggttataaatcataatccaacaagttagtcattggctttaattttaaaaaatcccataagagtaaaatcttttagaaagttaatcaacccacacatgggc

SEQ ID NO: 166663 - DNA, 374 bp, Arabidopsis thaliana nossen
cggattccgggtgcgcccacgcgtccgcgtcttcttcagcttcactgagtcttacgaacatagcaaaatccaaatcggattcctgaagaaacctctttcgctctcgtcttcgttttcagatcaacaagaaatggcaacagcaacatcagcttctctggtttcaactgtttcttcatcttactccaaagctagctccataccacattcaagactccaatctgtgaaattcaactcagtccctagcttcaccggtctcaaatcaacctctctcatctccggatctgattcctcttccttagccaagactctacgcggttccgtaacgaaagcacaaacatctgacaagaagccttacggattcaaaatcaacgctt

SEQ ID NO: 166664 - DNA, 349 bp, Arabidopsis thaliana nossen
cttgacagtaatatctgttgtttatgtaaatcctagatatgacaatatgcggaggtcatccatgaaaatgaaaaacaagggggggttgctaaagggatgaataaatgggacgcataaccggatatgctaaaatgaaaatacgaaaaaaaaggctaatgagatcgaaataatgaatcataactaaagttccgtttcgaattcgctagataaaacaaaggcttgcctattcctattatgataaaaaaataaaagactttccgcaaaaaatttttttattcatatattttttattttaaaactaggtttcagttagttgagcttgaaaatgactattccttcattgaatgaa

SEQ ID NO: 166665 - DNA, 349 bp, Arabidopsis thaliana nossen
cgtcttcttcagcttcactgagtcttacgaacatagcaaaatccaaatcggattcctgaagaaacctctttcgctctcgtcttcgttttcagatcaacaagaaatggcaacagcaacatcagcttctctgttttcaactgtttcttcatcttactccaaagctagctccataccacattcaagactccaatctgtgaaattcaactcagtccctagcttcaccggtctcaaatcaacctctctcatctccggatctgattcctcttccttagccaagactctacgcggttccgtaacgaaagcacaaacatctgacaagaagccttacggattcaaaatcaacgcttca

SEQ ID NO: 166666 - DNA, 347 bp, Arabidopsis thaliana nossen
atgagtacaacacttcttcttcttctctctaagtccagttaaaaatcatgtctttgcaatgttgactctttaatcttcgatttataagctctcgaaggaatctattaccttcaatctctctcgttgttagctctttgaattgtagaagagaatgggttgcttacttggttgcttcggtcgtcggaagaatcgtcgccgtcagagacgcagagaatcttttcagccacgtttaaacagaatctctgaggaagctgcaaaggatgttcttttgaatcttagggttcctactgttgaagaagtcccaaagtatgcaaaagattcaactgttgtgaaagtccctaaaatct

SEQ ID NO: 166667 - DNA, 345 bp, Arabidopsis thaliana nossen
acctggaaaccccctatttgccaatagaaatgttggcctacttggacacgagatatctcatataacccttcttttattagtgtgttgatggaacatgataaaacattcatattgccctctgacagaaataagaactttaaattattttgattcaagacccccctttttttttacttatttacttaaattttatattttagttttggatcccaactaaacaaatcacacaatatccccagttttttctctctttttcttttctacaattcaggagtagtaaccgatttttgaaatcgaaatacagggagcccctccctaaaaaaaaaattgatttatttatcttat

SEQ ID NO: 166668 - DNA, 348 bp, Arabidopsis thaliana nossen
gtcgcagatacagagatggatgaagagaggaaaagaacaaaaagtggaccttgtgtcagtgcttttgtagatagaggagacttcgatcctaatgtttctggaggtgtagctagaagtaaggcaaaatgctgtgccttaccaaatggagatatagtggtctctttacaagtttatattgtcgactgtcccaaagaacccatcatagagatactgcagtttgagaagcatcaggaccaggaccaaaatcctgagaacgatgaggatccatatgggaatcttttaaagtggttgataccgctggataacactatttctcagcaaccccgttctttaccacctcctataacc

SEQ ID NO: 166669 - DNA, 345 bp, Arabidopsis thaliana nossen
atcccatcgatcttttcggaatcttccctcattatgctcagccggcattggcagagctccattgtttcagttctccgttcaacgattatcggaattattcacaacactattagtatcaccgtcgccaaccgattttgattaccagctttggtgacgacagtcgtgattaaggaggttttggtaaatttcttcgttcctgtttgttttcaaagatggctgctttgaaaggttatggcttgtgttctatggactctgctcttcaattcccctgtcctaagctattcaatagctacaagagaaggagctcgaaatgggtctctcccaaagcagctgttgtacccaatt

SEQ ID NO: 166670 - DNA, 347 bp, Arabidopsis thaliana nossen
gctttcgacctctctcttctcattcctttgcaacttctcacttcgcgaagtccttctcttcaaaatcagaaatggctcaagtggttgctaccaggtcaattcaaggctcgatgttatctcccaacggtggatctgtgtctacaagatccgagaagctattgaaaccagcgagttttgcagtgaaggttcttggaaacgaagcaaagagaagtggaagagtctctgtaagaagcagaagagtggttgatactactgtgagatccgctcgtgttgagactgaagtcattcctgtttctcctgaagatgtgcctaacagagaggagcagcttgagaggttgttggaaatg

SEQ ID NO: 166671 - DNA, 345 bp, Arabidopsis thaliana nossen
acgacacataaaattgaaagccccactgcgaatccaccacaaaggaaaagaaaattgtttgttattcgaatggagctcctgagcacgatcaatctcttagcaatagctctagtgcttcttgtagttccgaagatatatggagcttgtcggatccttgtttggcggccatggatgctatcgagaagattcaagaagcaaggaatctctggtccaaaatacaggatcttgtatgggaacctccgagagattaggaagatgaagaacgaagctaagcttatggttcttgatccaaactccaacgatatcgtccctcgcgtcttacctcatcttcagcaatggaagtct

SEQ ID NO: 166672 - DNA, 354 bp, Arabidopsis thaliana nossen
  unsure (1)..(354): unsure at all n locations
tcacgattcacgttaccgtgggatcatcggaaaaagatcttgcttnntgtgtgcgtcggctttagcttattgacatagagagtgtgagaatcaggtgattcacagagatgttaagagtagtaatataatgttagataagagttttaatgcaaagcttggagatttcggattggcgagacagattgagcatgataagtcgccggaagcgactgttgccgccgggactatggggtatttagcgccggagtatcttctgacgggtcgtgcttcggagaagacggatgtgtttagttatggagcggtggttttggaagtggttagtggaagaagaccgattgagaaggacttaaatgt

SEQ ID NO: 166673 - DNA, 342 bp, Arabidopsis thaliana nossen
  unsure (1)..(342): unsure at all n locations
ctctcanttaaccagagagagcatcaattgcttctacttcttctctagcggtctggcaagctctccttacacgagccatctctcacaatggctctgaaaactgcgtctctataccagctttctctgctctcaaatccacttctccacgcaccagtggcaccatctcttcccgtcgacgaaacgcctccacgatcagtcactctctccgccctctggttcgtgcagcctccgtagaggcaatcatgacaagttctgattcgtccctggttgataagtcggtgaacacgatcaggtttctggcaatagatgcggttgagaaggcgaaatcaggtcatccaggtc

SEQ ID NO: 166674 - DNA, 348 bp, Arabidopsis thaliana nossen
taggaaacctatcaattaatgtcctctaaagtgtggtgtctctttcttaggggcatgagatttactttccaagggatgaatctacatccacaacaatatacatctattcatatttataaaatttattactgcaaaaatatacaaaattttgaacataaaatatgaaggaaattgatagattaaacaaattaaaactacagcaaacactaagtaaataatcttctcaaaagttataaaacaatttgtactataaatagaggttgatttgtgtaaacataatataagaatcataattgttttttttctaaaacaaagtttgtatttgtaggattttattaattgaagatt

SEQ ID NO: 166675 - DNA, 344 bp, Arabidopsis thaliana nossen
tttcgatttctgaagttgagagacgactatggcgacgaacaatggggatggcttgatgttggaggcgacgccggaggctgcgaggccctgggctagtgcggcgaatgcagaagttatcgatgcgcttccttatatagacgacgactatggcaatccattgattaagtcggaggtagaccgtttggtggaggaagagatgcgtcggagctctaagaagccagctgactttctaaaggacttgcctcctcttccgaagttcgattttaagaactgccctgttcttggcaaagagtatgagcgtgttagagctgggaagcctcctgtgcggatagatttcgaatccc

SEQ ID NO: 166676 - DNA, 352 bp, Arabidopsis thaliana nossen
gagaacaacaaccaaacactcatttctccacatcttgagagaaaaaaacagagcaggggtattagagatctcatggcgatggcagtctccggagctgtcctcagtgggcttggttcttcgttcctcaccggaggcaagaggagtgccaccgcattgggaagcggcgtatgcactggagctcagagagttggcaggaaaactcttattgtcgctgctgcggctgctcagcctaagaaatcttggatccctgccgttaaaggtggtggcaacttccttgaccctgaatggctcgatggctcgctaccaggagatttcgggttcgacccattgggtttggggaaagacccggctt

SEQ ID NO: 166677 - DNA, 347 bp, Arabidopsis thaliana nossen
aatcaccaaaccaaactcttcactctctccaacaatggccaagaagatgagttctctcatcatcatcttcaacattctccttgtcctcacaactcaaacccacgcgcacaacgtcacgcgcctcctagcaaaccacccatcattctcttccttcagccatttcctaacacaaacacacctcgccgacgaaatcaaccggagaagaaccataaccgtttgcgccgtcgataacgccgccatgtcagcattaacctcaaaaggctacacaatctcaactctcaaaaacattctctccctccacgtccttttagattacttcggaaccaaaaaactccaccagatccgtg

SEQ ID NO: 166678 - DNA, 343 bp, Arabidopsis thaliana nossen
acagattcagtctatcgtgtcaagtgcctgtctctttcgttgcccaaatgtccgatcaaattcgtgcggcgtgtttgcatggcgtttgctccgattctccgccgcgcctccgccgttaagaacctcttctctttaacaagactcgccgttggctctgccctctccactaggtctctccaaaccggagcctccggcgatgattctcaatcgatgggtgggtatcacgtgagccccggcggattcatgcgtggagccgtgtatcgcgagcccaataagcctctaaccatcgaagaatttcatattccccgccccaaatccaatgaaattctcatcaaaaccaaag

SEQ ID NO: 166679 - DNA, 344 bp, Arabidopsis thaliana nossen
catctctctctctctcttccaattttcccaattcttttttaaaaccctagtttttcagatatctgattatctcttgtatttcttctactcgatttgctcccataaaaacccttactttcttcaagttctggttttcaccgattgatgggtcgtggctcagtgacgtcgcttgctcctgggttccgttttcacccgacggatgaggaacttgttcgctactaccttaagcgtaaggtctgcaacaaaccctttaagttcgatgctatttccgtcaccgacatatacaagtctgagccttgggatctaccagataagtcgaagctgaaaagtagagacttggaatg

SEQ ID NO: 166680 - DNA, 349 bp, Arabidopsis thaliana nossen
  unsure (1)..(349): unsure at all n locations
atcaagcgttgagtcatcgccgtgttgttccttttccttccctctctagggtaaggggggtacgatggtcttttgtgatnaanagtctgagatcagcgagtcagagattgaggagtattctaaaacaccctaccaccttttacgcagtgagacttactacaaggtgaaggtgaatggacggctcagatgccccttttgtgtaggcaagaagaagcaagattacaagtacaaggagttgcatgcacatgctactggtgtttccaaaggttctgccaccagaagtgctttacagaagtctaatcatcttgctttagctaagtttttagagaatgatcttgctggttatgca

SEQ ID NO: 166681 - DNA, 352 bp, Arabidopsis thaliana nossen
  unsure (1)..(352): unsure at all n locations
gtgcgtccaacagtcccaaacgattgtctcccggtgctgagtgacattatgactggatgttgggatgctaatccagaantccgtccatgttttgtggaggttgtgaagctgcttgaagctgcagaaacagagataatgacgacagcgagaaaagcccgtttcagatgttgcttgagccagccgatgacgattgactaaataatcccccccctcaagaaaataacaaagagagaaagaagaagaagaagatataagaaaaagggctttagatataagtttgtgtgtcagttatgtgtctctgtgtgtgtttgtgtatctataaaaatatgaaatgtattttgttttctcaaga

SEQ ID NO: 166682 - DNA, 343 bp, Arabidopsis thaliana nossen
  unsure (1)..(343): unsure at all n locations
ggtttcttggcagtaacacttatggtttggatcgaggagaacatangagggagcggcagcttcactatatctaccgcggttttagcctctgcgatcttcgttttcgttgcgggatgcccgatgtatcgattcaagcgcccagcagggagtcctttgaccagaattgtgaatgtgtttgtttctgccgcaagaaaccgaaataggtttgtaacggatgcagaggtggtgacacagaatcataactctaccgacaaaagcattcatcacaacaagttcaagtttttgaataaagcaaagctcaacaacaagatatcagcaacacaagttgaagaaacaagaacgt

SEQ ID NO: 166683 - DNA, 350 bp, Arabidopsis thaliana nossen
  unsure (1)..(350): unsure at all n locations
ggtttcttggcagtaacacttatggtttggatcgaggagaacatangatggagcggcagcttcactatatctaccgcggttttagcctctgcgatcttcgttttcgttgcgggatgcccgatgtatcgattcaagcgcccagcagggagtcctttgaccagaattgtgaatgtgtttgtttctgccgcaagaaaccgaaataggtttgtaacggatgcagaggtggtgacacagaatcataactctaccgacaaaagcattcatcacaacaagttcaagtttttgaataaagcaaagctcaacaacaagatatcagcaacacaagttgaagaaacaagaacgtttctagc

SEQ ID NO: 166684 - DNA, 348 bp, Arabidopsis thaliana nossen
aatcagacagaagttgcagagataagagaattaattgattggtgtaatggagaaggcagttcatttatccaccaaaaatggacccaaggttccaggagagccaacgaagaccggaacctccatggttgacacggcagcttcagccgtacaaagcttcgctccgattaaccaaatccaccaacatctctgcgcgtttcatttctatgcatatgacatgacccgacaagtggaggcacaccatttctgtggtcacatcaacgaagacatgcgccagtgtctgatctacgacggtcctgatgccaacgctcgtctgatcggtctggagtacattgtgacagataagctctt

SEQ ID NO: 166685 - DNA, 346 bp, Arabidopsis thaliana nossen
gctccacactcctcaggattcgtgacttcatctgatcaccgctgtcgctggggaagccctcctgagcatatgaattatcctggttacactggagtgtcgtcgtcatcgtcatctactgaacgtcctttcactgtcaggcatggttttccatttgctgagaggcaggcttcattgcttggaaaataccagcatcatgtgggctctgctccctcaagcattcattttaatacacaaatgaattgctacacgggatcaccagagataccccttggatttagtgatatgggaatcaacagaaactataacagtgctcatggaaaagcaaaccttggtgttagtctaccgg

SEQ ID NO: 166686 - DNA, 300 bp, Arabidopsis thaliana nossen
cttagaaccatatatatgtgaattttgaaccccatatcaaataatgtggtttaaaattttgagctgatataaaattaatcacttatctgttatactaaattgaatatccttacttgcattagtttctctgaaattaaaaacgtttaatataaatcattaactttaacgatcataatatatttatttgtcgaaaatataaatcactattaatttactacgttacaacttacatgtatagtgtttgttgaaatgtaaggttttcaatgacgtttagatagatgaaataatttcgttccaaaa

SEQ ID NO: 166687 - DNA, 346 bp, Arabidopsis thaliana nossen
aaacaacagagtgattggcgtcgttttccacatcaacctgaattgaaagggtaaaaatgaagaggtggtgttgagagatgttgatacagctatatgaatgagtgtgactgaaaacaaacgaatctgaatcacatacgccaaagcagtccagttttctcgttgctgcatattagaccacaagattttgttagttgcgcttggtatgatccatgcgaatgctacacaagcaccaaacagactaaactgtaaatctgttacagtcgcaaccgcaactcccacagatacaactgtaagtgataccacctgaaaaacatcagccacaaggttacttactataccaaagttt

SEQ ID NO: 166688 - DNA, 344 bp, Arabidopsis thaliana nossen
acctcactcaccatgagacactttatctcacctccatggcctctgctccgtctcctccttctgctcctgcgctcttctttcacctccggcgaatcctctctgtccgcagaaaaaaaaaaattgcacaccggtggtctcagtagacagagttttcctaaaggattcgtgtttggaaccgccacgtcagcttatcaagtcgaaggcgagactcatcaagacggtcgtggcccaagcatttgggatgcctttgtcaagattcctgggaagatcgccaagaatgccacggctgagataacagtggaccaatatcaccgttacaagatgtggatttgatgaagaaactg

SEQ ID NO: 166689 - DNA, 357 bp, Arabidopsis thaliana nossen
gattgaatgtctgagcattccgagactttcatgagtatatatccaaagtatcttaggtccttttgaaaactattaatttaaatgtctctccggctatccaatctaattgaagactcagtaagtggaactaaattagtagtggcaagtaaagatttacagatttccctccactactttaagttttccttgaatctgataggcaaaactttaggttagagaatagaacctcgcgagccaggggcttagaataatgaaaagaaagtataaagagtcttttcctacgtttgttatttaaagtttgttgctgaggcggcacccggatttgaactggggaaaaaggatttgcagtcccccgcc

SEQ ID NO: 166690 - DNA, 352 bp, Arabidopsis thaliana nossen
ccgatacatatcccgccgcttcccctgtgtttttcttcgccgtccctcgggctttggaactccttaggtgctatgttaaagtctagacacaatgagaggaaggagctacacgccatcaccaccaaggggttatggaaggaggggccggagccctagccctcggggccggtttggtgggagtcgtgacagtgatctcccaaccagtctcttggttcgcaacttacgtcatgattgcaggcaagaagacctcatgaggccatttgagcagtttggtcccgtcaaggacatctaccttcctagggattactatactggagatccaagggggtttggattcattcagtttatggat

SEQ ID NO: 166691 - DNA, 354 bp, Arabidopsis thaliana nossen
gaaagcttttaaaacttatctagtttcgtttgatacacatttgaagaaagaggtggcgtccaaccaacagagctacaaagctggtgagaccagaggcaaggcccaggagaagactggacaagctatgggaacgatgagggacaaggctgaggagggccgggacaagacttctcaaacggcccaaacagcccaacagaaggcccatgagacagcccagtcagctaaagataagacatctcaaactgcccaagcggctcagcagaaggcccatgaaacggcccagtcagcaaaagagaagacatctcaaactgcccaaacggcacagcaaaaggcccatgagacgacgcaagcagc

SEQ ID NO: 166692 - DNA, 349 bp, Arabidopsis thaliana nossen
  unsure (1)..(349): unsure at all n locations
caaaagtcgaatatcccaaattctatccgttttccggcgataatctccgggctagggcccatggcgaaagaaccagttcntgtgctcgttactggagctgcaggacaaatcggatatgctcttgtacctatgattgcaaggggtatcatgcttggtgctgaccaacctgttatcctccacatgttggatattcctccagctgctgaagctttgaacggtgttaagatggagttgatcgatgctgctttccctcttcttaaaggtgttgttgctacaactgatgccgttgagggatgtactggagtcaatgttgctgttatggttggtggtttcccgaggaaagaaggta

SEQ ID NO: 166693 - DNA, 350 bp, Arabidopsis thaliana nossen
gaccaccatgctgtgacaagattggagtgaagaaagggccatggacaccggagggagatatcatcttggtttcttacatccaagaacatggtcctggaaactggagatctgtgcctactcacacaggtttgaggagatgtagcaaaagctgtagattgaggtggactaattatcttcgacctgggatcaagcgtggaaatttcaccgagcatgaagagaagatgattctccatcttcaagctcttttgggaaacaggtgggcagctatagcatcatatcttccagaaaggacagacaatgatataaagaactattggaacactcatttgaagaaaaagctcaagaagatg

SEQ ID NO: 166694 - DNA, 344 bp, Arabidopsis thaliana nossen
  unsure (1)..(344): unsure at all n locations
caaaagtcgaatatcccaaattcgatccgttttccggcgataatctccgatctagggccgatggcgaaagaaccagttcntgtgctcgttactggagctgcaggacaaatcggatatgctcttgtacctatgattgcaaggggtatcatgcttggtgctgaccaacctgttatcctccacatgttggatattcctccagctgctgaagctttgaacggtgttaagatggagttgatcgatgctgctttccctcttcttaaaggtgttgttgctacaactgatgccgttgagggatgtactggagtcaatgttgctgttatggttggtggtttcccgaggaaaga

SEQ ID NO: 166695 - DNA, 344 bp, Arabidopsis thaliana nossen
aatttaaagaaaatttttccattttttttttttactctatctctgggagggattctcttcaagtgtcaggcctttaggctttaggtttcttttgggagtcttcttgagctctgtaatcactctctagaagcttattttgcctcctaatgttattagggtgttgtactggaatctttaggatgaaccaaggaagatgagtctctcggtctttcaaaaaccaagtcttgtaatgaggagctgtccactgttgtaaagtaagtcattaagatggaatcgtttgcaggttcttgtgaaattgttgaggagaaggatgcggtaaggttagccaaacattctagcagata

SEQ ID NO: 166696 - DNA, 336 bp, Arabidopsis thaliana nossen
aacaggctagacgagatgattgtgttcatacagctaacaaagctggaagtgaaagaggttgctgacatactgttgaaggaagtgttcgagaggttgaagaagaaagagattgagcttcaggtgaccgaaagattcaaagagagagtagtagacgaaggttataacccgagctatggagcaagaccgttgagaagagccatcatgaggcttttagaggatagtatggcagagaagatgcttgcgagagagatcaaagaaggagactcggtgattgtggacgttgacgctgaatgtaacgtcacggtgctaaatggtggaagtggcactccaactact

SEQ ID NO: 166697 - DNA, 353 bp, Arabidopsis thaliana nossen
ccacgcgtgcattaatcgaacacttaatttctctctctaaaaagcaaaagtaggcgagtcagtgatttcttctaatcctccggtggagtgagagatgatatctccgacgttgtttcctctcctctgcgctttatttctatgtcttccagtggctgttatcttcacagtccagcgagaactcacctgcgttatctcgccggagtttggtttccgctctctttccgtcttctctctttactctcgaaatgtccccgactcttcttcttcttctccggcggttcggattcgacagccgattcccaaagaagacgaccctcttcttcgactatcttctcgggttaacccgaatctac

SEQ ID NO: 166698 - DNA, 357 bp, Arabidopsis thaliana nossen; identical to SEQ ID NO: 131886

SEQ ID NO: 166699 - DNA, 345 bp, Arabidopsis thaliana nossen
atctgctagaagagcatatggattcgggagagctgacgaggcgactcaggcggactccattagagccacgtttggctgagtttctttccacgttcgtcttcgtctttgctggagaaggctcaatcctcgctctagacaagttgtattgggacacggcggctcacacggggacaaacacgcctggagggttagttctggcggcgttagctcatgcattggccttgttcgcggctgtttctgcagccatcaatgtctctggtggccacgtcaaccccgctgtcacttttgctgctctaatcggacgcaggatctccgtcattcgagctatctactattgggttgctc

SEQ ID NO: 166700 - DNA, 342 bp, Arabidopsis thaliana nossen
  unsure (1)..(342): unsure at all n locations
ctcanaaccatatatgagaaacaccatttcacataccttaaactcttccatatgggattcatttcatggtcagggacatgaatgacccacacaccaatgctaacggaggctgttgttgcagcttactggctctggttccagcggatctcaaggtggctcaagggtccacgtgttttgccagttattaacagtcatcccgatatgctcgagcatcgtgaccgcatgcacgactggatcactgagaacctacgtgcgtttggcggcacttaccaaacatgtatctgcgccgtacctttcttggcaaagaagcatggtctcctgaccgtgacgcgccatctcaag

SEQ ID NO: 166701 - DNA, 336 bp, Arabidopsis thaliana nossen
catacagtagcatattttcttcatcgcgagagaacgcttattgcggggtggactacttgtcggtcggtggtgttcgtcagtcttatcgctctatctatcatatctagcccactcgcggctctataaagtctacggtgtaccgcacattatctctgagatgtggttagattccgtcactgatttgcctcatcatggtcactataccaagttgccttggtgtagaagcaacgtatggcattattttcttggcgtattaacatcagctgatacagattacggaatctataactacattcaggaccacattccgacacacgtgatccatcaactgtttcc

SEQ ID NO: 166702 - DNA, 337 bp, Arabidopsis thaliana nossen
gactagatttgcggtattgccactctctgttctccttctcgttctcttgttcctctgcactgagtcgttggctaagtcggaggagtctgaagaatacgacgtcgctgtgccttcatgttgcgggttttcgtctcctcttctgattaagaaagatcaatggaaaccaatcttcgagacgaagtttggacagatttcaaccgttcaaatcggcaatggatgcggtggaatgggaccttacaaggtacattccataacgttggagccaaacacaattttgctccctcttcttcttcattccgacatggtcttcttcgttgactctggaagtgggattctg

SEQ ID NO: 166703 - DNA, 347 bp, Arabidopsis thaliana nossen
acgaatgtgaaaaagtttgaaaaataacacaatatttttttttgttcactaaaatattataaattatgcgaacattgagttttttttttttgccatttaaaatgttcacagtggctaacatgattgaaatcttagtagtaagactcaaagttagtcattcaactaccatagtgaatcttttaacctcgaaaccaccataatcagtcttcctgtaaataatcacctaatcggatgttgctacctaataaaaaattattcatttaactataaaatttatctatcacaaaacgaaattatatatccgtttgggtttactagagaggattaatgattatattttatgatta

SEQ ID NO: 166704 - DNA, 343 bp, Arabidopsis thaliana nossen
catggattcaagaaaggtcagttaagagagagagatggaaacccgcgcttacaagtatatcttgccctatccaagcataagagtattgacgtttaaccgcccaaaatacagcaaatgctatgcaaaagggacaaatagccagagtcaagtatgagacagcacccaggaaaggaactttgacatatgattttccaaagcggcggaaccatttgaaactttaccaatttaacggcagtatcagattttcttttttacttctcaaagagggaagaagcttgaataccctagcatttcatagtcaacaaaaagaaacaactcatgggttctatctgattcattattt

SEQ ID NO: 166705 - DNA, 341 bp, Arabidopsis thaliana nossen
gacacgattattcatttttttcttctattgtaaaataacaaaaatatccagttattacatattagcttgtctatcattcgatctgaatttatccacgatctaattctattactcattcgatatgaacttgtccccgatataacatattattaaaatatgttaacatattattaaaatatgtccccgatataacatattattaaaatatgttaacgtgtaggtgaagacaataacgctcaacttatctgtggaccaacatagatggcgaaaatctaaataaaattcaaaattcttaaatgagaacaattgcatataagatgtaggattcataataatagagc

SEQ ID NO: 166706 - DNA, 341 bp, Arabidopsis thaliana nossen
cgcaaaggtaggggccagattctgtagtaccttcttcgcctacctactctctttcccgaatttatttgccggcggtgatcaatcagaacgggattttagcctgagtaatcggtcactgggaagagaatttcgacggtgagagaagatgaagatatttgtgaaaactctcaaggggactcacttcgagatcgaagtaaaacccgaggattcggttgttgatgtgaagaagaacatagagagtgtgcagggcgcagatgtgtatcctgctgcaaaacagatgcttattcaccaaggtaaagtgcttaaagatgagacaactattgaggaaaacaaagttgctg

SEQ ID NO: 166707 - DNA, 346 bp, Arabidopsis thaliana nossen
atttttgagacaagagactctctctctctctcttctctctttctctccgcctctctccggcgatggtgtgggctatggaccaacgcaccaatgtgaacggagatcccggcgccggagaccggaagaaagaagaaaggtttgatccgagtgcacaaccaccgttcaagatcggagatataagggcggcgattcctaagcactgttgggttaagagtcctttgagatcaatgagttacgtcgtcagagacattatcgccgtcgcggctttggccatcgctgccgcgtatgttgatagctggctcctttggcctctttattgggccgcccaaggaacacttttctgggc

SEQ ID NO: 166708 - DNA, 347 bp, Arabidopsis thaliana nossen
tccggttttgcatgttgttaagaccaaaaaaaacaaaaatagtgacatcgttgtgtcaccattcggagttatccgagttattgcgtaatgttcagaaaataactaacattgtttaatcttgaattttcacaggattacttccctgctgcatcccaatttcagcaatcctacttcaatgggtttaccaaagaagtcctctctaccagtttcaacgtatgctattcttccctagaacatgttatgaatttcttattaaatcaggcacatactaaggattggaagaatttattttttttggtataggtgccggaagaattgctagggagattggttacgagatcaaaaga

SEQ ID NO: 166709 - DNA, 345 bp, Arabidopsis thaliana nossen
catacagtagtttatttgctccaagcgagagaaagcttattgcaacttcaactacttgttggtccataatgttcgtcagtcttatcgctctatctttcgtcttcggtccactcgcggttcttaaagtctacggtgtaccgtacattatctttgtgatgtggttggatgctgtcacgtatttgcatcatcatggtcacgatgagaagttgccttggtatagaggcaaggaatggagttatctacgtggaggattaacaacaattgatagagattacggaatctttaacaacattcatcacgacattggaactcacgtgatccatcatctcttcccacaaatccctc

SEQ ID NO: 166710 - DNA, 350 bp, Arabidopsis thaliana nossen
ctccagtagagttgcctccttccttctcttccaatggcgacttctgctgtcaagtcaacgatgaagcgatcgacgtctctagccaaatcctccgagagtggcgacgactcttcttactctacacggaggtcagcttctaggagacaccggagtttgagccgtttctctcaccgcatgccggatccagacattgaagtgactccgatgaggaagggaaagtttgttaacaccgtgagaggttctggattcggtgaaattagcctcgatgatttagctgtcgagttttttgaatcgttctccggcgagagcgagattagtagcggagaaagaggacgatctggtttaagaaa

SEQ ID NO: 166711 - DNA, 341 bp, Arabidopsis thaliana nossen
cttgaagcttctcttaaaaaacctgtctcactcctcgtcaacctcttgctctcccgctgtcgccaagattgaatcttttttcagttgtggcttcaccggataataaggaattcagtaagagataagttcatcctgacaacatggagaccaagaatgagaattctgatgtttcacgggcagaggagtttaaaagtcaggccaacgaagcttttaaaggtcacaaatactccagtgctattgatctatatacaaaagctattgaactcaacagcaacaacgctgtgtattgggcaaatcgtgcatttgctcacacaaaactggaggaatatggcagtgcaata

SEQ ID NO: 166712 - DNA, 71 bp, Arabidopsis thaliana nossen
tgttcgtcgttcaaagaagaacaatttttatttataaacttacaaaataattagctctcttctgtcaaaaa

SEQ ID NO: 166713 - DNA, 343 bp, Arabidopsis thaliana nossen
gcccatatctccagcctttatagaaaaaaagagaagataactaattaacttcccttgatttggagttttttagctaaacattacatattttctttcttaatcttcccctttcttaattcttaaaaaaacatatactgtcttgtctttaaccaaactcttctcttttatttttgtggcaacaaaaataaatagtgaaagggaatcatctcaaactcctcctagatataaatatttaggttttcgtcattaaataaaagttattttggaaaaaatagaaacaacgaacaagatacaaaaggacatagaattgattattccaagacgacgaatgtgaaagctggct

SEQ ID NO: 166714 - DNA, 342 bp, Arabidopsis thaliana nossen
ctcgatttgttctctgaaattagggttccggagggtgggggtttagcgagtcataccgtagggcgttctgaagcgatcattttggggaatctccaatgttgttatcgatttttctattggtgctctgcttcaaaatttcaagagattctaagattttaggcgagcactgttgagcacaatttcaaaaggtaatcgactcgtctgattggcattgcatgtttggttatggcttatgaagaacaaatactgggcgagtcgttaatttcgatccttttatcttgggttttagttccacaacacagatttgttccttgggaatcactgcttcaagggttataatct

SEQ ID NO: 166715 - DNA, 347 bp, Arabidopsis thaliana nossen
gccaatacaaggttgttggatatttctctatgcattggtcaagtaaagctaacaaataatggtctatttgattgttacaaataaaaaataaatctaccaaagagaaattattttgtaggcttgttgcatagaaaattggaaaattttttgctagctacacgaaatatcaaaaaatacatggtcacacatgccaactatactattatatcctcagctacacgaaatagatgtattgcatgaccacatgtctaaactatacgacgtcatgtagttaacaccatagacatacaattccggtataccaatggattgactccggtgaaaaccaatgttgactagcaaaaata

SEQ ID NO: 166716 - DNA, 344 bp, Arabidopsis thaliana nossen
caaatattttagttttcaagaattgtgtaattgtactactcatacgtgatttatttgaggatttggactaggctaatcgactcttgtccactgatcgtaaacatttatcagttgccaatttaacattttgttatctatatgaactatatttgttaatttacacccaaaaaattaacaaatgctaattatcgcctcaagattagaaattttgtatgaaaagtatatgttataattgacggaagtttatctactgatttatcattgattcacttcaacgaatatttaatatctcatatttgttatgttagatgtgtaggagaaaaaaaaatttatttaaatgaatt

SEQ ID NO: 166717 - DNA, 350 bp, Arabidopsis thaliana nossen
attcacgaaccatctttagtgttacatcatcatataaacggataacagggtgggtcgccactgtagctatgagacctaccaattgataagaaattagcaaagtcagagtcaatacggtggtaccctaagagaaaatgacggaaactgatacatttgtgagatcgtacaagtgaaaatgtagggttagattaggaaaatttaccatttacacggtggtagacaattttaaccaacgaacatccgacatcccactgtgactttaattcccgctttttgaaatcccaaacctgtattacacatatgaaatattagagtctatttgactcataaactagagtttatgttgaagg

SEQ ID NO: 166718 - DNA, 385 bp, Arabidopsis thaliana nossen
  unsure (1)..(385): unsure at all n locations
cgtnatttttcgctttttgcgtgtcctntacttatcnnnacttgtaaacccaaagctacagagatgatctttatataatggacccgcaactcnntttttcaattccnntcccatcaanntcttcttcaaatttgttctnntctagttggtggnntggtgatctanngttttcaaagannatcgattttgcccaagtgggttacttacttgataacccctttcttcttcttntgaaatngggttctttctgtaggagccagaacaattcttgttaccctggtggtgctggctttatcgggacgcatactgttgttcaacttctcaaagatggttttaaggtttcgatcatcgataattttgataactctgttatcgaagctgttga

SEQ ID NO: 166719 - DNA, 341 bp, Arabidopsis thaliana nossen
cagacacggtagaagttccttgtttcttctctgtgagcaagtggacgcgggtgatggggtctggagattccgcttcgagactgactctcatggttctgcttagggttgttgattctaggtgttggattatgcgcaatgtggagtatacttatgaccggaaagcacttttcattaatggacagagactaatcctattctgtggctccatacattaccctcgaagcactcccgatatgtgggaagatttaattcaaaacgcaatagatggaagcattgatgtgattgatacatatgtgttctggtatcttcatgagccttctcctggaaaatacgattttgaa

SEQ ID NO: 166720 - DNA, 204 bp, Arabidopsis thaliana nossen
  unsure (1)..(204): unsure at all n locations
aatagaaaaatttaatccaaataaataattttgcctaacggtttttccgtaaattttaagcaaaaaagcagtaggaacgagaatgaaaagtgcagtaccattaaatgcaagaatatctacttccataattaaaccgntaataataataattcttttttccttgggaatatctcgggattaaatcccatagagatgagaaatctt

SEQ ID NO: 166721 - DNA, 346 bp, Arabidopsis thaliana nossen
cttatccttccgtgtggagatcgacgagttcgagccaccacagcaaggagaacaagaaggtccccgtcgccgtcctggtggtggctctggcgagggatgggaggaagagtcgacgaatcatccataccacttcaggaagcggagtttcagtgattggttccagtcaaaggaaggttttgtgagagtgctgcctaagttcacaaaacatgcaccggctctcttccgaggaatcgagaactacagattctcgttggtggagatggagccaacaactttctttgtgcctcaccatttggatgccgatgctgtttttatagtcctacaaggtaaaggagtgatcgagttt

SEQ ID NO: 166722 - DNA, 332 bp, Arabidopsis thaliana nossen
cttatccttccgtgtttatatttacacgttcgagccaccacaggggggggaacatgaaagttcttgtggccattctactggtgactattcctaggtatggcaggaagagtatacttatcatacataccactctaagaaacagagtttcaaaaatcgtttccaaacaaaagatagatttgtgagaatactgtctatattaacaaaaaattcaccggttctatttccagtaatctataactacatactctaattattatgaatggagccaacaactctctttgttcctcaccatttagatgccaatactgtttttatagtcctacaatgtaaac

SEQ ID NO: 166723 - DNA, 340 bp, Arabidopsis thaliana nossen
gtcttcttgttgattttttaaattttgggcccaacaaaaatttactagaccaacccacttagaggaagtaaaaatttacttctctttttttactcagaggaagtaaaaagtatcggaggaacaaaagagataaactcatgcagaactcctttacttattcaacacaatagtctaacttgtagggattcattgaagagaaattgactaattcttcctaacaactgacaagtagaacaaggagaagcaacttttctccatgaaacaaaccaagagtttgaggtgatgccttagcattcttcgaaacaatcaatcacttcagcatatttggtgagcaagttta

SEQ ID NO: 166724 - DNA, 340 bp, Arabidopsis thaliana nossen
ggaggctgctgagatgaacaagaggtccttcaagtacgcatgggttttggacaaacttaaggctgagcgtgagcgtggtatcaccattgacattgctctctggaagttcgagaccaccaagtactactgcactgtcattgatgctcctggccatcgtgatttcatcaagaacatgatcactggtacctcccaggctgattgtgctgtccttatcatcgactccaccactggtggttttgaggctggtatctccaaggatggtcagacccgtgagcacgctctccttgctttcacccttggtgtcaagcagatgatctgctgttgtaacaagatggatgcc

SEQ ID NO: 166725 - DNA, 341 bp, Arabidopsis thaliana nossen
aaaatgaagtcttgtctagctacttttgctctcgcagtgttagtggcacaaggaagcatttttagtttgtgtttggcctcctctgcttctacaaactctgttcctaattggtttcatcattggccgccgtttaaatggggaccaaaatttccatattctccacctaaaccgccgccaatcgtgaaatatcctccaccggtgcagtatccaccaccgatcaagaagtatccaccgccaccatacgagcatcctccggtgaagtattcaccaccgatcaagacttaccctcatccgtcggtgaagtatcctccaccagaacagtatccaccgtcgattaagaa

SEQ ID NO: 166726 - DNA, 324 bp, Arabidopsis thaliana nossen
gttaattgcgagtttttgtggtttttttcggctatgaacttgttgggttttaggactaaacccatgccgtataagtgttcgggttacgggttaaccggtcgtaccggactgttccgttcgatcgtgtaaacactgatgaaaagcaatatcaagcacctctgtattatgaatgcaatacaaatacatgacagaagaagaaggcctacattcatattgattcattattaacaacaaattacatcgttacacaaagtttgctgaataaataaaaattaataattactggaatgagttccaaacatgagtattgtgtggctttcacgt

SEQ ID NO: 166727 - DNA, 344 bp, Arabidopsis thaliana nossen
  unsure (1)..(344): unsure at all n locations
gttaattgcgagtttttgtggtttttttcggttttgaactcgccggggggggggactaaacccatacttgaagagtgtncaggttactggttaaccggtccgaccggacggttctgatcgtgcgtgaaaacactgataaaaagcaatatcaagcacctctgtattatgaatgcaatacaaatacatgacagaagaagaaggcctacattcatattcattcatcatcaacaacaaattacatcgttacacaaagtttgctgaataaataaaaattaataattactggaatgagttccaaacatcagtattgtgtggcttttacgttaaaactatacattcttata

SEQ ID NO: 166728 - DNA, 338 bp, Arabidopsis thaliana nossen
cgtcatggtgggaatcttttggtgaagaagctccacggagtctggtatgtttggtcaagtggagcttattccaatataccatggcctctgcctgccataaacacttgaggatccttattttgagtggattcattggcctcaagcatcattaccattctgtgatgaagaggttgactacatacaaagtcttgatccagtgaaagactgagacatgcttataagggaacttacaatgattagagaggcgtgtcttcgggttcttgttctctgtactattttccttaatgaagcttctgcatatggtctgtgtcttgccgacatcggcgagatgatgactc

SEQ ID NO: 166729 - DNA, 340 bp, Arabidopsis thaliana nossen
tttcttttgatctcgtttctctctgcactaacgaatgaaaatgaagcaattagtcctgatggtgaggcgcttttgagttttagaaatggagttttggcttctgatggtgttattggtctgtggagaccagaggatcctgatccatgtaactggaaaggagtgacctgtgatgcaaaaacaaaaagagttatagccttgagtcttacttatcacaaattaaggggacctttaccccctgagcttggaaagctggatcagttaaggcttttaatgcttcacaacaatgcgttatatcaatcaatacctgactcattgggaaattgcacggcattagagggaa

SEQ ID NO: 166730 - DNA, 345 bp, Arabidopsis thaliana nossen
gaatcgctggtgcttctaggatcatcggtgttgattttaactctaaaagattcgaccaagctaaggaattcggtgtgaccgagtgtgtgaacccgaaagaccatgacaagccaattcaacaggtgatcgctgagatgacggatggtggggtggacaggagtgtggaatgcaccggaagcgttcaggccatgattcaagcatttgaatgtgtccacgatggctggggtgttgcagtgctggtgggtgtgccaagcaaagacgatgccttcaagactcatccgatgaatttcttgaatgagaggactcttaagggtactttcttcgggaactacaaacccaaaactg

SEQ ID NO: 166731 - DNA, 339 bp, Arabidopsis thaliana nossen
ggaaactgttgacggctactattaatggatccagattgtctgatgaaccattgctcttgatttgagactcttcaacacagtctccttgtgaatagtcttctgtttcttcttcttcttcttccacgttatcctttctcttcgaagtatgtgcgtcatgatcactattttcatcgtcataatccatcattcttcttccgccttgttctctgctactcaaactataggaagcaccctgcataaacacaaagttggagcttcttgagtcagcagattccatgctggaatgagagttttccttctcaattttgatcctttctcctctaagtttattactcttct

SEQ ID NO: 166732 - DNA, 346 bp, Arabidopsis thaliana nossen
gaaaacagttatgagagaaggtagcaaatatcttgttgatggattagtggctactggaggtgatttagaagtagtggaatgctcacaaacgacgccaccggattcaggaatgttcaccggtgagctttctttggtgaaaaatgaagcaggttctatcaatcaagagatcagtgaggtctctgggaagaaagttggtaccaatctcggcagcaaagtggtatgttttttactcatggttttatagcaaatgatgcgtttaaactacaatattggcttttcgttggttgcttaattttcttcttgtgatatgtatacagattcgtcatccggaaaagattttcaagaa

SEQ ID NO: 166733 - DNA, 340 bp, Arabidopsis thaliana nossen
gtgtgttcttccggaggagcacactaaaataagaggtaaacattgattggtagcatactcgatcaaacgagttattttttcgcctactacggatcccatactaccccccataaaccgaaaatccataaccccaagggctaccggaataccgtttagttgacctgtacctgtttgaacagcgtcagtcaatcctgtagttttttgcgcagagtcaatacggtttttataaggttcctccttcgaatgaaatttaatgggatccgcagagaccatgtcttcatccataggattccaagtacccggatcaatcgaaagctcgattctttctgaactactcatt

SEQ ID NO: 166734 - DNA, 344 bp, Arabidopsis thaliana nossen
ttcaaagggtacctttaacaaggcttcatggcgtggaattgacgtggctgttaaaacctttggagaggaaatgttcactgatgaagacaaagtgaatgcatttagggacgaacttgcactgcttcaaaagatacgccatccgaatgttgtccagtttctaggggcagttactcagagtacccccatgatgattgtcaccgagtatttaccaaagggagatcttcgacaatatctagacaggaaaggacctctaatgccagcacacgcagtgaagttcgcccttgaaattgctaggggaatgaattatttgcacgaacataaacctgaagcaataatccattgcg

SEQ ID NO: 166735 - DNA, 345 bp, Arabidopsis thaliana nossen
taccgatccgtcagcggttactatgacgagttattgtgggccgctgcgtggctataccaagcttcgaacaatcagttctacttggactacttgggtcgcaacggtgacgccatgggtggtaccggttggtccatgactgagtttggttgggacgttaagtacgctggtgttcaaacccttgttgccaagtttttgatgcaaggcaaagcaggacgtcacgcacctgtgttcaggaagtatcaagagaaagctgattcctttatgtgttccttgttgggtaaaagctcgaggaacattcagaagacaccaggtggtttgattttcagacaacgttggaacaatatg

SEQ ID NO: 166736 - DNA, 341 bp, Arabidopsis thaliana nossen
ggacttgcattctatttggagacgctgctggtgctgtggttgttcaggcttgtgatattgaagatgatggtttgttcagttttgatgtgcacagcgatggggacggtcgaagacatttgaatgcttctgttaaagaatccgaaaatgatggtgaatcgagctccaatggctcagtgtttggagactttccaccaaaacaatcttcatattcttgtattcagatgaatggaaaagaggtctttcgctttgctgtaaaatgtgttcctcaatctattgagtctgctttacaaaaagccggtcttcctgcttctgccatcgactggctcctcctccaccaggcg

SEQ ID NO: 166737 - DNA, 342 bp, Arabidopsis thaliana nossen
cttggtccttattctctctttcttgctactggaatctgcaatgagttgtttgctttcgaagttgccgcaacctaaacagaattgaagacagtacgtattaccatgagtcaaacaatggaggaatatcagtctaatgagagtgaagataaaagaagttggatttggagtaaggcggtaagtgttgggaagaaagttctgacagctggtgttgtagtgtcttcagctccacttcttgttccttcactttttgtcgcctcgacactcgcctttctctcctcggttccgttttgtctcttcttggctaattatgcttgtacacaaaaggtcatgagtactctgctt

SEQ ID NO: 166738 - DNA, 346 bp, Arabidopsis thaliana nossen
gtttttatagtcctacaaggtaaaggagtgatcgagtttgtgacggataaaacaaaagaatcgttccacataactaaaggtgatgtggtaagaatcccttctggtgtcaccaactttatcaccaacactaaccagacggttcctctccgcctcgcccagatcaccgtccctgtcaacaatcccggcaactacaaggattacttccctgctgcatcccaatttcagcaatcctacttcaatgggtttaccaaagaagtcctctctaccagtttcaacgtgccggaagaattgctagggagattggttacgagatcaaaagaaattggtcaagggattatccgaagaa

SEQ ID NO: 166739 - DNA, 342 bp, Arabidopsis thaliana nossen
taagtttgtcaccttaatactgtagttctccaacgaagcaacgttggtgagatcttgttataaacctataatcacaaaccaatattcatatcggtatgaaatattttcgcattttcaatgattttttcttagaaatattatataacatcttcgacacgaatatatgtgtgaatatatggcatatatgattgatgcaaataagagtttcaaagaaatgatttaattagaaaattttccttatagagatatatacagacagtaaaaaataactttctaaattaactcttcttatcacatatataactgaaaatgtaaccaaaatacaaactggatccaactcat

SEQ ID NO: 166740 - DNA, 343 bp, Arabidopsis thaliana nossen
gtttcaagagagcagagatgtgtagtttgtcggcgattatgttgttaccaacgaagctgaaaccagcttattcagacaaacggagtaacagtagcagcagcagctcactcttcttcaacaatagaagatccaagaagaagaaccaatcgattgttcccgttgcaaggttgtttggaccggcgattttcgaatcatccaaattgaaagtactcttcttaggggttgatgagaagaagcatccttcaacgctccctaggacttacacactcactcacagtgacattacagctaaactaaccttagctatttctcaatccataaacaactctcagttgcaaggatg

SEQ ID NO: 166741 - DNA, 338 bp, Arabidopsis thaliana nossen
gttgaattctacgtggatttaagcataagtttacaatagccatagtaattcggtaagtacatgcttttgggtccttatcatctctattggtgtggtcatatctgaataagcagagctactacggatcacgaatctcttcttctcgtatgttttatgtttaagtgaggttcgatctagaacctcatcaattaatatcaataaaagtacacccatgatcaatgagaactcatgtaacaataatctctgttcgtaggttcttggggataaattagtcatcggaatagcataccagagatcgacgatctcattaatcattatgtataagtacaaaacttcgt

SEQ ID NO: 166742 - DNA, 311 bp, Arabidopsis thaliana nossen
gaatgaataaaaaaaagaatgccacatccgctcgggtgggaccaacaaagtcgggggcttactcccactctttatcgaattacaccgattaattggctatcgaagattgtttctgtattccaaaaaattagcaacaaaatttaacatattttttttattatgagaacaaatcctactacttcaaatccagaggttccgattcttgaaaaaaaaaacctgggacgtatcacccaaatcattggtactgtgctggaagtcgccttcccccggggcaaaatgcctaatatatacaatgctctggtggtgtaacg

SEQ ID NO: 166743 - DNA, 344 bp, Arabidopsis thaliana nossen
aattggttcagctcaaaaaacgaaaacgatgggttccatcgaagaagaagcaagacctctcatcgaagaaggtttaattttacaggaagtgaaattgtatgctgaagatggttcagtggactttaatggaaacccaccattgaaggagaaaacaggaaactggaaagcttgtccttttattcttggtaatgaatgttgtgagaggctagcttactatggtattgctgggaatttaatcacttacctcaccactaagcttcaccaaggaaatgtttctgctgctacaaacgttaccacatggcaagggacttgttatctcactcctctcattggagctgttctgg

SEQ ID NO: 166744 - DNA, 90 bp, Arabidopsis thaliana nossen
catttgtatgtattgacctcataaaagaggataaaaactatcctaatatattaaacccaatttagaacacaaattaccatcataactcac

SEQ ID NO: 166745 - DNA, 340 bp, Arabidopsis thaliana nossen
caaaaatggagttgataaacgactttctcaacctaactgctcctttcttgaccatctttggtctctgcttcttcttgcctcctttttacttcttcaagttcttgcagtctattttctcgacaattctctctgaaaatctttacgggaaagttgttctcatcactggtgcttccttcgatataggcgagcaattggcatatgagtacgcatgtagaggtgcatgtttagccctgaccgcccgaaggaagaaccgtctacaggaagtggcagagattgctcgtgaactcggatcttccaatgttgtcaccggtcatgctgatgtcttcaaacctgatgactg

SEQ ID NO: 166746 - DNA, 93 bp, Arabidopsis thaliana nossen
  unsure (1)..(93): unsure at all n locations
aagaaaaatgggtcgagtctcatctattatctctttctctttgacactcttgatcctcttcaatggctacactgncccaacagtgtgcccaac

SEQ ID NO: 166747 - DNA, 342 bp, Arabidopsis thaliana nossen
ggagaaggcagttcatttatccaccaaaaatggacccaaggttccaggagagccaacgaagaccggaacctccatggttgacacggcagcttcagccgtacaaagcttcgctccgattaaccaaatccaccaacatctctgcgcgtttcatttctatgcatatgacatgacccgacaagtggaggcacaccatttctgtggtcacatcaacgaagacatgcgccagtgtctgatctacgacggtcctgatgccaacgctcgtctgatcggtctggagtacattgtgacagagaagctctttatgacattgcctgacgatgagaagaagctttggcacactca

SEQ ID NO: 166748 - DNA, 346 bp, Arabidopsis thaliana nossen
ctattaatgtatggcacaccatactaacttttggcctggcgcttgacctgataggcatgcccataacgtcttaccacaaataattccgacccacactagaggacggagccaacatcgaggaaattcaagcagatcaaatcggacatttggccacgttttcaacgaagacctgcttggtagggtacctttccgcatcatatggattctcagtcaaatggagtattgatatgaataccagctgtcgtgatgacgagaatctatctggttaaacgatcaaacttattctcgatagatgataccttcaggataaccagagactattgtccatctccagatgcgtaggagt

SEQ ID NO: 166749 - DNA, 343 bp, Arabidopsis thaliana nossen
caccggtactcgttctgagcgattcgttgaagcgtgaatctggaagcaaggttcatcatggtaatatccaagcttccaaggctgttgctgatatcattcgtacaacattgggtcctcgttctatgttgaagatgcttcttgatgctggtggagggattgttgttactaatgatgggaatgctattcttcgtgagctagatgtcgctcatcctgcagctaagtcaatgattgagttgagccgtacgcaagatgaagaagttggtgatgggacaacgtctgttattgttctagctggtgaaatgcttcacgttgcagaagcgtttcttgagaagaattaccatcc

SEQ ID NO: 166750 - DNA, 287 bp, Arabidopsis thaliana nossen
cggacgcgtggggacaaaggattctgtttcgtcatgttcaaccttcggcgggggacgacgcctatatgtctgcctcaaattgcttgtccaaagacagtgctgcatatcaatatggagatgatgttgtcattgtcgcggcacaaaggactgcactttgcaaggcaaaacgtggcagcttcaatgatacatttccagacgagttgcttgcctctgtattgagagcattgatagagaaaactaatgtaaacccaagtgaaattggtgacattggagtgggtaactttttg

SEQ ID NO: 166751 - DNA, 346 bp, Arabidopsis thaliana nossen
gaacatgtaaatgaattcaaatcaattgagaaattcaagattttcaacaccaacaacctatgggtgaacttgaaagccatcaaaaagcttgtggaagctgatgcacttaaaatggagatcatcccaaacccgaaggaagttgacggagtcaaagttcttcagctggaaactgcagctggtgctgcgataaggttttttgataatgcaattggtgtgaatgtacctcggtcacggttcttgccagtgaaggcaacttcagacttgcttcttgttcaatcggatctgtacacactcgtagatggctttgtcacaagaaacaaagctagaacaaaccccacaaacccag

SEQ ID NO: 166752 - DNA, 343 bp, Arabidopsis thaliana nossen
gaacatgtaaatgaattcaaattaattgtgaaattcaagattttcaacagcagggacctatggatgaacttgaaagccatcaaaaagcttgtggaagctgatgcacttaaaatggagatcatcccaaacccgaaggaagttgacggagtcaaagttcttcaactggaaactgcagctggtgctgcgataaggttttttgataatgcaattggtgtgaatgtacctcggtcacggttcttgccagtgaaggcaacttcagacttgcttcttgttcaatcgtatctgtacacactcgtagatggctttgtcacaagaaacaaatctagaacaaaccccacaaacc

SEQ ID NO: 166753 - DNA, 342 bp, Arabidopsis thaliana nossen
cccaaatatgcataagcttttgttttctcttctctccgtcgtctcactctcatttctcctcttcttccatggcgccgaggcacgccagcgagaggcgccgtttccaaacgcctgccatttcagccaaatcaacagcctcgcgcccgctcaggcgacgaagttcgaagccggtcagatggaagtatgggaccacatgagccctgagctccgatgcgccggtgtaacggtggctcgcatcacccttcagcccaattccattttcttgcccgctttctttagcccacctgcccttgcttacgttgtccaaggagaaggagttatggggacgattgcttctggttg

SEQ ID NO: 166754 - DNA, 339 bp, Arabidopsis thaliana nossen
ctctgttttttcttgcattttccccagaattccttcacattctctccttttcctctttttaattcctcaccacctcaaattctccataaacaaatccacttctgcatggttgggagaatctgttagagaatttttgctgttgttgggttcagatttggaaaatttccttttttttcgagtttcttctgaattattcatcgtggagattctcggatcgggaagggctgcgagaggtggttttcacggcggggatagattcatcttctgtcttctcctgagggggtagccgaggctccggcctcggcggtttttaaacccctacctttacaaattctggga

SEQ ID NO: 166755 - DNA, 339 bp, Arabidopsis thaliana nossen
ttcgagaagaagaagagggagtgatggaattgcaaggagaggaaagcaaaacggcgacgtattgcgtgacgggtgcaagtggatacatcggttcttggttggttaagtctcttctccaaagaggttacacagtccatgccactctcagagatcttgcaaaatctgaatactttcaatctaaatggaaggaaaatgaacggctcagattattccgagcggatcttcgagatgacggcagctttgacgacgccgttaagggttgtgacggcgtcttccatgtcgccgcttccatggagtttgatatctcatcagatcacgttaatctcgagagttatgtcc

SEQ ID NO: 166756 - DNA, 338 bp, Arabidopsis thaliana nossen
attctgttaaaaatctcacctttcaattcaaaaccccttccatttttgtgattaatatgcctacttggtggggaagaaagtcctgcaagaacaaggacgataatcacagaggaatcatctccacagatagagatatcaagagctctgctgttgttgttgatcctcctctcactcctactcgtggtggtacacctcgttgcagtcgtgaattctctggagcttcttctgctttctctggttttgactctgattctaccgagaagaaaggtcaccctcttcctcgtcctttgctctctcctgtttcgatccatcatcaagatcatgtaagcggatccact

SEQ ID NO: 166757 - DNA, 343 bp, Arabidopsis thaliana nossen
atgcttcttgggtatttaggtttgacacagcttcacacccaaaaagaagggagctacgtctgagttaaacttggaggtggaagccttctttcgtttctcgacggtgaagtaagaccaaacccatgagcttattatcctaggtcggaacaagttgataggatccccttttacgcccccatgtccctctcgtgtggcggcagggaggcgtaaaaaggaaagagagagatggggtttctctcgcttttggcttggcatagcgggcccccagcaggaggcccgcacgacgggctattagctcagtggtagagcgcgcccctgataattgcgtcgttgtgcctgggct

SEQ ID NO: 166758 - DNA, 345 bp, Arabidopsis thaliana nossen
ctttgtgatgtgtaatatgtaatgtaatatcaatgttgatgtatattcaggtggtcttcttagttcttactacttgtcgtaacatataaagatatttagtaaacgtactctgattttataatatcagatggaccgtttcttaaatggacttagaaaatagaatttgtgatagtgatcagttctgagaaattctataaataattgtatcgaatcttgggtgacgaaaaccaaaagattttcctctctgttttttaagttggaatttccagttggccggctaaattcctccactattaaaaattacaaaataaataataatcttatttctatagaatgattatcatc

SEQ ID NO: 166759 - DNA, 342 bp, Arabidopsis thaliana nossen
atttctctttctctttctactatttctctcctgtggagaaactcatgagatagagagagagagagagaagagaagagagcatgtatgtttggttttataatctctctactcataccaaagatttgtctcagacccaccacttggacagagagaacccaagctcctttctctctttttctcgatctactccttcttaatctccttttttgaaacttgaagccactttcaacatcatccttaaacttttgttcccttattcacaatctcctgccacctctcatttctctagctacatatatgggttctattagaggaaacattgaagagcctatatctcagtca

SEQ ID NO: 166760 - DNA, 362 bp, Arabidopsis thaliana nossen
caacaatggaaatgagcctctcattcttgttgcagccgcggatctcgccagcaaccagaaccagcttgaccgcaaccttagaccatttttgatagccggaaacaacccacaagggcaggaatggctacaaggccgaaagcaacagaagcaaaacaacatcttcaatggcttcgcacctgagatcttggctcaagccttcaagatcaatgtcgagacggctcagcagctccagaaccagcaagataaccgtggcaacatcgtcaaggtcaacggacctttcggcgtcattaggccacccttgagacgcggcgaaggcggccaacaaccacatgaaatagctaatggtttagaggagactttgt

SEQ ID NO: 166761 - DNA, 350 bp, Arabidopsis thaliana nossen
agagaagaaagatagagaaaaaaaatgggaggcaaaggtgtgatgatggtggcgatactttgcctttgggcactctctgcaacatctgaagcagtaacagaggctgagccaggtttgatgatgaacttctacaaggacacgtgtcctcaggccgaagacatcgtccgtgaacaagtcaaactcctctacaaacgccacaagaacaccgctttctcttggctccgtaacatcttccatgactgcgccgttgagtcatgtgatgcgtcgcttttgctggattcgacaagaagagagctaggagagaaagaacacgacaggagcttcggacttagaaactttaggtacatcga

SEQ ID NO: 166762 - DNA, 333 bp, Arabidopsis thaliana nossen
ctactatacaagcttggaaaacctcaaagaaccaacgttaatttcaattacttaaacatcaaccgagaagttgatgcaactgagaagaacaaatgctaattgcagacctcttataaaggcaaacatgaatcctccaaagaaagttgctgttacttgtatgaatatcccaacctgtgcatcaaaaccatcacactctcagtattttgtgtcagcaatgaatgtaaaataatcgattagttagtattcctctgttgtaattacattttttaagttattcggtgtaattcacgaacaatgttttgtaaaagaacttacatcaataaagacaataat

SEQ ID NO: 166763 - DNA, 337 bp, Arabidopsis thaliana nossen
tcataatctgacatgactgcttcattacgaacacataaccatcgggggggggaatgacctaaaggtgaaccaaaaagttggtgcacctgagaagaacaaatgctaatagcagacctcttataaaggcaaacatgaatactccaaagaaagtagctgctacttgtatgaatatgccaacctgtgcatcaaaaccatcacactctaagtattttgtgtcagcaatgaatgtaaaataatccattacttattattcctctgctgtaattacatttgttatgcatttcggtgtcattcacaaacaatgatttgcaaaagaacttacatcaatatagacaat

SEQ ID NO: 166764 - DNA, 395 bp, Arabidopsis thaliana nossen
aaaaacgggggcgtcccacgcgtgcggcaaaacaacatcttcaatggcttcttacctgagatcttggctcaagccgtgaggatcaatgtcgagacggctcagcagctccagaaccagcaagataaccgtggcaacatcgtcaaggtcaacggacctttcggcgtcattaggccacccttgagacgcggcgaaggcggccaacaaccacatgaaatagctaatggtttagaggagactttgtgcaccatgcgatgcactgaaaacctcgatgacccgtcggatgctgacgtgtacaagccatcactcggatacattagcacacttaacagctacaatcttcctatcctcagacttctccgccttagcgctcttcgtggctccatccgtaaaaacgc

SEQ ID NO: 166765 - DNA, 169 bp, Arabidopsis thaliana nossen
ggcaaacatcaacaatgtgaaactgaaacttgattcttcagctcaagtggacatcaacaatgtgaaactaaaacatgattcttaagctccaagtaaacatcaagtcatcaacaatgtgagctgaaacttgatgcttcaggtcaagtaaacatcaaacacatttggcttt

SEQ ID NO: 166766 - DNA, 367 bp, Arabidopsis thaliana nossen
tatatctatatataaataaaagaaaaagaacatgttgattatatcaaaattatagaacaataaggaattttaacttatcatggggaaagacaccattgctgatataataacctctatacgaaatgctgacatgaatagaaaaggaacggttcggataggatcgactaacatcacggaaagtattgttaaaatccttttacgagagggttttatcgaaaacgtaaggaaacatcgcgaaaacaaccaatattttttgattttaaccctaagacatagacgaaataagaaagaatcctacaaaacgattttaaatttaaagagaataagtcgaccgggtctacgaatctattctaactctcaacgaatt

SEQ ID NO: 166767 - DNA, 368 bp, Arabidopsis thaliana nossen
cgcttcgcctcttttagggcgcaaccaagagacagagaagaagagagagactcgtaagcaacaataaccaatagctctctctctctctctctctctcctctgctgattcttcgctgactcttgcctcctcgacgtcgtcttcggctttgtagcatctcgccgaagcgtcgttgatttgagagagacccaatttggattgttagaaaatgggttacataggagctcatggtgtagctgctcttaagaaacacaaatacagtggtgttgatcactcttatcttgccaaatatgttctccaacctttttggaaccgttttgtcaaaatcttccctctatggatgccccccaacatgataacacttatgggg

SEQ ID NO: 166768 - DNA, 374 bp, Arabidopsis thaliana nossen
gcgaaaaatgctcgttagtccctattcggtcgcacaatatttactcgagaagcacgtaataaatttaacaaaattttaaaacgttgcacaatcgtcgcaatttagtcacaaaacagttacacaaacgttgcaacgtgcgactgtgttctgctgtcgtcgcaaaaaaattgcacaaagcgactgttttgtgacattttggaataggtcacaagacaaacttttgaaatccacatagtttgatccattctatagataaacattactgaaaaacaaccattttagtacataaagaactttaggtatacaaatgattggtttcaaacttatttgagaacttgtttgaaaagatcaatcatgaaaatgaattcacatga

SEQ ID NO: 166769 - DNA, 370 bp, Arabidopsis thaliana nossen
gcgaagctcctggtcaagacagtgaagtgatcttataccctcaagcaatttggaaagatccattccgtagaggcaacaacatccttgttatgtgtgatgcttacactccagcgggagagccaatccctactaacaagcgacatgctgcggctgagatctttgctaaccctgatgttattgctgaagtgccatggtatggaatcgaacaagaatacactttgttgcagaaggatgtgaactggcctcttggatggcccattggtggcttccctggccctcagggaccatactactgcagtattggagctgacaaatcttttggaagagacattgttgatgctcactacaaagcctctttgtatgctggaat

SEQ ID NO: 166770 - DNA, 371 bp, Arabidopsis thaliana nossen
gcggtaaaaacgctatggtgctacttcaatggaacgtaaacgcaaacgcggggctctacgtgacaaacggaaaggctcatatacaaatggtgaacgacaacggagaaagagtgttcgaccaagagatctccagcggacagttactagtcgtgccacaaggcttttcggtcatgaaacatgccataggcgaacagttcgagtggatcgaattcaagacaaacgaaaacgcacaggtcaacacactcgcgggccgtacctcagtcatgagaggtttgccgcttgaggttataaccaatgggtaccagatctctcccgaagaagctaaacgagtaaagtttagcacgattgagaccacactgacccatagcagt

SEQ ID NO: 166771 - DNA, 386 bp, Arabidopsis thaliana nossen
cggggttgttccacgcgtgcgctgaagatgcagcctgatttttttaaaaagtcatcaattgagggaggggggtttacggaattttgtgagggaaccacatacagaatagaggaagtgattggtaaaggaagttatggagttgtctgttctgcttacgatacacataccggagagaaagttgcgattaagaaaatcaatgatatctttgagcatgtttcggatgcaactcgcattcttcgtgagatcaaacttcttagactcttacgccatcctgacattgttgagatcaaacacatcttgttgccgccttcaagaagagagtttcgagacatttacgtggttttcgagcttatggaatctgatttgcatcacgttattaaggcaaa

SEQ ID NO: 166772 - DNA, 367 bp, Arabidopsis thaliana nossen
cgtccgcttttgtactctggatttacagaattttttcaaagagatttcactctttgggggaaggacaaaagattttcttgtgtcgcttatcatggtcccttaagctgttactttaattggagcttcgatgctttcaattcggtgcaaaacataagagtcttcgttcgattccttatcggcgaggatttcttaccggaatcggcgctcaacggtggaggttgttgccggaaaaacttgtgattactcatcatgcgtgggacgtggtttaaccggttgtcgacacgtttccatggatggagtttagattgaaattcttctgcagaagtcggttatctattgggcctttgttggctatttctgtaaacct

SEQ ID NO: 166773 - DNA, 205 bp, Arabidopsis thaliana nossen
ctcgagcgagtgaaattgttgggccacctcagatgcctaatgagttgatgacgttttgggatacaaaagtggagacacgccatcccataagactctattctcggtatatagacaaagttcatataatgtttaaatttacccatgaagaagctcgggatcttattcaacgatatcttacggagcattccgatcccaacaatgaaaa

SEQ ID NO: 166774 - DNA, 366 bp, Arabidopsis thaliana nossen
gttggagcttagaagccgtcggcacaagaagaagaagaagaagaatgtctcacaggaagtttgagcacccaagacatggttctcttggtttccttccaaggaagagagctaaccgtcacagaggaaaggtgaaggctttccctaaggatgaccaaaccaagccttgcaagttcacagctttcatgggttacaaagctggtatgactcacatcgtcagagaagtggagaaacctggatccaagcttcacaagaaggagacatgtgaggctgttactatcattgagacgcctgctatggtggttgttggagttgttgcctatgtgaagactcctagaggtttgaggtctttgaacactgtctgggcac

SEQ ID NO: 166775 - DNA, 366 bp, Arabidopsis thaliana nossen
caaatctcagatctagctcaacaatggcgttgctcgtcgagaagacctcaagtggccgtgaatacaaggtcaaagacatgtctcaagccgatttcggtcgtctcgaactcgagctcgccgaagttgagatgcctggactcatggcttgtcgtaccgaattcggaccttctcagccattcaaaggcgctagaatcaccggatctcttcacatgacgatccaaaccgccgtactcatcgaaaccctaactgctctcggtgctgaagtcagatggtgttcctgcaacatcttctccactcaagaccacgccgccgcagccatcgctcgtgactccgccgctgttttcgcctggaaaggtgagactcttc

SEQ ID NO: 166776 - DNA, 365 bp, Arabidopsis thaliana nossen
attaaaagtccaactgatcaccacgtctgtattgtaaataagcagttacgaataatccagccaaagtaataggaattagacctaagacgattccaaataaaaaaacttcaatcatttgaattttcttttgttttcatttttgaaagggagaaaagagaggtactatctattcctagctcttaatctgtattgccaatgaatctcaatgaccaaaatttggtaattaacacggtaaggaactatcgaacatattaataaataccaacgaaatccttttttataaaaaaatctgcattcaattaatttcaaataagtcgtattttgcttagaccaataaacagaactgaggttatagttaaagctgc

SEQ ID NO: 166777 - DNA, 365 bp, Arabidopsis thaliana nossen
cagcactgtagacgtttgatctctgacaacaaagctgagccttctgtgtatgatactatgccaactgggccagatgctcctactgagcatgtgatattggatgagaataccaaggctcaagagcatgactactacagaattggggccttcaaggcgagtcccgatcataaattggtggcatatgcagaggacacaaaaggtgatgagatatatacagtgaatgtcatcgactctgaagacctaaaaccagcggggcaacagctgaaaggacttacttattatcttgaatgggctggtaatgatgctttgctctacataacaatggacgaaatcctgcgacctgataaggtttggttacataaatt

SEQ ID NO: 166778 - DNA, 361 bp, Arabidopsis thaliana nossen
ttagagtcttcactcttcaccgaaccctctgattctcgtatagacacacacatacctatacatacacactttaacacttatatctgtagagtatagccatgggagaaggagaagcaaaagcagagcacgcagccaaagcagatcacaagaacgctccctccgcttcttcaacgccagaatcttactctaaagaaggcggaggaggcggtggagatgctcgccgcgcaatctgcggcgcgatcttcaccatccttgtcatactaggtatcatagccttaatactttggctcgtctaccgtccacataaaccacgtctcaccgtcgtcggagccgccatctacgacctgaatttcacagcgcc

SEQ ID NO: 166779 - DNA, 366 bp, Arabidopsis thaliana nossen
gcgtataaatgtttatatatttatgtattttaaacatcatgagtcaaaaactttgatatataattttaaagatacgaagtatcaaatgtatttaagtatattcaagaaatcccccgacctcgtacaatggtactattgaagcttttttgaacatgaataactccatttggtattctacgtacattttatgtgaaccattacttgtatttttactcaaaccaaaattttaaccacaagtagaaatttaattaacctaaatcaacgatcatttttttaataagtgaggcattctccatttgacatgtgacataagttttaaattctagttttttacttctccttttctgaataaaatctttctttccg

SEQ ID NO: 166780 - DNA, 368 bp, Arabidopsis thaliana nossen
ggatcccaaagaaaaacacaatgcagcatcaccgccaccaagacgagaagaatatgacgacggaggcgaattctacggcggaggagggttatagtgtacagagagacttttggcgtcaagcggcgaaatccgatggtttcgatttagagaacatctcacttccaccaggtacgaatggaattgtcatgggactgattccctacgactgtcaacgtgcaaggcattatccgtttcctgtcttggtcaaactttatgctaagtttgggcttcatcgttacaatatgttgaaggggacaagcttccagctcgctaccctaatgaaattcaacatgttaccgaactatatttcctctttctacatgactctg

SEQ ID NO: 166781 - DNA, 367 bp, Arabidopsis thaliana nossen
gtcattacgacatgaatggaccacatgatcaaaaccattgccgccggcaagattgttatccatcctaacaaaaacaattctgattaggtattcggtaccggctcaacttggtctaattagctttactattcttgattatgtataattgatccggttatgctaaaccaaaatctgatattatatgggctaccgtgtggattaaaaatccgattgggggaactcgtgcaaagcccaattaaagagaggcggtttgttttgtttttaacttttaactcgttccaaagtcccacatcgctaacaacataagagttgaagacaagaggagtagtataaataacgagaccacttcacagatcaattcatacct

SEQ ID NO: 166782 - DNA, 354 bp, Arabidopsis thaliana nossen
gtcattacgacatgaatgttttttcatgatcaaaaccattgccgccggcgggattgttattcattcgggcaaaaacaaatctgattaggtattcggtaccggctcaacttggtctaattagctttactattcttgattatgtataattgatccggttatgctaaaccaaaatgtgatattatatgggctactcgtgtggattaaaaatacgattgggggaactcgtgcaaagcccaattaaagagaggcggtttgttttgtttttaacttttaactttgtccaaagtcccacatcgctaacaacatatgatttgaagacaagaggagttgtataaataacctgaccacttcaca

SEQ ID NO: 166783 - DNA, 363 bp, Arabidopsis thaliana nossen
ctgaaatcgtagccatcagtctcagtgaactcaaggccatccttgtcatgctcaaggatctggatgatacaagacttctccacaagtgcttgcaagaagttgagcacgccatagacattccaggccttatcgtgctgtctgagcaatgcaatctcctcctctgttttgttcttgagctttgctctgaattgacagaaactttggaactggtagacaaactcatccaccatatcccacaaccactggttcggcaactgcatattcactacgccgtgcaacacaacctagaaagaacaaacggaagaaggtctacttacttgtatttattcccagccaatacatacacaaaagaaatcaaaatca

SEQ ID NO: 166784 - DNA, 365 bp, Arabidopsis thaliana nossen
attggaacttttttcctctgttttctcaaaaagtttccgctttttgctcgctggagaagaaagaaagaaagaagtgaaaaggaatcattaccatggctgatccggcgattaagctctttggaaagacgattcctttacctgagcttggtgttgttgattcttcttctagctataccggatttttaagcgaaactcagattcctgttcggttatcagattcgtgtaccggcgatgatgatgatgaagagatgggtgattccggtttaggacgagaagaaggtgatgatgttggtgatggtggaggagagagcgagactgataaaaaggaagaaaaagatagtgagtgtcaggaagagtcattgagg

SEQ ID NO: 166785 - DNA, 365 bp, Arabidopsis thaliana nossen
ctttctctttctctctgatcatttccaaattatttctaagctaagaaaatctttaaaaataacaaagcttctaaaataataatccgacctaccggattcaaaccattgatctgaagatcatctataaaccagtccttgatctataaactaaaataagggaagaaaaaaacaagagagagaaatagagaatgaagtcttttgcggctaaggtagaagagggagttaaaggaatagacggaaagccgtcggtaggtccggtgtaccggaatcttctgtcggaaaaaggttttcctccgattgattctgagatcaccactgcttgggacattttcagtaaatcagtggagaaattccctgacaataat

SEQ ID NO: 166786 - DNA, 363 bp, Arabidopsis thaliana nossen
caacgtggagtacaacgtctcgtatgtctaccatgccctgtatgcctactttgacagagacaatgtcggcttgaaaggtttcgccaagttttttaacgattcgagtcttgaagaacgaggtcatgctgagatgtttatggagtatcagaacaagcgtggtgggagagtgaagctgcagtctattttgatgcccgtctctgagtttgatcacgaggagaagggagatgcattgcatgcgatggagcttgcattgtctttggagaaacttacaaatgaaaagcttctgaagttacaaagtgttggtgtgaagaacaatgatgttcagctggttgattttgtagaatctgagtttctaggcgagca

SEQ ID NO: 166787 - DNA, 367 bp, Arabidopsis thaliana nossen
atttctctcgcgatttctattttattacaagaactttgttttgggtgtggatccatcgttcaaggttcgttgaaaactatgaagaaagttgagttttttatgctccttctctgcttcatcgcagcgtcatttctagtgtctgctgatccaccaacatgtcctgctgatttgggaggcaagtgtagtgattctgatgactggcaaggtgatttcttccctgaaatccccaagattaagtatgagggaccttcgagtaagaacccacttgcttacaggtggtataacgctgaagaagagattcttgggaagaaaatgaaggattggtttagattcagtgttgcgttttggcatactttccgtgggactg

SEQ ID NO: 166788 - DNA, 364 bp, Arabidopsis thaliana nossen
tctcgattaagcttgaacttggaggatcaatggccgacgttcgcacacactcgcaccagcttcaagtgcaccctcaacgccagcatgaaggaggcatcaaagtcctttatcctcagagtggcccttcttccactcaggtgctagccgtgtttgtcggtgtaccgataggaggaacgctgctgactatagccggtttgacattagccggttcggttataggactaatgctagcattcccgttgtttctcatctttagtccggttattgtaccagcagcctttgtcatcggtctagctatgactggattcctggcttcaggggccataggtctcaccggactatcatccatgtcgtgggtactcaa

SEQ ID NO: 166789 - DNA, 363 bp, Arabidopsis thaliana nossen
caaacagagagcgagtcacgcgccgagttttcctcacttgttctcaatggagctctctctctttcttcgctatcgctttcatttttctcctccagatctcgattccaatctctctctccctctctacttccttcaacagaaatggaaacgttcctatttacctctgaatccgtcaatgaaggacacccagacaagctttgtgaccagatttctgatgcgatccttgatgcttgcttagagcaagatcctgaaagcaaagtggcgtgtgagacatgcaccaagaccaacatggtgatggtgtttggtgagatcactaccgctgcgaaagttgactatgagaagattgttagatccacttgcagg

SEQ ID NO: 166790 - DNA, 371 bp, Arabidopsis thaliana nossen
ataaaatattatatttttttctgaatatgatgtaattctaatttttttaaatggacatatgttattcaacctatgaagaaataatatgtgtacaatgtcccacatcgcttagaaaaattggacaatggttcagacccatattataaaaggaccaaaatgattctgattacgaatgagcaggaagcttgatttatcaggcgtccaaaattaaaatagttatccgattttactgggattttttattttaaagaattgaaactttaaaatgtttcaaaaaattataaatattataactttatcaaaagttaaatattataattttaaatttttttataaagtttatctttaaaaaatgctttaaatatttataa

SEQ ID NO: 166791 - DNA, 280 bp, Arabidopsis thaliana nossen
  unsure (1)..(280): unsure at all n locations
tccacacatccgataaaaaaaaatataaaaaaatttttttttacccaaaacnaaaaaaacggccgcgacataaattattcatcctctcaacacaaaacaaaagtacaatcacccacattgcttataaaaatcatacacatccccatacccatatcatctaatcccaccaacatattctgattaccaatgatcaataagcttcatttatcacccctccaaaattaaaatacttatccgatactactaaaattctttattttaaacaattcaaactttaaaa

SEQ ID NO: 166792 - DNA, 332 bp, Arabidopsis thaliana nossen
  unsure (1)..(332): unsure at all n locations
ctctttacttattctagttcttttctaaatcaataagaccttaacgggggcgccatgagtttgtttgggtatcgcaacnatctatttctactaaccctaaccggcgaacaccagcacagattccacccggacacgaacgcctctattctatcaattcttgaacaagcaaactctgaatccacaaaaagatccgtcctcatcactaccggccacggaaagttcttctccaatggatttgatctaccatggacccaatacagtggacacggtgctatagaacggatacaccaaatggtcaaatcggtcaaaccggcgttagccgaactactcga

SEQ ID NO: 166793 - DNA, 367 bp, Arabidopsis thaliana nossen
ctcttttcttattcttgttctttttctaaatcagtaagaccttaaccgtggcaccatgtgttctttggggaagcgcggcgatctctttctcctaaccctaaccggcgaagacgagcacagattccacccggacacgatcgcctctgttctctcgcttcttgaacaagcaaagtctcaatccacaaaaggatccgtcctcatcactaccggtcacggaaagttcttctccaatggatttgatctcgcatgggcccaatccgctggacacggtgctatagaacggatgcaccaaatggtcaaatcgttcaaaccggtgttagccgccctcctcgatcttccaatgccgacgatcgccgccttgaacggc

SEQ ID NO: 166794 - DNA, 254 bp, Arabidopsis thaliana nossen
aaaacccggggcgggccacgcgtacggaatcaataatgcttatagttttttttttgttgatattaactctaaaaggggggaccaaactaatttttggggtctccaccgactgtgagaacccgaaagaccatgacaagccaattcaacaggtgatcgctgagatgacggatggtgttgtggacaggagtgtggaatgcaccggaagcgttcaagccatgattcaagcatttgaatgtgttcacgatggctggggt

SEQ ID NO: 166795 - DNA, 365 bp, Arabidopsis thaliana nossen
cggcaaactcacgtttgttgttcacggaaggggtctaatgggaagagttattccgggatgcgccgagacgttcatggagtcaccggtatttggagaaggtcaaggtcagggtcagagtcaagggttccgtgacatgcaccagaaagtagagcacctacggtgcggtgacaccattgcaacaccatctggtgtagctcaatggttctacaacaatggaaatgagcctctcattcttgttgcagccgcggatctcgccagcaaccagaaccagcttgaccgcaaccttagaccatttttgatagccggaaacaacccacaagggcaggaatggctacaaggccgaaagcaacagaagcaaaacaaca

SEQ ID NO: 166796 - DNA, 366 bp, Arabidopsis thaliana nossen
gtgagagaagaaagatagagaaaaaaaatgggaggcaaaggtgtgatgatggtggcgatactttgcctttgggcactctctgcaacatctgaagcagtaacagaggctgagccaggtttgatgatgaacttctacaaggacacgtgtcctcaggccgaagacatcgtccgtgaacaagtcaaactcctctacaaacgccacaagaacaccgctttctcttggctccgtaacatcttccatgactgcgccgttgagtcatgtgatgcgtcgcttttgctggattcgacaagaagagagctaggagagaaagaacacgacaggagcttcggacttagaaactttaggtacatcgaggagatcaaggaa

SEQ ID NO: 166797 - DNA, 346 bp, Arabidopsis thaliana nossen
  unsure (1)..(346): unsure at all n locations
ccgggggggtcccacccgtccgataattttgacaaacccccctttttctttccaaaaaaaagagtncaaagggaaggacgtgagatatggttttggcatcattcttatcaccgtccttagtctctgaaaataaattctgattttgatttcaaattttagggatttgagagagttatcagttatgagtagttcggagagagtaccgtgcgatttctgcggcgagcgtacggcggttttgttttgtagagccgataccgcgaagctgtgtttgccttgtgatcagcaagttcacacggcgaatctgtgtgcgaggaagcacgtgcgatctcagatctgcgataattgc

SEQ ID NO: 166798 - DNA, 368 bp, Arabidopsis thaliana nossen
ggagaagaaggtctcgatttcaaattttcttaaggaaaagtttcaaaatttaaggcggcagtttcgcgaaatcaatgggcttttctttttctattttcattatggaaaatttcgcgctaattcacttctaggctcttatggatgaccatggtggttctgatttgagcctcgaggatctcatggatgagtattcttctcgacccgcacaaatagctgaatggttatggtgtattgaatatgtagccaaatttgtcaaggatctaagctgcttactcgatttgatgaacattggttatcagtaccctgatgactatgggaagaggattaatgaagtcctgtctcttagagtcttggagttcatgtttgat

SEQ ID NO: 166799 - DNA, 369 bp, Arabidopsis thaliana nossen
gtgagtgcaaatcccatcataccaactaatataaagttataccatcaatgatattctatcgtgaaaaaatatgtaaagtctaatatcattaagtatcatttattaaaagaatgaattgaagggaaaaaaaaaaaaaaagataggcaatccactagtgttcataatgaaagacgatggtcgatgtaatatgtatactaatattatatctctagctttgatcctcaatagtcaatatccatagtgtttatagtgttttaacagcttttgtataatgttaactgtgcaaaatacatgacataaaataaatgattttttttggcttttatgttataagtactattagttggttatctgttttaaaggtttttc

SEQ ID NO: 166800 - DNA, 357 bp, Arabidopsis thaliana nossen
aacaaatcttaaacgttttactttgtgctgcactactcaacctcaatggccgcctcaacaatggctctctcctcccctgccttcgccggtaaggccgtcaagctttcccccgcggcatctgaagtccttggaagcggccgtgtgacaatgaggaaaactggtggcaaaccaaaaggcccatcaagcaacccattggtcggatcttacccgtggcaagacttggggtccattctctggcgaataaccgagctaccttaccggaaagttccccggagactacggatgggacaccgccggactttcagctgaccccgagacattcgcaaggaaccgtgagctagaagttatccacagcag

SEQ ID NO: 166801 - DNA, 355 bp, Arabidopsis thaliana nossen
aaaaaaatattgctgctatttttctataagtccactcctccttcaaggggagcaccttcctcttctttgtgctcctctgagattggtttaagattaaaccagacccatctaagggatctggaacaagcttcgtctctggttccactctgatcatcagagtattaaaaatggagtctttcttctccagatccacctccatcgactccaaattgagtttctcggccttatggatcgacttcttgatttcttcatcttcttttacttcgacagaagcatatgatgcgcttgatccacaaggcaacattacaatgaaatgggatgttatgagctggacttctgatggctatgttgccgt

SEQ ID NO: 166802 - DNA, 358 bp, Arabidopsis thaliana nossen
tgtgtgttcgtgcgtaaaagaattgtcatttctttaaaataagaaggaatgaaagattgaaaggtatatgttctaactaaaacgtgtgattaagattggacttttatacatagttgattactttggatgtatctttttgtttaatttttgtttcaataatgtcattgagtagtcgttgtgaatacgattgaccaacggttgcagagatatattggaggatttgatgtgatatctcctaagaatttcagaagttcattgaacgtttttttggggttagtgaaatagtatcatttgtatctttttgcataatttttgaaaaatcattcatatccacttgattctcattcaaactttgaat

SEQ ID NO: 166803 - DNA, 366 bp, Arabidopsis thaliana nossen
cggggaggatgaagagcacgtgtttatgaggattgcttggaattcaaaccggagaggtggatctcgccggacgatggaaaattcgtgaatcacgatcagtaccgattcgtggcgtttaacgccggacctaggatctgtctaggaaaagatctagcgtatctgcagatgaagacgatcgcggcggcggttttactcaggcatagactaacggtggcgccgggacacaaggtggagcagaagatgtcgttgactttgttcatgaagaacggacttttggtcaacgtgcacaagagggatttggaagtgatgatgaagagtctcgtacccaaagagagaaacgacgtcgttgttcttaacggaaaatgc

SEQ ID NO: 166804 - DNA, 369 bp, Arabidopsis thaliana nossen
gtttcattgaaaatttcaagaaccctagttaataacgataatgggttcgagagttttggcttccttctttgttttcttaatcttcacggtcatcacattgcctcccacgatccaagcttgcactccttgtactcgtcctcatcctccggttccgaaacctccacaacacggcggtggtggaggtggtggtagcaagccgcctccacatcacggtggaaaaggtggtggtaaacccccaccccacggtggaaaaggtggaggaccgccgcatcatggtggaggaggaggaggaggagggaaatcaccgccggttgttagacctcctcccgtagtggtgaggccaccgccaatcataagacctcctccggt

SEQ ID NO: 166805 - DNA, 364 bp, Arabidopsis thaliana nossen
aaggcttggatggattggcctcacgctctgctgagtactacaagcaaggcgctcgttttgccaagtggaggacagtggtgagtgttccctgcggtccttcagcactggctgtgaaggaagctgcgtgggggctggctcgctatgcagccatctctcaggataatggtcttgtccccattgtggagccagagatccttctggacggggaccacccaatagagaggactctggaggtggcagagaaagtgtggtcagaggtgttcttctacttggcacagaacaacgtcatgtttgagggcattctgttgaagccgagcatggtcaccccaggcgctgagcacaagaacaaggcctctcccgagac

SEQ ID NO: 166806 - DNA, 367 bp, Arabidopsis thaliana nossen
gtttcattgaaaatttcaagaaccctagttaataacgataatgggttcgagagttttggcttccttctttgttttcttaatcttcacggtcatcacattgcctcccacgatccaagcttgcactccttgtactcgtcctcatcctccggttccgaaacctccacaacacggcggtggtggaggtggtggtagcaagccgcctccacatcacggtggaaaaggtggtggtaaacccccaccccacggtggaaaaggtggaggaccgccgcatcatggtggaggaggaggaggaggagggaaatcaccgccggttgttagacctcctcccgtagtggtgaggccaccgccaatcataagacctcctccg

SEQ ID NO: 166807 - DNA, 366 bp, Arabidopsis thaliana nossen
acgttgtccagtcccacggaaacaagttcgagtggatctctttcaaaactaatgaaaacgcaatgatcagcactttggcgggtagaacctcgctcttgagggcattgccattggaggtcatatcaaatggtttccagatctctcccgaggaagctaggaagatcaagttcaacacacttgagaccactttgacccgcgctgccggtaggcaacaacaacagttgatcgaggagattgtcgaggcttaaatcaaaacgtttttctttttcttaataaagtatggtcagtttgtaatcacgtccctttacctttaacgtacgtgtaaaatatgtgtctgcggcacctcacttgtaataacactttctt

SEQ ID NO: 166808 - DNA, 368 bp, Arabidopsis thaliana nossen
gcttgaacttggaggatcaatggccgacgttcgcacacactcgcaccagcttcaagtgcaccctcaacgccagcatgaaggaggcatcaaagtcctttatcctcagagtggcccttcttccactcaggtgctagccgtgtttgtcggtgtaccgataggaggaacgctgctgactatagccggtttgacattagccggttcggttataggactaatgctagcattcccgttgtttctcatctttagtccggttattgtaccagcagcctttgtcatcggtctagctatgactggattcctggcttcaggggccataggtctcaccggactatcatccatgtcgtgggtactcaactacatccgccggg

SEQ ID NO: 166809 - DNA, 371 bp, Arabidopsis thaliana nossen
cttccctgcaaatctattttctagatctttctttcttccgcgaaacgacaatgagagagtgcatttcgatccacattggtcaggctggtattcaagtcggaaatgcttgctgggagctttactgtcttgaacatggcattcagcctgatggccagatgcctggtgacaagactgttggtggaggtgatgatgctttcaacaccttcttcagtgaaaccggtgcaggtaagcacgtcccacgtgctgtctttgttgatcttgagccaactgtgatcgacgaggtcaggactggtacttaccgtcagcttttccaccctgaacaactcatcagtggtaaagaagacgctgctaacaatttcgcccgtggtcat

SEQ ID NO: 166810 - DNA, 351 bp, Arabidopsis thaliana nossen
ctaagtgcttcatcatcaccttttcatcaacataatcacatatctcaagggtacggaacggtcttttcttgataatcaagcaaagttctgaatcatctatatcgggacacagggagctgtttgttatctctaaaaaggggtttctggaaacaaggattacataatccacgatctccatctatcgatattcattaatatataaaatcgtgaatgatactatatatggaatcgctaggagaaaaaatgaagttcagcattagtacttccttatattacgaagctcgcctcgggtacagcattgaagacgttcctccaaacggtggcttcaagaattgcaaatcttctgtctac

SEQ ID NO: 166811 - DNA, 442 bp, Arabidopsis thaliana nossen
  unsure (1)..(442): unsure at all n locations
caggtgaccggtaccggaattggccgggtgcgacaccacgcccgtgccgggaagtacgnnatctggggcaatgtgtnntcggatctgattanntgacatataccatggagggtgcgtcaacaggactcctgttgtttattaatnntaaaaaaagtgttgtatcgccgtttacatttggtacacgaaagagctgttttttataacgctacatcgagtgtattcatatgttcaattattaagattccgaaatgtagcctattttttttatagataatattatcctatttcaataaatgcttattagtcattactaagaaaaagtctagtattgatatttagtcattttgaaatatcttttattggttttagttttaatagtagaaaataacaaatagaaaaaactaaatatatagatattctcatattcatgtactacttaccc

SEQ ID NO: 166812 - DNA, 358 bp, Arabidopsis thaliana nossen
ctgtttaccagtaatatcaatcgatcgccattctcgacatttctctctctcaagctagtctaaagtttcttcttatctccttcctccgaccaaaacttcgacttctctcttattttcaccctcagagagtaaccatggatgccttgacctcgagtttggttcgatctcccatcgtaccatcgagaacttccgacaacggttctggatctatgttccttaccgccagtggccctggattcacgcgttctagttcttcaagacttcaacttcgtttaaggcaaaacgcgtctgctagatcctcaagatcattacagagcttaacaacgactgctaaaactcggagaagttttgtggttag

SEQ ID NO: 166813 - DNA, 371 bp, Arabidopsis thaliana nossen
aaataatcgtcgttgaccattgaccataacttagtcagtcatatatatgaaaatccaaccgcccactattgttcccctattcacaaggtccttgctttctcagacgtaaacaacaagaaattatattaacacaacaacaacaacaaaaagaccaaccctatttattcatattttctcttatatgcaactctcaaagaatccgatcaaacaaacgagaaatcgagagaagaattacaccgacgatttcaccatgaagagatctgtaatcatggctcctgaatctccggtttttttcccacctccgcttgttttctctccgacgtcggtcaaaacgccgttgtcttctcctcgttcgtcgccaccgaagctga

SEQ ID NO: 166814 - DNA, 365 bp, Arabidopsis thaliana nossen
tttgattccattttgtctctaatggctgccctcgcttctccctgcctcatcccctcttctctctgcttcgctgccgccgccgatggtccccgttccctctcttctaatttctctgccttttccgacggcggttccaatttcaggtatcacaagagcttcttgtcgctttcatcttcgtcttcttcgtctacgccttatcgaaatcgacggggccgttccctcgtcgtatttgctgcttccggagactactacgccactctcggtgtctctaaatctgccaataacaaggagattaaagctgcttatcgacggctcgctcgtcagtatcatcccgatgtgaacaaggaacccggagcaactgaaaa

SEQ ID NO: 166815 - DNA, 366 bp, Arabidopsis thaliana nossen
gaacttttgaaatgcagctcttgcaaatggaagaaaccacaaagagccaagaaccttggaagcagccattatcatcaataagcaatatcgcagattccatggaagcagaatttgtgtatggagacctcatgaagaaaccttcacctcgtgctagagagttgttggatcaagccatttctacaaatggttctcctcccaaaaagttaaaaacaacatgaaaatgtgatctgcttctggacacagagaggtatcatgtcgactttcttgatcgctagctacaaacttcttctaggtgttataattgactttgatttagactaaatcaggctttaatcgtttttgtttcgtgcatactagtagttctgg

SEQ ID NO: 166816 - DNA, 367 bp, Arabidopsis thaliana nossen
cttcatcattaccaaatcatcaacttaatcgtttctctcaaatttagggttttctcttttctcgaaagtcttgcggttttctgaatcatctctatctggtttgagggtttcgtttgatatctggagaaaggggtttctggaaacaaggagttcataattcgcgatcttgatctatcgatcttcatttatatataaaagcgtgaatgagattatgatggagtcgaaaggtggtaaaaagaagtccagcagtagtagttccttattttacgaagctcccctcggttacagcattgaagacgttcgtccaaacggtggaatcaagaaattcaaatcttctgtctactcaaactgctccaagaggccatcc

SEQ ID NO: 166817 - DNA, 370 bp, Arabidopsis thaliana nossen
cttcatttctctgcctttgtaaactttaatttattttagaactttatctcatatagaaatctcaaatatatatattacagtttttgcttaacttttatatttaaaataaatctgaaagttgtaagaaaattattttccatatcagatttaacattgggtgcagtcttgggaaaatatataatcgttagaataattttctcttttaatgtgataattcgaagacgtatgtaacaaacaaaaatgacaataataaatattacagtataaatcatttcaaacatatactataattagttattttttgcttaaatatgatggaattgttttgatattgcttaagaatcaaaaatgttttactctagataataaa

SEQ ID NO: 166818 - DNA, 363 bp, Arabidopsis thaliana nossen
aaggacgaagacgggcgcccacgcgtccgaaaagggtcggtctatctatttctttcttttgacacttgacgtcttaatggctcactgccaacagggcccaacgagtgccagctcgatcaactcaatgcgctcgaaccatcccaaatcataagagcgagggtggtcgcatcgaggtctgggaccaccatgcaccccactccgttgctcggcttcctttgagcgtttcgtcattgagcctagggtcttttcttgcccactttcttgaacgccgcaaactcacgttgttgttcacggaaggggctaatgggaagagttattccgggtgcgccgagacgtcatggagtcaccggatttgagaagtca

SEQ ID NO: 166819 - DNA, 364 bp, Arabidopsis thaliana nossen
agagcaacgacgtacgttaacgttaagctcctttaccgatacgtcttagccaactttttaaacctctggttgttcccgttaacggcgttcctcgccggaaaagcctctcggcttaccataaacgatctccacaacttcctttcctatctccaacacaaccttataacagtaactttactctttgctttcactgttttaggtttggttctctacatcgtaacccgacccaatccggtttatctcgttgactactcgtgttaccttgcaccaccgcatctcaaagctagtgtctataaagtcatggatattttctaccaaatgagaaaagctgatacttcttcacggaacgtggcatgtgatgatc

SEQ ID NO: 166820 - DNA, 360 bp, Arabidopsis thaliana nossen
tttgcttttttttttttttaaggtctatcagagactttcatagcgatattttcactatatgaagccagatttgctccttttttcgatgattttcaatacttatgcttaattttaagatacgctatatattttcttcactcgttacatcattattcagaccaagtaataaaatttgccaagaaattattccttgttaaatacatcaaacgtatcatatgatccatatgaaattgatccaaacctatccatatgaaattgaagttggcgcacttggtccgacggcccaataacgtggcactaaacccaaacatcacagaggttctcgcgttgactactctgtcaacaaaaccgaaacagatg

SEQ ID NO: 166821 - DNA, 365 bp, Arabidopsis thaliana nossen
gagagtacaagcccttggtttttttcagattgtgatttattttgcaatgtagatctaagttttgacataaatttgagatccagttctctaagaaacttcttcttctttaacaatggcggtttgatttgatttttgctctctctcatgggtaaaactcgtttcacctacatagcatcgagatttcggttaatcaaatctcctgttattatggacatagatcggtaaaaaggtttcccaatggatatatttaaatggacacgttattatggataccaaaaacttgtttgttgatttttctttcagtttgcagagacctccaccttcaagactttacggacatgaaactttggtttctttacaaacca

SEQ ID NO: 166822 - DNA, 366 bp, Arabidopsis thaliana nossen
atgctctctcctccaacataacacctcaagagctattcagctcccgtcggcaacgtgactcccggcgcgtgagatcaatcgccacactcgccgctcaaatccccggaagaaacgtgactcacgcgccacgacccggtggattcagcagctcagtcgtctctggtctctctcaaggaagcggtgaatacttcacgcgcctcggtgtcggtactccggcgagatatgtttacatggtgctcgacaccggcagcgacatcgtctggctacaatgcgctccttgtcggagatgttactctcaatccgacccgatattcgacccgagaaaatccaagacctatgccacaatcccctgttcttcacctcact

SEQ ID NO: 166823 - DNA, 366 bp, Arabidopsis thaliana nossen
agccatttgttctagttcgtttgtttctgataatattttcatctccaagaactgaatttaagctgggtttggtttaaatcgattgtccaaaatctaaacaaatagaaacgtcaaattgttatttgagtggtgaaagattgaaatttttggaacagagaagcaatagagaagcaacgattctttttacaaccgtaaggaaaataaataaaaggaaaggctgtaaataaaaatatatacttaagagcaaatatatgctctacactagttatgcaataaagaacaacttgttgctgctaatttagacgaggatccatccctgatatcctctcatcctccaacagagcatatggatcgatgtaaggtggt

SEQ ID NO: 166824 - DNA, 369 bp, Arabidopsis thaliana nossen
gtaaaataagactcctggctttgttgaatatgtacaaatattcgattaaaaatgtgggaaacttgtaacctcttttgattccttttggagccattcctggttctcatagttaaaataaagctttgctggtggcagagtcactgcgtaaatattgattgaagcatagcggaagcaagcaaccattctcccaaaactgcattaagaaaaatttaagtgatactcattactggcgtggtcatggttgtttaatacaaggccacaaccgtcaaacatagactgacacttgccgtatagatgacaattagagaagtgaatgaccaacactacagtactacttatgcagagcctatctagacagtacatctgatg

SEQ ID NO: 166825 - DNA, 366 bp, Arabidopsis thaliana nossen
cgctgtcaacgctgggcgtgagtgatatctaacaatcggtagcgaattgtggaaattttgttccggttttgaagtctcaatctcggggttccggttttagcaactacttcttctgacatttcagctgttctagttgatctttatatactttatatgatctgggattttgaagagtttttagggaggaaccaaaatttctgagagagaaaaatgaagttatcgagctgcgttttgatcttccttctatgtaacacattctcctcgatttctgctttccgtctgagtcggagtcaaccaactgagcgaatttcaagtagtgctggtgatgtgttggaagatgatcccgtgggaagactgaaagtcttt

SEQ ID NO: 166826 - DNA, 365 bp, Arabidopsis thaliana nossen
ggcttataattcacctgagaaaaacaatatcaatcggctcgttttctctgctcagtgtttcttcagtagtcctgcgagatcgtataagagattcgaaaccctaatctatcaatttgatcctgtccattctctgttattgtttgagaattgtgcaatccgatggggacgatgcaccggagtggtgctcccagaaggacaaacgaaaatgcgaagcttatcataacgacaatcgtgggagtggtgtttggtttttttgttggtatcacattaccattaggttcctttagaaagattagcttaccttcaggccttatgtcatctcttgatgtagccatgtcagatgggaaattgttttctggtggcag

SEQ ID NO: 166827 - DNA, 372 bp, Arabidopsis thaliana nossen
tccaaatatttggaggctgattacgttaactagtccccgtgttcctcgggtggatctcttagttgttgagagggttgcccaaaggcagtatatagagcatacccagtaaaacttacaagtaacccagatataaagatggcgactagggttgctgtttccattattatagaattgaaagaccacaccggatctatgctaagatcatttatttacaacggaatggtatacaaagtcaacagatcgtaatgaatacaaaataagatttatggctacacaaactgttgaagatagttctagatctggtccaagaagcactactgtagggaagttattgaaaccattgaattccgaatatggtaaagtagctcccgg

SEQ ID NO: 166828 - DNA, 316 bp, Arabidopsis thaliana nossen
  unsure (1)..(316): unsure at all n locations
cgcgtccgccttcattgaattaataaaaaatttaattccacatccgcttgggtgggaccgacgaattcaaattcttactccctcttaaaatngaatnaaccgattaatttgctatcgaagattttttctgtattcgaaaaaattcgtaacaaaatttaacatattttttttattatgagaacaaattctactacttcaaaatgcagaaatttccataccttaaaaaaaaaacctatgacttatcccccaaatcattgtttctcctactttatgtaaccttccccccgcgcaaaatacctaataattacaatgctct

SEQ ID NO: 166829 - DNA, 370 bp, Arabidopsis thaliana nossen
gtttttggtacggaaacacttaatttgtgtgtaatcttaatttttccattaattgtagcagaactttttcgttgtcttgttgttcaggtgaggcagaaaatggtttggagagacttcatcattgtgcagaggaggagttgaaacagtttatcgggaaaattgaagacccatcaaaaaatttcggtgagctccgagcgaaattaattgatttgactaaagcaactaaaacctacttcgaaaatctggtgaaagctttggagaacggtcttgttgacgtggcatataatgagagccagtcaatagaagaacctgaatcttttaccaaaaggtccaagacaaggaaaataaaaactttaatttagagttttag

SEQ ID NO: 166830 - DNA, 387 bp, Arabidopsis thaliana nossen
  unsure (1)..(387): unsure at all n locations
ccggggggtttcacgcgtgcganatttaggaattttgaaacctttgtcgaagagaaaagaggcaaaanctcgggattttgatttttttagggcttttggaaaaagagcaaaatcgtgagagatggatctgattcaatcctacgaagaagaagacgaagccgttgcttcctcgccggaatcttcaccgcctcgtatgttaaaggcgaaatcatcggcgccggaggtagacgatacggcactagctctcacggtggctaacgtgaatcaatcgaaatcgaagccgattgacccgactcaacacgtcgtcttttataaccctacccatgatcagctgtgggctccgatgttcggccccgcgcatccgtatgcgaaagacgggatcgctca

SEQ ID NO: 166831 - DNA, 367 bp, Arabidopsis thaliana nossen
cgagttccatctcgttcgcactttcttgtcccgactcaattcttcgaccgggcacaaaatcaatcccgagaagttgccatggccaacacgcatatctagctctgtttgaagtattcatatctcgatgggtttctaattcttcaactttacggtttagttcttggattctttccctcaacttagtcgccctattgtctgcgagtctcagagatctctctgctgcatcccttgcacccattgctgctgctgccgtctcttccttaaactttagtttcttttctgattctattattgcttgctttgcctcttcaagttcttcttttagcacatacagctgaacaaacaaagccaataagagttaagacta

SEQ ID NO: 166832 - DNA, 304 bp, Arabidopsis thaliana nossen
  unsure (1)..(304): unsure at all n locations
cgcgtgcgattgcttcatctttaccaaattttcaacttaatcgtttctctcaaattagagttttctcttttctcgaaggtcttgcggntttctgaatcatctctatctggtttgagggtttcgtttgatatctggagaaaggggtttctggaaacaaggagttcataattcgcgatcttgatctatcgatcttcatttatatataaaagcgtgaatgagattatgatggagtcgaaaggtggtaaaaagaagtccagcagtagtagttccttattttacgaagctcccctcggttacagcattg

SEQ ID NO: 166833 - DNA, 372 bp, Arabidopsis thaliana nossen
  unsure (1)..(372): unsure at all n locations
cacaaagtagaagaagaagaagaagaagatggatgatttggcattatgtgaagcaaacaatgttgctctaacccccatgacgttcttgaagagagcttcagagtgttatccaaatcgaacttcaataatctacggaaaaactcgtttcacttggcctcagacctatgaccgttgttgtcgtctagccgcttctctaatctctcttaacatctccaagaacgatgtggtatcagttatggctccaaacacacccgccttgtatgaaatgcactntgccgttcccatggctggagctgtacttaaccctatcaacactcgtctagacgcaacatccattgccgcaatcctccgccacgccaagcccaagatctt

SEQ ID NO: 166834 - DNA, 351 bp, Arabidopsis thaliana nossen
caaactccttccaatcaaaattgccagctccatacctgcaattattttgtgcaaccggaaaaacttgtaaatattgagcaccacaagactgatgataatttagatacatcgggggatgaaactgtaaaatttagacagaatagcttctggcgtctaaaggccttaatggaaagtagatacctcatcaaagtctgtacaaaaatggccctttgactctggttgaaacccagtactctgaaagatctcccctcaccttccatcaacggagttggttccaaattatctatagaaaaaaaactcatctaataaactgcgcacacttctaatatcagtcattttcagctccattac

SEQ ID NO: 166835 - DNA, 360 bp, Arabidopsis thaliana nossen
  unsure (1)..(360): unsure at all n locations
caaactcctaccaatcaaaatctccagctccatacctgcaannnttagacgcaacctttaaaatcttgtggggcttgaacaccacacgactgatgataatttacatacatcgggggatgaaactgttaaatttagacagaataacttctggcgtctaaaggccttaatggaaagtagatacctcatcaaagtctgtacaaaaatgtccctttgactctggttgaaacccagtactctgaaagatcttccctcacctttcatcaacggagttggttccaaatgatctatataaaaaaaactcatctaataaactgagcacacttctaatatcaatcattttcaggttctttacataatata

SEQ ID NO: 166836 - DNA, 367 bp, Arabidopsis thaliana nossen
atggattacatggaatgatgtttcctctctttgacacaactgtcaccagggtcaagctagcaactcatggtcgtcctgaggccatgaatgcagtactcatttcctcaattgctgcttcaacatttaacccgcagttggaagcgtgggagccccttctggagccatttgatggaatattcaagttggaaacatatgatactgctttgaaccaatcgtcaaagccaggaaaacggctgcgaattgctgctactaacattttgaacataaatgttagtgctgcaaaccttgaaactcttggcgatgccgttgtttcctggagaaggcaattagaacttgaagaaagagcggccaaaatgaaagaagaatc

SEQ ID NO: 166837 - DNA, 371 bp, Arabidopsis thaliana nossen
acctgcttcactcaaatcatgaccctgaaacttatgattcattgaactagaagcaacaacaccaccactaggacctgcttcacgactatcaagatcaagagactttaacttattaacaacatctgaagaagaacgctcatgctccatacgagctttccaagcatcagaagaaatagcaaaatcttcaggaccagaaacaccaatatactgataaattcgatctatttctccatcatcaactccatcgactcgaaaactagtacgattcgggaaatccaaagaacgagttatcaacaacgaagaagaatcttcacctgcgtcataatcgatattcctcctcaccgcatcactacggtctaaccgccgcgccg

SEQ ID NO: 166838 - DNA, 119 bp, Arabidopsis thaliana nossen
gtacatgttgttttttgacacataccacacctcatcgggggggggtttataaatgtaaggggttggatgtatgagggtaatgtaagcactacttaataaataagagttttgtttatttt

SEQ ID NO: 166839 - DNA, 371 bp, Arabidopsis thaliana nossen
  unsure (1)..(371): unsure at all n locations
ctngngtnaggcgtnnattctttttgggtttttcactttattttataaaggggaatttgaaagcgagacccgtttctttatttggtataactacttgagccggatgagaggaaactttcatgtccggttttgaggggggagatcttatagtggaccctatcccaatttttcttttgctaggcccataactaaaaaacctactttcttacgattacgaggttcatttgaatatgaaattcaatcctggaaatacagcatcccacttttttttactactcaaggtttcgatatatttcgaaatcgagaaatttctactggggcgggtgctatccgagaacaattagccgatttagatttgcgaattattatag

SEQ ID NO: 166840 - DNA, 366 bp, Arabidopsis thaliana nossen
gcgtgggctgacgcgttttttcccaaagacttagagattagctgggggggtactcagaaaacatagggtagtttctcttcaatttagtaactataaacttctaaaaatacaagcaatcatcttcattttggtaatttatagaaatctggaacttaattagaccaattaatccaagacattaggatttttccttcgaacattctccaatttctgagcaagaaaaacaaaaaataaaaagctcagactaccttgacaccagagtctgaaaccccaatcgctactccattatccgccgtagcttccgcaatcagcttccgtttaagaggattagacgacggaggacgcggaggcaatggacttttcaat

SEQ ID NO: 166841 - DNA, 372 bp, Arabidopsis thaliana nossen
ggaacaggttacaagtctgctgtcccgaatgcagctgcaagctgagcaaggaaaatctagtgataaccagtgtgccatcaaagtacatgtaccccccagcaggagcgacgttctccacccttgtgatgttatggaggatgttgccattgcctatggtttcaataacattccaacaagaaagcctgcttcgataaaaccactgactttgaatgagctcactgatcttctaagaatagagattgcgatgtgtgtgtacacggaggtggtaacgtggctactatgctcacataaggaaaactttgcgatgctaaatagagaggatgttaattcagccgtcatagttgggaacccgcggtctgctgattttgaggg

SEQ ID NO: 166842 - DNA, 374 bp, Arabidopsis thaliana nossen
cactctctcaaaaatcaccaaaccaaactcttcactctctccaacaatggggaagaagatgagttctctcatcatcatcttcaacattctccttgtcctcacaactcaaacccacgcgcacaacgtcacgcgcctcctagcaaaccacccatcattctcttccttcagccatttcctaacacaaacacacctcgccgacgaaatcaaccggagaagaaccataaccgtttgcgccgtcgataacgccgccatgtcagcattaacctcaaaaggctacacaatctcaactctcaaaaacattctctccctccacgtccttttagattacttcggaaccaaaaaactccaccagatccgtgacggctctgctctcg

SEQ ID NO: 166843 - DNA, 367 bp, Arabidopsis thaliana nossen
ttgaaagaccattaacatcattccttgcccagatccaaacaatgccatcggcactctctctatttagggttctctccaacttttcaaatccctaattcttgctccctcccttcaatcaattccgatcatcatcgaggtctctctactccccgaatttaaagatcagagccgcgacttcctctgccttcttttcctcggaatttttcagctacgttttccaggtggtgtgtattgtcaatcagttgacctttgcttttgtagccagatcgttcgtgctttgagtttagggctcttttacaaggtttcgtgttggtggaatttctctacctaggtttgggggaagagttcagtaatttcgttgtagatc

SEQ ID NO: 166844 - DNA, 373 bp, Arabidopsis thaliana nossen
gtttcagatataggcagattctttcatttgcaaacatgacgactcagatcagcaagaagagaaagtttgtagcggacggtgtgttctacgctgaattgaatgaggttcttacaagagagctagcagaggatggttactctggtgttgaggttagggttactcctatgaggactgagattatcatcagagctacacgtactcagaatgttctcggtgagaaggggaggagaattagggaattgacttcccttgttcagaagagattcaagtttccagttgacagtgttgagctttatgccgagaaggttaacaacagaggtctctgtgccatcgctcaggctgagtctttacgttacaagcttcttggtggtct

SEQ ID NO: 166845 - DNA, 374 bp, Arabidopsis thaliana nossen
gttgtgtccaagctacgatcgacgaagaagcggctaaggatgaatcatggactgattgggcaaaggagaagatcggtctcaagcacgaagacaacatccaacccactcacaccaccacgaccgttcaagacgacgcttggagagcgagtcaaaaagccgaggacgcaaaggaggcggctaaacgcaaagcagaggaagcggttggagccgcgaaggagaaagcgggttcggcatacgagacagctaaatcgaaagttggggagggtttgggttctgtgaaagacaaggcctcgcagagttacgactcagctggtcaagttaaggatgacgtgtctcacaagtcaaagcaagttaaagatagcttgtcgggagac

SEQ ID NO: 166846 - DNA, 374 bp, Arabidopsis thaliana nossen
gcaataaccaacaaattaatcattttacttcttctccttatctccatagcgggggtccactgcttatccttccgtgtggagatcgacgagttcgagccaccacagcaaggagaacaagaaggtccccgtcgccgtcctggtggtggctctggcgagggatgggaggaagagtcgacgaatcatccataccacttcaggaagcggagtttcagtgattggttccagtcaaaggaaggttttgtgagagtgctgcctaagttcacaaaacatgcaccggctctcttccgaggaatcgagaactacagattctcgttggtggagatggagccaacaactttctttgtgcctcaccatttggatgccgatgctgtttt

SEQ ID NO: 166847 - DNA, 373 bp, Arabidopsis thaliana nossen
gccgcggatctcgccagcaaccagaaccagcttgaccgcaaccttagaccatttttgatagccggaaacaacccacaagggcaggaatggctacaaggccgaaagcaacagaagcaaaacaacatcttcaatggcttcgcacctgagatcttggctcaagccttcaagatcaatgtcgagacggctcagcagctccagaaccagcaagataaccgtggcaacatcgtcaaggtcaacggacctttcggcgtcattaggccacccttgagacgcggcgaaggcggccaacaaccacatgaaatagctaatggtttagaggagactttgtgcaccatgcgatgcactgaaaacctcgatgacccgtcggatgctg

SEQ ID NO: 166848 - DNA, 373 bp, Arabidopsis thaliana nossen
gacgacgaaagattatatactggacgaagcattgagcttcacatcgagccacttggagtcactagctgcaaatggggcgtgcccgcctcatatgtcaaggcgtatacgaaatgctctcaatgcatctcagcattggaacatggagatgctagtcgctgtggaatatatatcattctacgaaaaagaaaaagaccacaacgagatgctactcaagttttctaagctcaatttcaagtttctacaactccaataccttcaagaactcaaagttcttacaaagtggtacaaggaggtagattttgtatctaagttgccaccttacttcagagacagaatcgtcgaaaaccatttctttatacaaacgttgtttgtg

SEQ ID NO: 166849 - DNA, 363 bp, Arabidopsis thaliana nossen
ccttgcttttggtctaactttttctatcattgagcttcacatcgagcgcggtgggagtcactagctgcagatggggcgtgcccgcctcatatgtcaaggcgtatacgaaatgctctcaatgcatctcagcattggaacatggagatgctagtcgctgtggaatatatatcattctacgaaaaagaaaaagaccacaacgagatgctactcaagttttctaagctcaatttcaagtttctacaactccaataccttcaagaactcaaagttcttacaaagtggtacaaggaggtagattttgtatctaagttgccaccttacttcagagacagaatcgtagaaaaccatgcctttatacaaacg

SEQ ID NO: 166850 - DNA, 372 bp, Arabidopsis thaliana nossen
ccggaaataatggctttcccgctttttctttctctcctcgccgtcgtcacggtctctcttttcctcaccaccactgatgcttcctctcgctctctatccactccacctaaaacgaacgtactcgacgtcgtttcatctctccagcaaacacaaactatcctctcactcgacccgactcgttcctcactcaccaccaccaaacccgaatccctatccgacccggttttcttcaattcatcttcaccactatctctagagcttcactctcgagacactttcgtcgcgtcacagcacaaagactacaaaagcttaacactcagtcgactcgagcgcgactcatcccgagtcgccggaatcgtcgcgaagatccgt

SEQ ID NO: 166851 - DNA, 371 bp, Arabidopsis thaliana nossen
cttctttaaaccctttcctcctctcgccgtcatgcaagccaccatcttctgtccacgcgccactctcttcccctgtaaacctctcctcccttcccacaatgtcaactctcgccgtccctcaatcatctcctgctccgcccaatccgtaaccgctgatccttcaccacctatcactgacaccaataagctcaacaaatacagctcaagaatcactgaacccaaatcccaaggtgggtctcaagcaattcttcacggtgttggtttatcagacgacgatttgctaaaaccccagattggtatctcgtcggtttggtatgaagggaacacttgtaacatgcatttgctgaaattgtctgaggctgtgaaagaag

SEQ ID NO: 166852 - DNA, 360 bp, Arabidopsis thaliana nossen
catgaaatagctaatggtttagaggagactttgtgcaccatgcgatgcactgaaaacctcgatgacccgtcggatgctgacgtgtacaagccatcactcggatacattagcacacttaacagctacaatcttcctatcctcagacttctccgccttagcgctcttcgtggctccatccgtaaaaacgctatggtgctaccgcaatggaacgtaaacgcaaacgcggcactctacgtgacaaacggaaaggctcatatacaaatggtgaacgacaacggagaaagagtgttcgaccaagagatctccagcggacagttactagtcgtgccacaagggcttttcggtcatgaaacatgccat

SEQ ID NO: 166853 - DNA, 370 bp, Arabidopsis thaliana nossen
cttccttacaaatcagggagccctaacagccatagctattatggcagcccggcatttgggtctaatatgtcatatcctggcagcccattggctcatcatggtatgccaaactctcttatgtcaccttacagccctatgagacgaggtgaagtaaatatgcgatatcccgctgcaacaagaaactatactggaggggtaatgggttcttggcacatggatgctagtttggatgaaggatttggatcttcaatgcttgaagagttcaaaagtaacaaaacaagagggttcgaactttctgaaatagctggccatgttgtagagttcagttcggatcagtatggaagccggtttattcagcagaaactcgaga

SEQ ID NO: 166854 - DNA, 364 bp, Arabidopsis thaliana nossen
tgtcatttctctctctagtggctttagtatggcggattggggacctgcggggtcgctgtgatactgttcgtgcttttgactccgggacttctctttcagattccggcgagaggtcgtgttgttgaatttggtaatatgcagactagtggagcgtcgattctcgtccacaccatcattttcttcggtcttataaccatcttcaccatcgccattcgtctccatatctataccggttaattgtaccgtaccggattcgtaacttcccccggttgtctagttttatggtttgttttggattttgtttcttctctgtgtcttgtcaaaacgttatggaatttgtgaatctgaatatgcgttaagttaa

SEQ ID NO: 166855 - DNA, 368 bp, Arabidopsis thaliana nossen
ccttgcttttggtctaactttctctctcttgcttctacgcttcttcttgtggcgtagattgttatagagagggaaaccaaaaaagggaatctcaaaagctcgagttcacagatttgacccgagtctttaatccaatctgctggttcgttttccacattcaaactcgactcttgaatatcaaatcagaagtctttgctatggctgctaccgctgctgcttctgttgtccgttacgcacctgaggatcatactcttcccaagccctggaaaggccttatcgatgatagaactggttacttgtacttttggaatcctgagaccaatgttactcagtacgagaaaccaaccccctctctacctcctaagttt

SEQ ID NO: 166856 - DNA, 373 bp, Arabidopsis thaliana nossen
cggacgcgtgggctttcatcttctccaccagaatttgttttaggctctccgtgttctgtttctttttctcccaaagaaacaattagatatggagaaccttaccctagtttcttgctcagcttcttctccaaagctgttaattggatgcaatttcacttcctcgctgaaaaaccctactgggttttctcgtcggactcctaatattgtcctccggtgttccaaaatatctgcctctgctcaatctcaatctccctcttcgcgtccggagaacactggagaaatcgtggttgtgaaacagagaagcaaagcttttgcaagtatattttcttcgagtcgtgatcaacagacaacttctgttgcttcccctagtgtg

SEQ ID NO: 166857 - DNA, 372 bp, Arabidopsis thaliana nossen
gggataaaacgtctatatgatatacaaatctatcactgagttttcggaaaataaagctcgatcataaactcagtaaacttaccgtacatagttactggactcagtaaaatacactcggacaaatctattcaaggagccgcttcgagtagcataaatattattactcaatggccgaagttctaggactgaaatgaatgggattccgtcgtttgtccttacaagacaaatctgcaaagtatttgactttggggtgtgaataatttcgctggacgtaccatatcctctctgctctgatcgcagtgatgcccaattggtatcagggtctcccattgtagatattgtttcccaccaagtcctacctatatacagatc

SEQ ID NO: 166858 - DNA, 370 bp, Arabidopsis thaliana nossen
cttcatatcaaatcgtcgattttttgatctggcttggaataagagatatgggaaatgaccttatgaaaaagaaattgaaactacggcctgttacatatctaagtggaacacaaggatctggatctaatatcccacatggatatatgtggagtcctcaccttgtaccaaagccaaaagactgggggcctcaaattgatgtagtgggattttgctatcttgatcttgcatccaactatgaacctcctacagagcttgtggaatggctagaagctggtgacaagcccatatatatcggctttggtagtctccctgtgcaagaaccagagaaaatgacagaaatcattgtggaagcacttcaaagaactaaaca

SEQ ID NO: 166859 - DNA, 373 bp, Arabidopsis thaliana nossen
tctgcttggaaagctaatgcaactgggagaaactctaactcaattagggagtgtctggagaaaaactacaaagaaagcgctggccaagaaactgttaagcttgctatccgtgctctgcttgaggttgttgagagtgggggaaagaacattgaggttgctgtaatgacacgagaggaaggtgttctgaagcaactagaagaagaagaaattgatatcattgtggctgagatcgaagcagagaaggctgcagctgaagcggccaagaaaggccctgcgaaggaaacatgaaccagatcttaaagtagcggtctcagattatgagttgtaatgctggttcaaagtcagggatattcaagggttgaatagaaaatct

SEQ ID NO: 166860 - DNA, 371 bp, Arabidopsis thaliana nossen
  unsure (1)..(371): unsure at all n locations
caaaacacacccaaatatgcataagcttttgttttctcttctctccgtcgggtcactctcatttctcctcttcttccatggcgccgaggcacgccagcgagaggcgccgtttccaaacgcctgccatttcagccaaatcaacagcctcgcgcccgctcaggcgacgaagttcgaagccggtcagatggaagtatgggaccacatgagccctgagctccgatgcgccggtgtaacggtggctcgcatcacccttcagcccaattccattttcttgcccgctttctttagcccacctgcccttgcttacgttgtccaaggagaaggagttatggngacgattgcttctggttgtcctgagacttttgcagaag

SEQ ID NO: 166861 - DNA, 368 bp, Arabidopsis thaliana nossen
  unsure (1)..(368): unsure at all n locations
gcggtcatttatatcagaaactttgtttatcggagaagctcactgagaacaaganaattatacgttcttcgaggtctatgaagnaaattcgcgtctccttggttctccttctcgggttttggccagtttgtgatctgcagtgaagaaaaaggaacgtacaacgacaacgtcgtaaagatgaagcttggcggatttagcgattccaagaacgattggaacggtggaaaagagatcgatgatattgcactcttcgctgttcaagagcacaacagacgagagaatgctgttcttgagcttgctagagtattgaaggcaacagagcacgtggttgctggcaagctataccgtcttactcttgaagttattga

SEQ ID NO: 166862 - DNA, 370 bp, Arabidopsis thaliana nossen
gcgcttaaccgtaaacgaatctctcttctcaaagttttattttctctctgcgagggctcaagaagatgttactgctgttgctactaacggtgctggtccggtggagacgcatcttgtcttcactgagttcaagcagatgttgctcgttgaagctcaaaaggtcggtgacgctgttactttctacaaatctgcttttggtgcgatcgagtctggtcattctctttaccctaagcgtaagcttgaccaagagcttcctcatgttctctcttctgagcttaatctcgctggctcttccttcgttgtttgcgacgtttcctctctccctggtttttctactgcgaaatcggaaggttcgggagtgacttttctt

SEQ ID NO: 166863 - DNA, 162 bp, Arabidopsis thaliana nossen
gaaattttaggtggttcccgaaataaaatagcgaaaaaaattatccctaaagtggatactaagagaaatgtataaaccaatgcttccataaatttgatcgtggtttacaattatagctttcatacctgttttgtttacgttttgtttacttgggaggataaa

SEQ ID NO: 166864 - DNA, 318 bp, Arabidopsis thaliana nossen
  unsure (1)..(318): unsure at all n locations
aacaaaataatattgcaaatatttcctataccaacnaccacacagaagcggagactttagaaattttacggccttacacaagcacaaaattacccaacttaataattactatgggccaaagtaaagaaatcacaatcactttttcttctaaacaaccacaactcaatatatcaacaactactttcaaattaactaacattaacaaactacaacatactacatcataagcatacaaatacttaaatactattactaaatgcaaatttgtctccaatacggattcatacttaaatatatttactctaaaataaatcttaa

SEQ ID NO: 166865 - DNA, 314 bp, Arabidopsis thaliana nossen
cacttggtaacattaatctttttgtgcaaaaacgacccactatcctggggcatgaaattaaggttttcgtctgcaagtataacgacccaatttatgttaagatggagaagttggagattatgattaaacttgcctctgacagaaacatacaccaggttcttctggaattcaaagagtatgccacagaagtagacgttgattttgttagaaaggctgttcgtgcaataggccgatgtgctatcaaactagagagagcagctgaacggtgcatcagtgttttgctcgagttgatcaagattaaagtaaattatgtt

SEQ ID NO: 166866 - DNA, 371 bp, Arabidopsis thaliana nossen
ctaaactcgagaatttttgtagagagaggaggcaaagtgcgaaagctaaacgcagatccacgatcaatctcctccaccttcaaaagccttcaaaagtgtttcttcttcgtcttcttccttttattatctgtgccttgacagatccacgatccgattctggtcaaattttacatttctgcagactccatagaaggtgacatttgtttaagatactcttgttcctggaacacatacgaagatgaagaaagtcttcggacaaactgttagagaccttaagagagaggtcaacaagaaagtgctcaaagttcctggagtagaacagaaggttctagatgctactagtaatgagccatggggtccacatggatcac

SEQ ID NO: 166867 - DNA, 371 bp, Arabidopsis thaliana nossen
gccagcaccgtatggcaggattttctgtgatagagattgctcaaaaaggggccaaagcttggcgcatagagtggaggaattcaaccaaaggcaccacaaaaaatggaaagaaaaaccggaggagagagagaaccaacattcttagccagaatagaggtggtgctgggtgtagtagtagcagtttcagtgaaacttcaactggatatgcctcactagaagatagatcatcatgccgctctattttgtcttggcaagacgtttattcctctgctgtcagatggagacaaatttcagagccttgtgacccagtggtgtgggttaacaaactaagtgaagagtttaattctgggtttggttctcatacaccgatg

SEQ ID NO: 166868 - DNA, 366 bp, Arabidopsis thaliana nossen
tatttctcacattttcgtagcctcaagactcctttcagattcttacttgcggctatgggtaaagagaagtttcacattaacattgtggtcattggtcatgttgattctggaaaatcgaccacaactggtcacttgatctataagcttggtggtattgacaagcgtgtcatcgagaggttcgagaaggaggctgctgagatgaacaagaggtccttcaagtacgcatgggtgttggacaaacttaaggccgagcgtgagcgtggtattaccatcgatattgctctatggaagttcgagaccaccaagtactactgcacagtcattgatgccccaggacatcgtgatttcatcaagaacatgattact

SEQ ID NO: 166869 - DNA, 369 bp, Arabidopsis thaliana nossen
caaattgcaaaatttacctatttcccatcttacaccaccgtcagattggggggtatgtattatcaaaggtgcaagaacaatcacatcatcagaatctaacttatatatcaaaggtccagaattttctccattgaagctggattctaaggaaagttatcaaaagttttgagagctttggatagtgaagctcaaagaactaaacaatgggcttcagagtttgtgttattgtcgtcttcttgggttgtcttcttctagtccctgagaaaacaatggctcaagaaatgaaacgtgcatcgatcgttatccaaggagctcgacgagtttgtgagaccgatgagaactttgtctgtgcgacattggactggtggc

SEQ ID NO: 166870 - DNA, 364 bp, Arabidopsis thaliana nossen
cacaatctaatcccaaaaatcaaaagatgaatgccacaaagtttgttgtgcttctcgtgattggcgttttgtgtgccattgtcaccgcaaggcaggtcaaagatttgtccacggagaccaaattaggggcctctcttccaaaaactactaccaaaggcattggagctcagctttctgcaactggcacaacttacagcaccagcagtgtcgttagctatgctaatggttttaacaatcccaaaggtccaggggccaatgcattcgaaagtgccaacacatttaccagcggacaagtcactgccaagggtcgcaaggcaagagtttcttctacaagtgcttctgccgctgaaggcgatgctgcagc

SEQ ID NO: 166871 - DNA, 367 bp, Arabidopsis thaliana nossen
gaaacagttaaagacttggggttggagctcgttgaaaatggtcttgctaaatttgttgaatggagtgccaacatgatggaggaggaagctaagaaaaagttgaaagctgcagaacttcaatgcaagaaagataaggttaaaatgtgggcaaactacgttcctccagctacaaactctaaggcaattcatgaccagaactttacgggaaaggtagtggaagtggtgagtggggattgtctaatagttgccgatgatgctgttccatttgggagtccagcagcagagagacgggtctgtctttcgagtatcagatctccaaaaatgggcaacccacgtagagaagagaaaccagctccttatgctcggg

SEQ ID NO: 166872 - DNA, 361 bp, Arabidopsis thaliana nossen
ctaggatgtaagttatataataagcacagccaaatattttttttatgtctgttgcatattcgttcataattgtggagttatgaaaatattgtaatccatattacctcagatcaaattttacatgagtgtaccaaacatataaacattgattatcgaaaccatgctctttgtgatttgccataacctttctttttgtgaattaccaaaatcacttaggtgatgttctcaccaaactttaacttggtatccagtctgtgcatttccaagattgatatacacaattactaatttaatactctaattctctagattaatataagtggtttggtcgatcggtttaattattgtatctggttttttt

SEQ ID NO: 166873 - DNA, 365 bp, Arabidopsis thaliana nossen
atttatttacaacggaatggtatacaaagtcaacagatcgtaatgaatacaaaataagatttatggctacacaaactgttgaagatagttctagatctggtccaagaagcactactgtagggaagttattgaaaccattgaattccgaatatggtaaagtagctcccggatggggaacgacccctttgatgggtgttgcaatggctctatttgcggtattcctatctattattttggagatttataattcttctgttctactggatggaatttcagtgaattagactgagaagaatcttgaagttctagcttttagctcgatacaaaaaagtaaagtatgcaggtctaacaattttagcctattc

SEQ ID NO: 166874 - DNA, 361 bp, Arabidopsis thaliana nossen
cgcctgctcatcatgagattgatcggtataaggcagagattaagaagctggaggaatcagaatcagatatcaaagccttatctgtaaattatgcagctctcttaagagagaaagaggatcagatttccagattgaatcaggagaatggctcattgaaacaaaatctgacctcaactagtgccgctcttaaagaggctagaaccgacatttccaggggatcaaacaactatgctatcaagggaaacaatgatcagtcacccaataggctacacaaatctgtttcgcatttaaaaagtccaaaccatatgtccaatggaaaagggaaggatactgattcgtttataaaggaaaaggaccttgc

SEQ ID NO: 166875 - DNA, 255 bp, Arabidopsis thaliana nossen
ggggggttccacgcgcgcgctattctgctatttctctgatgttttgccgacagtctctaaccatggggaggcagatttaaaatatctatgcgagtgttcacaaagaccacgtcgattctggaaagtcgaccaccactgggcacttgatctacaagtagggtggtattgacaagcgtgtcattgagaggttcgagaaggaggctgctgagatgaacaagaggtccttaaagtacacatggatgaggcacatactta

SEQ ID NO: 166876 - DNA, 388 bp, Arabidopsis thaliana nossen
ttcccgcggggagacacacgtgcggctaatcattaagtttcatagctataatggcttcatcatcatcaatgtcaaagcacaagattccaaacacactaatgtttttggtgatcgtaaactttttgtacctaattcaaactaattcagctgtcagtatcagttccaatttcaacttctacttatcaagattctcgagacatcgaagctcaccatcatcaaaaaccaaacaagggtttcttgcaacggtccaagagagtatgaaccatgctctattggctcgttctcttgctttcaacctcactctttctcatcgaaccgtacaaacccacacgttcgatcccatccacgactgcctcgagctgctcgacgacacacttgacatgttatc

SEQ ID NO: 166877 - DNA, 370 bp, Arabidopsis thaliana nossen
atttaaaattcagatagtgagagagatgattatattttttgaaattggaaggaaacttggagtaaataatataagaagaaaagatgggtcggtggaggttggctttataggttctgttttgacgaacacattatcaaaaggtataagtaagctcttttctcacctaaacggctaaacctaccttcgattagaccattttatttttaattctcttacatttatttaaaaatattttggataatatgattttctatcataataaataaaaatagatggataaagacaaatgagagatcaaattgtggaaatagtatgttattttttaataacaccggccaatattagcttattgcacttttatttcttaaaa

SEQ ID NO: 166878 - DNA, 375 bp, Arabidopsis thaliana nossen
gcgctcaacctgagctcacaaagctttacaaaaaaaaaagagcttaggcggagaagaagaggagaccaaaacaccaaacaaacaacaatggctgtctcaactatctactcaacacaagctctcaattcaactcatttcttaacctcttcttcttcttccaaacaagtcttcctctaccgtcgtcaaccacaaaccaaccggagattcaacacactcatcacttgcgcacaagaaaccatcgtgatcggactagctgctgactctggctgcggcaaaagtacctttatgcggaggctcaccagcgtctttggtggcgctgctaagccaccaaaaggcgggaaccctgattccaacacactcatcagcgacacgacc

SEQ ID NO: 166879 - DNA, 374 bp, Arabidopsis thaliana nossen
gtcgtcgtagtctctctctctcttttcaaaatatcatcggagaaaagaaacggagacacgaaacagttgtgagcatgcacagattcgcggcgaaaagatcggtgcaaaacatttccgtctctctatggcgtcgatgtatctcatcgacgtctcaggcagcgacagcttccgttaaggattccgacgagtttcaggcgaggcttcctccttttgcttacactcctccgccgtatactggtccttccgccgatgttatccttagcaaaaggaaggagtttctcagtccttccatgttctgtctctatcggaaaccgttaaacattgtggatgggaaaatgcagtatctatttgatgagagtggtcggagatattta

SEQ ID NO: 166880 - DNA, 320 bp, Arabidopsis thaliana nossen
ggataatcctttattctatagtcctggggctatttacaactagccaattcagaattttcagatgtactaacaagtgcatctttgatgcagtcatcgattctcccgagagttcacaattaccgcgagcaaacatatgaatttaatgacttaatgatgaggaacgcatttttgctatgctactaatacttgctccgctattctgcccaagcctggctgaggaagagttacggggcttcaaaaaatatgctgattcggccgtttaaaaatactatatgtaaaattaaaaaagcgatagatataatagatatatatctaaattc

SEQ ID NO: 166881 - DNA, 317 bp, Arabidopsis thaliana nossen
ctcaaatttttccagaagagatttagccatcacataaacatctcctttggggtcattgtatatcattgggggcttgaaaactattcttacatcagcatatatattcctgacattgctatactcctaactctccattttttttttaattgttcccaagtccattggcttctctataacctgtttaataatgaacagaagctatgaacatttttcaaaatcgctcatttcagcaaaattccatgtaaacattgaatatttaacccacagtttattagcaacagtttgaatctttaccttgtaataatcatgtataccaa

SEQ ID NO: 166882 - DNA, 367 bp, Arabidopsis thaliana nossen
gcttaatcctgtgatcaatcggtgccaatgctattggattgtccttggggggttgcattaggagtttagcggggcggctgaataatgtagactacaaagcttaagtagctccgctgaccgctgcttcaacgctgcatcacacccgctctggatcacgagtaacagctttgcagcaagaccaacctcaacagcaagtggtgaacattcttctggagctaatttgcagacagaccaaagaatcgacagcgcgtagttagtgcaattctcagacaccctcatcagcaccctaactgtataaggtattgtgtttgcagagtctttgacagcaactcttacttccacgtctgtacacaaagcatcaagaaca

SEQ ID NO: 166883 - DNA, 344 bp, Arabidopsis thaliana nossen
gcggaaaactttcccggttaagcataattcgccatggatgctcaacaacggagaactgatattccttgtgcaccaccggtcggagaacccggtggcgatatatcttcgattctcattgctttcggtgttttcgctgcaatcgccgccttggttatgtttccctcatcgttggtgcaccaagttcctgaaggtcacgttggagcgtattggagaggtggtgctcttctaaacataatcacagagccaggttttcatctgaagctgcctttcataaccaactatgagcctgttcaagttactctacagacagatcaagtgagggatataccatgtggtaccaaaag

SEQ ID NO: 166884 - DNA, 296 bp, Arabidopsis thaliana nossen
gctaaacgttctaaatcttttttataatcacctctctggtaaaatccggggcgtctacgctatatttatgtactcacacgacttcatcggaaatcccggtttatgcggtctttgtcagaagatcacacggtctaaagacattggctatgtttggattctcttaacgattttcttactcgccggcttggttttcgtggttgggatcgctatgttcattgccaagtgcagaaaactcaaagctttgaagagttctagtttaacaacatctaaatggaaatcccttcacaagcttcatt

SEQ ID NO: 166885 - DNA, 372 bp, Arabidopsis thaliana nossen
ctcaaatttctccagaagagattcagccatcacataaacatcttcttttgcttcattgtatctcatcgcgttcttgaaaactagtctaacatcggcatatatctccctgacattgctatactccgaactctccattttttttttaattgttcccaagtccattggcttctctataacctgttaagtaatgaacagaagctatgaacatttttcaaaatcgctcatttcagcaaaattccatgtaaacatggaatatttaacccacagtatattagcaacagtttgaatctttaccttgtaataatcatgtagtccaagtcctttaacatcaacaggctccaagaacggccatgcccatttatgttgagcaat

SEQ ID NO: 166886 - DNA, 360 bp, Arabidopsis thaliana nossen
ttttgttctaggatttttcctattcgtgggtcatttatggcacgcgggaagggctcgggcagcggcagcgggatttgaaaaaggaattgatcgtgattttgaacctgttctttccatgactcctcttaactaaagtagtaggtaaaacaaataggttcatattaaaaagtcttctttgtttctttcaattcaatctaaatttttctggctcggctatactatccagccgagccagaaaaatttatttatcatgctaagaagtaaaaaaagccaataaagagaaaaatagattcatccaacaaaaggagagagagggattcgaaccctcgatagttatttttatgaactataccggttttc

SEQ ID NO: 166887 - DNA, 370 bp, Arabidopsis thaliana nossen
tattttcactgagcgcataacatttttgagacaagagactctctctctctctgttctctctttctgtccccctctctccggcgatggttgttgctatggaccaacgcaccaatgtgaacggagatcccggcgccggagaccggaagaaagaagaaaggtttgatccgagtgcacaaccaccgttcaagatcggagatataagggcggcgattcctaagcactgttgggttaagagtcctttgagatcaatgagttacgtcgtcagagacattatcgccgtcgcggctttggccatcgctgccgtgtatgttgatagctggttcctttggcctctttattgggccgcccaaggaacacttttctgggccat

SEQ ID NO: 166888 - DNA, 344 bp, Arabidopsis thaliana nossen
gaccacgttagaactcttagaatgagagttttataattgttatgagggttccataaacataaacaccccacactttaaaacacaccaattgaccaacaattaatcaacactaatacaagttttaacttattgccataacacacaacacaaactcatctttctttctctgcttcacttgaatctcaaatccatttttagaaagtctctacggctgctgtaggattcagttctgtaactgcagaagcattcttcattgctgcgaaccgtggctccttgggctgaaacttgacccctgcataaagcttcatgtagtcatcaaagacgaaactcgggtactcggaatc

SEQ ID NO: 166889 - DNA, 345 bp, Arabidopsis thaliana nossen
ggagaaactcagtgatggcagcatcatcatctcagtccatccgagaccctccaagggtttctgctcgaagcttctcgatcttctcgagagacttgttgtcaagctcatgcacgatgcttctctccctctccactacctctcaggcaacttcgctcccatccgtgatgaaactcctcccgtcaaggatctccccgtccatggatttcttcccgaatgcttgaatggtgaatttgtgagggttggtccaaaccccaagtttgatgctgtcgctggatatcactggtttgatggagatgggatgattcatggggtacgcatcaaagatgggaaagctacttatgtttc

SEQ ID NO: 166890 - DNA, 343 bp, Arabidopsis thaliana nossen
taaaactttggtcatgtacgtttataactgcgtttttgcattgtctctcggtatatataatcatttctaagtaatccactcttgataaaactagtaattacagattaaacacgtaagctttcaggaaaatcttccaaaaattcaggttcattccggtgaaaaatcattgttcatacattttgagtttgttatgacgttcactacaaaagaatattcattgtaggacaaatccatgaaagattatgaatttatgaatccacataatatggaaataaagatggatttgttacacctaatggtttatacatatatattaatataaagtagcgcatgtgcataaaga

SEQ ID NO: 166891 - DNA, 334 bp, Arabidopsis thaliana nossen
tctctctaaaacactctacaacaaaacttacttgtgtgatctttggtttccttgaaatcatacagttcaaagagtttgctcaatgaaggttcacgagacaagatctcacgctcacatgtttggagacgaacaaaagaagggaaatttgcggaagcacaaagcagaagggaaacttccagaatctgaacagtctcagaagaaggcaaagcctgtaaacgatgacggacgttctgtcaacggcgccggagatgctgcttcagagtacaatgagttctgcaaagcggttgaggagaatctgtccattgatcagattaaagaagttctcgaaatcaac

SEQ ID NO: 166892 - DNA, 357 bp, Arabidopsis thaliana nossen
  unsure (1)..(357): unsure at all n locations
cagcctttagcttatttgtgtgtcgaagagaagagataacattcctaagcaaatctcttctctctcccattcgtctccaaagagattacagttttgagcatttctcatctctcgaagctcttctctgtgtgtgtggcgatggctgctaattcgataatggcttcctccaaacccctaatctccctgtcatccaaccaacaaccaaaccgagtccaaattcccaaattcgccaaacttccccaaattcccaaatccctcacttcctccaccgatctccgtagcaaagcactatcactctcctccgccaccgncaaatccttagctttaatcgccgctttcgctcctccgtcgatggcg

SEQ ID NO: 166893 - DNA, 354 bp, Arabidopsis thaliana nossen
cagccgcatcatccttctcccttgtgcgatatcgtttgcgtgagatttggctgaaaagtagctaaccatgggtaaagagaagtttcacatcaacattgtggtcattggccacgtcgattctggaaagtcgacaaccactggacacttgatctacaagttgggtggtattgacaagcgtgtgatcgagaggttcgagaaggaggctgctgagatgaacaagaggtccttcaagtacgcatgggtgttggacaaacttaaggctgagcgtgagcgtggtatcaccattgacattgctctctggaagttcgagaccaccaagtactactgcactgtcattgatgctcctggtcatcg

SEQ ID NO: 166894 - DNA, 366 bp, Arabidopsis thaliana nossen
  unsure (1)..(366): unsure at all n locations
cggggcgttccacgcgtgcgcanccncatcattcttctcctttttgctatatcgaatgccagagaaagggcgggtgggtatctttccgtggctaaacataacattcacatcaacattgtggtcattggccacgtcgattctggaaagtcgacaaccactggacacttgatctacaagttgggtggtatagacaagcgtgtgatctagaggttcgagaaggaggctgctgagatgaacaagaggtccttcaagtacgcatgggtgttgcacaaacttaatgctgatcgagagcgtggtatcaccattgacattgctctcttgaagtccgagaccaccaagtactactgcactggcattgatgctcct

SEQ ID NO: 166895 - DNA, 350 bp, Arabidopsis thaliana nossen
taaaaataaaagacagtaaactaacaaaataccaggtggtctgaactctatcttatgaaaaaaaatattgaatcgaattcttaaatgtcatatatattgatgtcggaacaatatttttttattgaaacactaaattcattgaacatgttgggttcagtccggttcagaaatttactactgtgtctttataaaaccaaattactattgtgcccccattttccgatcgctataaaaaaaacctaattcctcaactctaattcaccatgtcttcagatcaactaagcaaattccttgatagaaacaaaatggaagacaataaaagaaaagtattagatgaagaagcgaaagct

SEQ ID NO: 166896 - DNA, 331 bp, Arabidopsis thaliana nossen
taaaaataaaagacagtaaacttacaaattaccaggtggtctgaactcgatcttatgaaaaaaaatattgaatcgaattcttaaatgtcatatatattgatgtcggaacaatatttttttattgaaacactaaattcattgaacatgttgggttcagtccggttcagaaatttactactgtgtctttataaaaccaaattactattgtgcccccatttttcgatcgctataaaaaaaacctaattcctcaactctaattcaccatgtcttcatatcaactaagcaaattccttgatagaaacaaaatggaagacaataaaagaaaagtatt

SEQ ID NO: 166897 - DNA, 347 bp, Arabidopsis thaliana nossen
cccacgcgtccggtttcattaataatcttctctcgctttctgtgtttactttaattctgaagaaggatgatgttaccagaagcatgcgtggcgactatcctctcatttacaactccggctgacacaatctcgtcggcggctgtctcatcagttttccgagtcgccggagactctgactttgtgtgggagaagtttttaccgaccgattactgccacgtcatctctagatcgactgatcctcaccgaattttctcttctaaaaaggagctttatcgatgtctctgtgaatcaattctcatcgataatggcagaaagattttcaagatcgagaagctttcagggaaaat

SEQ ID NO: 166898 - DNA, 350 bp, Arabidopsis thaliana nossen
ggggggcccggcacccacccacacccccatcaattcttcttccttgttctttatccgacgcccgcaaaagcgcggaagggaaatttttcagggttcaaaaaaaaccacacaccaacattgcggccattcgccacctcacaactgcaaaggccacaaccactggacactttatctacaaattgggtggaattgacaaacactttaactataagttcgagaaagacgctcctgacaataacaacaagtccttcaagaactcaagggtgttcgacaaacttaaagcttaacaaaagcgaggtataaccattgacattgctctctctaagatccagaccaccacaaactactgc

SEQ ID NO: 166899 - DNA, 350 bp, Arabidopsis thaliana nossen
tatcaaggaggtgtcttcctacttgaagaaggttggttacaagcccgacaaaatcccatttgtgcccatctctggattcgagggtgacaacatgattgagaggtccaccaacctagactggtacaagggaccaactcttcttgaggctcttgaccagatcaacgagcccaagaggccatcagacaagccccttcgtctcccacttcaggatgtctacaagattggtggtattggaacggtgccagtgggacgtgttgagactggtatgatcaagcctggtatggttgtgacctttgctcccacagggttgaccactgaggtcaagtctgttgagatgcaccacgagtctc

SEQ ID NO: 166900 - DNA, 357 bp, Arabidopsis thaliana nossen
aatcaaacccagacttacgcaaaaacgactttgattttactgaacttcggggggggtccaaagatgatgatgggcgtccaagtagaagtgatgaagtcaatcacgctccaacaattcctggttctagtaacacctctttgcctactcaaagcaatgcacccagaccgcttgtacctcctggttttgcaagcacaattttggaaaaaaagcaaggggaaaaacctcaaattgaaagttctcaatatgagcggagtcctttaaattccaaaggcattaatgtggtgaatggaacatcagttaataatggggggaaaccgttgggaattaagataggttcaagtgagatgctaatagaag

SEQ ID NO: 166901 - DNA, 349 bp, Arabidopsis thaliana nossen
attacggataaaatcataaattttttcgcccgtctcaagatcctctagggtagcacaagccgttattagcgacacaccattgtaaccgaattaggagtcacctcttaatttcttaccatccgcaaaaacaaatcaacagcgtattttgcaaaatctcgcctcgcgtaaccacaaatcatactctttcaagaaacaacatttttcttatacatttcatcaaacaccttacgtgcactatcaagctctccacactcggcgtaaaaatgaaccagcgagctctgcacaaacaaatctttcgcataacccatcttcacaatcaacccatgaatctgaatcccattacctttct

SEQ ID NO: 166902 - DNA, 345 bp, Arabidopsis thaliana nossen
gtgagagaagaaagatagagaaaaaaaatgggaggcaaaggtgtgatgatggtggcgatactttgcctttgggcactctctgcaacatctgaagcagtaacagaggctgagccaggtttgatgatgaacttctacaaggacacgtgtcctcaggccgaagacatcgtccgtgaacaagtcaaactcctctacaaacgccacaagaacaccgctttctcttggctccgtaacatcttccatgactgcgccgttgagtcatgtgatgcgtcgcttttgctggattcgacaagaagagagctaggagagaaagaacacgacaggagcttcggacttagaaactttagg

SEQ ID NO: 166903 - DNA, 346 bp, Arabidopsis thaliana nossen
gtttggcattctcaaagcaaactattcctcactactacttgaccgtggatacatgtgttgacaaaatgatgggtcttaggagtcaactcaattcatttcaagaggcttccggtgggaaaaggatatctgtaaatgatcttgttattaaggctgctgcactggctcttcgaaaagttcctcagtgcaatagttcatggacagatgaatacatccgccaatttaaaaatgtgaacatcaatgtcgctgtacaaacagaaaatgggctctacgttcctgtggtcaaggacgcggacaagaaaggactgtctacaattggagaagaggttcgattcttggctcaaaaagc

SEQ ID NO: 166904 - DNA, 352 bp, Arabidopsis thaliana nossen
cagtcctcgatatctaaggaccaaagtagctatggatggaaaacgtgcaatgtgactgctggtccagactacatcccttgccttgacaattggcaggctatcaaaaagcttcatactacaatgcactatgaacatcgcgagcgccattgtcctgaggaatctcctcattgtcttgtgtctctgcctgatggttataagcggtccatcaagtggccaaagagcagggaaaagatctggtacaacaatgttccccacaccaagcttgcagagatcaaagggcatcaaaattgggtgaagatgagtggtgaacatctgacgttccctggtggtggtactcactttaagaatggtg

SEQ ID NO: 166905 - DNA, 352 bp, Arabidopsis thaliana nossen
gacagaagttgcagagaaaagagaattaattgattggtgtaatggagaaggcagggcatttatccaccaaaaatggacccaaggttccaggagagccaacgaagaccggaacctccatggttgacacggcagcttcagccgtacaaagcttcgctccgattaaccaaatccaccaacatctctgcgcgtttcatttctatgcatatgacatgacccgacaagtggaggcacaccatttctgtggtcacatcaacgaagacatgcgccagtgtctgatctacgacggtcctgatgccaacgctcgtctgatcggtctggagtacattgtgacagagaagctctttatgacatt

SEQ ID NO: 166906 - DNA, 352 bp, Arabidopsis thaliana nossen
cggacgcgtgggttcacacacactcatggcttcttcttcttcttcttggggcatgagcaatcattaccagcttcctcttccttttcctccacacaaccgccaaaaaaacctacatcatccgcgtcaatcactccgataaaccggaatcattcctcactcaccacgattggtacacatctcaactcaattcagaatcatctcttctctacacttacacaacctccttccatggcttctccgcttacctcgactccaccgaagccgattctctcctctcctcctcaaactcaatcctcgatatcttcgaagatcctctctacacacttcacactacgcgtactcctgagtttct

SEQ ID NO: 166907 - DNA, 348 bp, Arabidopsis thaliana nossen
atcggctatgaagttgttcatagcaatgaacgttgccttcttgtcgttgattctaatggtaacacatttcgtggttaaaactcctcccctccaagtctctgtactcggctggatttgtgttgccatttctgtttctgttttcgctgcccctctaatgatcgtggctcgtgtgataaagacaaagagtgtggagtacatgcccttcacgctttctttcttcctcactataagcgccgttatgtggttcgcttatggtttattcctcaatgacatatgcatagcgattccaaacgtggtgggattcgtactagggctgttgcaaatggttttgtacttggtttacaggaa

SEQ ID NO: 166908 - DNA, 351 bp, Arabidopsis thaliana nossen
attacggataaaagcataaaccttctcgcccgtctcaagatcctctagcttagcacaagccgatatcacacacaccattgtaaccgaattaggagtcacctcttcatctctcaccatccgaaaaaacaaatcaacagcgtctttagcaaaatcccgcctcgcgtaaccacaaatcatactcgtccaagaaacaacatttctctcagacatttcatcaaacaccttacgtgcactatcaagctctccacactcggcgtaaaaatgaaccagcgagttctgcacaaacaaatctttcgcataacccatcttcacaatcaacccatgaatctgaatcccattacctttcgctct

SEQ ID NO: 166909 - DNA, 354 bp, Arabidopsis thaliana nossen
cgaccaaagatctcttcgatcaaaaccctagctctaaattcccccaaatctgattcttctcctccgataagcttttgttgaattcacaaagcagcgtaaatggtgttggcggagctaggcgggcggattacccgcgcgatacagcagatgagcaatgtgacaattatcgatgagaaggctttgaatgaatgcttgaacgagatcactcgtgctttgcttcaatccgatgtttcatttccccttgtgaaagagatgcagagtaatattaagaaaatcgtcaatcttgaagatctagcagctggtcacaacaagcgccggatcattgaacaggctatctttagtgaactctgtaag

SEQ ID NO: 166910 - DNA, 345 bp, Arabidopsis thaliana nossen
gctagccaaacggacaaagtgccctgcatcttttttatttcccccacaccttttttatataaaattaagtatttcacatttaccgttaattctaatttatgaagatttttttctgattctctaaaagcctccctaattcactaattcgtgggacgatactggacttttgtatttaaaaaatgtttcagtagagatctctgaagtagatgatggtggatagagtagttcttgatcataatttccaatatgcggactgcgtacaacaaaaaacttgtgattggtagtaaaacaccgattaccctgttgaggtctaattcgatccttatagatttctctagctatttt

SEQ ID NO: 166911 - DNA, 354 bp, Arabidopsis thaliana nossen
aatggaaacaatggttatgatgagatccgtgctgccattagggaagctaaggctgtaacagacaagcccactttgattaaggtcactactacaattggttatggttctcccaacaaggcaaactcatacagtgtccatggagctgcgcttggtgagaaggaagttgaggctacccgaaacaatcttgggtggccatatgagccgttccatgtacctgaggatgtcaaaagccattggagccgtcacacgcccgaaggggctgctcttgaagctgattggaatgccaaatttgcagcttatgagaagaaatatccggaggaagctgcagagttgaaatctattatctcaggtgaa

SEQ ID NO: 166912 - DNA, 342 bp, Arabidopsis thaliana nossen
aatggaaacaatgtttatgattagatccttgctgtcatttactaatctacggcgggggcagtcatgcccacttggattaacgtcactactacaattagttattgttctcccaacaaggcaaactcatacagtgtccatggagctgctcttggtgagaaggaagtttaggctacccaaaacaatcttgtgtggccatatcatccgctccatgtaccatacgatgtcaaaagccattggagccatcacacgcccgaaggtactgctcttgaagctcattgtaatgccaaatttgcagcttatgagaagaaatatcctcatgaagctgcagagtttaaatctatt

SEQ ID NO: 166913 - DNA, 349 bp, Arabidopsis thaliana nossen
gttccaatcattcttgctcgtgttcttgctttcatgtttaatcctcatatcaactgcctcgtgtgagcgaaatggtgatggaacgattagaattggattgaagaagaggaaactagaccggagcaacaggctagcttctcagctttttttgaaaaaccgagggtctcattggtctcccaaacactattttcgcctgaacgatgaaaatgcggatatggttccgctgaaaaactatttggatgctcaatactatggtgacattaccattggtactccttctcagaagttcactgtgatctttgatactggtagctgcaatctctggataccatctactaaatgttaccta

SEQ ID NO: 166914 - DNA, 348 bp, Arabidopsis thaliana nossen
gaagccgtgaccacacagtctctgcaactcacggagacatgggccagagcaccagggacatcatcatgagagagttcaggtctggttcctcccgtgttctcatcaccactgacctcttagctcgtggtattgatgtccaacaagtctccctggttatcaacttcgatctcccaactcagccagagaactaccttcaccgtatcggaagaagtggaaggttcgggagaaagggtgttgcgatcaatttcgtgacccgtgatgatgagaggatgctgtttgatattcagaaattctacaatgtggttgtcgaagagctgccttcgaacgtggccgatctgctgtgaaggg

SEQ ID NO: 166915 - DNA, 347 bp, Arabidopsis thaliana nossen
gctctctgtatccatccatatcgaaaaaagatcggaggaaggagagagagataccaatctctgttgctttggttttaagggtttagaggagatgtcaaaccacccgaagatcacatcggcgcatcagaatgtggaggagaagctaagggaacttcaggagaggttctgtcatcttcaagctgctaggaaagaagggcggcatggtgaccttgcgcttttagaagcccaaatctctcagaatattcgggagtggcaagctgaactcactgctccttctcctgaatcttctctgttgggtgaaggtattagccaattccttgaggagtttgctcctctgttgaaattag

SEQ ID NO: 166916 - DNA, 353 bp, Arabidopsis thaliana nossen
cttttctacagccgcatcattcttctttcttgtgcgatatcgtttgcgtgagatgtggctgaaaagtagctaaccatgggtaaagagaagtttcacatcaacattgtggtcattggccacgtcgattctggaaagtcgacaaccactggacacttgatctacaagttgagtggtattgacaagcgtgtgatcgagaggttcgagaaggaggctgctgagatgaacaagaggtccttcaagtacgcatgggtgttggacaaacttaatgctgagcgtgagcgtggtatcaccattgacattgctctctggaagttcgagaccaccaagtactactgcactgtcattgatgctcc

SEQ ID NO: 166917 - DNA, 348 bp, Arabidopsis thaliana nossen
gcaagactcctttcagattcttacttgcagctatgggtaaagagaagtggcacattaacattgtggtcattggtcatgttgattctggaaaatcgaccacaactggtcacttgatctataagcttggtggtattgacaagcgtgtcatcgagaggttcgagaaggaggctgctgagatgaacaagaggtccttcaagtacgcatgggtgttggacaaacttaaggccgagcgtgagcgtggtattaccatcgatattgctctatggaagttcgagaccaccaagtactactgcacagtcattgatgccccaggacatcgtgatttcatcaagaacatgattactggta

SEQ ID NO: 166918 - DNA, 345 bp, Arabidopsis thaliana nossen
cttctctttctcttagcatactctgctcttcctctctctgttggtctctgttccaaaggctttgagaaaaaatggagttcgagaaccggtacggacttgcaacgtcgcagaagtacgactgtctcttgttcgatttggacgatactctttatcctcttagctccggaatcgcaagagaatgtgggaacaacatcaaagattacatgaccgagaaactcggtataccgaaggacaaaatcgtcgaattgtctgatcttctatacaagaactatggaacaacaatggctggtcttagggcgatcggatatgaatttgactacaatgagtaccacagcttcgttcacg

SEQ ID NO: 166919 - DNA, 345 bp, Arabidopsis thaliana nossen
accgaatactgtatccttcactatctcatcgacgtccggaactgcaagtgtggcacaagattatagtggatatacgccataccagacctcttctgacccacacaactattcaaacacgggatattccaattactacagtggctatcaacagcaacctagccagtcatatcctcagcctgtaggggcttatcaaaacacaggtgctcctcagcctctttcctcatttcagaatccaggatcttatgctgggactccaagttattcaggaacttactacaatcctgctgattatcagactgctggaggttaccaaagtacgaactataacaaccaaacggctggaag

SEQ ID NO: 166920 - DNA, 348 bp, Arabidopsis thaliana nossen
tcttccgcatctcttttaatttctctctaatttctcgatctctccgtccaactatgtctgccttcaccagcaaattcgccgatgagttgatcgccaacgctgcctacatcggcacacctggaaaaggtattttggctgctgatgagtccactggtaccatcggaaagcgtcttgcgagcatcaacgtcgagaacgttgagaccaacagacgtaacctccgtgagcttctcttcaccgcccctggtgctcttccatgcctcagcggtgtcatccttttcgaagagactctgtaccaaaagagttccgatggtaagcttttcgttgatatcttgaaggaaggaggagttc

SEQ ID NO: 166921 - DNA, 342 bp, Arabidopsis thaliana nossen
gttgatcctaattcccatgttatcatacacaggctctggtgaaggagacctctgtccttctggtctatcatccaaaggcataccagactgcaacatcctactaatctcaagtaacctactattcaaagcttgaatctcaggatcaaactcaatacctccagtgaaatccttcatgaagtcaggtaactgaatttgcgtcctcggctcatcatctgcccatctcgacttacgcttcctaatcccagtaccggaatcaatacccccttcggcgcttgggttattaatggactcaaaaaggggaggattccaccgacttcgacgcttcctccggcttgtagtctc

SEQ ID NO: 166922 - DNA, 338 bp, Arabidopsis thaliana nossen
ctttagttatgtcacattagtatactatgagaatatatcaagattctactaggtgtatgcataataagggtaagaatttctcttacttttgttcttcttcgtgaaggtccctcctacatgcctgctcttcatcttcaatataaccttcatgttcaataaccaaatcaaaatcataagaatgatgccaagaaatggttttaagcagagactaaagcatattactagatatatacatcattcacaaaattgctttctcttcttttattggtctctgaaatcactttttcatgttccttttttctattcttttaacaaaatcacactcatgtaggtgactt

SEQ ID NO: 166923 - DNA, 353 bp, Arabidopsis thaliana nossen
ctcttcttctcccatcgaagagtcgtcttcttctgcttctctttcgtccgttgccttcaatggccgaatttccagaatccggcacagttatagagccggtgagcttaaaccctgactcggatctgtcgaatggccgagccgagatagacacttccgctccgttcgagtcagtgagagaagcagccactcgtttcggcggttttggtttctggagaccttctctcaagagactcccagatgcttctcaggaaaatatccaagaaactgatatcatgggactcaaagcacaagcttctgagttacaaagagaactaattgttaaagaacgcgaaacgctagaggtgttgaaggag

SEQ ID NO: 166924 - DNA, 345 bp, Arabidopsis thaliana nossen
gtctaatatcacaaagaaagagtttttttaactagcttagctcaaagtgtttgcttaagacaagaagaacatggcgtcttaccagaaccgtccaggaggtcaggccactgacgagtacggaaacccgatccagcagcagtatgacgagtacggaaatccgatgggaggaggaggatacggaactggtggtggtggaggagctacaggtggccaaggatacggaacaggtggccaagggtacggatcaggtggccaagggtacggaaccggtggccaaggatacggaaccgggaccgggactgaaggctttggaactggcggaggagctaggcaccacggccaaga

SEQ ID NO: 166925 - DNA, 348 bp, Arabidopsis thaliana nossen
ctttttccttcttcctctccgattcttcctccgtcagtaaaagaaaatcaaaatggcttcacacattgttggatacccacgtatgggccctaagagagagctcaagtttgcattggaatctttctgggatggtaagagcactgctgaggatcttcagaaggtgtctgctgatctcaggtcatccatctggaaacagatgtctgccgctgggactaagttcatccctagcaacacctttgctcactacgaccaggttcttgacaccaccgccatgctcggtgctgttccacctaggtatggatacactggtggtgagatcggccttgatgtttacttctccatggctag

SEQ ID NO: 166926 - DNA, 346 bp, Arabidopsis thaliana nossen
gttttgggaaccttcggttaccacgcaccagagtaatgaatggttctgaaataatagttgatcacacagtattcttgaggaaggaaagattgtaactgtacattttcgctgttgcaggtatgcgatgactggtcaactgacacagaagagtgatgtttatagttttggtgtggtgcttttggagctcttgactggtaggaaacccgtcgatcatacgatgcctcgtggtcaacaaagtcttgttacttgggttagtactaaaaccatgttgctttaattttctgaggataatcttactttcgaatttactgattgttcttggcatttgccgtcttaacttcaggct

SEQ ID NO: 166927 - DNA, 349 bp, Arabidopsis thaliana nossen
aatctcccaccacataccacttaatccgacccgacccgaccgaaaaaccggacccggtccattccaatgtgaggagctaccaccgcttcctccggagaccacaacaacctccgtcttccaacttcgacgcttgacgccgaatcgcaaactctgctgcaatcgatttctgctgaagggggttacgcttatgctcgcatggcggtgttagcggtggccggtgaccaaagcgcggcggaggcggcgcgtgatatggcttgggagcaacttcactctggtccgtggcactcggttctccccgtttggcgcgacgcttactcaatggcttgtctccacgtagctaaaatccatt

SEQ ID NO: 166928 - DNA, 347 bp, Arabidopsis thaliana nossen
gagatccacgacctaatcgagaaggagaaacgtcggcaatgtcgaggaatcgaacttatcgcttccgagaatttcacttccttcgccgtcatcgaagctctcggaagtgccttaaccaacaaatactccgaaggtattcctggtaatcgttattacggaggtaacgaattcatcgatgagatcgagaatctttgccgttcaagagctctcgaagctttccattgtgatccagcagcgtggggcgttaatgttcagccgtattctggatctccggcgaatttcgctgcttacacggctttgcttcagcctcacgatcgtatcatggggcttgatttgccttcaggtgg

SEQ ID NO: 166929 - DNA, 348 bp, Arabidopsis thaliana nossen
ggcgttgataactggtggagactctgggattggtcgagccgtgggatactgttttgcatccgaaggagctactgtggctttcacttacgtgaagggtcaagaagaaaaagatgcacaagagaccctacaaatgttgaaggaggtcaaaacctcggactccaaggaacctatcgccattccaacggatttaggatttgacgaaaactgcaaaagggtcgttgatgaggtcgttaatgcttttggccgcatcgatgttttgatcaataacgcagcagagcagtacgagagcagcacaatcgaagagattgatgagcctaggcttgagcgagtcttccgtacaaacatctt

SEQ ID NO: 166930 - DNA, 342 bp, Arabidopsis thaliana nossen
  unsure (1)..(342): unsure at all n locations
ggaactcattaagaagatgtgttgggaactcgatccattaacaaggacactatcaatggagtagtgtgctacttacagaaagccaacttaaatgagtgctacaaaaacagatcaaaccgggcctccaatttgtgcagactctgatgatccaaatgcatcttggaaagtgccgcttaagcatgcatgcacaccgcgccagaagacaaaacgcaacgtggatctcagtggcccgaacaatggccagcgagattagagaaagcaccgttctggttatcaagttcccagactggagtttacggaaaagcagcaccagaggatttcagtgctganatgagcactgga

SEQ ID NO: 166931 - DNA, 351 bp, Arabidopsis thaliana nossen
atcgtcttggcgcacagaagatggaactcgggcttggaattcatggagaacctggtgctgctgtggttgacgttgaacctgtggatgtggtggtgtcccatgttcttcagcaaatacttagtcctgagaccaattatgttccaattactcgtggtaacagagtggttctcatggtcaatggtttgggaggcacacctttaatggaacttatgattgctgctggaaaagcagtccctaaactgcagttggaatttggacttgccgttgatagggtgtatacaggcttttttatgacttctcttgatatggcaggattctcgatttcaatcatgaaggctgaccattcgattt

SEQ ID NO: 166932 - DNA, 346 bp, Arabidopsis thaliana nossen
cgcctcctccctcctcatctctccgtcaaccttcctaccatggagaaaactacttcttccgagttaaccccaactcgactcggtttccctaacgagttcccttacgagttcgactctccttccttctcccctggtttcacttctcccggtgactccactgagacggaagacgaaagcagtgatgacgaggaagacttcctcgctgggttaactcgccgactcgctccttcgactcagcgtcttccttcccctctcttcaagtctgaggagaaacgtcaagttgcagctacttcaccacagtcaacactgagtggactcggaagcttttcaaactcaggaagtagaa

SEQ ID NO: 166933 - DNA, 347 bp, Arabidopsis thaliana nossen
gagaagataagaaagcagcactaacaccaactcttaaggaaaacatctgagttatggttaagtaattgcatgcaatttaaagctacgtgtccagcttaagacactcaagtctcacatctgtccctttttacttcgacttcgcttcttttggcttcttttaaactctctctatctctctctttcttcttcacactttgttgttaatttcaagtgtttgatcataatggcaacatcagctcgtagagcatacggtttcggtagagccgatgaggctacacaccctgactccattagagcaactttagctgagtttctctccacttttgtcttcgtctttgcagctgaag

SEQ ID NO: 166934 - DNA, 344 bp, Arabidopsis thaliana nossen
cttaatttctgctcaccatcaaggcaagtttccttcttttgatcctcaacaatttccattgctactaaaaatatcttctttccaaaacaattcacgcatttacgtttttctcaatctttacatatatggtaaccaactcttattccattcctctgtaactcacacaaattcctgtccaaaaattagttttttcttttcatgtgatgtgagaatttgggctacgagaaagatgaagactattagtggattaggtattgggttaagtttaatgtttgggtttcttctattagcacttgttggagaagtctactatcttctaagatgtaagaagcacaagaagagag

SEQ ID NO: 166935 - DNA, 348 bp, Arabidopsis thaliana nossen
ctctgtttcgcggcggagaaaattgaaatggagctcagcttgagcacttcctccgcttctcctgcggttttgaggagacaagcttctcctctgcttcacaagcagcaagtgctcggcgtcagctttgcttccgcgctcaaacctggaggaggagctcttcgatttccttcccgccgtccgcttcctcgtcccatcacttgctccgcctctccatcaactgccgaaccagcctccgaggtgaagaagaagcagttggataggagggataacgtgaggaatatcgcaatcgttgcacatgttgatcatggcaaaactactttggttgattctatgcttaggcaagctaag

SEQ ID NO: 166936 - DNA, 345 bp, Arabidopsis thaliana nossen
gacgagagcagcctgttcataaggttctcggcggtggaaagccggctgatatattcatgtggaagaacaagaagatgtctggtggtgtacttggtggtgctacagctgcttgggttgtgtttgaattgatggagtaccatcttctcactctgctttgccacgtgatgattgttgttctcgctgtgctgtttttgtggtctaatgccactatgttcattaacaagtcccctccaaagattcctgaagttcatatccctgaagaacctattcttcagcttgcgtctgggctcagaatcgagatcaaccgtggattctcttctctccgtgaaattgcatcaggaaggg

SEQ ID NO: 166937 - DNA, 351 bp, Arabidopsis thaliana nossen
ccgatctgagaaatttcgccggagctaggttttgttgtttaccgatcaatcctttaatcaatggcaatggctgttttccgtcgcgaagggaggcgtctcctcccttcaatcgccgctcgcccaatcgctgctatccgatctcctctctcttctgaccaggaggaaggacttcttggagttcgatctatctcaactcaagtggtgcgtaaccgcatgaagagtgttaagaacatccaaaagatcacaaaggcaatgaagatggttgctgcttccaagcttagagcagttcaaggccgagctgagaactcccgtggactttggcagccatttactgcacttctaggagataat

SEQ ID NO: 166938 - DNA, 353 bp, Arabidopsis thaliana nossen
caaggatcgaaaacattaagtagctagttaagagagagagagagatggagatgaacattaagtttccagttatagacttgtctaagctcaatggtgaagagagagaccaaaccatggctttgatcgacgatgcttgtcaaaactggggcttcttcgagctggtgaaccatggactaccatatgatctaatggacaacattgagaggatgacaaaggaacactacaagaaacatatggaacaaaagttcaaagaaatgcttcgttccaaaggtttagataccctcgagaccgaagttgaagatgtcgattgggaaagcactttctacctccgtcatctccctcaatctaaccta

SEQ ID NO: 166939 - DNA, 352 bp, Arabidopsis thaliana nossen
cttctctcttcagataaaacaagtcctgcaaaattaagacctgatgtcttatcgattgctaagtgtggataaggaggaactggttacatcaccttgtttgaaagaacgtaactacttgggtctctctgattgttcctctgttgatagctcaactattcccaatgttgttgggaagagcaatctcaatttcaaagctactgaactgaggctaggtcttcctgagtctcaatctcctgagagagagactgatttcggtttgctgagtccgagaacacccgatgagaagcttctcttcccgttgctaccttctaaagacaatggttctgctactacagggcataagaatgttgtt

SEQ ID NO: 166940 - DNA, 346 bp, Arabidopsis thaliana nossen
cttctttcacgtctctcttccctgaaactttcccgagaaaattctcaatcctctattttctcgagaaaattctcattctcattttctttcagggaaaagttttgttgttgaatacagatttggaaacttcatttgtttttttccgtttttaaccaaaatttttaaaaaagctttcttctgaacgttaatcgtggagagtttcgggtcgggtcgggtcgtaaaaggcgggtttcacggtggtgatagattcacctcctgcttccttctgagggggttagccccgaggctcttcgcctcggcgggtttcaaattcccccaaatctaacaaactcacagattcattttc

SEQ ID NO: 166941 - DNA, 347 bp, Arabidopsis thaliana nossen
cggaaagaggaggagaaagcggcgcagagcgtggcggtgaccgtggtgacttcggacgtggattcggcggtggacgtggaggtggccgtggccgtgatcgtggtccaagaggccgtggaagacgtggaggccgtgcctcggaagaaacgaaatgggttccagtgaccaaactaggtcgtctagtggctgacaataaaataacgaagctagagcagatctatctccattctcttccagtaaaggagtaccaaatcatagatcatcttgttggtcctacgttgaaagacgaggttatgaagatcatgccagttcagaaacaaaccagagctggtcaaaggactagattc

SEQ ID NO: 166942 - DNA, 346 bp, Arabidopsis thaliana nossen
ctctctctctctctctcgagtctctcgacggtcgcatatcaggggtccatttctttcttctgtttggaggatcaccaactatggatgaagagtacgaagtcatagttctgggtactggtctcaaggagtgcatccttagtggtcttctctccgtcgatggtcttaaggtacttcacatggacaggaatgactactacggtggagagtcaacttctcttaatctcaatcagctgtggaagaagttcaggggagaagagaaggctcctgctcatttaggttctagcagagactacaatgttgacatgatgccaaagtttatgatggctaacggaaagcttgttcgtgt

SEQ ID NO: 166943 - DNA, 344 bp, Arabidopsis thaliana nossen
gaagaatacgacgtcgctgtgccttcatgttgcgggttttcgtctcctcttctgattaagaaagatcaatggaaaccaatcttcgagacgaagtttggacagatttcaaccgttcaaatcggcaatggatgcggtggaatgggaccttacaagatacattccataacgttggagccaaacacaattttgctccctcttcttcttcattccgacatggtcttcttcgttgactctggaagtgggattctgaattgggttgacgaggaagcgaagagtactgagattagactaggggacgtttacaggctacgtcccggttcggttttctacttacagagcaaacc

SEQ ID NO: 166944 - DNA, 352 bp, Arabidopsis thaliana nossen
atcacaagtaaatacaaaaatcaccatataaaaatatgaagcgatttattgttcttgcgctttgcatgcttatggttcttgaaaccacaaagggtttagatttccatgacaaagatgtggaatcagagaatagcttgtgggagctatacgaacggtggaggagtcaccacactgttgctaggagccttgaagagaaagctaagaggttcaacgtgttcaagcacaacgtgaagcacatccatgagaccaacaagaaggataaatcttacaagctcaagctaaacaagtttggtgacatgactagtgaagaatttaggagaacatacgctggttcaaacatcaaacatcatag

SEQ ID NO: 166945 - DNA, 349 bp, Arabidopsis thaliana nossen
atcacaagtaaatacaaaaattttcatttaacaatatgaagcgaccaaggggccgggcgctttttttgcggtatggttctcaaaaccacaaagggtttagattcccatgacaaagatgtgcaatcagccaatcgcttgtgggagctatacgaacggtggaggagtcaccacactgttgctaggagccttgaagagaaagctaagaggttcaacgtgttcaagcacaacgtgaagcacatccatgagaccaacaagaaggataaatcttacaagctcaagctaaacaagtttggtgacatgactagtgaagaatttaagagaacatacgctggttcaaacatcaaacatc

SEQ ID NO: 166946 - DNA, 351 bp, Arabidopsis thaliana nossen
attgcttcatcattaccaaatcatcaacttaatcgtttctctcaaatttagggttttctcttttctcgaaagtcttgcggttttctgaatcatctctatctggtttgagggtttcgtttgatatctggagaaaggggtttctggaaacaaggagttcataattcgcgatcttgatctatcgatcttcatttatatataaaagcgtgaatgagattatgatggagtcgaaaggtggtaaaaagaagtccagcagtagtagttccttattttacgaagctcccctcggttacagcattgaagacgttcgtccaaacggtggaatcaagaaattcaaatcttctgtctactcaa

SEQ ID NO: 166947 - DNA, 352 bp, Arabidopsis thaliana nossen
ttttccgacacaaacagagcattgacgttcgttaacgttaagctcctttgaccgtgacgtcttaaccaactttttcaacctctgtttgttcccgttaacggcgttcctcgccggaaaagcctctcggcttaccataaacgatctccacaacttcctttcctatctccaacacaaccttataacagtaactttactctttgctttcactgttttcggtttggttctctacatcgtaacccgacccaatccggtttatctcgttgactactcgtgttaccttccaccaccgcatctcaaagttagtgtctctaaagtcatggatattttctaccaaataagaaaagctgatact

SEQ ID NO: 166948 - DNA, 347 bp, Arabidopsis thaliana nossen
cttgcgtggaagaaagttgcagccactaaatcagatccgacaatgccgaagcaaatccatgagatcaaggacttccttttgacggcgagaaggaaggatgcaaggtctgtgaagatcaagagaagcaaggacattgtgaagttcaaggtcaggtgctcaaggtacctctacacactatgtgtcttcgaccaagagaaggccgataagttgaagcagtctcttcctccaggtttgagtgtgcaagacctttgaagatcttatgaaatcaggatctatcatggttttatatacccttgtcttagatgattttgttttttcccctttctgctgtcttttgaatgactatg

SEQ ID NO: 166949 - DNA, 346 bp, Arabidopsis thaliana nossen
gtcttgtctagctacttttgctctcgcagtgttagtaacacaaggaagcatttttagtttgtgtttggcctcctctgcttctacaaactctgttcctaattggtttcatcattggccgccgtttaaatggggaccaaaatttccatattctccacctaaaccgccgccaatcgagaaatatcctccaccggtgcagtatccaccaccgatcaagaagtatccaccgccaccatacgagcatccaccggtgaagtatccaccaccgatcaagacttaccctcatccgccggtgaagtatcctccaccagaacagtatccaccgccgattaagaagtatcctccacca

SEQ ID NO: 166950 - DNA, 344 bp, Arabidopsis thaliana nossen
tccgaattcaaatcccttggagcgctaatcgccaattctctcatcctcctttagatttccctcgttttatcagagcttcttcttcctcaacctcacagaagccgaaaacttacgaaggtccgaaaccgaggaagaatttagtagctgatttcatttccaaaaacgatgacttggttcgaagcttaccgatctacgtcgggggcgcttctcttttggccgttctctttaatcggactgtttccggtatcgctcctgttgccgatgctagcagctcacagtctagagcagatctattagcgcttggcttggctgtcaccaatctattgaccggtttagtctggtta

SEQ ID NO: 166951 - DNA, 354 bp, Arabidopsis thaliana nossen
taagaatcagacagaagttgcagagaaaagagaattaattgattggtggagtggacaagggaggtcatttatccaccaaaaatggacccaaggttccaggagagccaacgaagaccggaacctccatggttgacacggcagctttagccgtacaaagcttcgctccgattaaccaaatccaccaacatctctgcgcgtttcatttctatgcatatgacatgacccgacaagtggaggcacaccatttctgtggtcacatcaacgaagacatgcgccagtgtctgatctacgacggtcctgatgccaacgctcgtctgatcgggctggagtacattgtggacaaaaaagctttta

SEQ ID NO: 166952 - DNA, 354 bp, Arabidopsis thaliana nossen
caaaaaagaagatatatatattttgaataatagaaaagatcagtaaagaagcctgaatgacatggtttctgaagttaactttctctctttcctttctggttctgtattcaacatagagaatactgatgaggtaagcagtccaactacctaagatgccatagaagagctgaaagagaatccctgagagcatccccagctgtgagaacgagtatggcagtgtcaacagcacttgtgccacctatataatagcacattcatgaatcagaatcataagcagagagactaaatatatagtaaaaccaaaacttgttcatcattttcatctgagagaaagctattacctgattggaagca

SEQ ID NO: 166953 - DNA, 397 bp, Arabidopsis thaliana nossen
ggaatctcgccggctcgatcccaggcgtgcgctactctctcttccggttttcacttttgttcgttctctggcggccgatcccgtcgctcggtaccttttaagatattttttttatctaatgaacctgaaattgtaattaggcatataattggggattatttgctgaatttctcatttctagatcgaaaaaagcgaataattcgttttcatttgattcctgcctaatcttagggtgtctttatttatctaccaaaagaatgtctaattatcgaggagatgatgctgagtacatggaagacgtagatgatgagatggaagatgttgaagatgatatggatgaggagtttcgtggcgatgatcttggtgcttcagattctgacgttgaagaatttgacta

SEQ ID NO: 166954 - DNA, 380 bp, Arabidopsis thaliana nossen
  unsure (1)..(380): unsure at all n locations
cccgggggagatctccaggcgtgcgctctctctcttcccgttttcacttttgttcgttctctggcggccaatcgggacactcggtaccttttaagatatttggtttatctaacaaacctgaaattgtaattaggcatataattggctataatttgctgaatctctcatttctagatcgaaaaaagcgaataattccctttcatttgattcctgcctaatcttagagtgtctttatttatctaccaaaagaatgtctaattatccatgagatgatgctgagtacatggaagacgtcgatgatgagatggaagatgttgaacatgatatggatgangagtttcctggcgatgatcttggtgcttcaaattctgacattgaac

SEQ ID NO: 166955 - DNA, 354 bp, Arabidopsis thaliana nossen
ctcaaaatcttaaaaactttctctcaattctctctaccgtgatcaagatgcagatctgtgttaagactgtcaccggaaagacaatcaccctcgaggtggaaagctccgacaccatcgacaacgttaaggccaagatccaggataaggagggcattcctccggatcagcagaggcttattttcgccggcaagcagctagaggatggccgtacgttggctgattacaatatccagaaggaatccaccctccacttggtcctcaggctccgtggtggtatgcagattttcgttaaaaccctaacgggaaagacgattactcttgaggtggagagttctgacaccatcgacaacgtca

SEQ ID NO: 166956 - DNA, 338 bp, Arabidopsis thaliana nossen
  unsure (1)..(338): unsure at all n locations
gtaccgcccggatcgcggctgcagtctccaggcgtgacgctactctttcttccggtgttcaactttttgaatgttctccaccggtgcagtatccaccaccggtcaataaggatacatcggcaccatacnaacatacaccggtgaagtattcaccatcgatcaagacttaccctcatccgccggggaagtttcctccacaaaaacagtttcaaccgccgtttaaaagatttcttcaccaaaacaatattcaacggcgattaaaaagtattcttcaccaaaacaatattcaacggctttcaagaagtatcctccggcagaacagtattcaccaacgatca

SEQ ID NO: 166957 - DNA, 354 bp, Arabidopsis thaliana nossen
tggccaccgccgcagatgttgacgctgagattcagcaggcgctcactagcgaagtcaagctcttcaaccgctggacctatgacgacgttacggtcacagacatcagtcttgttgactacattggagttcaggcagctaaacatgctacctttgttccccacaccgctggaagatactctgtgaagagattcaggaaggctcagtgccccattgttgagaggctcaccaactctctcatgatgcacgggaggaacaacggtaagaaattgatggctgtcaggatcgtcaagcacgccatggagattatccacctcttgtctgacttgaacccaattcaggtcatcattgacgcca

SEQ ID NO: 166958 - DNA, 360 bp, Arabidopsis thaliana nossen
agccaatggcacatgccacgtttacatcggaagggcagaatatggagtcgtttcgactcttgagtggccacaaaatcccagccgttggactcggcacgtggcgatctgggtctcaagccgcccacgccgttgtcactgcaatcgtcgagggtggctataggcacatagatacagcttgggagtatggtgatcagagagaggtcggtcaaggaataaagagggcgatgcacgctggccttgaaaggagggacctctttgtgacctcgaagctttggtgcactgagttatctcctgagagagtgcgtcctgctctgcaaaacacccttaaagagcttcaattagagtaccttgatctctact

SEQ ID NO: 166959 - DNA, 370 bp, Arabidopsis thaliana nossen
gtcttcgtctctctctctctctctctttgtctccgccatgacaagctcgtcatctcctgcacgcaaggcgttaagcaagatcgcgtgtaataggttacaaaaggagttatcagagtggcaagtaaatccaccgactgggtttaagcacagagttactgataatcttcaaaaatgggtaattgaggtaacaggagcacctggtacgctttacgctaatgaaacttataatcttcaggttgagtttcctcaacattatcctatggaagctcctcaggtgatttttgttccaccagcaccgttacatcctcatatttacagcaatggacatatttgtttagatattctgtatgactcatggtctccagcaatg

SEQ ID NO: 166960 - DNA, 353 bp, Arabidopsis thaliana nossen
atttcataatctttttcatggcttacaactacaatatgcatacttcatgaagagtagctatcataggtgcgggtgttagcggtttagctgccgctaagcacttagcacgtcaccatccacaagtctttgaagcctctgattcgattggaggtgtttggagaaaatgtacgtatgaaacaactaagctccagtcggttcgagtaagctatgagctctccgatttcctttggccgaacagaggcgaaagcagcttcccaacttatgtcgatgtattggattatttggaggcttatgcaaagcattttaaccttgtaaagtttataaaattcaactccaaagtcgttgaacttagg

SEQ ID NO: 166961 - DNA, 351 bp, Arabidopsis thaliana nossen
gggttgcaaatgctaaagttgttaaacgaatccaacacaaactaaaccttgtaagtagacctttttgtttttagtttgttaatttgcaacttgaaggttactgtgagatgtctggtggcaactgtcttagtacgtcgttatgagtattataacttctcccttgggttgtaacaggcccaatcgaagtttcaaagagcagagaaactgttgtccaaaatagaagcctctatgattccaaatggacctgattatgatcaagaggtcatctccgaggaagaaagagctatgttccggaaagtgggactgaaaatgaaggcatacttacccataggtgcgtcctggtctcttaag

SEQ ID NO: 166962 - DNA, 353 bp, Arabidopsis thaliana nossen
ggcactttccaagtactccaactctgatgctgttgtgtatgttggttgtggagagagaggaaatgaaatggctgaggttcttatggacttcccacaattgacaatgacgttgcctgatggccgtgaggaatctgtcatgaaacgtaccacacttgttgctaacacctctaacatgcctgtggctgctcgtgaagcctcaatttacacaggaatcacaatcgctgaatattttagagatatgggctacaatgttagtatgatggcagactcaacttcccgttgggcagaagcattaagagaaatttcaggacggctggctgaaatgcctgctgacagtggatatccagcctatc

SEQ ID NO: 166963 - DNA, 368 bp, Arabidopsis thaliana nossen
accacattattttcactgagcgcataacatttttgagacaagagactctctctctctgtcttctctctttctctccccctctctccggcgatggttgttgctatggaccaacgcaccaatgtgaacggagatcccggcgccggagaccggaagaaagaagaaaggtttgatccgagtgcacaaccaccgttcaagatcggagatataagggcggcgattcctaagcactgttgggttaagagtcctttgagatcaatgagttacgtcgtcagagacattatcgccgtcgcggctttggccatcgctgccgtgtatgttgatagctggttcctttggcctctttattgggccgcccaaggaacactttt

SEQ ID NO: 166964 - DNA, 367 bp, Arabidopsis thaliana nossen
taagtttcataactataatggcttcatcatcatcaatatcaaatcacaagattccaaacacactaatggttttggtgatcgtaaactttttgtacctaattcaaactaattcagctgtcagtatcagttccaattccaactcccacttctcaagattctcgagacatcgaagctcaccatcatcaaaaaccaaacaagggtttcttgcaacggtccaagagagtatgaaccatgctctcttggctcgttctcttgctttcaacctcactctttctcatcgaaccgtacaaacccacacgttcgatcccatccacgactgcctcgagctgctcgacgacacacttgacatgttatctcgcatacatgc

SEQ ID NO: 166965 - DNA, 357 bp, Arabidopsis thaliana nossen
aattcaacaagagatcgcagcagttaccgtgcaggctgcgtatagaggatacttggcacgacgtgctttcaagatattaaaaggtataataaggctacaagcacttatccgtggtcacatggttagaaggcaagctgtttcgactctgtgctgtgttatgggaattgtcagattgcaagcacttgctcgtgggagagagatcagacattcagacattggagttgaagttcagaggaaatgtcatttgcatcatcagcctttagagaataaagccaactcggttgttgatacacattcttacttgggaatcaataagctaacaggaaatgcttttgctcagaagcttctagcttcatc

SEQ ID NO: 166966 - DNA, 362 bp, Arabidopsis thaliana nossen
gaggacactgtgttttgtggtgtttttgatggtcatggtccgtatggtcacattgttgcaaagagagtgagggatttgcttccactcaagttaggttctcatttggagtcctatgtgtcccctgaggaggttcttaaagagattagccttaacactgatgatagaaagatctcagaagaccttgtacatatatctgccaatggagaatcacgagtctacaataaggattatgtgaaggatcaagatatgattcaaatgctaataggctcaattgttaaagcctacagattcatggataaggaattgaagatgcaagttgatgttgattgtttttgcagtggaacaactgcagttaccatggt

SEQ ID NO: 166967 - DNA, 362 bp, Arabidopsis thaliana nossen
aagagactgaatcaggtgaggaaccgacttcttcaggcaacgaagcatcggaggagaaacttcaggcacttttaagtatcgcaacggtttgtgtgaccattcaacccgataaccggcctgtgatgagagaggtgttgaagatggtgagggatgcaagggctgaagcaccattctcgtctaacagtagcgaacattcgcccgggagatggtcggataccgttcagagcttgccaagggatgatcaagtgagcatttagagaaattgggtgggccttcttcattgctttcatagaatgacacgtgtgattcttgaagtagggttcatagtgtaaagcttcttttttattttgtaacgccatttt

SEQ ID NO: 166968 - DNA, 355 bp, Arabidopsis thaliana nossen
gccaaagggcccatcaggcagcccatggtacggatctgaccgtgtcaaggacttgggtccattctctggcgaatcaccgagctaccttaccggagagttccccggagactacggatgggacaccgtcggactttcagctgaccccgagacattcgcaaggaaccgtgagctagaagttatccacagcatgtgggctatgctcggagccctaggctgcgtcttccctgagcttttggctaggaacggaatcaagttcagagaggcggtttggttcaaggccggttcacagatcttcagcgatggagggctcgattacttgggaaaccctagcttggttcacgctcagagcattttg

SEQ ID NO: 166969 - DNA, 367 bp, Arabidopsis thaliana nossen
atcatcatcatcaggaggtgatgtatatttcatcaatcgcgtaaggtaatatgtagagggcagatgttcatcaatgtaattttctatcccaaaactctccattatcattcttctcaccatcaaatccaattccactaattgctccgaaaacaggtgtatcgtctcactgtttcaaatgcaaaaatgtttcaaacacaaaattcttgtgttctataatcaacatgtaatgcgtataatcaagtgaaaaccaaaaattttgtaatgcacattaaaaggcctaaatggattgacttcatgttcgtacctaatactcttgttcccatgatcaggccataattgttgagtaaagtcgttgactctctccaaa

SEQ ID NO: 166970 - DNA, 363 bp, Arabidopsis thaliana nossen
attcacgaaccatctttagtgtcacaacatcatataaacggataacaaaggcatccggcactgtatccaaaatacctaccaattgataagaaattagcaaagtcagagtcaatacggtggtaccctaggagaaaatgacggaaactgatacatttgtgagatcgtacaagtgaaaatgtagggttagattaggaaaatttaccatttacacggtggtagacaattttaaccaacgaacatccgacatcccactgggactttaattcccgctttttgaaatcccaaacctgtattacacaaatgaaatattagagtctatttgactcataaactagagttaatgttgaaggtaaccatatcaac

SEQ ID NO: 166971 - DNA, 360 bp, Arabidopsis thaliana nossen
ctgtacttttacctcgagctctctccaattttctcatagctctattgggggaaaattctgaaacgaacgttaccactatggacactaagatcggatctatcgacgcgtgtaacccgaccaaccacgatatcggcggtcctccaaacggcggagtctccaccgttcaaaacacaagtccacttcactccaccaccgtcagcccctgcgacgcgactcttggccgttacctagcaagacggttagtcgaaatcggcgtcaccgatgtcttctccgttcctggtgatttcaacctgacgcttctcgatcacctaatcgccgaaccaaacctcaagctgatcggttgctgcaacgagcttaacg

SEQ ID NO: 166972 - DNA, 354 bp, Arabidopsis thaliana nossen
tataaatgcttatatatttatgtatctcaaacatcatgagtcaaaaacggggatatataatttttaagatacgaagtatcaaatgtatttaactatattcaagaaatcccccgacctcgtacaatggtactattgaagctttattgaacatgaataactccatttggtattctacctacattttatgtgaaccattacttgtatttttactcaaaccaaaattttaaccacaagtagaaatttaattaacctaaatcacacgatcatttttttaataagtgacgcatactccatttgacatgagacataacatttaaattctacgaatatacttcttctattgtttaataccta

SEQ ID NO: 166973 - DNA, 356 bp, Arabidopsis thaliana nossen
gaaaccaaatgtcgttgataataatagaacactttctttctctctctagaaagcaaaagtagtctagtcactgatttcttctaatcctccggtggagtgagagatgatatctccgacgttgcttcctctcctctgcgctttatttctatgtcttccagtggctgttatcttcacagtccagcgagaactcacctgcgttatctcgccggagtttggtttccgctctctttccgtcttctctctttactctcgaaatgtccccgactcttcttcttcttctacggcggttcggattcgacagccgattcccaaagaagacgaccctcttcttcgactatcttctcgggttaacccga

SEQ ID NO: 166974 - DNA, 366 bp, Arabidopsis thaliana nossen
aaaaccctaaaaaaagtcctttctgattcatctatacagacacatactggattctcaaaacaatggagattccttctctgaataagcagcaagagttcactctcgcctccgtcactgatctcacttctccttcctcatctctttcgtcctctcctgttgtagctacgttttcatgcgttaatgaagtcaaggaactccgatttcaggaatcgaaatcgtctgatggtttcagttttgatcttagttcgactcagttgttcaagttggggccacttctgttcacttgtgtatctgatggttcgagttcttttgcaaaggagaaatcgtcattttctcgaggagttgtaataaaatttagagatgaga

SEQ ID NO: 166975 - DNA, 368 bp, Arabidopsis thaliana nossen
cgactatgaaagcaggttgtcgacaaaagttgattagcccttcaagagcggcttcttgtaacggaaggaagcctgtgaaagctgtaactctcaacaacacgaaggagaagaaagcttcgagttgtagcctcatgaacctaataaatcaacacattgttgttagacaaagttgagaataaacagagttttaggttttaatgttataaaaaacagaggacttacttgcggaggaagtgatatatattgagtatacaactacagatcattgatagcacaagagggcttgaagaagctccataatggattaaatggtgaaatagatcgtcctgaaccatccgaagaagcttagggcggccgctctagaggat

SEQ ID NO: 166976 - DNA, 358 bp, Arabidopsis thaliana nossen
aatacttttacgaaaaaagcttttaaaacttatctagtttcgtttgatacacatttggggaaagaaatgggattcaaccaacagagctacaaagctggtgagaccagaggcaaggcccaggagaagactggacaagctatgggaacgatgagggacaaggctgaggagggccgggacaagacttctcaaacggcccaaacagcccaacagaaggcccatgagacagcccagtcagctaaagataagacatctcaaactgcccaagcggctcagcagaaggcccatgaaacggcccagtcagcaaaagagaagacatctcaaactgcccaaacggcacagcaaaaggcccatgagacga

SEQ ID NO: 166977 - DNA, 360 bp, Arabidopsis thaliana nossen
ttcagcgccagagatggcttagaaccaatagttcattatctaatggatgggtccgttctaatactcgatccgagagttatcagtatttatcaaatctgttcatatctaacggaacgctattggatcgaatgacaaagacattgttgaaaaaaagatggcttttctcggatgaaatgaaaataggattcatgtaatgtaacaggagaagggtttcccattacttagccggaaagatatgtggccatgaaatagggattaagtggaacggaattgactgggtggtagagttgtataaacacctgtttcttccacttagctccatggaacaatatgctactactgaaacatggaagaattgaa

SEQ ID NO: 166978 - DNA, 358 bp, Arabidopsis thaliana nossen
gcaagaaaccttgagagcttaaaaattcttcacttgggtctcttctctgtctcttctcttgcgaccattccgttcgatccatatatcaaagcttgatttagttggttttcaatgggggacagtcagtactcgttttctctcaccaccttcagcccatcagggaagctggttcagatagaacatgccctaacagctgttggatcaggccaaacatcacttggaattaaagcttcaaatggagttgtcattgcaactgaaaagaaacttccttctatattggttgatgaagcgtctgttcaaaagattcaacatttgactcccaacattggaactgtttacagtggtatgggtcctgatt

SEQ ID NO: 166979 - DNA, 360 bp, Arabidopsis thaliana nossen
gagtttttagcaatggcgaaactaaaccctaaattcatctctttgattcgtttcgctctcgtggtgatcgcctctgctgaagttatcttcgaggagaaattcgaagatggatgggagaagagatgggtaaaatctgactggaagaaagatgataatactgctggggaatggaaacacacagctggaaattggtctggtgatgctaacgataaaggtatccaaactagcgaggactacagattctacgctatatcagctgaattccctgagtttagcaacaaggataagaccttagtcttccaattctctgtcaagcatgagcagaagcttgactgtggtggtggctacatgaagttgcta

SEQ ID NO: 166980 - DNA, 357 bp, Arabidopsis thaliana nossen
cggacgcgtgggttttttttctctcatagtcgctctccctctcctctggctttgagaaatccctaactgtttgctcttctcttcccggcgatctatctctccgattcgggtattgaaatggcaactcctatggttgaagatacgtcaagcttcgaagaggatcagcttgcttccatgtccaccgaagatatcactagagctactcgtcttctcgacaacgagattcgaattctcaaggaagacgcgcaaagaacaaatctagaatgtgattcttacaaggagaagattaaggagaatcacgagaagattaaactcaacaagcagctgccttacttggttggcaacattgtcgagatt

SEQ ID NO: 166981 - DNA, 357 bp, Arabidopsis thaliana nossen
ttcttcttcctcctcgcgccgtctctgaaactccatcatggtatcaatcaaattgcttcctcctccaaattgaaaaaacaatggaattggattcggagaacaaattgttgaagacgggtttggttatagtggcgacacttgttatagccaaactcatcttctctttcttcacttctgattctaagaagaagcgtcttcctcctactcttaaagcttggcctccattggttggaagtcttatcaaattcttgaaaggacctattattatgcttagagaggaataccctaagcttggaagtgtgtttactgttaatcttgttcacaaaaagattacttttcttattggtcctgaagtct

SEQ ID NO: 166982 - DNA, 365 bp, Arabidopsis thaliana nossen
gaaaaattaaatatccatccaactgtgtgaattagatattttctcttatgtcttctgtgtgttcgatcaaaaattcaattttcccgagatttttgtttctctcgatcgattcaacacctaaagattgaagcttttgctcgtgggttatgtaaagtttccacctttcgtcttctttctgatctgtgagcaaaaatgggacaacagcaatcaaaaggggaattgctgtatcagcaagttagttatggtaactctgaaggaattcgagctcttcatcgagatggtggagaccttgagtggatggatagagaaggaaaaactccgttgatcttggcttgtatgaactccgagctatttgatgttgctaa

SEQ ID NO: 166983 - DNA, 365 bp, Arabidopsis thaliana nossen
ttataatataaaaaaaacaatcccttctgtcatgtatccacgattaatgcagccttagatgcttcaattgtgaattatagtattgagcaaaaggtttttacctatggttcccgtattacagatcaatcctactacactaatacaatatacgaataggaggcataggggaagaagcactacgccgagaaatcaacaacacgaaaactttcttaaaaatgattccctttctttcttcttcttcgttgggattgggactaattaaaatggttggaacaataaacatccatctcgttcgtattttggatacccgtataaccattgaagactgttgaagtgactaattcctggaaacttaggggcgttga

SEQ ID NO: 166984 - DNA, 365 bp, Arabidopsis thaliana nossen
gtctcttcaagcttctctctctgttcctcttattaccttttatctatcacttttaaactgtgtcaatctaaactcagctttggattcaaacgctggtttttgcactccttacccatgtaaccaaccgcctcaaccaccgtcctctacaggctactctccatatggtaaccctcctccaccgtctccacagtattcaccacccccaccgccttcacagtcttcaccgccacgttctcgctgccctcctgttccgacgacaggctgttgcaaccaaccaccaggtccaccaccttcgacgatgtattctcctccgtatccttacttttatactcctccttatccttacggtactattggcggagggg

SEQ ID NO: 166985 - DNA, 364 bp, Arabidopsis thaliana nossen
ctgatttctaagcttttcatagaaagaagaagaaaaaggcggaattcgatggtggatgcgattcaagtagctgagctgagaagattcgtcgagcagttgaaattgaatccttcgattctccacgatcctagtctggttttcttcaaagaatatctccgaagtttaggagctcaagttccgaagattgagaaaactgaaagagattatgaagataaggctgagacaaaacccagtttctctcctaaacatgatgatgatgatgatgatattatggagtctgatgttgaactcgacaactctgatgtagttgaaccagacaatgagcctcctcagccgatgggagaccctactgctgaagtgaccg

SEQ ID NO: 166986 - DNA, 365 bp, Arabidopsis thaliana nossen
agcagcacgaacaccaactcttaaggaaaacatctaagttatggttaagtgattgcatgcaatttaaagctacgtgtccagcttaagacactcaagtctcacatctgtccctttttacttcgacttcgcttcttttggcttcttttaaactctctctatctctctctttcttcttcacactttgttgttaatttcaagtgtttgatcataatggcaacatcagctcgtagagcatacggtttcggtagagccgatgaggctacacaccctgactccattagagcaactttagctgagtttctctccacttttgtcttcgtctttgcagctgaaggctctatcctctctctcgataagttgtattg

SEQ ID NO: 166987 - DNA, 359 bp, Arabidopsis thaliana nossen
cggagtcacttctcaacaaagcttcaagaatcggtgaaggggtttttgggacagtctacaaggcacctttaggagaacaggggagaaacttggctgttaagaaacttgtcccgtcgccgattcttcaaaacctagaagattttgatcgcgaagttcggatattggcgaaagcaaagcaccctaatctagtatcgatcaaagggtatttctggacaccggagttgcatcttctggtgtcagaatacatccccaacggaaacttgcagtccaagttacacgaacgagaaccctcaacaccgcctctttcttgggacgtaagatacagaatcatcctcggtacagccaaaggactcgcttat

SEQ ID NO: 166988 - DNA, 359 bp, Arabidopsis thaliana nossen
  unsure (1)..(359): unsure at all n locations
cagagtcacttctcaacaaagcttcaagaatcggtgaaggggccnngggggcagtctacaggtctcttgtancanaacagcggagaaacttggctgttaagaaacttgtcccgtcgccgattcttcaaaacctagaagattttgatcgcgaagttcggatattggcgaaagcaaaacaccctaatctagtatcgatcaaagggtatttctggacaccggagttgcatcttctggtgtcagaatacatccccaacggaaacttgcagtccaagttacacgaacgagaaccctcaacaccgcctatttcttgggacgtaagatacagaatcatcctcggtacagccaaaggactcgcttat

SEQ ID NO: 166989 - DNA, 375 bp, Arabidopsis thaliana nossen
gaacgcttaagaagaagcatgcttccggaacatacaaagagatggttatatacgtagaagcgtgtgaaagtgggagtattttcgaagggataatgccaaaggacttgaacatttacgtaacaacggcttcaaatgcacaagagagtagttatggaacatattgtcctggcatgaatccgtcacccccatctgaatatatcacttgcttaggggatttatatagtgttgcttggatggaagatagtgagactcacaatttaaagaaagagaccataaagcaacaataccacacggtgaagatgaggacatcaaactacaatacctactcaggtggctctcatgtgatggaatacggtaacaatagtattaagtcgg

SEQ ID NO: 166990 - DNA, 360 bp, Arabidopsis thaliana nossen
aaaatcgtaaagttctaaagcggtttttcatcaattttcaagcaatcgggaaaaaagcaatggcgtcagacaaacaaaaggcggagagagccgaggttgcggcgaggctagcggctgaggacttgcatgacattaacaaatccggtggtgctgatgtcacaatgtataaggtgacggagagaacaactgaacatccaccggagcaagataggcccggtgtgataggatcagtgttcacggctgtccaaggaacgtatgagcatgcgagagacgctgtagttggaaaaacccacgaagcggctgagtctaccaaagaaggagctcagatagcttcagagaaagcggttggagcaaaggacg

SEQ ID NO: 166991 - DNA, 357 bp, Arabidopsis thaliana nossen
gagacagaggtagagatatggaattgctctttctcctctggtcaatcatgtacacttcaatcagttccatcttcttctctcttctcctcccgtttcgcttccttctccaccgtctccttccttcacgcgccgccgtcgatcctaatgtctctttctacgaaggcacagtctggcacgaccgtctccgtcctgtccgccactctttccgttattccgttcgttacgcactctttgacctcgccaaagctattcccacaccgccggatcatttctccgccgccaaacctcgccgggtttctcgtcccaccggcccattttttttttggccattcccaccaaccgttggttttgaccaaa

SEQ ID NO: 166992 - DNA, 360 bp, Arabidopsis thaliana nossen
ctcccactttcctagtgtgtctgccctgctaagtttactgtaaacaaattcccattattgattggtaagtttacgtactttaccctagttcatatagttacctcatatttctaagtaactacactatagccaaacataaatgtgaaacggaagcactcaatcgtcagcgaacttgagagcaaaatacaatacgacggtacggtatcagcataaacgtgaattaatggaaccgcatatttaaaaaaatcataactggataaggtttcaaaaaaagaattgttgcacaataaacgagtttttttgtttattacaataaacgagtttcaattccttccatcgtcaaaaaccaaagagcttttt

SEQ ID NO: 166993 - DNA, 384 bp, Arabidopsis thaliana nossen
aattccgggttggaccaaggggtccgaccattaccattgaccaacctttgggagtattatttggtttccaataatgtaaatatgtatatatatatattttttgtttttttaagttttctaatcatttttacaatgcagggaaagaggatcatttgatttcaatcggctggatagttacatgcatcagtttaagggaagcagcacgaggtaatttccccccttagtttttgactattctaattacgccttcaagaaataattttacttaaagaaatgcgaatacttcaatgtttataagataaaagagtgtaacgcaaaagtacattaaaattacttccattctaattcaggattcaatgacagattctactttaaccagaaata

SEQ ID NO: 166994 - DNA, 363 bp, Arabidopsis thaliana nossen
gttgttattgtactagttactccaaccatcttctgcattcaccgcaaaggctatcacggtaacctcatgttctttgtaatttcgttgcagctatttgcaacaaagaaggcagactctatgtcatgttggacactattggatttgtacctaaaccccagcaccgtaagatttttatatcactctgtttagcttctgcttattctagagctacgcttagcaactcttcttttctaggatgccccattcccgttgattatgaccctgataaggtgctcctaccaagtgataaaaccgcagatacaattgtcagaaatttgacctacgtaacagaggatgaatcctctaagtctcagtttcctctat

SEQ ID NO: 166995 - DNA, 363 bp, Arabidopsis thaliana nossen
gctactggaatctgcaatgagttctttgctttcgaagttgccgcaacctaaacagaatgtgaagacagtacgtagtaccatgagtcaaacaatggaggaatatcagtctaatgagagtgaagataaaagaagttggatttggagtaaggcggtaagtgttgggaagaaagttctgacagctggtgttgtagtgtcttcagctccacttcttgttccttcactttttgtcgcctcgacactcgcctttctctcctcggttccgttttgtctcttcttggctaattatgcttgtacacaaaaggtcatgagtactctgcttcctgatactgaagaaactggtggagttggcaaggaggatgatga

SEQ ID NO: 166996 - DNA, 368 bp, Arabidopsis thaliana nossen
ctctagttggtctctcaaaggctttccctggaatcaaagctccggctactctcgctggttcttcccggaaagtctctcgcatctgcttcgccacctccgttagccaaaacgagggaagagatcctctagataacgctagagactcgagagctgattcagcttacggatcgaagaaatggagggaggacatcggagaaaactatgcccaagcggctaaagacaaggctaacgaaggagcaagcaaagctgcagataaagcctacgagacaaaagagcaagcaaaggataaagcctacgaaactaaagagaaagcaaaggatacagcctacaatgcaaaagagaaggctaaggattatgctgaacggact

SEQ ID NO: 166997 - DNA, 364 bp, Arabidopsis thaliana nossen
ctcatttatcgtcctctctcgcttgacctacaacacccgattctctaatcgaaaccgtggctctctttttgatcagatctcagatctttccctctttgattcttcttccttagatcgattctctctagaaacaacaatggcgtctgggcgtgaagagttcgtatacatggctaagctcgcggagcaagcggagaggtacgaagagatggtagagtttatggagaaagtctccgccgccgttgatggcgatgaactcaccgtagaagagcgaaatcttctctccgtcgcttataagaatgtgattggtgctcgccgtgcctcgtggcgtatcatttcatcgatcgagcagaaggaagagagccgt

SEQ ID NO: 166998 - DNA, 354 bp, Arabidopsis thaliana nossen
ggcggttatcaagaacacataactgggcggttgcactgaaaactcttagggttattcaccgtgccttgagagaagtggaccagacatttcatgaagaagttattaattatagcagaagcagaagtcatatgctgaatatgtctcattttaaagatgattctggtccaaatgcttgggcttattctgcttgggtccgtttctatgctctattcttagaggagcgattagagtgtttccgtgttttgaagtacgatgttgaggttgaccccccaagaaccaaagatttggacactcctgatttgctcgagcaacttcctgctctgcaagaacttcttttccgtgttcttgactgtc

SEQ ID NO: 166999 - DNA, 354 bp, Arabidopsis thaliana nossen
tgaatatattgatatatctatctctactcgtcagcaagctgtcctcatgcttctctcgtcattcatttgctttttcataatgatgttgtcttattgtctacattgttttaaggaacggttagctacgatttgtttatacatttaagtaggctcagaattatgccaacaaaagatagtttcagagtttattgcaacaaaaaatagtttacaaaaagggtcccaaaacccatttaatcatttaaatgatttagggtactgttactaattatgatatgtgactgttgaaaacttctacaatgtttatagcattttttgtaatggaactcccaaaaaccctgagggctcttaaagatc

SEQ ID NO: 167000 - DNA, 357 bp, Arabidopsis thaliana nossen
gttagagagagagagaccacgccagatatacctttcttgtttcaccggggttcatacacaaaaatggcgggcagtgcctcattcgccgccgcattattcatcggactctctcttctcttcgccgtcacggctgaagatccgtacagattctttgaatggaacataacttacggcgatatctacccactcggtgttcgccaacagggtattttgatcaacggggcgtttccgggaccggacattcattcggttactaatgacaatctcatcatcaacgtctacaatagcctcgacgaacctttccttctttcatggaatggaattcaacagaggaggaactctttcgttgatggagtg

SEQ ID NO: 167001 - DNA, 370 bp, Arabidopsis thaliana nossen
ccggggggaaccacgcgggctgtacttctctctctacctttacataaaccacctttgacatcaaaacagggggaacccatgtacattcccaaatttttaaggaccacaccacttcgttcccacactaatcaatataggcccgataatctaaccctgttctcaaggacattatcccattctctttcactcaatcaatatctaatgataaacttcaccacatccaattggacatagaagactatactataaagccagataactcctacccatccccaaccaatacccttaatacatgctaataaccaacttgcacaaaccccaatcaaaacaccaatcctttaaattaaaacaacaaccaaacaaaggatat

SEQ ID NO: 167002 - DNA, 363 bp, Arabidopsis thaliana nossen
cattgcttcatcattaccaaatcatcaacttaatccttgggctcaaatgtggggttttctgttttctcgaaagtcttgcgcttctctgaatcatctctatctggtttgagggtttcgtttgatatctggagaaaggggtttctggaaacaaggagttcataattcgcgatcttgatctatcgatcttcatttatatataaaagcgtgaatgagattatgatggagtcgaaaggtggtaaaaagaagtccaccagtagtagttccttattttacgaagctcccctcggttacagcattgaagacgttcgtccaaacggtggaatcaagaaattcaaatcttctgtctactcaaactgctccaag

SEQ ID NO: 167003 - DNA, 353 bp, Arabidopsis thaliana nossen
tttaatacctccgggccacaggagttccttccccaataggattagggggccttttaaggttttcattgttgtcctggtgatttcagctcgaaaaggtgaatttgaaacaggatatgagaggggtgggcagacacgtgaacatgttcaacttgccaaaacattgggtgtctctaaactgattgttgttgtgaacaagatggatgacccaactgtgaactggtcgaaagaaaggtacgatgaaatagaacaaaaaatggtaccgttcctgaaagcctctggctacaacacaaagaaagatgttgtcttcttgcctatatctggtctaatgggcaaaaatatggaccagaggatgg

SEQ ID NO: 167004 - DNA, 363 bp, Arabidopsis thaliana nossen
aaaaaaacagcgttaaaaccgaaccatcaagctaacaaaaaaaaagaggggaatttttggtttttgttttggttttcaaaaacaaaatctttgaattttatggcaacccgtcttctccgaacaaactttatccggcgatcttaccgtttacccgcttttagcccggtgggtcctcccaccgtgactgcttccaccgccgtcgtcccggagattctctcctttggacaacaagcaccggaaccacctcttcaccacccaaaacccactgagcaatctcacgatggtctcgatctctccgatcaagcccgtcttttctcctctatcccaacctctgatctgctccgttccaccgccgtgttgcat

SEQ ID NO: 167005 - DNA, 366 bp, Arabidopsis thaliana nossen
cgagatttcaagctctctaacatagttcttcacttttgctctcaaagctgtcatctttgattcaactacttaagctccaagtatggcaggatccgcaccggaaggaacacaatttgatacgcgtcagtttgaccagaggctgaatgaagttctcgatggacaggatgagttcttcacctcatatgatgaggtccatgagagctttgatgccatgggtttgcaagagaatcttcttaggggtatctatgcttacggtttcgaaaagccttctgctattcagcaaagaggaattgtacccttttgcaagggtcttgatgtgatccagcaggcacagtctggtactggaaaaaccgccactttctgctc

SEQ ID NO: 167006 - DNA, 346 bp, Arabidopsis thaliana nossen
ccaaccttgactggtacaagggaccaactcttcttgaggctcttgaccagatcaacgagcccaagaggccatcagacaagccccttcgtcttccacttcaggatgtctacaagattggtggtattggaacggtgccagtgggacgtgttgagactggtatgatcaagcctggtatggttgttacctttgctcccacagggttgaccactgaggttaagtctgttgagatgcaccacgagtctcttcttgaggcacttcccggtgacaatgttggattcaatgtcaagaatgttgctgtcaaggatcttaagagaggatacgttgcctctaactccaaggatgatcc

SEQ ID NO: 167007 - DNA, 355 bp, Arabidopsis thaliana nossen
cctcttcctttttctttccttatatcgagaaaagcctctggctcatatggagataactaaacagatcagagcaagaactatacagccataacaatggctgtcacaaaacttattctctttgcctctgcattacttctaacaactctatttatcggcgttaatgcatccaggtccaatgaaacatggcatgaacatgcagttgagaacccagatgaagtcgctgccatggtggacatgagcattcgaaacagcacagagcggagaagattaggttacttctcctgcgccaccggcaacccaatcgacgattgctggcgttgcgaccgcaaatggcagctccgtcgcaaacgtttag

SEQ ID NO: 167008 - DNA, 369 bp, Arabidopsis thaliana nossen
  unsure (1)..(369): unsure at all n locations
gcgatcatcatctcttggtgacagaagaaaagagttgaggaacagagaaaatggcancacaggcacttgtgtcttcttcacttacctcctctgttcagacagctagacagatatttggctcaaaaccaattgcgtctgcctcacagaagaagagttcctttgttgttaaagctgctgcaactccacctgtcaagcaaggagcaaacagaccattgtggtttgcatcatcgcagagtctctcttacttggatggcagcttacctggtgactatggattcgaccctcttggcctttcagacccagaaggtactggaggattcattgagccaagatggctagcatacggagagatcatcaacggacggttcg

SEQ ID NO: 167009 - DNA, 366 bp, Arabidopsis thaliana nossen
  unsure (1)..(366): unsure at all n locations
cacggatctgtgagatctagaagaagaagaagctaanacgatggcatcgatggcaggaccagatcatctcttcaatttgagaaaccatttctacttgggtgcttatcaagctgcgatcaacaacagcgagatccctaatctttcgcaggaagatatcgtcgagcgagactgtctcgtccatcgcgcttacatcgctctcggaagttaccagcttgtcatcagtgagatcgatgaagccgctgctactcctctacaggcagtgaaactccttgctatgtatctatcgagtcctgaaaacaaggaatcaaccatttcgagcttgagggaatggttggcagatccaactgtaggaaacaatgctattat

SEQ ID NO: 167010 - DNA, 380 bp, Arabidopsis thaliana nossen
  unsure (1)..(380): unsure at all n locations
gggggccccgcgtccgaaaaacttctctctgaatctcagtgagttctcataaaatgagagggatggtgagttttgccgtttgggctctctttnctgctttactctcacagcagctctttgcttctgttgcttccgtaaggtttgaggatgccaaaacatactacttatctcctccctctggctcacatggaactactgcatcacacacgccttcttcttctaactgtggaagtccaccttacgacccttctccttcaactccttcttacccttcacctacatcacatactccaacttcttccactccatcacacactccaactccacacactgcatcacacacgccaactccacacacccctgcttgtaactgtggaagt

SEQ ID NO: 167011 - DNA, 363 bp, Arabidopsis thaliana nossen
tgcagttggatctgacaggaatatttatgcatggaaagattcctacacttaagatatgtgtgattcagattttccgtgcccatttgtggcagaagatccatgagagtgttgttatggatctctgccaagtattggaccaagagttggacgctttggagatagaaactgtacagaaggagacaattcatccaaggaagagttataaaatgaacagctcttgtgctgatgttcttctatttgctgctcataaatggccaatgtctaagcctagcctggttgcagagtcgaaggatatgttcgaccagaaagcgagtaacaagtattggatagatgtgcaacttcgatggggagattatgactctc

SEQ ID NO: 167012 - DNA, 361 bp, Arabidopsis thaliana nossen
gaaacccatcatcatcatgatgaactcttctcttctaactccttcttctgcatcttctgcccatatccaaactccatgaacaactttcgaccacgaagacttcctcgatcaaatcttttcctcggccccgtggccctccgtcgtcgatgatgctcatcctcttccctccgatggcttccacggccacgatgtcgactcaaggaatcagccgatcatgatgatgcctttgaatgatggctcctccgtccacgctctttataatggcttctccgtcgccggatctcttcctaactttcaaatccctcagggatcgggaggaggattgatgaaccaacaaggacaaacgcaaacgcaaacgcaa

SEQ ID NO: 167013 - DNA, 373 bp, Arabidopsis thaliana nossen
  unsure (1)..(373): unsure at all n locations
gacccacgcgttctgaagacgagagtacgacatatggctacgaacaaataaaatgagcttgatggtggatgcgacgcctgaggctgcnaggccctgggctagtgcggcgaatgcagaagttatcgatgcgcttccttatatagacgacgactatggcaatccattgattaagtcggaggtagaccgtttggtggaggaagagatgcgtcggagctctaagaagccagctgactttctaaaggacttgcctcctcttccgaagttcgattttaagaactgccctgttcttggcaaagagtatgagcgtgttagagctgggaagcctcctgtgcggatagatttcgaatcccgatacaaacttgaaatgccacct

SEQ ID NO: 167014 - DNA, 355 bp, Arabidopsis thaliana nossen
atcaagatgcatacgcgtgcagtggacagaagtgttctgcacagtctatgctttttgttcatgaggttggtttgatcctaattgttatggtgaaactacctttgaatcttttgtttacttccattttcttctgtctttggtgttttcaatgtattttctctctgagcagaactggtcaaaaacccctcttgtttccaaattaaaagaactagcggaaagacgcaaactggaagacttaaccattggtcctgtccttacagtgagtttcattgtttctccatctgttgttaatcatctgatgagattgtatcattaaaacttattttttcattattgtttcaagtttacaactgag

SEQ ID NO: 167015 - DNA, 354 bp, Arabidopsis thaliana nossen
gcttctcgatttctctcctctgctctccaattccatcttcgcatggcgagttcggctccagccgcttggtcttcctcctctagaattctctgttcctactcctctccttctccttctctctgtcccgccatttccacctctggtaaactcaaaaccctaactctctcttcctccttcctcccttcttactcattaaccaccacctccgcttctcaatccactcgtcgctccttcaccgtccgcgccgctcgtggaaagttcgagaggaagaagcctcatgttaaccttcggaccatccggcatggttacccttggaaaacttccttaacccgaacttttacccatggctctcgc

SEQ ID NO: 167016 - DNA, 366 bp, Arabidopsis thaliana nossen
tcgattataatctggtccttagatttatttatggcccccgaggagccgtatgaggccatagacctcatgtggggggtctgaaatagcggtgaaaatagtaatgttctcgccgactaggattatctaacagtttaagtacagttgatatagttgaggcacaatcaaaatatggtttttggggatggaatttgtggcgtcaacctataggttttatcatttttctaatttcttccctagcagaatgcgagaggttaccgtttgatttaccagaagcggaagaagaattaatagcatgttatcaaactgaatattcaggtataaaatttggtttattttacgttgctttttatctaaatctattaattt

SEQ ID NO: 167017 - DNA, 357 bp, Arabidopsis thaliana nossen
aaacaaacctgtaaatcaaatacaggttgcacatcatcttcatccgatgcatcagtatcatcattgacatccaagggaactatatccctctgtttatgaactgtggacaaaaaaccaaacatcagacataaacttacaaaatctcaaacaatgagcaatctatcacacatatctcatcagaatcgttaattaagaagaaataagctagtaagcacttaataataaggacatagtcattccaataatcaattaagctttaggaaacaaaagaaaggacaaatttttcgaagtgggtagaagtttacaggcgtcaatctcgtcatcgtattggtcttcgacgatatctttgcgagtttt

SEQ ID NO: 167018 - DNA, 328 bp, Arabidopsis thaliana nossen
gtccgttaacgttaagctcctttaccgttacgtcttaaccaactgttgcaacctctgagtgttgccgggaacggcattcctcgccggaaaagcctttcggcttaccataaacgatctccacaacttcctttcctatctccaacacaaccttataacagtaactttactctgtgctttcactgttttcggtttggttctctacattgtaacccgacccaatccgggttatctctgtgactactcctgttaccttccaccaccgcatcttaaagttagtgtctttaaagtcatggatattttttaccaaattagaaaagctggtcctttt

SEQ ID NO: 167019 - DNA, 353 bp, Arabidopsis thaliana nossen
cttcaggtcaaaatgggtgttttctcgagagcggttgcgttttcggtctttgtgtcgtttctgcgtgggttcactgcttattctaagagaaatgatggaacattcagagttggcctgaaaaaactgaagttggatcctaacaaccgactcgcaacacgctttggttccaagcaagaagaggccttgagatcttctttgcgttcgtacaacaacaatcttggtggtgattctggagatgctgatattgtcccgctcaagaattacttggatgctcagtactatggtgagaatgctattggtactccaccgcaaaagttcactgtcatttttgataccggaagctctaacctttg

SEQ ID NO: 167020 - DNA, 330 bp, Arabidopsis thaliana nossen
tcaaaaacttttctctgaatttctttgagttctcataaaatgaaagggatggatagttaagatcgagggggctctcaatactgctttactctcacagcatctctttgcttctgttgcttccgtaatgttggaggatgccaaaacattctacttatctcctcccaataactcacatttaactcctacatcacacacacctacttcttctaactgttgaaatccaccaaacgacccttcttctttaacttcttttcactctttatctatatcacatactttaactcttttccactcctttacacactataacttctcacacttcattataca

SEQ ID NO: 167021 - DNA, 354 bp, Arabidopsis thaliana nossen
cggcgagcttgtgaagaagaatctggtgatttcatctccttcgatcaggcccaagattcgcattacgggtcttataatcgccgagattgttcgagcctgaataatcaaaatggttgtgcttgctgctgccattgtggtcaagtctgggaaagtgattgtttccagacactatgtggatatgtcccgtatcagaatcgaaggtctacttgcagctttttctaagctggttggaatgggaaagcagcatacctatatcgagacggagaatgtgcgatatgtttatcagcctattgaagctctgttcctgcttcttggttcaactaaagcagagtaacattcttaaagacctggcca

SEQ ID NO: 167022 - DNA, 365 bp, Arabidopsis thaliana nossen
atttctcacattttcgtagccgcaagactcctttcagattcttacttgcaggtatgggtaaagagaaggtggacattaacattgtggtcattggtcatgttgattctggaaaatcgaccacaactggtcacttgatctataagcttggtggtattgacaagcgtgtcatcgagaggttcgagaaggaggctgctgagatgaacaagaggtccttcaagtacgcatgggtgttggacaaacttaaggccgagcgtgagcgtggtattaccatcgatattgctctatggaagttcgagaccaccaagtactactgcacagtcattgatgccccaggacatcgtgatttcatcaagaacatgattact

SEQ ID NO: 167023 - DNA, 358 bp, Arabidopsis thaliana nossen
  unsure (1)..(358): unsure at all n locations
caaaaaancccaacnaacagcttgcttacaaacccgcacaaaaccacgggggggcaaggagcaagcgggaggggaaaagaaaaaaaaacaaaagggaagaaagcgaccacaagaggctgaagagaagcaaaagggcaacgcaaagcatgcaagacagcttagttacaaaaaccataaccaatttgacgaagctattccatatcatcatgcttctatggagaagaagacaaatgggttagaggatctgattgggctctgggagaatcctacggggactaatgatgcaaatcacgtcgacaagggttttgaaacaaccggtttgaggcaggaagaatctcagtctggagtgacgactcag

SEQ ID NO: 167024 - DNA, 359 bp, Arabidopsis thaliana nossen
ataaagaggaagaaaaatgggtcgagtctcatctattatctctttctctgtgacactcttgatgctgggcaatggctacactgcccaacagtggcccaacgagtgccagctcgatcaactcaatgcgctcgaaccatcccaaatcatcaagagcgagggtggtcgcatcgaggtctgggaccaccatgcaccccagctccgttgctccggctttgcctttgagcgtttcgtcattgagccttagggtcttttcttgcccactttcttgaacgccggcaaactcacgtttgttggtcacggaaggggtctaatgggaagagttattccgggatgcgccgagacgttcatggagtcaccgg

SEQ ID NO: 167025 - DNA, 363 bp, Arabidopsis thaliana nossen
  unsure (1)..(363): unsure at all n locations
agaaaaaaaaataatcaaatcctcctcctctgcttcaccaccaaaaaggatattcttctctcgtcttgtgccggttaatcaaaatctctccgtgtgaatcgtttgtgaatggtggaaactaatccgatcggtggtaagtttacgctctccctttccatcaaaagggcgagcttttctcttcctctctcgacatcctctgttttcgctttcggatcttgcaaagaaggctggtactttcgctgccttggcctcgacccgtgaacgattcgcccctaaaattcacaacccggaaccctaatttcctaaaaagtggttctttgnttattgattctgttacttgtgagatttgctctgtattttgtt

SEQ ID NO: 167026 - DNA, 359 bp, Arabidopsis thaliana nossen
cctcctttgtggctgcctgtattgagtgatctggtcgagtataatgctctgttgcttccctccgggggggatagactagaggatcgggtagaatccttgtaagttccttctacacctgaaaacacaccaaaacatgcaatatgtatgcaagatgatcctaaatgcctaagtgtacaaaataagctaaatgtgatgcaaaacgatatgaaacaatgagtgatcactaagctaaatgatgataaatacatgtctaaaatgagtaaaatatagtgttatcaacttccccaaacttatctcttgcttgccctcaagcaaacaaaaaaatcttaagttgaaggagaggtttgaaggttgggatt

SEQ ID NO: 167027 - DNA, 370 bp, Arabidopsis thaliana nossen
cacgcgtccgaagaaaatggttaagctcagctatcttctcgttgcaaccttcggggttgtcgtcgtccttaacggcgtggcgggcgaggcagtcacttggggttcctcctcagctacagaacgagtgtaacctcgacaacctagatgttctccaagccaccgaaactatcaagagtgaagccggtcagatcgagtactgggaccacaaccaccctcagctccgatgtgttggtgtttccgttgctcgttatgtaattgaacaaggcggtctttacttgcccaccttcttcacttccccaaaaatttcctacgtcgttcaaggaacgggtatcagcggaagagtggtccctggatgtgccgagaccttcat

SEQ ID NO: 167028 - DNA, 355 bp, Arabidopsis thaliana nossen
ctcccactttcctagtgtgttttccctgctaagtttactttaaacaaaggcccattattgattggtaggtttacgtactttaccctagttcatatagttacctcatatttctaagtaactacactatagccaaacataaatgtgaaacggaagcactcaatcgtcagcgaacttgagagcaaaatacaatacgacggtacggtatcagcataaacgtgaattaatggaaccgcatatttaaaaaaatcataactggataaggtttcaaaaaaagaattgttgcgcaataaacgagtttttttgtttattacaataaacgagtatcaattccttccatcgtcaaaaaccaaatagc

SEQ ID NO: 167029 - DNA, 359 bp, Arabidopsis thaliana nossen
gcttcatcattaccaaatcatcaacttaatcgtttctctcaaatttagggttttctcttttctcgaaagtcttgcggttttctgaatcatctctatctggtttgagggtttcgtttgatatctggagaaaggggtttctggaaacaaggagttcataattcgcgatcttgatctatcgatcttcatttatatataaaagcgtgaatgagattatgatggagtcgaaaggtggtaaaaagaagtccagcagtagtagttccttattttacgaagctcccctcggttacagcattgaagacgttcgtccaaacggtggaatcaagaaattcaaatcttctgtctactcaaactgctccaag

SEQ ID NO: 167030 - DNA, 363 bp, Arabidopsis thaliana nossen
cccacgcgtccgcatctccacacctctcttatctcttattttcttccctgcagatttataagaaaaccgaggaataaggaaaaaaaactgaaaaaatcagaagaaacctgagaagctcacagtaatacatcttcaagttcaaccacaggttcatacttactggaagaaaaaaaaacagaggaaaaaggagctcccttttctatcgctcagggaaaatggatagcaagatgttgtttagtttgacaagtcctcgacttttctccgccgtttctcgcaaacccatctcttctttctctccttctcctccgtcgccgtcgtcgaggactcagtgggctcagctcagcccttcaaaatcgatttctt

SEQ ID NO: 167031 - DNA, 350 bp, Arabidopsis thaliana nossen
gtagcgtcgcgctcctttaaacgcgacggacgcagccttctctggtcatggtttcgccggaggtgtggttcaacggagatttattttcagctggttagtagttttgagtgactactgaggtaacaatggttgtagaaactatcgagaggtcttgtgagggttcaaagagaagacatgtgaacggtggagatatcgctgttccttgttcgggagaagagtgtagcaatggagatataaatgtagctcctggagtttcagcgaaaagagctagggtttctagagaaatgacgtttgaagatatttacggtgctgatgcattactcaatgatgatgatgatgaggatgatgat

SEQ ID NO: 167032 - DNA, 359 bp, Arabidopsis thaliana nossen
gcttctctagaacctctccatctttctcactatcactcccccccccaagtataaaccctaattgtgaggatcacagtaccaaaaaaaaatggcagccgccgcaccgccaccgccaccaacagcagcaccggaaccaaacatggtagcaccactaatttcaccaatcggccacccaatgttctcccggatccgtctggcaacaccgtccgatgtcccattcatccacaaactaattcaccaaatggcagtcttcgaacgtctcacgcatctctttttcgccaccgaatcaggtctcgcttcaacactctttacctctcgtccttttcaatcattcacagtcttcctcttagaagtctctc

SEQ ID NO: 167033 - DNA, 317 bp, Arabidopsis thaliana nossen
  unsure (1)..(317): unsure at all n locations
naagcanncacaancgggggacgaaacnaaaccngagagaaaaagccagaagagccaaacgcagaccgggggagagagnaagagggagagcaccagcncngnagaaaagaagganncanncancananccagaaaaggcgccaaaggaaaacccnangggggcancncagccaaacaaaaacccnaccacgacacggccgccaacagcaacngacagaacacccaagagccacagccacgcgaacacaaacacggcacacagccccggccccaaggagggggagagagagaagaaaccaaaaacgccacccagggaa

SEQ ID NO: 167034 - DNA, 384 bp, Arabidopsis thaliana nossen
  unsure (1)..(384): unsure at all n locations
ggaannccgggggggacccacgcgnccgccaacnaaaagcccaccagaaaagtttccaccagnacaacagcccccaggcggaacaaaaagacgggggggggaaccaccaccagnacaagagcccccaaccccaacacaaagcccacccgaaaaaccaccagcagcacaaggaccgccaacaccaacagagagccaacccagaaaaccaccaccgcggcaagggccaacaacaccaacaacgccagcaccgccccaagggggaaacgggacaccaccaccacaagcaaagcgaacgcaaccaaaagacacaaggaacgagggaaacaagagacagaacacaaacccccgcaaaggacgccaaaaaggcagccaagcacaagagag

SEQ ID NO: 167035 - DNA, 343 bp, Arabidopsis thaliana nossen
cttgtctagctacttttgctctcgttgtgttagtaacacaaggaagcatttgtagtttgtgtttgggcggctctgcttctacaaactctgttcctaattggtttcatcattggccgccgtttaaatggggaccaaaatttccatattctccacctaaaccgccgccaatcgagaaatattctccaccggtgcagtatccaccaccgatcaagaagtatccaccggcaccatacgagcatccaccggtgaagtatccaccaccgatcaagacttacccttatttcccggtgaagtttccttcatcagaacagtatccaccgtcgattaagaagttttctccacc

SEQ ID NO: 167036 - DNA, 355 bp, Arabidopsis thaliana nossen
ggcggtcttgttcacagttgttgctgcacttttcatttggaatatttcttgtgaaagacgtggtatcacagatttcatcgctcgttatccggatgctgatcttagaactgccaaaaacggtcaatatgtgaaggtcactggggtggtcacctgtggtaacgtgcctcttgaatcatccttccatagagttcctaggtgtgtttacacgtctacttgtctatatgagtaccgtggatggggttcaaagccagccaatgcttcacatcgtcgctttacatggggactgagatcagcagagaggcatgtggtagacttctacatttctgatttccaatctgggctcagggcattggtc

SEQ ID NO: 167037 - DNA, 319 bp, Arabidopsis thaliana nossen
  unsure (1)..(319): unsure at all n locations
ccggnccggaaggcggggggcgacccacgcgnccgccagcacaanaccncaccgcagctacacagaagaagacncagaacgggaggggcacaggagggaggcgggccagaacagcgnaaccaaccngacgggcaaagaagacgggacaaagaaaaggcagggggaggcggccacagcccaggacaccagcaaccgcaacaacaaaggcgacacccccgagaagagcacgacaggaccggacagagagaaagcagcagaccccaacaaggaggaagccgacaagacgggggaaaagaccgagaacacaggaaacagaaag

SEQ ID NO: 167038 - DNA, 380 bp, Arabidopsis thaliana nossen
  unsure (1)..(380): unsure at all n locations
cgggggcgacccacgcgaccgcaaccacagagaaaacatttttctcacactccaaaaaaaaancggggggggcncagagggggagggaggggcgcaaaaccacncccaccngnncaaccaccccaacaaccacagaaaacacaacaactactacttcctctcctatttaatcggaggctccaaggcctaaacgagccaaaagggctaagaaatcttctccttctggtgataaatctcataacccgacaagccctgcttctacccgacgcagctctatttacagaggattcactagacatagatggactgggagattcgaggctcatctttgggacaaaagctcttggaattcgattcagaacaagaaaggcaaacaagtt

SEQ ID NO: 167039 - DNA, 323 bp, Arabidopsis thaliana nossen
  unsure (1)..(323): unsure at all n locations
acnacaccaacccnacaccgccaatgtaactnacccagaagccnccaaggcggccaaaagagacggggtggggggactacttcctctcttacctcataatcctccttttggacttttcaataaaaccgcctacttgaatctctcattctctcgcttccgcagcggagaaccatcccctcgccgagacgttgccggcggtggcgacggagttcagatggcgaatcccgcgggatcaaccggtggtgagaacctcgacaagttcttcgaagatgttgaatctgtgaaagaagagctaaaggagctagatcggctcaacgaaacac

SEQ ID NO: 167040 - DNA, 359 bp, Arabidopsis thaliana nossen
caaatctcttgggaatcagatttagtccaccaagaaaaagaacaaaaggcaacaagacatacaaaagggtgtcatacatgagctggaactaagagctgaagatcctcactatggactagtagacaatggaggagattacgactcagttcttggataccaaatcgaagggtcacgtgcttacgctcttcgtttccaccagaaccatcaccactattaccccaaccatggccttcatgcaccctctgcctctgacatcattaccttccatcttcttgaataattaaaggctaaaaggtttgctggtgccatcattggctatctaattatttaggaactacttaaaacataaagcatggtgt

SEQ ID NO: 167041 - DNA, 360 bp, Arabidopsis thaliana nossen
tcgcaaggctaggccgcattttgtctgatatcaagaacagattcacttggggtccaaacctgacattgaggaactttgaaggacttgacctcggaaagatggacgaggccaatgactctggcttggcttcatatgttgctggtcaaattgaccgtaccttaagctggaaggatgtccagtggctccagacaatcaccaagttgcccattcttgtcaaaggtgttcttacaggagaggatgcaaggatagcgattcaagctggtgcagccggaatcattgtatcaaaccatggagcttgccagcttgactatgttccagcaaccatctttgcccttgaagaggttgtcaaagcgacacaag

SEQ ID NO: 167042 - DNA, 250 bp, Arabidopsis thaliana nossen
  unsure (1)..(250): unsure at all n locations
cggaannccgggggggacccacgcgnccgaannacacagagcgcanaacattagngagacaagagacncncncncngggggcggcncaacgggcgggggggcgcccaccggcgaaggggggagcnaaggaccaacgcaccaaagngaacggagancccggcgccggagaccggaagaaagaagaaagggnnganccgagagcacaaccaccgnncaagaacggagananaagggcggcgannccnaagca

SEQ ID NO: 167043 - DNA, 363 bp, Arabidopsis thaliana nossen
tcgcaatgcagaaaaaaatttcgttttctaactaccaaaggagaataggctaaaattgttagacctgcatactttacttttttgtatcgagctaaaagctagaacttcaagattcttctcagtctaattcactgaaattccatccagtagaacagaagaattataaatctccaaaataatagataggaataccgcaaatagagccattgcaacacccatcaaaggggtcgttccccatccgggagctactttaccatattcggaattcaatggtttcaataacttccctacagtagtgcttcttggaccagatctagaactatcttcaacagtttgtgtagccataaatcttattttgtattc

SEQ ID NO: 167044 - DNA, 359 bp, Arabidopsis thaliana nossen
atcaattgcgtcactcttttcttttctgtcaccatcagtttccttgggggcgatcagaccttccatcagccagtgtctcttgttttcccgcagacagaggtttagtcgtttctgcagcagcagtagaaggagcaggagcagtaaaaggaaccaaacgaattccagtaaatggattagaagctggtggtgcagtagcagatcgatctgtgcgcctaactctgataattcttctgcttgccaacacctccttactagcagtgttgaaggtaccactctcgagtgcagaagtgtctttatcatcatcatcaagaccaggattgtcccgagacagcttttttagagcagttctctttctggaa

SEQ ID NO: 167045 - DNA, 316 bp, Arabidopsis thaliana nossen
agggaaccttctctgctttatttaagagcttactctgcggaactttcaaggtgtgagagtgcaggtggtatacttagtgctcttgcttatctagagaaagagatgaagctaacccaacaaaaaaaagacgagggaactaattctttagcttctttttaccaaaagtggtgttctgcgtactaaacttttttcgatttgcttggattcgaacaacatgttatcacagttttgccatattgggtttgggcttggcttttaaggccgggtatgcctttcaatgtcaaatgagggtttttgatggcgtattaccaccctt

SEQ ID NO: 167046 - DNA, 345 bp, Arabidopsis thaliana nossen
atcgagctttcgattgatttttttacttggaatcctatggatgaagacgagtggtctctgcggatgcgagtaaattacattcgaaggaggaaccttataaaaaccgtattgactctgcgcaaaaaactacaggattgactgacgctgttcaaacaggtacaggtcaactaaacggtattccggtagcccttggggttatggattttcggtttatggggggtagaatgggatccgtaaaaggcgaaaaaataactctattgatctgagtatgctaccaaataatgtttaccttttatttttaggtgtactttctgatgagcactaatgcattaaggaagtttaagt

SEQ ID NO: 167047 - DNA, 354 bp, Arabidopsis thaliana nossen
taattattgagtcgtcagagctcttaagataagaagatacacaaaatttgaaaatttaaatgaaaacaggaaaatactcccaaaagtgtttttagactcaaaataatgttagttttcttcatcattgttaaattcatatgtattggatacatgggttgatggtaatatgaaaggtcttgaatatggacagcacaacgcaaagtacaacaaaccaagtggaataaggtcggaatcaatgtggtttaacgtaaaatggatggaacaaatagtgtgaaatggatataaagaaaatttgaatggtgttcgtatttacttcttatgaatttttctttcatgttgttcgacacgtcaaga

SEQ ID NO: 167048 - DNA, 357 bp, Arabidopsis thaliana nossen
cagagaaaacttcgtctctcttctctgcttcgccctctcatttcctgtgagataaaggcggagtctctctccagttattttgctcatccatcgattcttagagttcaaaatggttgatcaagttcagcaccccactattgcgcagaaagctgccgggcagttcatgcgttcaagtgtttccaaggacgttcaagtgggttaccagaggccttctatgtatcaaagacatgcaacctacggaaactactccaatgctgcatttcaatttcctccgacatcccggatgttggcaacaactgcttctcccgtgtttgtccaaaccccaggagagaaggggttcactaactttgcccttga

SEQ ID NO: 167049 - DNA, 366 bp, Arabidopsis thaliana nossen
agagagacttattttcgttcttgcaatcatattgttctcacaattgaccaaggaaagagaaatgcgagggattctctgaatttagagagaagcaaaagagtttttttttttttcgagaaccaaaaatggagaatcaagaggaagatgaggtggtgctggcgaaggtgacgtcggaggttgaggataattttgaggatgaagggttggtttcaaattcaacattggagaaagttgctgcagcgaagaagtatattgaaaaccattacaatagacgcatgagacacattcaacaacgtaaagaaaggcgttgggtgctagaacaaaagattgcatctttagatgtatcagaaaaagaacaactcgagt

SEQ ID NO: 167050 - DNA, 269 bp, Arabidopsis thaliana nossen
agcgcatgcaaagtcaatatttcttacaaaatcagcgccagcacgaactgcaacaccgtgaggtgatgagcgacggtcaaatgaagctactagcggatgtttcgaatattatataatcgatgagataatattaaataaagatgttcgaatggctgtactcttttcaattttctgtctttttttatcgtggcgtttctattatgtgatcgactgtactatgttcgcaaacaacgttctttgaatttcagacttgaagtttaagttattct

SEQ ID NO: 167051 - DNA, 359 bp, Arabidopsis thaliana nossen
agaggaagaaaaatgggtcgagtctcatctattatctctttctctttgacactcttgatcctcttcaggggctacactgcccaacagtggcccaacgagtgccagctcgatcaactcaatgcgctcgaaccatcccaaattatcaagagcgagggtggtcgcatcgaggtttggtaccaccatgcaccccagctccgttgctccggctttgcctttgagcgtttcgtcattgagcctcaaggtctttttttgcccacttttttgaacgccggcaaacttacgtttgttgttcacggtagggggctaatgggtagagttattcctgtatgctctttggacattttggtgtcaccgtattt

SEQ ID NO: 167052 - DNA, 62 bp, Arabidopsis thaliana nossen
ctaatatcacaaagaaagagtttttttaacttgcttagctcaaagagtttgcttaagacaag

SEQ ID NO: 167053 - DNA, 138 bp, Arabidopsis thaliana nossen
atggcgtcttactcatgaaccgttcaggaggtcaggccactgacgagtacggaaacccgatggcagcagcggtatgacaagtactgaaatcctatgggaggaggaggatactgaactggtggtgtgtggaggagctac

SEQ ID NO: 167054 - DNA, 199 bp, Arabidopsis thaliana nossen
tcgtaaatctcctctttttttctatttctctgatcgccgccgggaacattcaatattccgggggttcaacggaataaaaactctccgtttttatttatcccccttttttaccttttttaagttatctgatatggtgtttccctaaaacgcttattggatttgagacttgatccatgctgattactgaattttcacaatc

SEQ ID NO: 167055 - DNA, 370 bp, Arabidopsis thaliana nossen
gtccactgcttattcttccgtgtggagatcgacgagttcgagccaccacagcaaggagaacaagaagggccccgtcgccgtcctggtggtggctctggcgagggatgggaggaagagtcgacgaatcatccataccacttcaggaagcggagtttcagtgattggttccagtcaaaggaaggttttgtgagagtgctgcctaagttcacaaaacatgcaccggctctcttccgaggaatcgagaactacagattctcgttggtggagatggagccaacaactttctttgtgcctcaccatttggatgccgatgctgtttttatagtcctacaaggtaaaggagtgatcgagtttgtgactgataaaacaa

SEQ ID NO: 167056 - DNA, 374 bp, Arabidopsis thaliana nossen
cggacgcgtgggaatggcttttccgcgatttctttctctcctcgccggcgtcactctctctcttttggggaccaccactgatgcttcctctcgctctctatccactccacctaaaacgaacgtactcgacgtcgtttcatctctccagcaaacacaaactatcctctcactcgacccgactcgttcctcactcaccaccaccaaacccgaatccctatccgacccggttttcttcaattcatcttcaccactatctctagagcttcactctcgagacactttcgtcgcgttacagcacaaagactacaaaagcttaacactcagtcgactcgagcgcgacttattccgagtcgccggaatcgtcgcgaagatcc

SEQ ID NO: 167057 - DNA, 317 bp, Arabidopsis thaliana nossen
gaataaaccaataatatatggtctgaattctatctagtagtagtctacatggcttaacccctaccactctctttgtttgtttcttcctctttataatccatctatctttagtatctaaaatttcactaattttggtttcccagtggatcttctacttaggatataaccaaaatgcatctatatttaaaatttacatacacccaacataaaaaaatttgtgactttgcttactttgcaatctgatctacacaaaaagaattgaattatgacattttttatctgtgagatttatatgattgtctagtgctgtacactcc

SEQ ID NO: 167058 - DNA, 379 bp, Arabidopsis thaliana nossen
catttatttacaacggaatggtatacaaagtcaacagatcgtaatgaatacaaaataagatttatgggtacacaaactgttgaagatagttctagatctggtccaagaagcactactgtagggaagttattgaaaccattgaattccgaatatggtaaagtagctcccggatggggaacgacccctttgatgggtgttgcaatggctctatttgcggtattcctatctattattttggagatttataattcttctgttctactggatggaatttcagtgaattagactgagaagaatcttgaagttctagcttttagctcgatacaaaaaagtaaagtatgcaggtctaacaattttagcctattctcctttggtagtt

SEQ ID NO: 167059 - DNA, 338 bp, Arabidopsis thaliana nossen
ggccaagtagtcttttttgtttaagttttatccagaggtattttagttttgatggggtatggatattaaattgaagcaccgtgtgaatatatgctacagctccagcgacttctattggttcttaggcggtgtttcatgtaagagaagaacaaacatggaaccgcctagtgattgaaaagggagccaccggttatgaattcatagaccaacaaggggacttcatctttatacaacaacccaagagcttgacaacgttctttggttaattgtgaaatcacgagcactttgttgatagaactgctatactagtgtgttgattactattcaaattttattta

SEQ ID NO: 167060 - DNA, 362 bp, Arabidopsis thaliana nossen
attattttcactgagcgcatatcatttttgagacaagaggctctctctctctctcttgggtctttcggtccccctctctccggcgatggttgttgctatggaccaacgcaccaatgtgaacggagatcccggcgccggagaccggaagaaagaagaaaggtttgatccgagtgcacaaccaccgttcaagatcggagatataagggcggcgattcctaagcactgttgggttaagagtcctttgagatcaatgagttacgtcttcagagacattatcgccgtcgcggctttggccatcgctgccgtgtatgttgatagctggttcctttggcctctttattgggccgcccaaggaacacttt

SEQ ID NO: 167061 - DNA, 382 bp, Arabidopsis thaliana nossen
agctacttttgctctcgcagtgttagtaacacaaggaagcatttttagtttgtgtttggccttctctggttctacgaactctgttcctaattggtttcatcattggccgccgtttaaatggggaccaaaatttccatattctccacctaaaccgccgccaatcgagaaatatcctccaccggtgcagtatccaccaccgatcaagaagtatccaccgccaccatacgagcatccaccggtgaagtatccaccaccgatcaagacttaccctcatccgccggtgaagtatcctccaccagaacagtatccaccgccgattaagaagtatcctccaccagaacagtatccaccgccgattaagaagtatcctccaccagaacag

SEQ ID NO: 167062 - DNA, 378 bp, Arabidopsis thaliana nossen
cttgatatgaagaagactgctgctccatgatgttctcaatttgtatctggatcttttgtgtaatatttggctgcagtgtagcatgtggatgacaatcattgtcccaactagcatgacagcgtatctatatctgtattctcatggggaagtatctttggctgcttcacaaccggttagcattttgctctctagcttcgtgtctgtataatgttaattgcaaatgttctgtttgttgctttcctctgtttcctctttgtatgccagataaatctgtgaagatatgtctaaggtttgtgttatcattgctgcaggtgctcctgtacattgcttttgctttggtactgatatttcctttcgatattttctacttgtcaagtc

SEQ ID NO: 167063 - DNA, 378 bp, Arabidopsis thaliana nossen
tctacagccgcatcatccttcttccttgtgcgatatcgtttgcgtgagatttgtctgaaaagtagctgaccatgggtaaagagaagtttcacatcaacattgtggtcattggccacgtcgattctggaaagtcgacaaccactggacacttgatctacaagttgggtggtattgacaagcgtgtgatcgagaggttcgagaaggaggctgctgagatgaacaagaggtccttcaagtacgcatgggtgttggacaaacttaaggctgagcgtgagcgtggtatcaccattgacattgctctctggaagttcgagaccaccaagtactactgcactgtcattgatgctcctggtcatcgtgatttcatcaagaacatga

SEQ ID NO: 167064 - DNA, 378 bp, Arabidopsis thaliana nossen
aaaattttgtgaaatattcaatggtttcaagagaaaaaaaaacttagaatttttttactaggccactagttcactcctactttaatctctaaactccaaattctgattcttaactcatactgtatggtccgtatatgtttatagtttatacacatgggtatctcaggaacaattgctatttttatttttatcaatattatcggatttgattacatgtaaaacacaacaacaatagttagtctatgtcaacaatagttaattagaaaatgactaatctacctatcatttaattaaaaagttatagattacgttgtgattaactagagtagtactaatagttagtctatgtcatgattaacgtatgaaactaggaattga

SEQ ID NO: 167065 - DNA, 378 bp, Arabidopsis thaliana nossen
cgacaacggagaaagagtgtttgaccaagagatctccagcggacagttactagtcgtgccacaagggtgttcggtcatgaaacatgccataggcgaacagttcgagtggatcgaattcaagacaaacgaaaacgcacaggtcaacacactcgcgggccgtacctcagtcatgagaggtttgccgcttgaggttataaccaatgggtaccagatctctcccgaagaagctaaacgagtaaagtttagcacgattgagaccacactgacccatagcagtccaatgagctacggaaggcctagggcttgaggcttgatgagcgcgtggtggaatagcgtttgaatctaaagttcggtttggtacgacttgtaatatgaaat

SEQ ID NO: 167066 - DNA, 365 bp, Arabidopsis thaliana nossen
tcgccttccttgcctaacctctttttataccatttgcacgaaccctatcttgtttatcttcacccttcgggggtcttaatattactaaattcgccatcatctcctctgatttctatgactatagatcctactcaatcgccgaattcggagccggatgatcactctggagaggacttttttcacatttatgaccctaggtctaccggcgatatctttttaagcgacagcatatataatgtggagaatgatgaactgctcaacgaagcggcgtgggaagaatttataggctcctattctgtgtttaacggttgcttatagctgtggaccggatgatgattgcttctagtgttcattagaagctacta

SEQ ID NO: 167067 - DNA, 382 bp, Arabidopsis thaliana nossen
gaagttatgaaagattgggctgtatcagaaggcatcaagtatgagcatcgaggacagctctgtaacgatgcaagagtgcgaaagactgttcttgctgagatggatgaccttggaagagaagctcagttgagagggtttgagtttgcaaaggctgtgactttggtgccagaaccattcaccttggagaatggacttctcacaccaacattcaagataaagagacctcaagcaaaagcctactttgcagaagcaattagcaaaatgtatgcggaaatcgcagcctcgaaccccattccttctaaactgtgatgctttttgctttgcttaaaagtgtttctttttttttgtattacaaaggtaattgtagaactgttaaaagatc

SEQ ID NO: 167068 - DNA, 380 bp, Arabidopsis thaliana nossen
gagagaaagcttgaagacggctagagctccctcttttctcaggcatctcttatcttcaaatcacaatgtctctggttgcaaatgaggagtttcagcacattttgcgtgtgctcaacactaacgttgatggtaagcaaaagattatgtttgcccttacctctatcaaaggtattggaaggagattggccaacattgtctgcaagaaagctgatgtcgacatgaacaagagggctggtgagttatctgcagctgagattgataacctcatgactattgttgcaaacccaagacagttcaagattccagactggttcttgaacagacagaaagactacaaggatgggaagtactctcaagttgtctccaatgcccttgacatg

SEQ ID NO: 167069 - DNA, 384 bp, Arabidopsis thaliana nossen
tcggagcagccctgtttcatatcctaaacctcaaacaaattcattactactgcataagcatccaaaaaaccagtcatatgagtatacactacaagataacaaatccaatgttccaacaaaaacaacaaagagaattcaaattttcaccttcctttacgaatctctcctcgaagaatctcaatctccaatttaacctcaatagctcgatccgaattcggtttagccttagccatctcatcatcaaacatagccaattccgtagctaactcctgtctatcactacctaacctctgtacatcagacctaacctgaccaagctcagctccaagtccattaatcacacgagccttcgccttcattctcaacgcattctgattaacctca

SEQ ID NO: 167070 - DNA, 281 bp, Arabidopsis thaliana nossen
attatgaaaatacgccttgcttatccaatgttttaacgatggctctgatgggcggttttgctagaataggcgataatgaaatcactattttagtaaatgatgcagagaagaatagtgacattgatccacaagaagctcagcaaactcttgaaatagcagaagctaacttgagaaaagctgaaggtaagagacagacaattgaggctaatctagctctcagacgagctcggacacgagtcgaggctctcaatacgatttgattttgtaactagctgacgtgt

SEQ ID NO: 167071 - DNA, 347 bp, Arabidopsis thaliana nossen
ctacaccaacatcctgaggaacttaaatttttgaggtcatggggatcccagtggcattggtctggctactggcattcactattctactgatcagtggggaaggcaataatgccatctgcaaggagaattttaagttagaccctagacctcatagtgtttcgatcctcgagtttggagcggttggtgatgggaagacgctcaacactattgctttccagaacgctgttttctatctcaagtcttttgcggataaaggcggtgctcagctttatgtttcaccagtgaaatggctcaccggaagctttaatctcacaagccatctcactttctttttggagaaaggagca

SEQ ID NO: 167072 - DNA, 374 bp, Arabidopsis thaliana nossen
gttgtagaagatctcagcccagtgacacaaaacaatgagttaaagactttcaaattcaacagggagaccgggaatatattcaaccaaggggcattgattctcaattctcaaatgccagctttgaatcagttcaaagccattcttcagaatgtatatccgatagtgatgatgattctgacgtctgcataatagaaccttttggtcaatctgcaatcccacatcgacctctagctatgaaaatgccggtagtttcttcagaatattctacagttggtcataattttaatcaatctggaggcctgaagcttcagtcaaataaagaaaatatgatcttttaagctgtattgcatgatctcactcagcctaattttgaa

SEQ ID NO: 167073 - DNA, 377 bp, Arabidopsis thaliana nossen
tcggcgaaaaatgtttcattcttgttttgttattcgagaagctaaaactatggtgacgaagaatattgctgggttattgcgatcgtgccagtgagcttaaagcttttgatgagaccaaaacgggtgtgaaaggactcgtcgactccggaatctcacagattccacgcatctttcatcattcatctgtcaaacttgcaaaccctgaaccagtttcctcggacttgctacatctcaagacgatcccaacgatcgatcttggaggacgagttttctaggacgagctttaagcacaagaacgcgattgaaaatattaaagaagcatcatagaagtggggtttcttccaggtgatcaaccatggagtttcgcttcgaacttc

SEQ ID NO: 167074 - DNA, 341 bp, Arabidopsis thaliana nossen
  unsure (1)..(341): unsure at all n locations
gtatgaactagcatttttatttttactagaactcataggggggaaaatggatatatggatggaatcaggtatccanaatttacagacaaaagtattcggttattggggaaaaatcaatatacttttaatgtcgaatcatgattaactaggacagaaataaagcattgggtcgaactcttctttggagtcaaggtaatagctatgaatagtcatcgactccccggaaaggttaaaagaatgtgacctattctgggacatacaatgcattacagacgtatgatcattactctttaaccggtttattttataccacctcttagaaagaaaataactttaatcaa

SEQ ID NO: 167075 - DNA, 381 bp, Arabidopsis thaliana nossen
  unsure (1)..(381): unsure at all n locations
atcgcttctacttcactctcactttcctcctattctctctctctttctatgtcaagttagcttagccggctcaccagaaagctaaccttacctcacaaacattgattgtgttacactaatctcttaaatagagagccgtaatttctacacactctgatcgctagatggaaacggagatatcaggaatggataatccagctatgaccttggacgaggtttccatggaacgcaacaagagcttcgttaaggcattgcaggagctcaagaacttgaggcctcaactntattcagctgctgattactgtgaaaagtcttatcttcatagcgagcaaaagcaaatggtattggacaatttgaaagactacactgtgaaggctctag

SEQ ID NO: 167076 - DNA, 376 bp, Arabidopsis thaliana nossen
  unsure (1)..(376): unsure at all n locations
agccaatggcacattccacgtttacatcggaagggcanaatatggagtcgtttctactctggagtgggcacaaaatcccagccgttggactcggcacgtggcgatctgggtctcaagccgcccacgccgttgtcactgcaatcgtctagggtggctataggcacatagatacagcttgggagtatggtgatcagagagaggtcggtcaaggaataaagagggcgatgcacgctggcctttaaaggagggacctttttgtgacctcgaagctttggtgcactgagttatcttctgagagagtgcgttctgctctgcaaaacacccttaaagagcttcaattagagtaccttgatctttacttgattcactggccttt

SEQ ID NO: 167077 - DNA, 377 bp, Arabidopsis thaliana nossen
cggacgcgtggggtgaggatgcgaatgcttaagagggaagaatgaacagcaatgccttacatcttgtctgctcgtgagacgaggaagatgattgtgagagacctctttatcatactggggttcccccatttcctctcccttcccacgagtaagatgccaaccaagcatccgctctgaaattttctccttctgagggtagttgaactcaacagtaccttcatcagctaagccatcctcgtctttatcaccaggaatagcaggactacctagaatcagaaattagcaaattgctataaataccaatctgatccaaaattcaaaacatactgataaactatcgatgaacaatgaagacagtatacttcagaaggatcaaa

SEQ ID NO: 167078 - DNA, 375 bp, Arabidopsis thaliana nossen
gttttgtttttgtatcaaaatattgattttccgtggtatatgtaacgcatttttattttcaagatcaatcaattaatttatgcttttaaatttacaataaatcaaagtacatcatttattattttcaagataagtggagcaaaaagcaacttgagattaactttttaaaagatatagcacaaaaataattaatcaaaatatataatttataattttctaaatcttggtgaaaaactcaggaattcattattttagggagtaataatataaaatattgtatgattttcttctatatgatttattaattattttaattggaattgcatctcggcaatgacacaacgatgattctagcaaataccgctaggttattag

SEQ ID NO: 167079 - DNA, 376 bp, Arabidopsis thaliana nossen
tcgctttaccacattattttcacttagcgcataacatttttgagacaagagactctctctctggctcttcggtctttctctccccctctctccggcgatggttgttgctatggaccaacgcaccaatgtgaacggagatcccggcgccggagaccggaagaaagaagaaaggtttgatccgagtgcacaaccaccgttcaagatcggagatataagggcggcgattcctaagcactgttgggttaagagtcctttgagatcaatgagttacgtcgtcagagacattatcgccgtcgcggctttggccatcgctgccgtgtatgttgatagctggttcctttggcccctttattgggccctccaaggaacacttttc

SEQ ID NO: 167080 - DNA, 315 bp, Arabidopsis thaliana nossen
ctcttgaagaccttgaaaaacttggtgtttatgatgaacctcagcctgttcaacctaagtttgaagatgcgttcgggtttcaaaatgtgtatgcacctttaatcaaactcgaagcagactatgacaagatgatgaaagagtcttaaagcatggaaaacctcactgttcggtgggatattggtcttaacaagaagcgtgttgcatacttcgtctttccaaaggaggaaaatgaattgcaataggttccggttgatgaactacgtctgcgggactcggtagatgctgttcatccatcctggcattcagttggacatg

SEQ ID NO: 167081 - DNA, 367 bp, Arabidopsis thaliana nossen
cactctctcactctagaaaccaaatgtcgttgataataatagaacactttctttctctctctaaaaaggaaaagtagtctagtcactgatttcttctaatcctccggtggagtgagagatgatatctccgacgttgtttcctctcctctgcgctttatttctatgtcttccagtggctgttatcttcacagtccagcgagaactcacctgcgttatctcgccggagtttggtttccgctctctttccgtcttctctctttactctcgaaatgtccccgactcttcttcttcttctccggcggttcggattcgacagccgattcccaaagaagacgaccctcttcttcgactatcttctcgggttaac

SEQ ID NO: 167082 - DNA, 360 bp, Arabidopsis thaliana nossen
gatacttactgtgttaggattttaaaataaaagtattgatgctttttgaaattatatatcagcaatggggtttgtcttatactaagtggattagtgtctcttgatagccattgtgccatatatgtgagtaagaccaatgtcgctttcttgtttgctatttcttcatattttttggttttctgtattctatatttttaggtatattcactgagattatacaacaaatgcaagttaaatgtgtgcaggttgaggaattgtattcctctgactttaactctctggattaaatatggtattttacttggtactttttcgtcttttattgttcgaaacatatgaaaaacaaatttaaatttacct

SEQ ID NO: 167083 - DNA, 376 bp, Arabidopsis thaliana nossen
tgaagttcacaattctcccatttgaaaattcttcgtaatcgacgacgaagagatcatgagtaccgtcggaggtatagagcagttgatacctgattccgtttcaacgtcgttcatcgaaacggtgaacggttcgcaccagttcacgattcaaggttactctctagccaaaggcatgagccctgggaagtttatacagagcgatatcttctccgttggtggatacgattgggcgatttacttctatcctgatgggaagaacccggaggaccagtcctcgtatatctctttgttcatcgctttagcgagtgattctaatgatattagggctttgtttgagcttacgcttatggatcagagtgggaaagggaaacataag

SEQ ID NO: 167084 - DNA, 359 bp, Arabidopsis thaliana nossen
  unsure (1)..(359): unsure at all n locations
tcggaaacgattagagaaagagaattttgtttttactnccctcctcngatcctgtgaaggctcttattctgggtctggggtgtccaaaactctgtctctctgtaatcttctgagctctccacaaatatgtctctactctctcttgccgactccacaaattttgagcttctttttttgaagttcttgagaacaagtgaaagagcttaatatccacaagactcttgtatctttcttaaatggctaaagtttattgtccttatttcgatcctgaataatagaacttgagctccagaatcaatcctccaagttgttctatagataacactagctgcaaagaatgcactcttgtcaatgtggac

SEQ ID NO: 167085 - DNA, 381 bp, Arabidopsis thaliana nossen
cttgattcatctgcccctgaggaattgccaaaccatctgactcttcacacattccaatatgaagggtgagtcaatcaaataatagataggaaatgcgtcggtttgaaaataaatgaattgcttgtcgtagaatattactctcgacagacttaataaacctaacttaagtaaaaaaaaaaattactaaaaacaagagttcggacaacttcccttttccattaaaaataaaaaggcacaaggtaagggatttttgtcaaagaatatttttcctttttcatgtatcattaaattggtagggagaattgggaatccctttgtttgctctttcccaacatttttccatatggaaggaaatttagggaatttgtgtaatttttattt

SEQ ID NO: 167086 - DNA, 383 bp, Arabidopsis thaliana nossen
accagcttgaccgcaaccttagaccatttttgatagccggaaacaacccacaagggcaggaatggctacaaggccgaaagcaacagaagcaaaacaacatcttcaatggcttcgcacctgagatcttggctcaagccttcaagatcaatgtcgagacggctcagcagctccagaaccagcaagataaccgtggcaacatcgtcaaggtcaacggacctttcggcgtcattaggccacccttgagacgcggcgaaggcggccaacaaccacatgaaatagctaatggtttagaggagactttgtgcaccatgcgatgcactgaaaacctcgatgacccgtcggatgctgacgtgtacaagccatcactcggatacattagcaca

SEQ ID NO: 167087 - DNA, 380 bp, Arabidopsis thaliana nossen
gtaattttgtagtagtctgtccgattcttctcaacgatttttgtattcatcgagtcaattgttcctgtgttttcattgattagatcttgtgaatatagtctttatagctttggttagagttttcttattggttaatgatgataaatccaaaggcttgtttctcaaacattcgcagtggccgcctaagagctttcgcctttcgccaggcttgagagttaatgctgttttatccttccttggatgtctgaaacttttgtatctaaacctgtattgttttgttttctattagggttttagatttgggactaagttattcaatgtcccattagcagaattgatttctcttagtgcttaataggattgaacaaagtccctcaaat

SEQ ID NO: 167088 - DNA, 383 bp, Arabidopsis thaliana nossen
tcgcaccagtctcttgcaatcttttttcttctctttgctctctctctctcagcgcggttcagattcttgggtgggagattcaagctccctgaaaaaagccctttactctcgcttaccaactttgctccagcatggcaggatctgcaccagaaggcacacagtttgatgcacgtcagtttgaccagaaactcaatgaagtacttgagggacaagatgagttcttcacatcctatgatgatgttcatgagagctttgatgccatgggtcttcaagagaaccttctcaggggtatttatgcttatggttttgagaagccttctgctattcagcaaagaggaatcgtccccttctgtaagggtcttgatgtgattcaacaggctcag

SEQ ID NO: 167089 - DNA, 373 bp, Arabidopsis thaliana nossen
cccacgcgtccgttcagacttaaacaagagtaaccaaaccgggcttgtccttagttgcaggggttttagagctatggctaaacctattgttggtgctgacaaagaccttctcaaacaaggcattgtcgacatcgaataccaaagagtttcttgcgattacggcaacaagaacatgaacgtgagagtagaagaagcaagcaagaaaccaaactacttagagataacgcttttataccaaggaggtcaaacagaagtagtatccatcgacattgctcaagtcggttcatcgccaaattggggttacatgacaagaagccacggagctgtttgggtaactgacaaagtacccaccggagctattgcagttcaagtt

SEQ ID NO: 167090 - DNA, 268 bp, Arabidopsis thaliana nossen
tcgaaaagatcagatttgaggtagatccgaattttatggacaccccaaaaaggttatgttgctcaggcaacgggtcttaactagaatccgttggtgcattgctatcttgcgacgaggagaacaaggtgctaaacggccacgggatcgagaatccgcttccgtcattgttctcgttctcctcctcttcctcctcttcttcttcttcttcttggcgccggtttccatcgctgttctcagctccatggctggttgtagcagaagcactact

SEQ ID NO: 167091 - DNA, 391 bp, Arabidopsis thaliana nossen
aaagatcagattgaggtagattcgaaatttcatgatcacaccaaaaaggttatgttgctcaggcaacgggtcttaactagaatccgttggtgcattgctatcttgcgaccaggagaacaaggtgctaaacggccacgggatcgagaatccgctttcgtcattgttctcgttctcctcctcttcctcctcttcttcttcttcttcttggcgcccgtttccatcgctgttctcagctccatggctggttgtagcacaagcactactgcttgcattgttatcgttcgatgatgttactgaatcagacttggcttcatctgcaagtaactgatatctgcaaacccagcatgaactgtgaagctcaagccatggtaacaagcagtcactatgaaac

SEQ ID NO: 167092 - DNA, 398 bp, Arabidopsis thaliana nossen
gatgcagcagccacctccagcttccaacggtgctgcaacagggccaggggagattccttccgaccaacaagcttacctccagcagcagcagtcgtggatgatgcagcaccagcagcaacaacaaggtcagccgcctgcaggatggaatcagcagtctgcaccgtcttctggtcaaccacagcagcagcagtatggtggtggtggatctcagaatccaggatcagctggtgagatccggtccctgtggatcggtgacttgcagccatggatggatgagaactatctcatgaacgtctttggtcttactggcgaggctacagcagctaaagttattcgcaataaacagaacggatattcagaaagttatggctttattgagtttgtgaaccatgctacag

SEQ ID NO: 167093 - DNA, 372 bp, Arabidopsis thaliana nossen
aagaagatgatgaagcttaatttttatgcagatcgaatgtcacagccatgacgttctgtaatcatattgtgcaaggataatggaatccaattcgatgaggtcttgatttccttggcgaagcgtcaacaattatctcctgaattcaaagatattaacccattggggaaagttccagctattgttgatggcaggcttaagctctttgagagtcacgcaatcctgatatatctatcctcggcgtttccaagtgttgctgatcattggtatccaaatgatctatccaaaagagccaagattcactcagttttggattggcatcacaccaatttacgtcgtggtgcatctggatatgttctgaatagtgtactaagt

SEQ ID NO: 167094 - DNA, 374 bp, Arabidopsis thaliana nossen
agaaaagctatggctgttatttaacagccttcgttgcccgtaaagaaccaaactgcaacttgcgatccagtttttttattcataatttgattttttggggaagacatattaaagaaaactataaagactgtgagatttaattccctgatttcttctttctcacacgtgttttcggtttttggatatattcgaaccgacctggttttctcaattcgggtttactagactgattgtaccgaccatactgaattttaataaatgttttcttcatcttttatgatagtggcatttagttaaaagtaaccgaatcaaacaaacagactgaaacttttttataaagttaaccgaaattttaatttatctaaacatttttt

SEQ ID NO: 167095 - DNA, 383 bp, Arabidopsis thaliana nossen
aaaagatcagattgaggtagaaccgagatttcatgatcacaccaaaaagcttatgttgctcaggcacatgtcttaactaggatccgttggtgcattgctatcttgcgacgaggagaacaaggtgctaaacggccacgggatcgagaatccgcttccgtcattgttctcgttctcctcctcttcctcctcttcttcttcttcttcttggcgccggtttccatcgctgttctcagctccatggctggttgtagcagaagcactactgcttccattgttatcgctcgttgttgttactgaatcagtcttggcttcatctgcaggtaactgatatctgcaaaccgggcatgaactgtgaagctcaagccatggtgacaagcagtcac

SEQ ID NO: 167096 - DNA, 355 bp, Arabidopsis thaliana nossen
gatgcagcagccacctccagcttccaacggtgctgcaacagggccagggcagattccttccgaccaacaagcttacctccagcagcagcagtcgtggatgatgcagcaccagcagcaacaacaaggtcagccgcctgcaggatggaatcagcagtctgcaccgtcttctggtcaaccacagcagcagcagtatggtggtggtggatctcagaatccaggatcagctggtgagatccggtccctgtggatcggtgacttgcagccatggatggatgagaactatctcatgaacgtctttggtcttactggcgaggctacagcagctaaagttattcgcaataaacagaacggatat

SEQ ID NO: 167097 - DNA, 331 bp, Arabidopsis thaliana nossen
acggatgcagtagccacctccagcttccaattgtgctgcaacaagcccagggcggattccaaacgaccaaggtgctgaccttcaacatcagcagtcctggatgatgcatcaccagcatcaacaacaaggtcagccgcctgcaggatcgtattagcaatctgcaccgtcttctggtcaaccacatcatcatcactatggttgtggtggatctaaaaatccatgatcagctggtgagatccagtccctgtggatcgtagacttgtatccatggatggattataactatcccatgaacgtttttagacttactggcgaggttacaacaacttaa

SEQ ID NO: 167098 - DNA, 374 bp, Arabidopsis thaliana nossen
cttcttacagctttgcttagatttgatcaaagattgggtcaaagagagggcagaagcttctatttgcgcccttgaaggtattcatcagtttagcgacatcgctaatttccaagactaccatggtcttaagaagtttagacaggcaattgcacatttcatgggaaaagctagaggtggaagagtgacttttgatccggagagggtggttatgagcggaggagccaccggagccaatgaaacaatcatgttctgccttgcggatcccggcgacgttttcctcattccctccccgtactatgccgcatttgatagagacttgaggtggcggacaggtgttgagataatcccggttccttgttcaagctccaacaatt

SEQ ID NO: 167099 - DNA, 371 bp, Arabidopsis thaliana nossen
gaaagacgtctgctgttactgtttctagaatggcttctttggatgcggagatacagaaacaactggatgaaaaaatgcgaatcaagactaggctgggaaatatatcaagagagcgaggtagaaaagaaatctttgcagatatgaaggcattaatttcttcgttccccgaggaaatgagttccatgcgtagtcaattaaacaattataaagagactgctggaggtattcattctctgcgggctgatgtccagtccctctctggggttctatgtaggaagacaaaagagtttgaagcattgcaattgagatcagctgattatgcttctcagttaggtgacctgaatgctacagtttgtgattcgaagaacagt

SEQ ID NO: 167100 - DNA, 389 bp, Arabidopsis thaliana nossen
tcggacggaaatatggtgttggaacatattttaaagagttaatacacatgctgatgaggcaacttggttcgggtactatcaggagttatgtaccgtggcttgcgtggactgattgggtcaacatgtttggaggctcgactggaaaagaccgctaatgattttgataaactattggagagaattgtgcaggatcatgaagattgagacggcgacaagactgattttggggatgtattgctcgcaactgaaagagacaagagtttcggggtcgatattgaccggttaagcattaaagcaatcgctttggatgctattgtgggtggtacagacacatgctgcacgcttggggaatgggtaatgacagagcttctacaacacccaacgtgtct

SEQ ID NO: 167101 - DNA, 377 bp, Arabidopsis thaliana nossen
caaagtgtgtgtagcagcaatggcgtttgttgcttcttcaactactctcgatctgttctccctcttctagggtggttccagcaaagtcttcactttcctctccatctgtttctttccttcgaaccctttcttctccttccgcatctgcttctctccgctccggatttgctcgacgctcttccctcagctccacttctcgtcggagctttgctgtcaaagcccacgccactgatcttacactggttggaaacaaggcgcctgattttgaagctcaggctgtgtttgatcaatagttcatcaacgttaagcttcttctgattacattcgaaagaagtatgtgattctctttttctaccccatgtactttactttctctg

SEQ ID NO: 167102 - DNA, 380 bp, Arabidopsis thaliana nossen
aacaaaacaacaagaaaaaatggcatttaccaacaaattaatcataacacgtggtctccttatctccatagcgggcgaccactgcttatccttccgtgtggagatcgacgagttcgagccaccacagcaaggagaacaagaaggtccccgtcgccgtcctggtggtggctctggcgagggatgggaggaagagtcgacgaatcatccataccacttcaggaagcggagtttcagtgattggttccagtcaaaggaaggttttgtgagagtgctgcctaagttcacaaaacatgcaccggctctctttcgaggaatcgagaactacagattctcgttggtggagatggagccaacaactttctttgtgcctcaccatttgg

SEQ ID NO: 167103 - DNA, 188 bp, Arabidopsis thaliana nossen
cgaaattattgtggtgttttgtgaacagaaaccaagcaggattaaagaggggtcaatctgtgttaattgcgcggaacaagggtttggcggagcaagatctaactaagcttgatgtaacaaagttacatcctctggctcctgaagtcatttctcgccaagcaaccataaatatcggaaccattggtcat

SEQ ID NO: 167104 - DNA, 380 bp, Arabidopsis thaliana nossen
gaagaagagccacacactcactttttaaaaagagagagagagagagaggcgtgagagagagagagattgggcggaggagcttcttcttcgtagggtgttcatcgttattaacgttatcgcccctacgtcagctccatctccagaaacatgggtgcaggtggaagaatgccggttcctacttcttccaagaaatcggaaaccgacaccacaaagcgtgtgccgtgcgagaaaccgcctttctcggtgggagatctgaagaaagcaatcccgccgcattgtttcaaacgctcaatccctcgctctttctcctaccttatcagtgacatcattatagcctcatgcttctactacgtcgccaccaattacttctctctcctccc

SEQ ID NO: 167105 - DNA, 377 bp, Arabidopsis thaliana nossen
atacatttgcactcagtctagagacaaagagagagagagatggggtcagggacggagatgatggggagggacgcaatggctacggtggctccctatgcgccggtcacttaccatcgccgtgctcgtgttgacttggatgatagacttcctaaaccttatatgccaagagcattgcaagcaccagacagagaacacccgtacggaactccaggccataagaattacggacttagtgttcttcaacagcatgtctccttcttcgatatcgatgataatggcatcatttacccttgggagacctactctggactgcgaatgcttggtttcaatatcattgggtcgcttataatagccgctgttatcaacctgacccttag

SEQ ID NO: 167106 - DNA, 312 bp, Arabidopsis thaliana nossen
gtcaaactgtatagacttcagtataacattgacataacaagttaaaaggtgtattaacagatgttctgtattatgttctataatttattaatttatatacgtttcatacatcatgcgtaacaactttataacggaataaggatcttcatggaagaaatgaaataaatcaagaaggaacgaaaaacataactattaagaaagtaacatgaatgacttggattctaccagtgaattagatggtcgatttaggatggatcttcatagataaatgacatttagacttttatttacgagaaactcctgaaacataca

SEQ ID NO: 167107 - DNA, 380 bp, Arabidopsis thaliana nossen
ggcttttgtttaacattttagatttggaattaataaaatatattgctggctgaatattgctaatggcgggaaagcacttatgtgtaatcatcatgactcttaaattgaaattaattggtcaattattcgaagttatagtcatgacacttaaattgaaattaattggtcaattattcgaagttatagtcataatcataattccaatatttctttttaaatgtaacgttcatagatattcaagccttttatgataattttatggcatttatcataaaatatcttccatattataagaatcgttaaagtatatcgacattaccaaagaatgttacaatagtgtgtacatggttgcaaatatctggattatataagtttataaa

SEQ ID NO: 167108 - DNA, 406 bp, Arabidopsis thaliana nossen
gggccggcccacgcgttcgcaagttttacttaactatactgttcctgcaggttgtagaagatggatacgagtgctttgcaaagagacaactggggacaatattctctgcacccaattactgtggcgagtttgacaatgctggtgcattgatgagtgttgatgatagcttaacatgttcattccaaatccttaaggcatctgagaagaaaggaagatttggattcaacaacaatgttcctagaccaggaaccccacctcataaggtgtgaaaatactatccccctgtatatagatgcaatgtaggtagatgttagatatcaggtttgatatgttaacattcttgcagggtggaaaaggtcgttaactcgtcgtcgatgggttcaagaaacgagtgaaaccgacgggt

SEQ ID NO: 167109 - DNA, 358 bp, Arabidopsis thaliana nossen
ctcatatacaaatggggaacgtcaactgttaaagagtgttcgaccaaaagatctccagcggacaggtgcgtaggcgagccacaaggcttttcggtcatgaaacatgccatatgcgaacagttcgagtggatcgaattcaagacaaacgataactcacaggtcaacacactcgctggccgtacctgagtcatgagaggtttgccgattgaggttattaccaatgggttccagaacttttcctgagaaagttaaacaggtaagtttacgcccgattgataccacactgacccattgcagtccaatgatctacggaaggcctaggtcttgaggcttgataagcgcttggcggaataccgtt

SEQ ID NO: 167110 - DNA, 377 bp, Arabidopsis thaliana nossen
ggacatttgagtcggaactgttgtgatttcaaattttcatttcttgagtgataatttcagttattgatctgtgcgttcatcaatggaggtttcttctttacccagatactgtaactcacgctcctttgttccagaattgtctcgtttcaggggattcaaagttcacttatgggaccaatctcttgttcctcttcatttcagcattcgaaaacgaaagaacacccctcgttatttgatttcttgcagtcagaagaaagatgtcactgttgttgatggaagttgtatggatgagatctatgataagttggcggaacgtcttgtccctacagcagcggcaatgtttagccccaatcttaaacgtttggtcggtttggctg

SEQ ID NO: 167111 - DNA, 394 bp, Arabidopsis thaliana nossen
  unsure (1)..(394): unsure at all n locations
cggccgccagtgtgctggaattcgcccttgaattcatgctgtccaactcccanagacagaggccgccggtgccgttggcccgccccggccccgccgccgcagcccccgcggcagttcccgcagttccacgtcaagtccggcctgcagatcaagaagaacgccatcatcgatgactacaaggtcaccagccaggtcctggggctgggcatcaacgggaaaggtttgcagatcttcaacaagaggacccaggaaaaattcgccctcaaaatgcttcaggactgccccaaggcccgcagggaggtggagctgcactggcgggcctcccagggcccgcccatcgtacggatcgtggttgtgtccaaaaatttgtccgcagggaggaagggcctgttga

SEQ ID NO: 167112 - DNA, 375 bp, Arabidopsis thaliana nossen
agtaactacaacaattcaacattctttggaaatgggaatctgaatgggggattaacaatggaggggaggcaaaatccattcacaatatcgaatcattcgttacagaaccattcaaattcgtccttatacagtgatataaaatcagaggccaatttttttggcacagaggctacaaatgttggtatgtggccatgtaaccagctccagcctcagcaacatgcatatggccatatataaatcttcttgtatattataaggtgtgtgaatctttttttttttttttctcaaatatggattttttttaaaaatgggttgtgtatatagtttgtgttatatatcatttaatttaacagtattggtttttacatttttttg

SEQ ID NO: 167113 - DNA, 376 bp, Arabidopsis thaliana nossen
atctctgtagttttttttttttgttcctttcttaaatttcgaaagaaggacatttattaaaccggaaggactctttagatcattgcaaggaaaaatgttgaaaagtgcaagtccaatggcattctacgatatcggagagcagcaatactctactttcgggtacattttaagcaaacctgggaacgcatgagcttacgagattgacccttcgatcccaaacattgacgatgcgatctacggctcaaatgaattccgtatgtacgctaacaaaatcaaacggagtccttttactcatatccaccactggacggagtgtccttatgctcaccgtggcgagaaagtcatactttgttaaccttactgttacacttactgt

SEQ ID NO: 167114 - DNA, 384 bp, Arabidopsis thaliana nossen
gtccgtcgtagtgatgcagcatccaccgtcaaacgccgccggagctgggcagataccatcaggacaacagcaattgtggatgatgatgcaacagcagcagcagcagcagcagatgcagttgtctgcggcgccactaggtcaacatcagtacggtattggatctcagaatccaggatccgctagcgatgttaagtcgttgtggatcggagacttgcagcaatggatggacgagaactacatcatgagcgtctttgctcagtctggcgaggctacatcagctaaagtcattcgtaataagctgacgggacaatctgaaggttatggattcattgagttcgtcagccactctgtagcagagcgggttttgcagacttacaatggtgc

SEQ ID NO: 167115 - DNA, 382 bp, Arabidopsis thaliana nossen
ataaaaatggctcgagtctcttctcttctttctttctccttaacactttggatccttttccatgggtgcgcgggtcaacagggtcagcagggtcagcagtttccgaacgagtgccagctcgaccagctcaatgcgctcgagccttcacacgtactgaagagcgaggctggtcgcatcgaggtgtgggaccaccacgctcctcagctccgttgctcaggtgtctcctttgcacgttacatcatcgagtctaagggtctctacttgccctctttctttaacaccgcgaagctctccttcgtggctaaaggacgaggtcttatgggaaaagtgatccctggatgcgccgaaacattccaagactcatcagagttccaaccacgct

SEQ ID NO: 167116 - DNA, 374 bp, Arabidopsis thaliana nossen
atctctgtagttttttttttttgttcctttcttaaatttcgaaagaaagacatttattaaaccaaaataactctttagatcattgcaaggaaaaatgttgaaaagtgcaagtccaatggcattctacgatatcggagagcagcaatactctactttcgggtacattttaagcaaacctgggaacgcaggagcttacgagattgacccttcgatcccaaacatcgacgatgcgatctacggctcagatgagttccgtatgtacgcttacaaaatcaaacggtgtcctcgtactcgtagccacgactggacggagtgtccctacgctcaccgtggcgagaaagccacacgccgtgatcctcgccgttacacttact

SEQ ID NO: 167117 - DNA, 392 bp, Arabidopsis thaliana nossen
gccagtgtcgctggaattcgcccttgtttttttgctgtccaactcccacggacagagccctccaatgccgttggcggggccaaacccgccgccgcagcccccgcggcagttcccgcagttccacgtcaagtccggcctgcagatcaagaataacgccttcatcgatgactacaaagtcaccacccatgtcctggggctgggcatcaacggcaaagtcttgcagatcttctacaagaggacccaggagaaattcgccctcaaaatgcttcaggactgccccaaggcccgcaaggaggtggagctgcactggcgggcctcccagtgcccgcacatcgtacggatcgtggatgtgtacgataatctgtacgcacggaggaaagtcctgcttattg

SEQ ID NO: 167118 - DNA, 371 bp, Arabidopsis thaliana nossen
gtttgtcatgcttattattcttttgaagaaaggtggagtgaaagaggagaatattgtggtgtttatgggggatgacattgcgaagaacgaggagaatccaagacctggagttattatcaatagtcctaatggagaggatgtctataatggagttcccaaggattacactggagatgaagttaatgttgataacttattagctgtgattcttggaaacaaaacggctcttaaaggaggaagtgggaaagttgtagatagcggtccaaacgatcatatctttatatactatagtgatcacggtggttcgggagtgctcgggatgccaacttctccaaacctatatgcaaatgatctcaatgatgtcttgaaga

SEQ ID NO: 167119 - DNA, 376 bp, Arabidopsis thaliana nossen
ggaacttatcatgaatccactgttttctgctgcttcggttattgctggggggttggctgttgggctggcttctattggacctggagtcggtcaaggtacagctgcgggtcaagctgtcgaaggtatcgcgagacaacctgaggcagaaggaaaaatacgaggtactttattgcttagtttggcttttatggaagctttaacaatttatggcctggttgtagcattagcgcttttatttgcgaatccttttgtttaagcccagaaatcacaaaattctggattttttttgtagtttttttaattctatcaagaattaactcctacaattattcattgagacaacaatccttgtgaaggactaatttgaggatgggga

SEQ ID NO: 167120 - DNA, 391 bp, Arabidopsis thaliana nossen
  unsure (1)..(391): unsure at all n locations
gcgattagcttgagtttagcttctttttttatctttgatctagctaaagaaacagagagtttttagagggagaagggacaganagttttcagaggaagaagaaacagagagtagtgatgacatcagggacgagaatgccgacatggagggaaagagagaacaacaagagaagagaaagacgacggagagcaatcgcagctaatatcttcaccggattaagaatgtacggtaattacgagcttccgaagcattgcgacaacaacgaagtgcttaaagcactctgtaacgaagctggttggatcgtcgaacctgatggaactacttaccgcaagggatgtagtagacctgtagagcgtatggagataggtggtggttcagcaaccgctagttc

SEQ ID NO: 167121 - DNA, 376 bp, Arabidopsis thaliana nossen
ggcaggttcttacgcgttacttacccgtccgccactggaaacaccacttgccgtccgacttgcatgtggtaagcatgccgccagcgttcatcctgagccaggatcgaactctccatgagattcatagttgcattacttatagcttccttcttcgtagacaaagctgattcggaattgtctttcattccaagtcataacttgtatccatgcgcttcatattcgcatggagttcgctcccagaaatatagctacccctaccccctcacgtcaatcccacgagcctcttatccattcttattcgatcacagcgagggaacaagttaaaatagaaaaactcacattcattgggtttagggataatcaggctcgaactgat

SEQ ID NO: 167122 - DNA, 248 bp, Arabidopsis thaliana nossen
ccagtcaattccatctgctgccagctgctattggtaaagcacacgacttccagttgtagagttatcaagttgcgacccaactaacatgatataccctctagtgcctgtatgcgcccctggtacaggaaaaggccgatatggtgttgtcttaagcaccctgtcagctgcaggtcctgcctatggcaggagctcacggcagcccagggcatgcccagagagtgttcgagcagcaccagctccttgcagtg

SEQ ID NO: 167123 - DNA, 400 bp, Arabidopsis thaliana nossen
  unsure (1)..(400): unsure at all n locations
gggcggcacacgcgtccgatcacacacaatgagagaagattttatttttataaagagagacaganatggtggcgtacaatgcgtgtttggtgcgccagagcacattggcttcatcagccgcacgatcatcatcttcctcctcatcccagcgtcacgtgtcgctctccaaacctgttcagatcatctgtaaagctcaacagtctcatgaagacgataactccgccgtctcccgccgtcttgctctcactctcctcgtcggcgccgctgctgatggttccaaagtatcttctgctgatgccgcctactgtgaagctgcaaacatgttttggaagccaaagactaacacagacttcttgccatacaatggagatgggttcaaagtgcaatgttccaacaaaat

SEQ ID NO: 167124 - DNA, 381 bp, Arabidopsis thaliana nossen
aaaaaaactgaaacattccaaatggatcatcatcttcaaccataacaacgggaaacccttcttgtccagggtccccaaaaccttgaaacaaagtctcaaaatttcacttcgtggatccgaatgtctcagaacccatcactcttcttcctcttatgtctagggttaggtttttgcgttgacctgggtcaatccctgaaagttcctttcagcgttaacgatgttcttccgatgctacctcgtcaagtctcatggcctgttttgaacagtttccacaacgctgtggatttgttgccggtttttattgggtcagttactcctaataatgtatctattgagtggaaaggtgcttgctttaatggtaatgaagctcgtcttgatatc

SEQ ID NO: 167125 - DNA, 305 bp, Arabidopsis thaliana nossen
tgcatatgtagtaagtatgtttagcttaaagaactgatcggagaatcacaaccatggctaaatgtcacgcggaataatatcggatctctcattcttgaccgtgctccttccacttcttcttcttctacttccggctaccatttccgtctctggagcaccttctctagatccacattccgtagaaagatcgtcgacgccgttagttgcggcggtagctaactttaccgtaacaagctccgggaagaggacgatgaaggaagttacttgacggtgaccgcgaagtcaacagttgcatcatcaaaaga

SEQ ID NO: 167126 - DNA, 247 bp, Arabidopsis thaliana nossen
aataaaaaccgatctctcattcttgaccgtgctccttccacttcttcttcttctactgcccgctaccatttccttctctggagcaccttctctagatccacattccgtataaagatcgtccaccccgttacttgctgctgtagctcacgttaccgtcacgaactcctctaagatgactatgaacgaacttaccttactgttacggcgaattcaacagttccatcatctaaagatgctaaatctaata

SEQ ID NO: 167127 - DNA, 326 bp, Arabidopsis thaliana nossen
  unsure (1)..(326): unsure at all n locations
ctcaaatctcttcattttttgtcccaaccgccttagctcaccctcctggtatgtttcaaagtatgtcgcggataaaaaacaaccaanctccaatttccttcccgtatgactcagcttttgctctcccccgcgattctcttacctacacttctgctatgcgctccgactaaagctagttctcgcgcctactattctccacccttccatatgtctatagataccgctcttaacgttctccatgtctccaaatgagcttccttccactaaattcttcctgccaataaatctatcctgacttcttttaatgaccacctcaactccatctt

SEQ ID NO: 167128 - DNA, 363 bp, Arabidopsis thaliana nossen
gaggatccatggatatttcttgtaaaagtgtctttctaatcgtggctaagtcttcagttctatggatgggttggtatagaaaaattgaagcaaaatagctattaaacgagaactttggtttactaaagacatcgacatattatattgttttagctcggtagaaaccaaatacttttcctaaggattccgttaaatagaaataaagaacgaagtaactagaaagattgttcgagttggcccgatctatcttctagaaggatcatctagaaagcaaaattttctgtgaaagtacccagacggaaaaaagctcacatagatgttatgggtcgaatttttatttcgtttccctctttttttatttgg

SEQ ID NO: 167129 - DNA, 146 bp, Arabidopsis thaliana nossen
cgatagagagattaatgttttttttttaggcaacgtttcatataatgggagggtattaaatttgttggtgggtctaaaaatcttacatacatccatcgacttgatacttcaaaccatcactttaacttcactgagccatcattttt

SEQ ID NO: 167130 - DNA, 381 bp, Arabidopsis thaliana nossen
tgcatatgtagtaagtaggttaagcttaaagaactgatcggagaatcacaaccatggctaaatgtcacgcggaataatatcggatctctcattcttgaccgtgctccttccacttcttcttcttctacttccggctaccatttccgtctctggagcaccttctctagatccacattccgtagaaagatcgtcgacgccgttagttgcggcggtagctcacgttaccgtcacgagctccgggaagaggacgatgaaggaagttacgtgacggtgacggcgaagtcaacagttgcatcatcgaaagatgcgaaagctaatacgatcggcgcggcgttgaacggcgtagtgttcgaggagacatccaagaaatcggagaagctt

SEQ ID NO: 167131 - DNA, 366 bp, Arabidopsis thaliana nossen
  unsure (1)..(366): unsure at all n locations
aatccgagcaaatggtcctctttattttgtcatcccaccgcctcgtgaatggcagcaagatggcattggtaatggcatcgaanagacttattgcacggctaagattcatgagaatatcgatgatccagaacggtctgaccattttagcacacgagccggaagaatcagcactcttaacagccttaatctccctgttctacgtctagtcagacttaacgcccttagaggttatctctacagcggaggaatggtgttgccacaatggacggcaaacgcgcacacggtgctatacgtcacaggaggtcaagccaagatacaagtggtggacgacaatggtcagtcggtgttcaatgagcaagtgggaca

SEQ ID NO: 167132 - DNA, 384 bp, Arabidopsis thaliana nossen
gtgaaagccaagatccatgacttttagggtattcctccggaccagcagggattgatcttaggcggggggcaacttgaaaatggcagaacttttgccgactacaacattcagaaggagtccacactccacttggtcttgcgtctgcgtggaggtatgcagatctttgtgaagactctcaccggaaagaccatcacttttgaagtggagaggttttacaccatttataacgtgaaagccaagatccaggacaaagagggtattccacctgaccagcagagattgatcttcgccggaaagcaacttgaagatggaagaactttggctgactacaacattcagaaggagtccacactttacttggtcttgcgtctgcttggaggtatc

SEQ ID NO: 167133 - DNA, 378 bp, Arabidopsis thaliana nossen
gagagagagatataatgtccatttaatttcaaagtttcatataattttatgtgagtaaatttgcttttggttttggtaaagtgttacatacatcgatcgacttgttagttcaaagcatcagtttaactccactgagccatcatgggtcgatctcaagaacagggacagggacagggtccggttcacagcattcggctatcgaccgtgggtgcgacccggccgacagagactgttacaacccacgaaccaaccggtttagacctagccatgaagctccactacctcaaggcggcttacatctactcagccgatacagtacgtgacttaaccgtgagacacctgaaagaggccatttttatgtttgtccaccagatcgtt

SEQ ID NO: 167134 - DNA, 373 bp, Arabidopsis thaliana nossen
aaaaatttcatgtcaccttatgttctttaaggctcttctctgtcaacggcgctattcatcaggagaacggccgggccttattctcaaccgctcttgcgtttttggttttagccagatactctttctgtgccaattcgattcaagacaatagcaacaaaatagcaaaagcaaacataacaaaatttggatattgatataaagataacaagagccaacacttagaagaccaaatctggtgcaaaaactctgtcagaaatttgagattagatctgttttctagtttgcaaaatggttatatggtaagataactgtttcttatatgaagaaataaacaaactgaaaatggctaaaaagcctggacaaatcaaaagaa

SEQ ID NO: 167135 - DNA, 373 bp, Arabidopsis thaliana nossen
catcaacttaatcgtttctcttttatttagggttttctcttttctcgaaagtcttgcggttttctgaggcatctctatctggttcgagggtttcgtttgatatctggagaaaggggtttctggaaacaaggagttcataattcgcgatcttgatctatcgatcttcatttatatataaaagcgtgaatgagattatgatggagtcgaaaggtggtaaaaagaagtccagcagtcgtagttccttattttacgaagctcccctcggttacagcattgaagacgttcgtccaaacggtggaatcaagaaattcaaatcttctgtctactcaaactgttccaagaggccatcctgagtaccagcgtgcaccgatct

SEQ ID NO: 167136 - DNA, 380 bp, Arabidopsis thaliana nossen
aatacttttacgaaaaaagcttttaaaacttatctagtttcgtttgatacacatttgaagaaagaaatggcatccaaccaacagagctacaaagctggtgagaccagaggcaaggcccaggagaagactggacaagctatgggaacgatgagggacaaggctgaggagggccgggacaagacttctcaaacggcccaaacagcccaacagaaggcccatgagacagcccagtcagctaaagataagacatctcaaactgcccaagcggctcagcagaaggcccatgaaacggcccagtcagcaaaagagaagacatctcaaactgcccaaacggcacagcaaaaggcccatgagacgacgcaagcagcaaaagaaaagac

SEQ ID NO: 167137 - DNA, 366 bp, Arabidopsis thaliana nossen
gcgcagaagatacccatcatcattttgatgaactcttctcttctaactcctgcttcttggtcttcttcccgtgtccaaactccatcaacaacttttgaccacgaagactttctcgatcaaatcttttcctcggccccgtggccctccgtcgtcgatgatgctcatcctcttccctccgatggcttccacggccacgatgtcgactcaaggaatcagccgatcatgatgatgcctttgaatgatggctcctccgtccacgctctttataatggcttctccgtcgccggatctcttcctaactttcaaaatccttaaggatcgggagggggattgatgaaccaacaaggacatacgcatacgcaaacg

SEQ ID NO: 167138 - DNA, 399 bp, Arabidopsis thaliana nossen
  unsure (1)..(399): unsure at all n locations
aaaacgggggccttaaantcgggggctacccacgcgtccgctcattgttttttcattaccttttcatcaacttaatcggttctctcaaatttaggggtttctctttggtcgaaagtcttgcgggtttctgaatcatctctatctggtttgagggtttcgtttgatatctggagaaaggggtttctggaaacaaggagttcataattcgcgatcttgatctatcgatcttcatttatatataaaagcgtgaatgagattatgatggagtcgaaaggtggtaaaaagaagtccagcagtagtagtttccttattttacgaagctcccctcggttacagcattgaagacgttcgtccaaacggtggaatcaagaaattcaaatcttctgtctactcaaactg

SEQ ID NO: 167139 - DNA, 373 bp, Arabidopsis thaliana nossen
aatcgttctctcctcctactacttgtcctgtcgctcacacaacaaggcgagatggccttatctgcaaggggtttcgaaggttacgagaaacggctcgaggtgactttctttgagccaagcatctttcaagactccaagggactgggactccgtgctctgatcaagtcccagcttgatgaaattcttacacctgctgcatgcacgatcgtttcatctctctccaacgatcaattggactcttacgtactctctgagtccagcttctttgtctacccctacaaaggcatcatcaagacttgcgggaccactaagctccttctctctatcccaccacttttaaagctggctggtgagctctctctgagtgtcaagt

SEQ ID NO: 167140 - DNA, 345 bp, Arabidopsis thaliana nossen
actagatttgcggtattgcctttctctgatctccttctcgatctcttggtcctctgcactgagtcgggtggctaaacagaggagtctgaagaatacgacgtcgctgtgccttcatgttgcgggttttcgtctcctcttctgattaagaaagatcaatggaaaccaatcttcgagacgaagtttggacagattttaaccgttcaaatcggcaatggatgcggtggaatgggaccttacaagatacattccataacgtgggagccaaacacaattttgctccctcttcttcttcattccgacatggtcttcttcggtgactctggaagcgggattctgaattgggtt

SEQ ID NO: 167141 - DNA, 355 bp, Arabidopsis thaliana nossen
gctagagttattgttgccattttgaacccacaggacatcatcgtccagggagcttggccctatggacggagagctaagttgaagtttgctcagtacactggagccaatgccattgctggaagacacactcctggtaccttcaccaatcagatgcagacatccttcagtgaaccaaggctgttgattcttactgacccaagaactgaccatcagcctatcaaggaaggtgctttgggaaacattccaatcattgctttctgtgacacagactctccaatgagatttgctgacattggtataccaaccaacaacaagggaaagcacagcattgggtgcctttactggcttctggcta

SEQ ID NO: 167142 - DNA, 372 bp, Arabidopsis thaliana nossen
gcggtcggttcgagccaaagattcttatgccgactgaggaagctaacccggctgaccaagacgaagatggtgtcggtacaagatgggcggttctcgtcgctggttcttctggatatggaaactacagacaccaggctgacgtgtgtcacgcatatcaaatactaagaaaaggaggtttaaaggaagagaacatagtcgttttgatgtatgatgatatcgcaaaccacccacttaatcctcgtccgggtactctcatcaaccatcctgacggtgacgatgtttacgccggagtccctaaggactatactggtagtagtgttacggctgcaaacttctacgctgtactcctaggcgaccagaaggctgttaaag

SEQ ID NO: 167143 - DNA, 327 bp, Arabidopsis thaliana nossen
acccacgcgtgcgctcttagcctaccctaattcttttttactctattattcttcctccgtcggtaaaataaaagcaaattggcgtgcacacattgttggatacccacttatgggccctaagagagagctcaagtttgcattggaatctttctgggattgtatgagcactgctgaggatattcataaggtgtctgcttatctcaggtcatccatctggaaacagatgtctgccgctgggactaactttattcctagcaacacctttgtttactacaaccagagttcttgacaccatctctttgcttgttacttcctcatcttcacata

SEQ ID NO: 167144 - DNA, 341 bp, Arabidopsis thaliana nossen
ctttatatttttaacattcttttatcagatcatattttttggatttcttgttaagtgacaccaatctggtaaaagtgttttcaggttaatataaaagaataatgatgttttcggtgacggttgcgatccttgtttgtcttattggctacatttaccgatcatttaagcctccaccaccgcgaatctgcggtcatcctaacggtcctacggttacttctccgagaatcaagctcagtgatggaagatatcttgcttatagagaatttggggttgattgagacaatgctaactacaagatcattgttgttcatggcttcaacagcttcaaaaaacactgaatt

SEQ ID NO: 167145 - DNA, 368 bp, Arabidopsis thaliana nossen
cggatccaatcgatctctccttttactacaagttttgtcgctcacacaacaaggctagatggccttatgtgcaatcgggttcgaaggttacgagaaacggctcgaggtgactttctttgagccaagcatctttcaagactccaagggactgggactccgtgctctgatcaagtcccagcttgatgaaattcttacacctgctgcatgcacgatcgtttcatctctcttcaacgatcaattggactcttacgtactctctgagtccagcttctttgtctacccctacaaagtcatcattaagacttgcggtaccactaagctcctcctatctatcccaccacttctaaagcttgctggtgagctctctc

SEQ ID NO: 167146 - DNA, 373 bp, Arabidopsis thaliana nossen
tgaaatcatccatggctgccaccgcaaccgagaagctccctcagctcaaatccgccgtcgatggacttactgagatgagcgagaatgagaagagtggattcatcaacctcgtttcacgttacctcagtggtgaagcccagcacattgaatggagcaagatccagacacctactgatgaaattgttgttccttatgataaaatggctaacgtctctgaagatgcttccgagaccaaatatctgttggacaagcttgttgtgctgaagcttaatggaggtttgggaaccacaatgggatgcactggtccaaaatcggttattgaagttcgtgatggtttgacattttttgacctgattgttattcagattgagaa

SEQ ID NO: 167147 - DNA, 362 bp, Arabidopsis thaliana nossen
ctcatgagctccaatcatttctacatataaaagggataatttaaattatgaatcaaataactcaaaaacgagttatatagtatttatagtttatgaagtgtagaagaaaacagaaatattttggcgtgatatttttgtgaaaaagagatatttcacatttgtggctgagctccaaaaaagctttaatttcatagttatgttctttttaacaaaaatgaattgagttttcgtttggttgaaatagtttttcagtaatacatatctacttaactaaaagtctaaggatccgattggtaaccacctttttaggaaaggaatgggcaggaacatgttgttcctctttttttttaccatttaccagt

SEQ ID NO: 167148 - DNA, 355 bp, Arabidopsis thaliana nossen
ctctttctttttcctgattgtttttttagggctttggaaagcacgaacgcgtgaagctctaatcgaggaaaaaatggaggttttggataggagagacgatgagatcagggactcgggaaacatggacagcatcaagtcacactatgttaccgactctgtttccgaggaacgccgctctcgtgagctcaaggatggtcttcatcctttacggtacaagtttttgatatggtacactcggtgcacaccaagggttcggaaccagtcttatgaagataacatcaagaagatggttgaatttagcacggttgaaggattttgggcctgcttctgtcaccttgctcgttcttctcttttg

SEQ ID NO: 167149 - DNA, 253 bp, Arabidopsis thaliana nossen
gaatcacaggggggagcaatcagatgtctttgggtcctattcacgctcaatatctactctccaaatgctgtcaatcttacactcattgatttgcccggtgtaactaaagtggctgttgatggacagccgtaaaccattgctgaggatatctcaatccatggtttctcacctatgttgattagcctaattttatcatataggctatattttctgccaaccatgacattgccacattacatgcaattaagctcgc

SEQ ID NO: 167150 - DNA, 374 bp, Arabidopsis thaliana nossen
gcggctaaacattgttagagagattttgagagcgattttggcgatgaggggcttcacgttgaggtcgatccttgtgttgtctgtgcgcgcttcgtctatcagaagcgaagagacggagacgaaggagttcgtgttgaccttggatcacactaactttaccgataccatcaacaaacacgatttcatcgtcgtcgagttctacgccccatggtgtggacactgcaagcagcttgctcctgagtatgagaaggctgtgttagctttgatcagtaacgtcccaccagtggttcttgctaagattgatgccagtgaggaaacaaacagagaatttgcaactcaatacgaggttcatggtttcccaacaatcaagattt

SEQ ID NO: 167151 - DNA, 365 bp, Arabidopsis thaliana nossen
aaaaagatcatgacgaccaccgttattatcattatcttcgttgccatcttcgctacgactcttcacgacgccagaggagcaaccatggaaccgtgtctcgaatcaatgaagactgcttcgcttcctgatcttccgtatgcttatgatgcgctagagccagcaatcagtgaggagatcatgcggctacaccatcagaaacaccaccagacttatgtcactcagtacaacaaagccctcaacagccttcgttctgccatggctgacggtgatcactcctccgtcgtcaaactccaaagcctcatcaagttcaacggcggagggcacgttaaccatgcaatcttctggaaaaacctagccccggttca

SEQ ID NO: 167152 - DNA, 367 bp, Arabidopsis thaliana nossen
acgctccctacttctttctccgattttagatccattcaacaatcttcaaaggggatggggccagtctctgggtggggtaacacctctctcgactccgtagatccagagatccacgacctaatcgagaaggagaaacgttggcaatgttaaggaatcgaacttatcgctaccgagaatttcacttccttcgccgtcatctaagctctcggaagtgccttaaccaacaaatactccaaaggtattcctggtaatcgttattacggaggtaacgaattcattgatgagatcgataatctttgccgtttaagagctttcgaatcttttcattgtgatccagctatgtggggcgttaatgttcaaccgtatt

SEQ ID NO: 167153 - DNA, 352 bp, Arabidopsis thaliana nossen
ctcactggtttccagactccattatgtttacactgcaggtgtatttcaggcctaccgagccagaaccaaacaagcctcagtcagctgttggagcaaatggtcttccaccgccaccaccacccccgcctcatcaagctcaaccgccaccaccacctccatctggtttattcccaccgtcaccacctccaatggctaacaatggttttaggcccatgccaccaactggaggtttcggacatcctaacatgtgaaagagaatccagcgaatcagtttaaaaacacattactctgatcatggtttactaagaaagacttgctctgtgactgaaaaacaaatctgttctgacatttt

SEQ ID NO: 167154 - DNA, 356 bp, Arabidopsis thaliana nossen
gccgccttattcgtcttcttttttctctagtttttgcctcaatctctgttcttatatcccttgtaggggccaaatcttccgataaaaatgtcgggtaaaggagaaggaccagctatcggtatcgatcttggtaccacttactcttgcgtcggagtatggcaacacgaccgtgttgagatcattgctaatgatcaaggaaacagaaccacgccatcttacgttgctttcaccgactccgagaggttgatcggtgacgcatctaagaatcatgtcgccatgaaccccgttaacaccgttttcgacgctaagaggttgatcggtcgtcgttttctctgacagctctgttcaaagtgaca

SEQ ID NO: 167155 - DNA, 336 bp, Arabidopsis thaliana nossen
tcggcaagaattttttgattctcgtttctctacctcacggaacccatcatctgctatctgatttgataaaggggtcaaaagttttgggagaatcaagaagatcgagcgatggttgaatccaccatatgctctgaagcttgcgacttttttatttcaacagcttcagctttcaacactgccttgtccaagcttgtctcaccaccaagtgattccaatctccaacaagggttacgtcacgttgttgaaggatctgattgggattatgctcttttctggctagcgtccaacgtttatagctcttatggttgtgtctttatcttgtgagatggtctatta

SEQ ID NO: 167156 - DNA, 395 bp, Arabidopsis thaliana nossen
aaaccgggccgacccacgcgtgcggaatggacctacactaagatgttcttctagttctttgatctccaacagaaattcgtgttccagattggtcatggctgaccgaggaagaattcactgaatgttttaagaactgtgacaccagcaacttgatggttctttaacttgaccagtgtgggcggtgtatgccagattatatattacccttcactttagcgaggtcaccaaaagtgttgccgatgctatctactttatctttaagtggtgcatgccggcttttctatgtggggctacaacaactggtttcctctgctcctgcgattacgtatattaatctcaaccaatgctttcttctaacatcatttaacatttgatatgttttcttgatttattgg

SEQ ID NO: 167157 - DNA, 328 bp, Arabidopsis thaliana nossen
aaaccggggacgacccacgcgtggcgtgtttacacgacatattctcaggttttttagacgatttttcctgcttgaacaggggatatcttccggcgagttgcagcgtattggttgcttaccatctccggaagctgatataaatgagagcggcggaaataacgaagcggtgcatgatccatagttagagagagagccttgtctagggttcttacagagagaaaacttctgtacagagattatcgagtggatttcgccggaagatcttcaaacaactgcgaaactatgcatcgacggacttcattcctatttggtggcgataaatcgatct

SEQ ID NO: 167158 - DNA, 372 bp, Arabidopsis thaliana nossen
ctcacggaagattcttcagattttctgatccgatttcagaagccccaaggtcgcttgaattccgtctgggcaatggctttggtcttgcacacgtacaagggaaacaaaagtgctgagaaggcactcattgcagcagagtacgttggtgtgcagatcgatgtgccctctgactttcagatgggtgtcactaacaaaacccctgcgttcctcaagatgaaccctattggaaaggttcctgtacttgagactcccgagggttcagtatttgaaagcaacgcaattgcccgttatgtaagccgattgaatggtgacaactctttgaacggatcctccctgatcgaatatgcacaaattgagcaatggattgatttc

SEQ ID NO: 167159 - DNA, 211 bp, Arabidopsis thaliana nossen
gcggaaacgactaaatatgttcatttatcaaaaaccatttttagaaaatgttcaaaaaacgaaaggggttgctggaaaaatcatgggaataaatgaggggataaattatatcataatcatattctaacatatataggataattctagggtactggcaatacttttgggagatattatttaagtaaggtcattctacaaaactttgaattat

SEQ ID NO: 167160 - DNA, 389 bp, Arabidopsis thaliana nossen
ggaaaaccgggggcgacccacgcgtgcgggaaattcgaaactcgattgtttttttgacttttttctcttctctccgggatattttacggggagaggggttcttataggttatcaccgtccggtttgtttttaccggagtttatactcagatgaagtccggttctgctgttagttagccgtcaacacgacttctccgttgtcgtgttcttgccggcaacacagcttttatgttgctgtgttcttaccggtaacatggctttctattgccatgtgcttttgctcatacaaaagcttgatgttgaagactatggcttttatgattgttgaatcctgagagttttgtatgcgccaaatctattctcttttgccataatatactttattcatcg

SEQ ID NO: 167161 - DNA, 371 bp, Arabidopsis thaliana nossen
gcgggacggaaaagttgctgtccttttaaaatcccattctattccagctggggacaactaacctgtgtgtgggttgttgccgagagccttcaccacatagttttcaagtctggaaagaatgtcttgattgagttctatgcaccatggtgtggacattgtcaaaaacttgctccaatcttggacgaagtggctttgtcattccagaacgacccaagtgtgatcatagcaaaattggacgcatccgcaaatgatatcccaagtgatacctttcgatgtgaaatgattcccgaccatttacttcatgttaacgagcggaaatgttgtagtgtacgaaggagacaggacaaaggaagacttcataaacttcgttg

SEQ ID NO: 167162 - DNA, 229 bp, Arabidopsis thaliana nossen
gaccaaacttttaaagcacactcgtacacatggtggttttgttaatgataataaaaagtgctctctcttgtggcgtgttcgtgtttgtatagtagataaatgtttgtactgtatgagttagagtcttagtggcaatattacaccttctagtgtaatgtaacttgccctacccccttaaataaaagatgttcttgggtattcaaaaaaaaataaaaaaaaaaaattatat

SEQ ID NO: 167163 - DNA, 295 bp, Arabidopsis thaliana nossen
catattttttacattttcgtttttttaagactccttggagattcttacttgcatctgtgggttaagaggagtctcacattaacattgtggccattggtcatgtttattctggaaaatcgaccacaactgggcactagatctatatagcttggtggttttgacaagcgttgtatcatgaggttctagaagtgatgcttctattatgaacaaaatgtcctttaaggacgcttgggtgttggacaaatttaattctatgcgttagcatattattaccatctatattcctttattgaat

SEQ ID NO: 167164 - DNA, 125 bp, Arabidopsis thaliana nossen
ttttaacaattttttttaactcgatgcgtgtgtcatactggaacctgggctcatgtttgggcactccaaacacaaacacattagtaattaataattgtgttataacaaaaaggaaatgcaacaat

SEQ ID NO: 167165 - DNA, 350 bp, Arabidopsis thaliana nossen
cggctctcttccgaggaatcgtgtaactacagattctcgttggtggagatggagccaacaactttctttgtgcctcaccatttggatgccgatgctgtttttatagtcctacaaggtaaaggagtgatcgagttgtgacggataaaacaaaacaatcgttccacataactaaaggtgatgtggttagaatacattctggtgttaccaactttattactaacactaaccatacagttcctgttctgcctttcccagatcaccggtcctgtcaacaattcaggcaactacaaggattactttcctgctgtattccaatttcaacaattctactttaatgggtttaccaaaaa

SEQ ID NO: 167166 - DNA, 363 bp, Arabidopsis thaliana nossen
ctcgattaagcttgaacttgttgatcaatggctgacgttcgcacacagtcgcaccagctggaagtgggccctcaacgccggcatgaaggaggcatcaaagtcctttatcctcagagtggcccttcttccactcaggtgctagccgtgtttgtcggtgtaccgataggaggaacgctgctgactatagccggtttgacattagccggttcggttataggactaatgctagcattcccgttgtttctcatctttagtccggttattgtaccagcagcctttgtcatcggtctagctatgactggattcctggcttcaggggccataagtctcaccggactatcatccatgtcgggggtactcaac

SEQ ID NO: 167167 - DNA, 362 bp, Arabidopsis thaliana nossen
cgagtgttcacttcgtcaagagtcttatcatcaaacgttacgttctcgttttctcaaattccaaacaataccaagaaacctctacttgaaaagagaagattatcgccgcgtgtgtgcctaagagcgatggcgtctgagaaacaaaaacaacatgcacaacctggcaaagaacatgtcatggaatcaagcccacaattctctagctcagattaccaaccttccaacaagcttcgtggtaaggtggcgttgataactggtggagactctgggattggtcgagccgtgggatactgttttgcatccgaaggagctactgtggctttcacttacgtgaagggtcaagaagaaaaagatgcacaaga

SEQ ID NO: 167168 - DNA, 302 bp, Arabidopsis thaliana nossen
aagaaattttatttatggagtttttatagacacaacgggcccaataactgaaattgggttgcaaagaagctaaagaaaatggatgatcgagtgaaccacatgttaaaactgatttaagaagacgcaaactcttttgcaaagaaagctcatatgtattaacagaaacgtccccagttaatccaacttggctaggaattctaccgcatgtattacgcatcggcctgatcgttatgatcaagctaggggtgaacttcagaagaaccatacatccgagatccagtcacagaactcttttgagatat

SEQ ID NO: 167169 - DNA, 336 bp, Arabidopsis thaliana nossen
tcgttcacttatttttcacaactttttggcaacataaagctttcaatgaactgctgaataaaactatgatggatgtaatgtaacatattcaatggcagtaccgttacaggttattcaatagagtatagttccaccaatcctcagattaatttgtctagaacaccagagatagaccattattttgtacaagttatcggtactcttcagtgatgcatattcataaactatccgcaactggaagatcaccatctttgggaatcataatcttaatactctgattcaagtattgttatgtgaacattaataaactaaaactgtttaagcataaatatgttt

SEQ ID NO: 167170 - DNA, 403 bp, Arabidopsis thaliana nossen
cagaaatttctcgagatgggtcaagctcaaagtgacgagaactcaattggcgcgacgacgactacggagactcctcctccttctgcgaattcacctcgggattctgaagatacttcgtcgccatcgatggattctcttcttgcagaagctgcagcatatggtgaagatgataatgagaatgagtctcttgaagccaaagcacagagagctctcgattgtccttgtatagcagatttgcgtaatggctcttgcgggtctcagttctccgaggcattcctttgctttctcaaaagcactgctgaagaaaagggatcagactgcgtgaatccatttgtagcattgcaaagctgtatcaatgccaatccggatgcattctctaaatcagttacaggggacgaaaaag

SEQ ID NO: 167171 - DNA, 414 bp, Arabidopsis thaliana nossen
cgattcccgaggctcgaaaaaaccctaaatctcttctccgttcactcaggcaaccgaagatgcgtgagattcttcacatccagggtggtcaatgcggtaaccagatcggcgccaagttctgggaagtggtttgcgccgagcacggcatctatccaaccggaaggtacaccggagactcagatctgcaacttgagcgcatcaacgtttactacaatgaagcgagttgcggtagattcgttcctcgtgcagtgctcatggatttggagcctgggactatggatagtctcagatctggaccgtacggtcagacctttcgacctgataacttcgtctttggtcaatccggtgctggtaacaactgggccaagggacactacacggtatgagctgaactaatcgattccgttcttgatg

SEQ ID NO: 167172 - DNA, 410 bp, Arabidopsis thaliana nossen
  unsure (1)..(410): unsure at all n locations
aagttagtcataaaaaaaaattacattctaaaaagtttcaatggccgcctcaacaatggctctctcctggcctggtttcnccggaaaggctgtgaacctttcccctgcggcatcagaagtccttggaagcggccgtgtgacaatgaggaagactgttgccaagccaaagggtccatcaggcagcccatggtacggatccgaccgagtcaagtacttgggtccattctctggcgagtcacccagctaccttaccggagagttccctggagactacggatgggacacagctggtctatccgctgaccccgagacattcgcaaggaaccgtgagctagaagttatccacagcaggtgggccatgctcggagccctaggctgcgtcttccctgagcttttggccaagaacggag

SEQ ID NO: 167173 - DNA, 384 bp, Arabidopsis thaliana nossen
ggaaaagcatgtttaaactctgtctcgttctcgtcttggttattgcagtagatgcaaatccggttaagtccggttcttgtagttgctccgggaatatatcagcgagcgatgtcgatcgagttcatttcgcgatgaacttggagttcaccgaggcggagttcttcttgaaaggggctaccggaaaaggacttgatgcctataacgcgacacttgctaaaggcggaccaccgccggtaggggccaagaaagccaaccttgatcctataactaaccgaatcatcgaggagtttggttatcaagaaatcggtcatcttaagggcgattacggatatgacgggaggaattccacgtccgcttataaatctgacgagagagaatttcgca

SEQ ID NO: 167174 - DNA, 293 bp, Arabidopsis thaliana nossen
ggtcacaccggtccatgatgttgaaggagtagagttatgtgggactttgaagaatgtagttgctatggcagcgggtttcgtggacggtttggaaatgtgtaataacacaaaggctgcaatcatgaggattggtctaagagagattaaagcactctcaaagcttttgtttccatctgttaaagatagtactttcttcgagagctgcggtgtatcaaatgtcattacaacttgcttatgaggaaaaaaccggagagttgcggaagcatttgcaaaaagcatatgaaaaaggtctt

SEQ ID NO: 167175 - DNA, 398 bp, Arabidopsis thaliana nossen
caacactatagtccagtcaccaacatcaaacatcgaacatcgggtttgataatttgaacttggaaagggcttggggatcgagcaacaggagtgcacttaaggggatgagccaatgtcaggttcagtcctccaatggcctctttcatgtcaaccttgtctcctttgattttccagtcaaagcattgcaccatcattccaatcgccgttcctacaaagatatacgctatatttgttccatgacatcctctccttccgctaccaaatgcaatgtacttgagggcttgctctcttatatcttcttcttcccttaatcttgaagaagctagaaacctctccggcttaaactcctcatgctcttcccagacatttggatctctcatcacagcataaccattaac

SEQ ID NO: 167176 - DNA, 408 bp, Arabidopsis thaliana nossen
aagaggaagaaaaatgggtcgagtctcatctattatctctttctctttgacactcttgatcctcttcaatggctacactgcccaacagtggcccaacgagtgccagctcgatcaactcaatgcgctcgaaccatcccaaatcatcaagagcgagggtggtcgcatcgaggtctgggaccaccatgcaccccagctccgttgctccggctttgcctttgagcgtttcgtcattgagcctcacggtcttttcttgcccactttcttgaacgccggcaaactcacgtttgttgttcacggaaggggtctaatgggaagagttattccgggatgcgccgagacgttcatggagtcaccggtatttggagaaggtcaaggtcagggtcagagtcaagggttccgtgacatgca

SEQ ID NO: 167177 - DNA, 398 bp, Arabidopsis thaliana nossen
aagcttttctccttgattttcgcattctttagagtcttaacgcaaagatgagacctcctctaactgggagtggtggtgggttcagtggtggaagagggcgtggtggatacagtggtggtagaggtgacggtggattcagtggtggtcgaggtggcggtggtagaggaggaggaagaggtttcagcgaccgtggtggtcgcggcagaggaagaggaccaccacgtggtggtgctcgcggcggcagaggaccagctggccgtggaggcatgaaaggaggaagcaaagtgattgtggaacctcacagacacgcaggagtgttcattgcaaagggtaaagaagatgcccttgttaccaagaatttggttcctggtgaagctgtctacaacgagaagagaatc

SEQ ID NO: 167178 - DNA, 396 bp, Arabidopsis thaliana nossen
catcgatagagttaagctcattgtgtctcctggctcttccttccgttggacggaacctggatggttggggattggctttgccaacatggacgatgatactctccatgtggcgcttggacggatccaagatttcgtgtctaagaacaagaacaagatcgtcgagaaagcatctgaaaatgatcaggtaatccaaaacaagagtgctaaaaagctgaaatggacgcagaccaatctttgactaagttttcgacgactttacgaggatggacttttgtctccagggataatgtcaccacactcaccttttctccgagcatgaaaatcttaaggcataacagttgagagattggattaactcgttcgcgtttcactccgggtgaaataatcttaaattag

SEQ ID NO: 167179 - DNA, 414 bp, Arabidopsis thaliana nossen
gaaaaaataaataaataaaaaagcttaacctcttggttcattagttcatacaatgaatgaaaactaagccagttccagttaaggtaatctcaaatctttttatactttttagatccattttttttatggcctttaattttttatttttttatgatgaagaaattattcataataatataatattattataatataataatatatatatatttttttttattcagaattatatattatatttatatacaggattattcttttctatataacaataacagtaaaattttgtatttataaaaaaattcgaatttatatactctagatccaaaaaatttttcataaatttgtgtatgattataaaacatagtagttgttagcaaggtattttttagtattcgtaccttaagaggaata

SEQ ID NO: 167180 - DNA, 418 bp, Arabidopsis thaliana nossen
gaaacgagaaggttcaagatcttctattgctcgatgtcactcctctctcccttggtttggaaactgccggtggtgtcatgaccactttgatcccaaggaacacaaccatcccaaccaagaaggaacaagtcttctccacctactcagacaaccaacccggtgtgttgatccaggtgtacgaaggagagagagccagaaccaaggacaacaaccttcttggtaaatttgagctctccggaattcctccagctcctcgtggtgtcccccagatcacagtctgctttgacattgatgccaatggtatcctcaatgtctctgctgaggacaagaccaccggacagaagaacaagatcaccatcaccaatgacaagggtcgtctctccaaggatgagattgagaagatggttcaagaggctgg

SEQ ID NO: 167181 - DNA, 395 bp, Arabidopsis thaliana nossen
atcctctcacttaaattaggattatatatggctacatctgctagaagagcatatggattcgggagagctgacgaggcgactcacccggactccattagagccactttggctgagtttctttccacgttcgtcttcgtctttgctggagaaggctcaatcctcgctctagacaagttgtattgggacacggcggctcacacggggacaaacacgcctggagggttagttctggtggcgttagctcatgcattggccttgttcgcggctgtttctgcagccatcaatgtctctggtggccacgtcaaccccgctgtcacttttgctgctctaatcggaggcaggatctcggtcattcgagctatctactattgggttgctcagcttataggtgctat

SEQ ID NO: 167182 - DNA, 397 bp, Arabidopsis thaliana nossen
cttaaatctccggatttcgattcccgaggctcgaaaaaaccctaaatctcttctccgttcacgtcatccaaccgaagatgcgtgagattcttcacatccagggtggtcaatgcggtaaccagatcggcgccaagttctgggaagtggtttgcgccgagcacggcatctatccaaccggaaggtacaccggagactcagatctgcaacttgagcgcatcaacgtttactacaatgaagcgagttgcggtagattcgttcctcgtgcagtgctcatggatttggagcctgggactatggatagtctcagatctggaccgtacggtcagacctttcgacctgataacttcgtctttggtcaatccggtgctggtaacaactgggccaagggacactacac

SEQ ID NO: 167183 - DNA, 410 bp, Arabidopsis thaliana nossen
tgaaatggtcatagtttagtgtagtagaaaggttggaatttgtgctcagtatcggtcagaggtgtcagggttcgctacttttccagtctctagaatgatgtcaacaagatcactcatttccatggagtcaacttgaagaagagctttttcgatcaaatccttgaattcgattgatgggtatcctcggctgcgacgcccatggcgatttgaacgatgcagagttcagcaaacccttaccttcaattggtatctacgttgccgtagcttcactcatctgtggtctagccatggccgccgatcttatacacggcttccgacaccgcaaattctggtttccctgtaagttcttctctctcaacgccacttctctgactttcatcgctgtcggaatcaaactctctgaggatctc

SEQ ID NO: 167184 - DNA, 95 bp, Arabidopsis thaliana nossen
tcgcccacgcgtccggaacaatacattgaatgggaaatgtagttttgcctagagctcggaaaataaaaagtggtaggggaaaaaaaaaaaataat

SEQ ID NO: 167185 - DNA, 283 bp, Arabidopsis thaliana nossen
gaagagagatagagatgacctcaggtgtatgaggcgagaagaatacttgatgagtggagagtaatgtcgtgcctggtgatctttaaacgagagttgatcatgtcttataaattgtatacaagtatcgagttttcgacaaatattttgcacaatatcataatagtgaaaataatttaaaagagaatagtggaaagattgcaggccgaaaggctcaagaacgtgcgtttgacaaacaaatggagaacaaatgacaaagacttttcttgaaactctttaatccacc

SEQ ID NO: 167186 - DNA, 261 bp, Arabidopsis thaliana nossen
ttttacgaaaaaagcttttatttcttatctagttgcgctggaggcacatttgatgaaagaaggggcgtgcaaccaacagagctacaaagctggtgagaccagaggcttggcccaggagaagactggacaagctatgggaactattagggacaaggctgtagagggccggtacaagacttctcaaacggcccaaacagcccatcataatgcccatgagacagcctagtcagctaaagatattacatcttaaactgcccaagc

SEQ ID NO: 167187 - DNA, 404 bp, Arabidopsis thaliana nossen
tgaaaagctccctggaatgattgatgagggtgacgtattagtgtttgcatctaaaaaggccactgttgatgagattgaagctcaacttactctaaattccttcaaagttgctgctcttcacggtgataaagaccaagcatcacgaatggaaactctgcagaagttcaaatctggagttcaccatgtgctgattgccactgatgttgctgcccgaggtcttgacatcaaatcgcttaagacagtggttaactatgacatcgcaaaagatatggacatgcatgtacatcgtattggtagaacaggccgtgccggtgacaaagatggggttgcctacacacttgttacgcagagagaggctagatttgctggtgaattggtaaacagtctggttgctgctggtcaaa

SEQ ID NO: 167188 - DNA, 407 bp, Arabidopsis thaliana nossen
gtcaccttatcgtctctctatctccttcttcctatatccccttgctctctgggtttttgctcagtgtgctacgtgagagatagagagatggaaggtctgattcaaaccagaggaattctctctttacccgcgaagcccatcggagtgagaaggcttctccaaccctcacatggcttaaagcaaagacttttcaccacaaacttacctgccttgtccttatcctctaatggtcacaagaaatttcaagcctttcagcaaatcccacttgggatttcggtttcccacaaggagagaagcagaggattcatctgcaaggcggaagctgcggcggccggaggcggaaatgtgttcgacgaaggagacacagcggcgatggcggtgtcgcctaaaattttcggtgtggaggt

SEQ ID NO: 167189 - DNA, 401 bp, Arabidopsis thaliana nossen
ttttacgaaaaaagcttttaaaacttatctagtttcgtttgatacacatttgaagaaagaaatggcatccaaccaacagagctacaaagctggtgagaccagaggcaaggcccaggagaagactggacaagctatgggaacgatgagggacaaggctgaggagggccgggacaagacttctcaaacggcccaaacagcccaacagaaggcccatgagacagcccagtcagctaaagataagacatctcaaactgcccaagcggctcagcagaaggcccatgaaacggcccagtcagcaaaagagaagacatctcaaactgcccaaacggcacagcaaaaggcccatgagacgacgcaagcagcaaaagaaaagacatctcaagctggcgacaaagctcgcg

SEQ ID NO: 167190 - DNA, 403 bp, Arabidopsis thaliana nossen
  unsure (1)..(403): unsure at all n locations
gttgttgttgttcttctccttcgtgatgtggaagaagaatataacaaagctgggtttttttatatctggaatgctgaagaaattcttcacggatttgatctgtttaaactataaaagtcttgatttttataaatcagctaaaaataagacacggtttagggtttatggtttgactagaaacaacaatactgaaatgggttgtgaggtttcaaagttatgtgcattttgttgggtttctgatcctgaaggatctaatcatggtgtcacagggttagatgaagataggagaggtgaagggaatgatttgcctcagtttcgtgaattctcaattgagacgttgaggaacgcaacatcaggatntgctacagagaatatagtatcagagcatggtgaaaaagctcca

SEQ ID NO: 167191 - DNA, 388 bp, Arabidopsis thaliana nossen
cttggaggatcaatggccgtctttcgcacacactcgcaccagcttcaagtgcaccctcaacgccagcatgaaggaggcatcaaagtcctttatcctcagagtggcccttcttccactcaggtgctagccgtgtttgtcggtgtaccgataggaggaacgctgctgactatagccggtttgacattagccggttcggttataggactaatgctagcattcccgttgtttctcatctttagtccggttattgtaccagcagcctttgtcatcggtctagctatgactggattcctggcttcaggggccataggtctcaccggactatcatccatgtcgtgggtactcaactacatccgccgggcccggcaatatattcccgaggagcctg

SEQ ID NO: 167192 - DNA, 276 bp, Arabidopsis thaliana nossen
ctcacactcaatggatccattttcgtcgtccccaccatcatcagcggcggagattcttgaccggggcggtatcaaagctctcaaaatcctcggttaaggcgccacatgtaccgtctttctcgcgcacgacttcgtttcaacctctttttattcttctcccttcgcggtcaaactctttcccaaatcctttgctacctttattcgccgtgcacggtgggaaatttatgtcctccggtggcaattcgttaactctaatttaaaccatttttttccacg

SEQ ID NO: 167193 - DNA, 387 bp, Arabidopsis thaliana nossen
gaaaaaatggcaataaccaactaattaatcataacacttcttctccttatctccatagctgtggtccactgcttatccttccgtgtggagatcgacgagttcgagccaccacagcaaggagaacaagaaggtccccgtcgccgtcctggtggtggctctggcgagggatgggaggaagagtcgacgaatcatccataccacttcaagaagcggagtttcagtgattggttccagtcaaaggaaggttttgtgagagtgctgcctaagttcacaaaacatgcaccggctctcttccgaggaatcgagaactacagattctcgttggtggagatggagccaacaactttctttgtgcctcaccatttggatgccgatgctggttttata

SEQ ID NO: 167194 - DNA, 421 bp, Arabidopsis thaliana nossen
cttctagagagagacatattgagaaagagagagaaagctttagggttggaaaaaaaaaaaactgagaccctttagaaatctcctaacaggaatttttttctcaatcgctatagaaaatgggagtcatgatcaatcaccatttcctcgcttttatcttcggcatcttaggaaacgtgatatccttccttgtattcctcgctccagtgccaactttttatagaatatacaagagaaaatcgacggagagtttccagtcgctaccgttccaagtgtcgctatttagctgcatgctatggctctactacgcattgattaagaaagacgcttttctcctaattaccatcaactcctttggctgcgttgtggagactctctacatatccatgttcttcgctttcgccaccagggagaaaaggatatc

SEQ ID NO: 167195 - DNA, 241 bp, Arabidopsis thaliana nossen
aataaaacttctctctgaatcttattgttttctcataaaatgagaaggatggtgaggattaccaaatgggctctggttgctactatactctcacatcatactctttacttctattgcttccgtaaagtttgaggaagccaaaacatactacttatctactccctttagctcacataaactgctcatcacacacaccttcctctactatctagaaaattccaccttacgacccttttccttc

SEQ ID NO: 167196 - DNA, 427 bp, Arabidopsis thaliana nossen
aaaaattaagggatacttaaatccttaccagcttgatcttgttgcccctggcaacaaacatgcctgaaccatttcccgaaagatgtgtccagatagtccaaagtctcgatagttagctctcggtcttccggtcgaaaagcaacgtcgatgaagacgtgtaggtgcactattacgcggtggggattgtaattttccatgaattttccatttctcacttagcgacggaatcttacttatttccttttttgaggatcgacgaatcaaatgatattttttttccaatttttgcctcttcttctccctataaatcaaacttttctttgccataatgcttcagttcctgttattatcaatgataatgatacaaatcggatcctagatgtagaaataaatataagagtgcatacctatattttttttattaaaa

SEQ ID NO: 167197 - DNA, 257 bp, Arabidopsis thaliana nossen
gagaagaggggtttgtgtttgtttgttgttcttcgattgaaaatggtgaaatcgacgagtaaggatgctcaagatctatttcgatctcttcgatctgcttattccgctactccgactaatcttaaaatcatcgacccgtatgtcgttttcgctggctttaccgctctgattcatgtggtctatattgctttggggggaacatttccattttactcattcctatctggaattttctcttggatttggacctcaatttt

SEQ ID NO: 167198 - DNA, 280 bp, Arabidopsis thaliana nossen
agagaaatttttacggggttggattaattaatacccgcaaaaggtccgggaacctgattggcaaaaggccgagagagattgagattttacttctttataattgaagttatgcgaatgtggggtatttttacaatgaacggttcatcgttctttttttagagttaaaaaaaagataaaatttacggggttggcatagtaccatttaaattttaaactacatcactaaataattagctgtgaaagaatacatatttctcttaggttttttttctttcttttt

SEQ ID NO: 167199 - DNA, 423 bp, Arabidopsis thaliana nossen
accactttatttttttagaactaatcaaatgataaaaaaatttgtaggtagtaaatcatggcattgagcgtttattggtatgacttcatctgctttgcgatagttgcggctgcaatcgtcacgtccttgtggtttctatcccgcagagacagaggctgcgtagtaattgatgatacgtcccacgatagcttgttaccactttatagatcgaacaaccgtggttcggctcggttatgggccagttgctggacaagattacatcccggctggctactctttactcgttccacctcttttctctccatggctgctttattggcttgggatgtcatcaagtgggacgcaagcatcttcgtctattacacagaatggaccttcatgcttgtgatcatttactttgcggtacgtcgtaacagcttttcg

SEQ ID NO: 167200 - DNA, 408 bp, Arabidopsis thaliana nossen
gaatggtcgatagctcctgcgtccggttaggctcctttcccctgttttggtgtctcgatggtaacgagcggttcaacgatctatgtctacggtggccgtgacgataaacggagatacaacggtcttcattcgtatgatactgagaccaatgagtggaaattgttggctcctgttgaggaagggcttcctggtcgtagctatcattcaatggctggtgatgatcggaaagtttatgtgtttggtggtgttactgctaaaggacgtgtgaatacgcttcatgcgtacgatgttggtgatcagaaatgggttgagtatccggcggctggggaagctttgtaaggcagaggagcaccaaggcttgtggttgtggaagggagaatttgggttttgtttgggttgatggtaatg

SEQ ID NO: 167201 - DNA, 277 bp, Arabidopsis thaliana nossen
gttatttggtgtttctcgtttgggtctttcgaacatctttcattcttgtctttttggtgttgctccgcacgaacaggtagattgatgaaaagcaaccatggatgacctacatggaagcaatgctcgaatgcacattagagaagctcaagatccaatgcatgtgcaatttgaacatcatgctttgcatcacatccacaatggaagcggtatgggtgatgaccaagcttgtgatggcaattgctgtgggatgagtgagggtgtggaaacaaacatttct

SEQ ID NO: 167202 - DNA, 245 bp, Arabidopsis thaliana nossen
gcggaatggtcttttgctcctgcttttttttatgctactttccccagccggggggtgtctaaagttacgatggggggaaccacctatgtcttcggtggccgtgtcgataaacgtttattcaactgttttcattcggatgattctgagaccaatgagctaaaattgttggctcctagttgagaaagttcttcctggtcaaagctaaaattcaatggcaggtgatgatctgaaatgtttatgtgttt

SEQ ID NO: 167203 - DNA, 349 bp, Arabidopsis thaliana nossen
attacctttatcctaagagtaattaattaaccgataagtggttaaattggttgaggttaaaagtgaaccttcaatggcaagaggtcgaaagctgacgatgagccagagcgagaggtacctaggaagcagctatagttaccgggacagtaacggaaactccgccaccgacgaatcagagctcacggaggaggacatctggtcacacgccgtcgatcacagcccggagatgctggaatctcatggagcgtggaacacacgcgatgctgtggtgaggaatgggcgcgtgggtggtggtttgtctctggcgtttgaagacgcgtcatcttcgccgaggatcgtgcaccaaata

SEQ ID NO: 167204 - DNA, 318 bp, Arabidopsis thaliana nossen
  unsure (1)..(318): unsure at all n locations
ctcatctattatctctttctctttgactctcttgancctctncaatgggtacactgcccatcagtggggctacgagtgccatctcgatcaactcaatgcgctcgaaccatcccaaatcatcaagagcgagggtgggcgcatcgaggtctgggaccaccatgcaccccagctccggtgctccggctttgcctttgagcgtttcgtcattgaacctcaaggtcttttcttgcccacttttttgaacgccggcaaactcacgtttgttgttcacgaaaagggtctaatggtaagagtaattccgggatgcgccgagacgtt

SEQ ID NO: 167205 - DNA, 225 bp, Arabidopsis thaliana nossen
acagcttctactttttgaagattgttttttattctatgattggctcatgtcttaatgaattccgtaggagtcggatcgacactttgtgtttgtgggtttagtccaatttgctcttttaattcttcttcttcattggtacatttataaaaggtttgttttttgtaaagcctaaagtggtttgacatttgattctgatcccgttggaatcaaaaactggttaattac

SEQ ID NO: 167206 - DNA, 418 bp, Arabidopsis thaliana nossen
cttctcagacaagggccaaggttgtccacatgagtgagcttgaaaaacgtgaatgttcttcaaacctcaaaccatgaaaaatgttgataagagctcgacattactctctaccttaatctaaaccacaaaggagaaaaagaatccccttcaagcaacttagatcaaagtgtcatcaagaaactccgagatcaaatctaatctttctctggtttgaatcaagaagagcaaaatcacattctcaaccccatcttttcagtgtggttaaagcaaaaagaatctcgagacaaagaagaaaaactaaaaaagagaaccccaaagaatcgaatatttattatttcgccccgaagattctatttctgatcatttacacccctaaaaagagtagagctttcgtgaagccaccatgtgtggaggagct

SEQ ID NO: 167207 - DNA, 238 bp, Arabidopsis thaliana nossen
ctaaacttgatcagctatggcgaccggtggtgctgcggcggatttggaagatgttcagacggtggatctcatgtcggagctcctccgccgcctcaagtgttctcagaagcccgacaaacgcctcatcttcattggacctccagggtcagggaaaggtactcaatctccagtagtgaaggatgagtattgcgtgtgtcactcatacactggagacacgtgaagagctgctgttgctttt

SEQ ID NO: 167208 - DNA, 417 bp, Arabidopsis thaliana nossen
  unsure (1)..(417): unsure at all n locations
ncgttccttttgtactttacgctatctcagatcatcgtacttacttcctaggctttccaagtctcgttaagtacggtgccgtgaagttaaataatctggtatctttcgttaagttataatagtttgtaacataaatctgtgggtggataaagttatgtctttttggtttttaaatcctagtttacagattatttggatttatcgtgctcactttttttattgtgtttggcattgggattatggcagcatgcatacgtacgtgttcacgtggcatacaaatccaagactnggtgatacgtatcgaggaaagtattttacgagattggtaatgaaacgacanccgttctggacttcggataccaactccagcgtaagctaccaaattatgtggctgctttctgaagattctggttactc

SEQ ID NO: 167209 - DNA, 145 bp, Arabidopsis thaliana nossen
agtcctcaaatcataaggtccagacataagataagtgccatcaccaccaggaaagatcattgacaacccataacacatcaagtttcttacaatggaacctaaaaccctctttggccctcacaatcttgactcaagcctactcatc

SEQ ID NO: 167210 - DNA, 334 bp, Arabidopsis thaliana nossen
  unsure (1)..(334): unsure at all n locations
tcgaaagttttctctgctatggatttttattaccaagcttgggttcatggaggtgctctgcttgctgttggagctgatgtaccggcggcggttagagaatttagccggactttgtttaatatgcgtccggatatatctctgcttgtttcgaggacggntttcaacagcgatctgagaggtgtgcttgggttagttagagttccgacgtgtgtgattcagaccgcgaacgatgtttctgtgccggctttggtggcggagtatcttaggtctcatctcggtggagatactactgtggagactcttaaaactgaaagacatttgccgcatcttaatg

SEQ ID NO: 167211 - DNA, 393 bp, Arabidopsis thaliana nossen
gggggatccacgcgttcgcttgaagatctttactcatattctattagctcattaaagcaactggcatggatgccataaccaagtatatcatgtctatataaagtttacagcaaactatcactctccaatccctcaacaaatgctcaagaagatgttcaatcatgcaccagacaaccaacacaaactatataagaaacaatcaccctgaagaatccaggaggtccagaaaatcacactctaaacaaaacaaactaatgggaaagtgaggaagcgatcacgagggtaatagagcgggaggggttttacctcgctgatggcagtatccttggcagcagcagcttgtgagtcgagaaacaaaggctcgccagaagaatagaaatccatgactgctgc

SEQ ID NO: 167212 - DNA, 397 bp, Arabidopsis thaliana nossen
tcgatcaccttcttttttgttacgtttttacggccttgcaggacgcaatggtgccggataaacaactgttgggaggcacaaggctatgcatgctatagagggtattcctactaattgccagatattgcatgttgaacaagaagtcgctggtgacaagacaacagccttacagtgcgttcttaacactgatattgaaagaaccaaactgttggaagaagagattcaaatactagcaaagcatagagaaacggaagaacccacagctaaggatggaatgcctaccaaagacacaatttgaaggagatcttatgtctcaaaggcttgaagaaatatacaaaagacttgatgcaattgatgcttatactgctgaggctcgggcagctagtatccttgctgg

SEQ ID NO: 167213 - DNA, 352 bp, Arabidopsis thaliana nossen
gactctttgatgcaacttaaaaacgaggtacatacagtatgtgtgggagcagccataggtcaggcctgtctattactttctgcgggaaccaagggtaaacggtttatgatgccacatgccaaagcgatgattcagcaaccacgtgtaccttcttctgggttgatgcctgccagtgatgtcctgattcgggccaaagaggtcattacaaatagggatatacttgtggaactactatcaaagcatactgggaattccgtggagactgtagctaacgtaatgagaaagccatattacatggatgcaccaaaagctaaagaatttggagtcattgacaggattctttggcgcggtc

SEQ ID NO: 167214 - DNA, 353 bp, Arabidopsis thaliana nossen
atctatctctagagttagtgtaaagctcttggggggatacaagtctgagaactccatcaataacctgtgaattcaggtgggaatttgtgaagaataattgcgacaatggcatttggtgtttccgaggatgaagctgaaggtactataaccatcaatgaatttatccaaagtcttgacgcagaatagcttgcatcggatttgttgtctagtggagatgaatgaaatgagtgtactttcccaaagggttacatgaaaaggcaagcaattttctcatgcattacatgtacaccataggggaatgcttgaatttgcactgcttgttgcttatcttgtcatgatggccattagctttt

SEQ ID NO: 167215 - DNA, 367 bp, Arabidopsis thaliana nossen
ccggcagggtcgtagcacacttgtgacgactcttcagatgttcaaaattctcggtctgaactgtctcgccacagcatatgtcctaagtgttatgtacttagacggtgtaaagcttggtgatgtccaggctacaatcagcggagtgttaacagctgcgtttttcctcttcatttctcatgcccgaccgcttcaaaccctctctgcagaacggccccacccgagtgtcttctccgtgtacctcttcctctctctgataggacagtttgctgttcacttgaccttcttggtctactctgtgaaagaagctgagaaacacatgcccgaggaatgcatcgaaccagacgcaagtttccatcctaacctggtg

SEQ ID NO: 167216 - DNA, 382 bp, Arabidopsis thaliana nossen
cggggggttccacgcgttcggcaacctccatatgtctcctttcattacatcgggtttacacaatatccggtgcgtcaaatctccgagtattggcagctttttccacatcttccgcagttcaatttgttggtcctcaaatcgacacacttcttacgacaacaattacgacctggactgcctttgagacgacataccttggagcttttgtcacatgtcaatgttgcacctaaatgtttcctacctttgttccttgcagaagcggttatcccccaaccatatttgtgttgatgtttcgcttcaaccgttagcggctcgctatatgttattgcaatggcttagaccattttgagccccataatgaaaatttgatatctggaatgta

SEQ ID NO: 167217 - DNA, 390 bp, Arabidopsis thaliana nossen
gcacaagaattcatacaacatcttgagggggagattaaactacttagtgggcttcagcatcaggatatggtgagatatcgtggcacagccaaggatgggtcaaacttgtacatttttcttgagcttgtaacccaagggtcccttctaaaactctaccaaagataccagcttcgggactctgtagtctccttgtacactagacagattcttgacggtttgaaatatctccacgataaaggttttattcacagggacatcaaatgtgcaaatatattggtggacgctaatggcgccgtcaaacttgcagattttggattggcaaaggtttcaaagtttaacgacattaagtcctgcaagggaactccattttggatggctccagaggttatt

SEQ ID NO: 167218 - DNA, 385 bp, Arabidopsis thaliana nossen
tcggtcacaggttttatttttgctttaactatatatttgcatgtcattgggggaaaggattagactttgatgcaacaagagcttcattgaacatttaaagaaccctagttaataacgataatgggttcgagagtcttggcttccttctttgttttcttaatcttcacagtcatcacattgcctaccacgatccaagcttgcactccttgtactcgtcctcatcctccggttccgaaacctccacaacacggaagtagtggaagtggtggtagcaagccgtctccacatcacgatggaaaagattgtggtaaacccacaccccacggtggaaaaggttgcagaccttcgcattatggtggaggaagatgaggatgatggaaatcac

SEQ ID NO: 167219 - DNA, 384 bp, Arabidopsis thaliana nossen
agagtaatgaaaattggtcgttgggtttacgataattaaacaaaggttgaaagagcatcaaccgttggtgagtcttcttaatcctcaacgacgaattcaactgctcctccattattctcttccttcttccttctttcggaaacaaccacagaagcaaagaaatcaatctcctatgagttccaagagacggcggagattcaatctccgaacagtgttctccatcatcttcctcacctttcttcctctgaatcttaactctcaagaggtctttgattcttctcaagatcacttcttgatccaatcccgagtttatgcgaaccatcgcagccttatcgatacacctcttcctggcaaagaccctgcccttgatgcctctccgccatc

SEQ ID NO: 167220 - DNA, 333 bp, Arabidopsis thaliana nossen
cccggggcgttccacgcgttcgcataaactcttttcgcttccgttctcgaccaccgctgaaaaccctggtggtacatttcttgggtatcggccaaggagataactcgaagatggtgtctgacgctagcaagaagaaggcagctcagaagaaagctgctgccgccgataaaagaggtggtaaagctgctgctccatccaaatccgccgctacttcttacaacggtgttgatagcttgtcaagcggtgtcgatgctctccaaatttctgatcggacttgtaccggagttctctgttctcatactcaatctacagatattcgaatagaatctctgt

SEQ ID NO: 167221 - DNA, 391 bp, Arabidopsis thaliana nossen
  unsure (1)..(391): unsure at all n locations
ttccggggtggttccactcgtccgcgcctattcactggcctttatttttctgagctttgaacccancttgttgtgttaggctattcttttctcctctaccaaagtcagttaaacaatttgctctgtgtgctgatgcaggctttgcttcttgccatccacaagatgaaagtatcagaagaacagcgcatggcaagcattgatacacatgaacctcttctcggctttgctctaagctgtggaatgtactcttcacctgcggtaacttaactaagtaacaatctgcgtttccaaaagtcataaacagtcattttcttaacacgaagaggtcttgcaggtgaggatctactctgcgaaaggagttaaagaagagatgctataagcacaaaaggac

SEQ ID NO: 167222 - DNA, 227 bp, Arabidopsis thaliana nossen
gaaaaaccactttttaaacttttctatacacatttcccgagaaaatagctgttctcaaagcgtacccgttgggtattgactcatgtttatagataaaatgatactctattgagaaaaataaaacgaacgttacaaagcagacaattattatctgacattgtcttccttcttattctaaacaaagcagacaattataagctgacattgtcttccttaattcttattct

SEQ ID NO: 167223 - DNA, 374 bp, Arabidopsis thaliana nossen
  unsure (1)..(374): unsure at all n locations
atctcatctctagaactttgattcttcccaatcaaagacagaagggggcggctgttgagatccaagaggacggctgaagaggtgcgttggcattcaaacaatgctagttcagatggaacaatgcgacatccagtggactcaattacttggtccactatgaataataaatggccagagttctcttttgatccaagaaacctccgcactcggtctttcaactgatgaaatgaatccattctcgatctagaatacaaagtacagcacatggccagttctattggtcaactacaacatgcatncaacaaagtgtatgaacgcagagaatataatgctgacattattgattcctggtccaacagcaccaagcaacaaaa

SEQ ID NO: 167224 - DNA, 385 bp, Arabidopsis thaliana nossen
cattcttttttttctcgttattttctaaacctctctcgatctcaatttggcaaattggctgacaagaagatcagaatcggaatcaacggtttcggaagaatcggtcgtttggttgctagagttgttcttcagagggatgatgttgagctcgtcgctgttaacgatcctttcatcaccaccgattacatgacatacatgtttaagtatgacagtgttcacggtcagtggaagcaccatgagcttaaggtgaaggatgacaaaactcttctcttcggtgagaagccagtcactgttttcggcatcaggaaccctgaggacatcccatggggtgaggctggagctgactttgttgttgagtctactggtgtcttcactgacaaagaca

SEQ ID NO: 167225 - DNA, 376 bp, Arabidopsis thaliana nossen
ctttcttcctttcttcttcttcttcttcgcattgatttggtccgccttcctcttctattctattcattaagaacctaatcttcatcttctccatcttcttcttcacggactccacttcgctcatccaggaaggtttattagtagtaaccaatccaagtgttccttttgtttgaagcaacaagctttgtgatattatcctgagagacaatgtttggtttaaggaaatcaccggcaaatcttcccaagcataactcagtcgacctcaagtcttccaagccaaatcctttcgattcagatgatgaatctgacaacaaacatacccttaacccttctaagaggactacctctgaaccctctttggctgatatgacaaacc

SEQ ID NO: 167226 - DNA, 376 bp, Arabidopsis thaliana nossen
cttcttgttcgtgatctttctttctccggaaaagatgtcggccggtagcggaaatgctactaacggtgacggaggttttagtttccctaaaggaccggtgatgccgaagataacgaccggagcagcaaagagaggtagcggagtctgccacgacgatagtggtccgacggtgaatgccacaaccatcgatgagcttcattcgttacagaagaaacgttctgctcctaccacaccgatcaaccaaaacgccgccgctgcttttgccgccgtctccgaggaggagcgtcagaagattcagcttcaatctatcagtgcatcgttagcatcgttaacgagagagtcaggaccaaaagtggtgagaggagatccggcggag

SEQ ID NO: 167227 - DNA, 356 bp, Arabidopsis thaliana nossen
caccacttaaggtcttttttgtctcggtgacagatgcaagaaggggtagggagctggtgctggtggcgccaagtggcgtgcagtccttaagatcggcgagaacgagccatctgagcattccattcatgagaacgcttacggattagctagatacgctgttatctggcaggagaacggtcttgtaccaattgttgagcctgagatcctaatcgatggatcccatgacatccataagtgtgctgccgtgactgaacgtgttcttgcaactggctgcaaggctcttaaccaccaacaaattttgctcgagggtgcccccttgaagcctaacatgggtacacccggatctgacaggccca

SEQ ID NO: 167228 - DNA, 370 bp, Arabidopsis thaliana nossen
ccattcgcaaataacttctctttgaatctcagtgagctctcataaaatgagaggtatggtgagttttgccgtttgaactctctttgctgctttactctcacagcagctctttgcttctgttgcttccgtaaggtttgaggatgccaaaacatactacttatctcctccctctggctcacatggaactcctccatcacacacacctccttcttctaactgtggaagtccaccttacgacccttctccttcaactccttctcacccttcaccttcatcacatactccaactccttccactccatcacacactccaactccacacactccatcacacacgccaactccacacacccctcctttgaactgtgga

SEQ ID NO: 167229 - DNA, 323 bp, Arabidopsis thaliana nossen
ggaaaagactctttatacttttttttcattattctaagcccctggctcgcgaggttctattctctaacctaaagttatgcctatcagattcaaggaaaacttaaagtagtggagggaaatctgtaaatctttacttgccactactaatttagttccacttactgagtcttcaattagattggatagccggagagagatttaaattaatagttttgaaaaggacctaagatactttggatatatactcatgaaagtctcggaatgctcagacattcaatcaatattagattagattaagaattgcctttcattttacttccaaa

SEQ ID NO: 167230 - DNA, 378 bp, Arabidopsis thaliana nossen
agaaaataaactattggcattttcataaacattgtcaaaaacaagtaatgaagagtattttagaagctggatgatggcgacgtcaggtacatacgtgacagaagttcctctgaaagggtcagcgaagaaccactacaagaggtggaagagcgaaaaccaactcttccctgacgccattggccatcatatccaaggtgtcaccgttcacgagggcgactgggactcccacggggccatcaagtcctggaactacacatgcgatgggaagcaagaggtgttcaaggagaagagggagttagacgaccagaagatggcggtgacgtttagagggctggatggtcatgtgatggagcagcttaaggtgtatgacgtcatctt

SEQ ID NO: 167231 - DNA, 379 bp, Arabidopsis thaliana nossen
tttcaaactcatctctctccttcttttttttcttccacttctaacagggacaggcttgtcgggagtcgggcgggcctttgcttccgacaaggcactcctcgtgaccggccgcaacatcacggctgacggtggaaggtcgtcactgagagggaagaagcagaggagagcatcaggatgtaacttgttccaaggccgatgggtgttcgatgcttcttaccctttctatgactcgtccaagtgtcctttcatcgacggcgagtttgactgtctcaagttcggccgaccagacaaacagttcctcaagtactcttggcaacctgaatcttgcaccatcccaaggttcgacggtggggcatttctgaggaaatacagaggaaaa

SEQ ID NO: 167232 - DNA, 365 bp, Arabidopsis thaliana nossen
aacaaattatcatgaatttttttcacgaaccaacaaaccaaccagaggcgcgtttttctactaatttgggtggcaaacgaccactgcttatccttacgcgtggagatcgacgagtctcgagccaccacagcaaggagaacaagaaggctcccgccgccgtcctaggtggtggctcttgccagggatgggaggaagagcccacgaatcatccataccactacaagaagcggagtttcaatgattggctccagtcaaaggaaggctccgccagagtgctgcctaatttcacaaaacatgcaccgactctcttgcgaagaatcgagaactacagactctcgttggaggagatggagccaacaactatc

SEQ ID NO: 167233 - DNA, 373 bp, Arabidopsis thaliana nossen
cttttacgaaaaaagcttttataacttatctagtttcgtttgatacacggttgaagaaagaaatggcgtgcaaccaacagagctacaaagctggtgagaccagaggcaaggcccaggagaagactggacaagctatgggaacgatgagggacaaggctgaggagggccgggacaagacttctcaaacggcccaaacagcccaacagaaggcccatgagacagcccagtcagctaaagataagacatctcaaactgcccaagcggctcagcagaaagcccatgaaacggcccagtcagcaaaagagaagacatctcaaacttgccaaaacggcacagcataaagcccatgagacgacgcaagcagcaaaagaaa

SEQ ID NO: 167234 - DNA, 294 bp, Arabidopsis thaliana nossen
aaacatcaagtaataatggctttttctaacaaattaatcataacactgtgtggtttattttcaatggtggcgcgcaacgcttatacctccgcgtggggatagagacagagttagccaccacacctcggggaacaagaaggtccccgtcgccgtcctggtggtggctctggcgagggatgggaggaagagtctacgaatcatccataccacttcaagaagcggagtttcagggattggttccagtcaaaggaaggttttgtgagagtgctgcctaaattcacaaaaaatgcaccg

SEQ ID NO: 167235 - DNA, 377 bp, Arabidopsis thaliana nossen
tcgcgtttggtctcagtttactcattcttgttctcatactcactgcgggtctttcaagcttcctgatggcttcgcgcctaagagttttgtggtgtcttcacggagagaattaagagtgttcgcagtggcaactaccgccgaggaggcgtccggtaacataccagcggctccgatttctctacctctagggtcatggaaacagatagctggtggagttacagctgctaaagggtttaaagctgctggtatgtatgctggattacgagctgcagggaagaaacctgatctcgctcttgtaacatgtgatgtcgaagctgtagctgcaggtgtgtttactactaatgtggttgctgctgctcctgtagtttactgtaaaa

SEQ ID NO: 167236 - DNA, 336 bp, Arabidopsis thaliana nossen
  unsure (1)..(336): unsure at all n locations
caccactttattttcactgatcgcataacatttttgagacaagagactgtctctctctctcttgtctggttcacaccccctctctccggcgatggttgttgctatggaccaacgcaccaatgngaacggagatcccggcgccttttaccgaaaaaaaaaaaaaaggtttgacccgagtgcacaaccaccgttcaaaaccggagatataaggccggcgattcctaaccactggtggttaaaaagtcctttgaaatcaatgagttacgtctgcagaaacataatcgccgtcccggttttggccatcgctgccgtgtatgtggatagctggtccctttg

SEQ ID NO: 167237 - DNA, 380 bp, Arabidopsis thaliana nossen
cggggggttccacgcgtccgcggacgcttgttttcatttttttatagagcgcgttcgtccacgagacgggtgcttggagatgtcagtggggcccccaccacacgttcttcgactcgttgcggcggtccactgtttatcaaaaatgagttcatctgtctcaaacccccacggaatcctgcaaccaggctcatttctgcttccacaatcacaatctatgaaaaaagatgaagcagcgttagtttctgtgtgctggaatcaagattcaagttgtttttcagctagaacgagtcatggttttcgtatatataactgggaacctttcaaagaaactttcacgcgtgatctaaaggaccgtggttctaaaaatcgtagagatgctt

SEQ ID NO: 167238 - DNA, 384 bp, Arabidopsis thaliana nossen
ctaaatgtgacaccaattggtgttttggcagttattactttcaaagatatacctgaagtggggcaaaacattggttacataacgatgtttggcacagggcttctatttgcagatgaagttactatatctgccggacaaataattgctcttgtggttgcagacacacaaaagcatgcagatatggcagcacaccttgcagtagttgagtacgattcaaggaatataggaacaccagtattatctgtggaggatgcagtcaaaaggtccagcctttttgaggttactcccgagtatcagcccgaacctgttggcgatatttcaaaaggaatggctgaagctgatcgcaagatacgctcagtagagttgagacttgggtcacagtac

SEQ ID NO: 167239 - DNA, 378 bp, Arabidopsis thaliana nossen
cttagcatactttgctcttcttttctctgctgttctctgttccaaaggctttgtgaaaaaatggagttcgagaaccggtacggacttgcaacgtcgcagaagtacgactgtctcttgttcgatttggacgatactctttatcctcttagctccggaatcgcaagagaatgtgggaacaacatcaaagattacatgaccgagaaactcggtataccgaaggacaaaatcgtcgaattgtctgatcttctatacaagaactatggaacaacaatggctggtcttagggcgatcggatatgaatttgactacaatgagtaccacagcttcgtccacggtcgtttaccctatgacaacataaaacccgaccttgttcttcgc

SEQ ID NO: 167240 - DNA, 408 bp, Arabidopsis thaliana nossen
  unsure (1)..(408): unsure at all n locations
cccggggggtcccacgcgtncgacttattatattagttagagttttattaggagtgtacatacaacacttgcacgtattttctctcaaaaaaggcttaacctaacaaaaaattgcttaaaagcagttaacagttttgttagtgtttaatggtcaaaatgtgtctcaatccaatgcatttgactaattataagagtttaagatggattcggagtgtttagacaacacttatatccattttctcttaaaagaggctcaaaccaacaaaaaaattgcttagaagcagtaaatagctttgttagtgtttctatggtcaaaatgtatcaaaacccaatgcatttaactaattataagagttaaatatagattaggagtgtttagacaacacatatacccattttctcctaaaa

SEQ ID NO: 167241 - DNA, 391 bp, Arabidopsis thaliana nossen
ttcccgggttgtgctcacccctccgatccaatctgttttcgatttttaatataacatctgtcgattctcagtgggtgcgtctcaatttcatgaggccattgtagccgataatgaattccgctttagatttagcttttccggctacatttccggttaaatcgagttctgttggcggacatcagattgcttcccctggattcaggtcccgactaagattgcgctctcttcctccttcttcatctatcaaggctgagtcatgtttaaaaagagacgtgcacaggcaaagaagcagtcttgagtcaatgttctgttatgataaaccaataccagaggaaataatcgaggagccagttggattatccatgtcagagagagagattggtgataatca

SEQ ID NO: 167242 - DNA, 401 bp, Arabidopsis thaliana nossen
ccggggcgtcccacgcgttcgacgtcatacactttaagctgttttcatcacatgaccatccagccctctaaacgtcaccgccatcttctggtcgtctaactccctcttctccttgaacacctcttgcttcccatcttcatatatttacatgaacctttcattaatagaaaccctagctagtaataaacacatattcatacaaatagagaatgagatagaggaccgcatgtgtagttccaggacttgatggccccgtgggagtcccagtcgccctcgtgaacggtgacaccttggatatgatggccaatggcgtcagggaagagttggttttcgctcttccacctcttgtagtggttcttcgctgaccctttcagaggaacttctgtcacgtatgtacctga

SEQ ID NO: 167243 - DNA, 379 bp, Arabidopsis thaliana nossen
gttgcatcaaatatgccatatttatctaaagctcgagaatacgctcttggatggaagtcctgctccacgtctgaaaatctgtgattttggttattccaagtcctctctgctgcactctaggcccaaatcaacagttggaactccagcatatattgcacctgaggtcctttctcgaagagaatatgatggcaagatggctgatgtatggtcttgtggtgtgactctttatgtcatgctggttggagcatacccatttgaagaccaggaagaccccaagaacttcaggaaaacaatacaagtaggtttcttttttgaagccatgtatctgcatatctcgctttcgccacatcctattcgtcaatgtgtgatcttgttatac

SEQ ID NO: 167244 - DNA, 384 bp, Arabidopsis thaliana nossen
ctttgttcaccatctttctctttctgtttaaaaatccaaatcttttaagaataaaatattgaaatgaaaagaagaataaacttaatttttcattatttcaaccgaattcaaaaaaaatctatttgcttttttaatttgtgtgatgcgggtaagtaaggtagaaccgcagattctaagagttttaataaaaaaatctatatttatttatttatatataaatatagatttctattcaaactaatatggaattcattttcattctgaccgaacctttacgcgtaaataaactattccattcatagagaaagaaaaggtatagattattatatactgactgaactatgactattcatgattccatcattgaatcaattacacaaacta

SEQ ID NO: 167245 - DNA, 263 bp, Arabidopsis thaliana nossen
  unsure (1)..(263): unsure at all n locations
acccacgcgttcgggaagttcattaagctttgttttcccaaagcaagagangctaaagggaagttggaagatacaggtgtgggggccaaaaagaaggcgagcgatatgactagtgcagctattgactaattctttaaatttccaggaggaagcagacagagagagtcagactgcgaaggagaaaagtaaagaaagtttcgagactgcaaaatcaaagccccatgatactttataatccaagaaagatatgacattttaagttt

SEQ ID NO: 167246 - DNA, 366 bp, Arabidopsis thaliana nossen
  unsure (1)..(366): unsure at all n locations
aaaccggcgggtgccatgcgttcgtcaaaatcttaaatcttgttttctattctctctaccgngancaagatgcagatctttgataagactgtcaccggaaagacaatcaccctcgaggtggaaagctccgacaccatcgacaacgttaaggccaagatccaggataaggagggcattcctccggatcagcagaggcttattttcgccggcaagcagctagaggatggccgtacgttggctgattacaatatccagaaggaatccaccctccacttggtcctcaggctccgtggtggtatgcagattttcgttaaaaccctaacgggaaagacgattactcttgaggtggagagttctgacaccatc

SEQ ID NO: 167247 - DNA, 323 bp, Arabidopsis thaliana nossen
caaaaagcaaatatcttgtaactcctcttattgccgtatcctatgccatgagagtccattcgagtgtggtttgaaccctggtcgatccatgtactatgtctcagccacgggttccaaagcacaactcctttctccatgtcacatagtaataacttatcgcaatcaaccatttttttaggtatctcatgagattctaaaccgggaatatctaaggttaactcacggaccactatcttaggatcgatgcttaccgaataaatcttggatttggttgctaagatgaatcgaaacgtcatcttgtggttattgatgaacgtcttatc

SEQ ID NO: 167248 - DNA, 368 bp, Arabidopsis thaliana nossen
  unsure (1)..(368): unsure at all n locations
agactctcttctaccncgctttttttgctgccgcagagatcatnggggagagttcactttgaccatggcgagagcaacaangttcgagttcagacacagccaggatnngctagggggttgtcttatggatttcccaagtcaatcaaggccgaaggatacggaagcttgtataagggtcttgctccactctggggacgtcagattccttacactatgatgaagtttgcttcctttgagaccattgttgagatgatttacaagtacgcagtccccaacccaaagagtgagtgcagcaaatgtctgcaactcggagtgagttctgtcggaggttacgttgccggagtgttctttgccatcgtatttaatcc

SEQ ID NO: 167249 - DNA, 378 bp, Arabidopsis thaliana nossen
  unsure (1)..(378): unsure at all n locations
cgggggcgtcccacgcgtccgaaactgtcccataggtttatgttacgaccggtacatttagggaagaagtgttcttttctcgacctcggggacgcgaanagacattgtctatcgctgaattaagttgtcctattttctcattcagtgtctctcttgttttctctaaaccttcatcgtagtacgttggctgtttcggcttctcaaaaccgtactcgtcttcttcatttggatgccgatgctgtttttatagtcctacaaggtaaaggagtgatcgagtttgtgacggataaaacaaaagaatcgttccacataactaaaggtgatgtggtaagaatcccttctggtgtcaccaactttatcaccaacactaaccagacg

SEQ ID NO: 167250 - DNA, 374 bp, Arabidopsis thaliana nossen
ttgcaattcaattcctgatctgatccgttcctgcttagatcggagcaaaacaatggcggagatggcggataaggcgaaagtggaggagatggattgggaaggtattgatggagttcgtatgacttggaacctttggcctcgcactaaggttgaagcaagcaagtgtgtgattcctctcgccgcttcaatttcaccgatccgtcgtcacccccttatccttgatctcccttatgctcctctcgattgcaagacttgtaaagctcttatcaacgccttcgctcgtgttgatttcgccgctatgaactgggtctgtcctttttgctatcataggaatcatttcccttctcattaccattcgatctctgagattaatc

SEQ ID NO: 167251 - DNA, 386 bp, Arabidopsis thaliana nossen
tcggaaagtctaacacttactaattaaaatctctttgagagcttcagcgatggtaacaatggcaatcgaggtgattcttcttgatttctggccgagtatgttcgggatgaggacaaggatcgcattgagggagaaaggtgttgaattttagtacagagaagaagatctaaagaacaagagtcctttgcttctccagatgaatcctattcacaagaagattcctgttctcatccacaatggtaaaccggttaacgaatctattatccaagctcagtacattgacgaggtctggtctcacaagaaccctatcctttcttctgatccttaccttagagctcaagctaggttctgggctgatttcattgacaagaagctgtatgatgctc

SEQ ID NO: 167252 - DNA, 388 bp, Arabidopsis thaliana nossen
  unsure (1)..(388): unsure at all n locations
ggtgagnaatcataattctatttttattataaatgtacggcagcnaccagggaatggttcattaaaaatggtggggcgactctantaaaattctatttttaacagccgnagaagagaggaaaattcagacaacgtgttagcttgtaacatctatctaggtgagtcacctcgagtgaccaatcaaatctatccaattagcgtttaggttgactaggtttcaagaacttcattttctttctcattagctaaggtaaacttaaaaaaacaatccgaaagtttaattggcttttgaagttttttggtatttgatatgagaataggaggttattacaaaatatatacattaagacaaagcaaaatattacagacgttatgtctatattggacc

SEQ ID NO: 167253 - DNA, 374 bp, Arabidopsis thaliana nossen
gagaaagaaactcattaacgccacgcctgtacaagagagagagagaataataagtttacagagtagagaagcttttaaattcgaatcaggggcaaatccgtaaaatattcctttttttttttcctttttcctcactactttatatctctaacctttaacttttttttttcttcttcttcttcttactcttcgtcttcttcttcctcctctgtgtctgttcatcggaaaaggagattttgtttttttgttttgtttgtgtggcggcgtagccatggcggagataagtcatcctccaatggaacagcttcaagaccttgaatattgcatcgactctaaccctccttggcgtactcttctctctctctcactctcta

SEQ ID NO: 167254 - DNA, 281 bp, Arabidopsis thaliana nossen
  unsure (1)..(281): unsure at all n locations
cccggggggacgcacgcgtccgcaaagtctaatttcacaaagttagagtttctcnaactagcttagctcaaggtggttgcttaagacatgaggaggatggcgtcttaccagaaccgtccaggatgtcaggccactgacgagtacggaaacccgatccagcagcagtatgacgagtacggaaatccgatgggaggaggaggatacggaactggtggtggtggaggagctacatgtggccaaggatacggaacaggtggccaagggtacggatcaggtggcca

SEQ ID NO: 167255 - DNA, 216 bp, Arabidopsis thaliana nossen
  unsure (1)..(216): unsure at all n locations
cgnttgctggaaactactactctcattacctttgtaattctatagctaatacgtccatcaaaccccaacttatgtaaagcacgcatctattaaataaaaggtccacacatcctctgcccgtttctctgataatgcatgttatctcgactgttcgcatgacctctatactatcaacacatcattcaaatctgttcacttataactttcgatagtatt

SEQ ID NO: 167256 - DNA, 369 bp, Arabidopsis thaliana nossen
ggatgatataatcttgtgatcgtttacttcaacttcgtttgaaacggagtgtgacgcaagaaaagatctaaacaggtctgttatgcatattctttcagttccttatcgtaactttgcatatatctgattgaaggcgtcttggtgttacaagtagcatagtcacgactatcttctttagtggatatcattcttaatgagcatggttttggagaatttagtcactgataggttgtgttttcctataattttcttagttaatattaatggtgattaaagtaccagaagatatattactgagaaatatacatttttagtataaagatgacaaattgcctgtaagtttagccctcacatcttgttgctcaattg

SEQ ID NO: 167257 - DNA, 355 bp, Arabidopsis thaliana nossen
ctcgcgtttgctatctacgactacactcgtcacaccgccggcttatctcaacatatcgccggcgtttttaacggccagagttggggtgagaagaggaagggctaacgttaaggctgtgagcaatagttcgcaaggagccgtcgatggaaccgtttacaaaggtgtttacggtccttggaccattgaccaagccgatgtcaaagaggttattttgtacagatcaggactagtaactgctgctgcatcttttgtagctgcttcttctgctgcctttttaccaggagactcttggttaagtgaaacaatcaagcaaaaccatgatctgttttactttggtggtgctaggggtttgggg

SEQ ID NO: 167258 - DNA, 398 bp, Arabidopsis thaliana nossen
  unsure (1)..(398): unsure at all n locations
cgcgaccgncagatagtttttgctccattttagtttagatgacccaagcgctnaaaggctggttggaatctactgtggtacaacatgttcttgctcangtttggtctcctgtcaaaaaccgnggacgatatgtcctcacaacttcaggacagccattttttcttggtcccaatagtaatggccttaatcaatacaggatggcttcattgacgtatatgttttcccttgatggtgaacgggacagaaagctcaggcttactggtcacgttttcaggaaaaagttacctgagttgactcctaatgtgcagttttactccagcaaagagtttttaaggcttgatcacgcctttcactataatgttcatggaaccttggcttttcctgtatctgaaccatcc

SEQ ID NO: 167259 - DNA, 337 bp, Arabidopsis thaliana nossen
  unsure (1)..(337): unsure at all n locations
cgctactnnagttttctcagtgttattatcacacggcagcacncanagtggggggttggcctcttcttgttgtggaaactctggncctaattggtttaatcaaagagccagcggttaaatggggaccaacatttccatattctgcacctaatccgtcgccaaacaagaaatatgcttcaccgatgcaacatacaacatcgatcaagaattatacaccgacaccatacgaccatgcaacaatgttgcatctacctccaatcaaaatttaccaccatccgccggataattattcttcacccaatcattatccacccccaaatcagaatgatcctccaac

SEQ ID NO: 167260 - DNA, 355 bp, Arabidopsis thaliana nossen
agattttaaaatccctacttcttcattatcatcccttcaacactccttggtagcttttctccgccttagctgggtgcttcttctctctcgatttgctctcacggaagattcttcagaatatctgatccgatatcagaagccccaagttcgcttgaattccgtctgagcaatggctttggtcttgcacacgtacaagggaaacaaaagtgctgagaaggcactcattgcagcagagtacgttggtgtgcagatcgatgtgccctctgactttcagatgggtgtcactaacaaaacccctgcgttcctcaagatgaaccctattggaaaggttcctggacttgagactcccgagggt

SEQ ID NO: 167261 - DNA, 351 bp, Arabidopsis thaliana nossen
ctaagtttgtgctgcaagaacttcatttgtaatgctagcgtctcaaagggtccagctcgacttgtatggtatggtcattgctgctgggacggtccgcatatcaaacgtacctaaatacctccctgacgcatgatggtgttctcgattagctcatgacactgaagcagaaaggaagatgaacgaaccacttcgcaatgtatataatgacttttgaacgggaaccggcggagaaatatgcgctgaccagtaccacgttacaagataagaacatgatgctgatgctatccatagctccgagcgtggtattgccacacaaaacaactcatttgtttgcttgggaaattggtcctg

SEQ ID NO: 167262 - DNA, 276 bp, Arabidopsis thaliana nossen
gtgatttgactattacttatgatcgcgctactattcttaggatgtcgggggtcgatcaccctgttgcgaaagttcttgtccagatagctgaactccaagatagaaaaatcagtgatgggactacatctgttgttattgaagctgctgagttgctgaaaagggcaaatgatttggtcaggaacaaaatacatccaacatcaattatcaatggatataagcttaccatgaaagaatcttgcaaatacctacaataaaaatttgtgaccaaggtccaaa

SEQ ID NO: 167263 - DNA, 306 bp, Arabidopsis thaliana nossen
cgtacgaacttggtggatctgtcatcgatggcctctttgatgctcaacggggccgttaccttccccaaagggtgagggtcccctggttccaatttgcatgccagatcgattcctcggccgaccttactctcagttacccgaacctccacacctagactctcggtggctactagatgcagcagcagcagcgtgtcgtcttcccggccatcggcgcaacctaagttcattcagcacaagaaggaggcttactggttctacaggttcttatccatcgtatacgaccatgtcatcaatcctgggcattgg

SEQ ID NO: 167264 - DNA, 375 bp, Arabidopsis thaliana nossen
gacccacgcgtccgaaaactaacaaaagatcaaaatcaagttcttcactgttgataatgtctacgcaccggacagattattcggtgcaaagctgctgtggcatgggaagccggaaagccactggtgatcgaggaagtggaggttgctccaccgcagaaacacgaagttcgtatcaagattctcttcacttctctctgtcacaccgatgtttacttctgggaagctaagggacaaacaccgttgtttccacgtatcttcggccatgaagctggaaggattgttgaaagtgtttgagaatgagtgactgatcttcagccaggagatcatgtgttgccgatctttaccggagaatgtggggagtgtcgtcattgccac

SEQ ID NO: 167265 - DNA, 355 bp, Arabidopsis thaliana nossen
ctcgctctcgccgctcgcgattccgtcgtcctatcaggagggccagacgatgctgtcccacttggccgacgtgactctctagcgttcgcgagccaggaaacgacgttaaataacttaccaccaccgttcttcaacgcgagccagctcatcgccgacttcgccaacagaaacctcaacatcaccgacttagtagcactttccggtggtcacaccatcggaatcgcgcattgtccgtctttcacagaccgactctacccgaaccaagacccaaccatgaaccagttcttcgccaacagcctcaaacgcacttgtcccaccgcaaactcgagcaacacgcaagtgaatgacataagga

SEQ ID NO: 167266 - DNA, 406 bp, Arabidopsis thaliana nossen
  unsure (1)..(406): unsure at all n locations
cgcccgcaggaccgnaacnanntnnggaggcgacccacgcgtgcgctcaatctttctctcctgcgttttaatttctctcggattgaaatcatcggtggctgccaccgcaaccgggaagctccctcagctcaaatccgccgtcgatggacttactgagatgagcgagaatgagaagagtggattcatcaacctcgtttcacgttacctcagtggtgaagcccagcacattgaatggagcaagatccagacacctactgatgaaattgttgttccttatgataaaatggctaacgtctctgaaaatgcttccgagaccaaatatctgttggacaagcttgttgtgctgaagcttaatggaggtttgggaaccacaatgggatgcactggtccaaaatcggttattgaa

SEQ ID NO: 167267 - DNA, 402 bp, Arabidopsis thaliana nossen
  unsure (1)..(402): unsure at all n locations
gcggcaccggnnccgaaaacccgggnncccacgcgtccgcttcgcttaattctccggcgtatacaagtcgccggcaaaaatgtcgatgtcgaagagctccaagatgcttcagttcataaactacaggatgcgagtaacaatccaagacggaagacagctaatcggaaaaatcatgggggtcgatccgcccaatgaatcttgttctcggcgactgcgaaaagtttcgaaaacttcctccggcgaagggtaataagaagacgaacgaagaaagagaagagcgtcgtacgcttggtttggttttacttagaggagaagaagggatttcgatgactgtcgaaggtccaccgccacctgaagaatctcgcgccaaatctggatctgtaaccgctgtggctggtcccg

SEQ ID NO: 167268 - DNA, 257 bp, Arabidopsis thaliana nossen
  unsure (1)..(257): unsure at all n locations
gcggcgccgagagaagggaaaagaaaggagacangncaatcccaatgggagggaaggggggggggggggggaaataaaccctatactccgaattaacagcagggggtgatggggtttgacgtaaagcgcaagggaaggggtaaagggggtgggttgaagacaccaaaaggcaaggtagaaggcacagggaaggcggagtacgaaggaaagccagcgaatttggggagtgagaatgatcaaaccaagagggagaaggg

SEQ ID NO: 167269 - DNA, 358 bp, Arabidopsis thaliana nossen
  unsure (1)..(358): unsure at all n locations
acccacgcgtccgagtaaaagcaacagaaaatcaattttaccggaaagctagcgggaagcagggggctggataggggaggggaggcacaccanatgtgccctacggaaataccttcaaaatagaggtgctttacaagatactacctgaaacagagccaactgctggtggggaagcttctcgactgatcatatcatgggggattcaatttagtcaaaggactataatgaaagggatgattgaaggaggtgctaggcaagggctgaaagaaagctttgaacaagnttcgaatcagctggctaagacttataaaactcttgatccggcgtggggattggacaaggagcanggtatagcaac

SEQ ID NO: 167270 - DNA, 324 bp, Arabidopsis thaliana nossen
ggaaaagaacaaaatcaaatctagcaaagaaaatggatacagaggggcagaagaggggggcggggggggcaaaaccaagcacaggagccaataaggagtcaccaaccagaggaagaagggcatcaggaaaaaggaccaacaaaagggctgaagaaagggaaggaaaaagcaaagaagagcaagagagggcatactaaacaaggacaagggcatgagcacgatcggggagaacacatccctgacgagcacgagctagaccaagaagacgaggaaggaggctacaacgacaaccaacaccacgggggggcaccagcacgaggaaaa

SEQ ID NO: 167271 - DNA, 348 bp, Arabidopsis thaliana nossen
tttataaaactagtcatttaattttgtaaagacaacattggagaaaagagaaaattgggggggggcaacaaatgaacgaagatagtaatcaatggccggccgggtctgaagaatcggttactttgcaaatctgaaaaacgcctaaaagagagagagaaacaaagtaaatataggggcatcatcggaataaaagaagaagaacgaggctaaaacagtaacgcaccttcgtctacttaaatacaagcgaaaacccaaatcgggtgtcactccccagcctacaaggcgactcagtctccggctagtgccactcgggaaaatcacgataactttctccttccatgtatcacg

SEQ ID NO: 167272 - DNA, 377 bp, Arabidopsis thaliana nossen
cgcgtgcgcttgacacttaattcacagtgtgaacaaaagaactttttggaaatccgacccttaaatactacaacggggcgcttttttgagagaatgagtttaaggcaatttgaaatatatcaactcttacaaaccagtggaaagaccagaggtttttgaggtgttaaatgtgcattcagaggaagttagtgcagtatcaggagtcgacacgagttcaactcgaccaaaatgctcgaccagccaaacaaaactcaaaatatatgaataattcaaaatagatatataaaatattttaaaaataaatataattttttatgatatctgagtaattaattctaaaaaattttatagtaaataaaatatttagttggaatgat

SEQ ID NO: 167273 - DNA, 362 bp, Arabidopsis thaliana nossen
  unsure (1)..(362): unsure at all n locations
gcgggaatctgatatcaacattaattctccggcaagatttnnangggaatcgggagctgggatggaggaagggtttccgacaagaggtgatgtgaaagtagagagtggattgggaagagacttaccgacgggaactcatgatcagttctcaccagaactatctcgtcccaaagagagagatgattctgaggaaaccaaagatgagtctacacatgagacaaaaccaagcacctacacagagcagttagcttcagctacatcagccataactaacaaagctatagccgcaaagaacgtcgttgcctcaaagctaagttacaccggaaagaatggcggcgggcaaagcgagagccctgtaaaag

SEQ ID NO: 167274 - DNA, 368 bp, Arabidopsis thaliana nossen
cgtccgctattcttagcaaaaatacctttattatttacaaaaacactaaagtaagtattatagatactcctggggattctgactttgggggtgaagtggaacgtgtcttgaacatggttgatggagtgcttcttgtggtggactctgttgagggaccaatgccccagacaaggtttgttttaaagaaggctcttgagtttggacatgcagtggtcgtggtcgtaaacaagattgacaggccttctgctcgtcctgaatttgttgtcaattccacttttgaactattgattgaactaaatgcaacagatgaacagtgtgatttccaagcgatatatgctagtgggatcaaaggaaaagcggggctttct

SEQ ID NO: 167275 - DNA, 375 bp, Arabidopsis thaliana nossen
ccacgcgtgcgccaaatcacaaaaacatttatttatctagagctatatagctaagggcaggttattggcgaatgaggagggggaatttcatgtgtcccacttttgttctgcctaaatttagaaatttattgtttttttttctacgcgagcctaactcgttttactcttctgaaatctaaactcttcgaatttaattgaccactccactaaaagagtcttaaaaagtcaaatatttttcttattacgacctaattttgaaagaacttcttcgttgacctatgcatcattctctcgtctataaataccattcacgtcgttcgttactcttcatctaaaaacattcatacacatacaaacacacgaaaatacatccca

SEQ ID NO: 167276 - DNA, 363 bp, Arabidopsis thaliana nossen
  unsure (1)..(363): unsure at all n locations
ggattctcgctatcttgagttttttagtggcagtccctgaagggggagaagcaatcggttgggggtgggacacattcccggttttagtcgatgtactgaactggactgactcaccggggtgccaagaaaaggcgacttacattctaatgttgatggctcacaagggataccgagatagacaagtgatgattgaggcgggaatcgaatcaacgttgctcgagttaactcttttaggaagtgcactggcacaaaagagagcatcaaggatagtngagggnctganatnagacaaaggaaagcaagtcctggatagtacaggaacatgcggagccgtatccacaccgatatactggaccagagaca

SEQ ID NO: 167277 - DNA, 337 bp, Arabidopsis thaliana nossen
  unsure (1)..(337): unsure at all n locations
acccacgcggccgagcaaaggcnaanancacaaagaaagaggttgtttaactagcggggcaggaagaggggcgggggaggggaaaaacaaggcntcttaccagaaccggccaggagggcaggccactgacgaggacggaaaccctaaccagcagcaggatgacgaggacggaaaaccaaagggaggaggaggagacggaacaggcggagggggaggagcaacagggggccaaggagaccgaacagggggccaaggggacggaacaagaggccaaggggacgggaccggagnccgaggatacggaaccgggaccgggacagaaggcagcggaaccggc

SEQ ID NO: 167278 - DNA, 373 bp, Arabidopsis thaliana nossen
acgcgtgcggaggaaagagaaataaaacaaaatctgtttgaggatcagcagcagcagcgggaggctaatggtgagagggctggctaagttcttggaggaaccttttgagcaatttgctgatgataagggcatgcagataaggagtcaaggcatcaatttgtcaggtgcgggcgatacactctgcgaaaatatgtatgaatgcattgagaatgacttgggggggtctctgcaacttggcatccacaacattactccatacagatcaaacggcatagaacgagcatctgaggtttatagttcccagaattccaaggaagctggtggtcaggcttcggattggggagggacgtccaggctcgatcaagctttggag

SEQ ID NO: 167279 - DNA, 368 bp, Arabidopsis thaliana nossen
  unsure (1)..(368): unsure at all n locations
acccacgcggccggctacttttgctcacgcagggttaggaacacaaggaagcatttngagggggagaaaggccgggggggggggcaacaaacactgatcctaaatggggacatcataggccgccgggtaaatggggaccaaaaggtccataaacaccacctaaaccgccgccaaacgagaaagagcctccaccggggcaagacccaccaccgaacaagaaggatccaccgccaccagacgagcagccaccggggaaggatccaccaccgaacaagacggaccgtcaagggccggtgaagnagcccccaccagaacagaagccaccgccgaagaagaagaaagcgggcccagaacaggagccaccgccg

SEQ ID NO: 167280 - DNA, 362 bp, Arabidopsis thaliana nossen
gaaaatttcaagaaccctattttataacgataatgggttcgagaggtggggcttccttctttggggtgggaatcttcacggtcatcacattgcctcccacgatccaagcttgcactccttgtactcgtcctcatcctccggttccgaaacctccacaacacggcggtggtggaggtggtggtagcaagccgcctccacatcacggtggaaaaggtggtggtaaacccccaccccacggtggaaaaggtggaggaccgccgcatcatggtggaggaagatgaggaggagggaaatcaccgccggttgttagacctcctcccgtagtggtgaggccaccggcaatcataagacctcctccggtc

SEQ ID NO: 167281 - DNA, 374 bp, Arabidopsis thaliana nossen
  unsure (1)..(374): unsure at all n locations
cccacgcgtccgggcgtcatcaaccgctttgatttgtgataccgaagcgtggaagggttggaagggacatgtagagagaggtgaaaaagactcatttgcgtgatttgatgagtgatgctaatagatgccagtccatgatgatggagtttgatgggttgctgttggattattctcgacagcgtgcaactggtgagacaatggacaagcttttgaacttggcaaaggcttctcaattgacagagaagatcagccgcatgttcaatggggagcatattaacagtacatagaacaaagcagtncttcatgttgcgctccgtgctccaaaggatgcagttatcaaggctgatggaaagaatgtggtaccagaagtgtgg

SEQ ID NO: 167282 - DNA, 376 bp, Arabidopsis thaliana nossen
gcgggcgctcaaaagcctatttgggggatcattaaccttctatcatcaccatggagccgtacaagaaggggccggggagcgcgtacaacgccccattctacaccacaaacgggggggctccaggctccaacaacatctgttccctcaccatcggagaaagagggccgggtcttcttgaggattatcatttgatcgagaagggtgccaatttcaccagagagaggatccctgagagagtgggtcatgccagaggaatcagtgctaaggggttctttgaagtcacccatgacatttcaaacctcacttgtgctgattttctcagagcccctggtgttcaaactccagctattggccgtttttccactggtggccacga

SEQ ID NO: 167283 - DNA, 351 bp, Arabidopsis thaliana nossen
gccacattttttttcatcgtttttgaccacatcgtggtgttttcgtgtttgggggtgaaataatcctccgctccttcttctcatcgatttctccgatcgcgattatggtttctcggtctcctctctcgctgtggattttgactccgagagaaggtttgattttcggtggatttcatttgacagacatgtcagacgctctttctgctattacggccgcagtttatcgcaatctctccgataaactctatgagaagcgccaagattctacgcttgagcttgagaatattgggaagaatctaacttctttgggtgatcatgacaagatctctaaagtcattgagatgttgatta

SEQ ID NO: 167284 - DNA, 336 bp, Arabidopsis thaliana nossen
  unsure (1)..(336): unsure at all n locations
cgcgtgcgggcgagaggaggggaanagatttcctatataatcaacagatggaattaaggggggggcaagagggaggagcggggggaagcctaactgacnttnacatgaaaaacaaggaaacgcaaaagagtgctccgcgcgagggggagacaatgggagaaatcctcattaaaggaaggagcataatgaaagggtgtgtaaaaaatcccaaagctacattggaggcatttaaacacggatgggtcaacacaggagatggatgtgtgattcaccctgatgggcgcgncgaggacaaagaacnnggaaaagacataatcatatcgggaggcgaaaaca

SEQ ID NO: 167285 - DNA, 233 bp, Arabidopsis thaliana nossen
  unsure (1)..(233): unsure at all n locations
gacccacgcgaccggagcagcnncnacacacgcgcaagcacaccgagcgattcttccgggggcacaaaggcagggggggggcacacaaaacactcatgggtttgataacaaaccctacccggttgagtctcggcgccaccagctgcaaccacgggacaacaatctccgggcaggaaacaggcgcggagaacaatgagagacaagaatctgaaggatcaggtaaagagcaaggg

SEQ ID NO: 167286 - DNA, 369 bp, Arabidopsis thaliana nossen
  unsure (1)..(369): unsure at all n locations
acgcgtgcgaactaatctaaaccagcccattatttatatgattccgtatgccaaccagggaacaacttatgagaagggaggacagccaatccgaaacgtcacgaaatccccagcgcttcggggatgccctcagcgacgaggaacatgtactcgggtgtatactatcacccccaaaaaaccaaactctgctttacgtaaagttgccagagtacgattaacctcgggatttgaaatcactgcttatatacctggtattggccataatttacaagaacattctggnntcttantaagagggggaagggttaaggatttacccggtgtgagatatcacattgttcgaggaaccctagatgctgtcggagtaaa

SEQ ID NO: 167287 - DNA, 372 bp, Arabidopsis thaliana nossen
  unsure (1)..(372): unsure at all n locations
ggacccacgcgtgcggagattngctactctagtttgctgctggctataagcatgtcgccggcgggggaaatacatgggggggggggcaaaacctaagtttatgtaaaagctaatcgaaaaatataggaattagtacgcaagagatcgatcaaaacctcacctgaactactaccggtggaatctcaagaatattccgggcacctggaacggcgtaaacaagttactcgagcgtctccattctattctctgagatggcctctttgatcggatctatcccacaggtagcctcaggtgccacaaccactacaccttctccggggcaattgacggcgatcttcccttccggactgatcggcagccttccggcgacag

SEQ ID NO: 167288 - DNA, 213 bp, Arabidopsis thaliana nossen
actatgtgttgagaccaaacggcgagcgacaaagaagcggggaaggatcaataatcgactgattgagcaaaggagaagatcggtctcaagcacgaagacaacatccaacccactcacaccaccacgaccgttcaagacgacgcttggagagcgagtcaaaaagccgaggacgcaaaggaggcggctaaacacaaagcataggaagcggttgga

SEQ ID NO: 167289 - DNA, 373 bp, Arabidopsis thaliana nossen
cacgcgtccgcttttctttttcacttttgggaagctctaagagctgagaggagtgtgagagagaaaaggatctttggagtcgccggaataatttgtttaaccggagctctgtctttgactctacgcttctctctcttcttcttccttcttcgtcttcttaatcgctttctgctctgtttttctcgttcatcaagctacatctactagctctctcagtgattgatttctcacagtttcatcgatttccatgcgtttaagacctaaaaggacttgttctggggtaaaggacttttcttgttcttgagagagttcattttgaggcttttctgggaattttgagaggttttttagggtttaagggggtttggttttg

SEQ ID NO: 167290 - DNA, 375 bp, Arabidopsis thaliana nossen
  unsure (1)..(375): unsure at all n locations
cgcgtccgcggacgcgtggggcgataggtataccttgaaaagagaggaagaatcggggtggcagcatgaccaccaggagggggaacattaacctctgcatatgcaagcattcgaatctaaacatcagaagctataacaacacataccattaatatcttgtttgaagcagatagataactaagtggtaagtattcagccaaagatcctaggaaaaggccaagaaaagacaataagaggaacctgcaacattgacatccgattttccagcatagaaagggcgaggcctggcgacatcaanagtggggacaccgaataatttcttctcatcataggtaccagccttcttaaaaatctcagctgcaattggaacattgg

SEQ ID NO: 167291 - DNA, 370 bp, Arabidopsis thaliana nossen
  unsure (1)..(370): unsure at all n locations
gcgtgcgcttttctacagccgcatcatttttctcccttgtgcgatatcgtttgcgggagatttgtctgagaaggggctgaccatgggtaaagagaagtttcacatcaacattggggtcattggccacgtcgattctgggaaggcgacaaccactggacacttgatctacaagttgggtgggattgacaagcgtgtgatcgagaggttcgagaaggaggctgctgagatgaacaagaggtccttcaagtacgcatgggtgttggacaaacttaaggctgagcgnnagcggngtgtcaccattgacattgctctctggaagttcgagaccaccaagtactactgcactgncattgatgcgtcctgggcatcg

SEQ ID NO: 167292 - DNA, 321 bp, Arabidopsis thaliana nossen
  unsure (1)..(321): unsure at all n locations
acccacacgtccaagcganncncactaaaatccttttacacatcgcctttatctccttctctagatctacgcactagggctgctaacaccaatnttaatgctagacaaatcttccacagtcttggtaatcccaccgttgaggttgatatccacacttcaaatggtattaaggttacaacagcatttccaagttgagctaccactggtatctatgatgctcttgaacttagggatggacgatctgactaccttggaaagggtatatctaaagctgttaacaacnataacgacagcatcntgccaacacttattagaaaagac

SEQ ID NO: 167293 - DNA, 332 bp, Arabidopsis thaliana nossen
aatggatgtatatatacataacataatataaatttcaaacttcgagacgtttttttgaaaaggggagggataagtggatctaacgggtctggaccttttgagacatggccaaaacgttgctacaaagcttcttcataagatcatcaagagacgccgtcggcgaatcaacatcaggaatatccacgaaattatcagaacaagtcgacacatcggagatggctgcactcaataccgaatccaatctcccgtaatctccctcctccatgggcatcgtcggatgttcaagacctgagatcaacgaatcgtaattctcgacgcaaacactcatcggc

SEQ ID NO: 167294 - DNA, 270 bp, Arabidopsis thaliana nossen
  unsure (1)..(270): unsure at all n locations
acgcggccgggggaacanaaaggggncagcagctatggaaggaccaacaacatgcgggcaagacatggcggatttgaggagggacccatcagctgtgaagaacagtggggatcatcagaagatttggggcaacgtacttggcatctcaaacaagacgtgagagtgggatcgagacaatctccctgcagcatactcaggagacgagacatgaaacaggaatgcagaaatgggacatatataatcaaagaacatgggatctccaacccacac

SEQ ID NO: 167295 - DNA, 326 bp, Arabidopsis thaliana nossen
  unsure (1)..(326): unsure at all n locations
gcgtgcggaaactaagctnngaagacatttaatattccaccagcatagaggacaaggggctgaggaggactttgggggcgctagcttgtgggaaagtccntgtcctgcagaagaatcctaagggaagagatgtagaagacggtgatgaatttgaatttaatgatgagtttgcagctccgctgtatcgcattaaggtaaatgcgatccagatgaaagagacagtagaggagaacacaagtacaacggaaagagtattccaggaccgacaataccagatggatgcgagcattgggcatgagannaagacaagaaaaggcttgagccat

SEQ ID NO: 167296 - DNA, 248 bp, Arabidopsis thaliana nossen
  unsure (1)..(248): unsure at all n locations
cgacccacgcggccgaaaacagangancggcgaaaataaaaaccggccacatccaacggggcaggtcccacagggggagggggggaacaatccaacggccacaaactcttcaccattctcatccgacaaccgtaacggcgtgaacgactacccacacactccgacaccggatcacgacaccagcgccactcacttccaggaccgaccggcaaacaagataacaaacgactcagactcatcaagcggcg

SEQ ID NO: 167297 - DNA, 257 bp, Arabidopsis thaliana nossen
  unsure (1)..(257): unsure at all n locations
gcgggcgggcgggcgaaangcaatacccatgttgccaaacgccnnaatttancttgggaggcgacggaggcagaggggtcancaaaagctgaancangaggagacggagaagaagaatagaaggatgaaacatatgaaagggaagtggagcagccccatggggcgaaattcaggaaaggaagagaggggggcacacacagagggagccatcttaccagggggagcagctgacaaaaccggaaaaggcaccgggggcg

SEQ ID NO: 167298 - DNA, 360 bp, Arabidopsis thaliana nossen
  unsure (1)..(360): unsure at all n locations
gaacagtggactntccattttttttctcacgcacaaccatctttaagcggggggtcacgaccggggggtgcggccatctacttatangcctaccaccatacacctaaccaacagaacaaggaagcaaccgcgggagtgaggcaacagaacaaaccagcctgagagatcaacagtgatgtgcattctgcatcatggggagagacttaccgggtcataactctctgccaagatataggccaaagcagcatcagtgactgccaaagcgtctcctgtgtcagcgggccgggcaacgacgtctttcatttgaagccgagctactttcctcaactggtcatgggaaagggggcccaacaccacaat

SEQ ID NO: 167299 - DNA, 376 bp, Arabidopsis thaliana nossen
  unsure (1)..(376): unsure at all n locations
cgcgtccgaccacttccacctctctctccttctcctctttccgccccttctcctctggtccgtccatggctggcgcggccgctgccgccgtggaatccgtcgtctccgacgagactctttcctcgaatcctctcttgcaggacttcgatttccctccgtttgattccgttgatgccagtcatgttcgtcctgggattcgtgctctattgcagcatctcgaagctgaattggaggagctagagaaatctgtggagccaacatggccaaaactgggggaaccattagagaaaatcnatgatccgttaactgttgtttggggaatgatcaatcaccttaaagctggcaaagacacacctgagctacgtgctgccatcga

SEQ ID NO: 167300 - DNA, 378 bp, Arabidopsis thaliana nossen
gcgttgttcttcttcatctttattacacatttttttcaaggtcttccaaacgatgtcggttttcgaatcggggacttcgaacttccacgtctacaacaaccacgaaatccaaacgcaaccgcaaatgcaaacgtttctgtcggaggaggaaccggtagggagacagaactcgattttgtcactaactcttgacgaaatacagatgaaaagcggtaagagctttggggcgatgaacatggacgagttccttgcgaacttgtggacaaccgttgaagaaaacgacaacgaaggaggtggggctcacgacgacggagagaagccggcggtgctgccacgtcaagggtcgttgtccctccctgtgcctttatgcaagaaaac

SEQ ID NO: 167301 - DNA, 365 bp, Arabidopsis thaliana nossen
  unsure (1)..(365): unsure at all n locations
ggccgggccggaattannnnnnaaccacgcgtccggtcatgggttccgttaccagaaagggtgtacaagaaattgccccacaggactcggatgctcagatacactgtccctctccccatgctcgcatatcctctctatttgtgctacagaagtcctggaaaagaaggatcacattttaacccatacagtagtttatttgctccaagcgagagaaagcttattgcaacttcaactacttgttggtccataatgttcgtcagtcttatcgctctatctttcgtcttcggtccactcgcggttcttaaagtctacggcgtaccagacattatctttgtgatgtggttggatgctgtcacgtatttgca

SEQ ID NO: 167302 - DNA, 391 bp, Arabidopsis thaliana nossen
  unsure (1)..(391): unsure at all n locations
ccgggccggaaaacccgnnaacccacgcgtgcggaggagacaaacgaggaaagtgaaaaagatcccaagaagagtatgcgaggcagatacatggccggcaagaggcacctgacagaaaagcacgcagaaggagacatagatgctgagttaccggaaaaagaagtaccaagaatccaggggaagaaacacgctctgccggagctctgcacaccagaaaacagacctagagtgaccaaggcactagagcatcagataatcgaaaaaccaaagatacagcagcgcagcacaaaagaaaactactatgagccactgcgacgggattcaaacaaccaggaagaaacagagaacatgccagacccggaagacactaggatggaagaggaagagcaga

SEQ ID NO: 167303 - DNA, 145 bp, Arabidopsis thaliana nossen
ttagattgtttaatgcctgggtgggtttggaggcttgtgggggggcataccttaaaaacacttcttcttttgccgtccggccattggtgcacaaatactcgattgttgggtagtaagcgctgggctccatttccagagtgaagta

SEQ ID NO: 167304 - DNA, 357 bp, Arabidopsis thaliana nossen
ttccttttgattttacctacttatatctcgtcttcttaactgacttccgtgctctttaaaaccttttgtgaagtaaataattggtattttcgttagttataaagtttgtaacatactctggggtggataagttattctttttgtttttaatcctgcttaagattattggatttatgtgctactttttttttggtttggcatgggattatggcagcatcaacgacgtgttacgttggaacaaatccatgactggtgaacgtatcgggaaagttttttacggattgtaatgaaactgacaccgtctggacttggaaccaactgcagcgaacctaccaaattatgggctgcttatgagat

SEQ ID NO: 167305 - DNA, 372 bp, Arabidopsis thaliana nossen
gaagaagagagtatcgttgtgtggtttggggatcgcgaaaatggaggttgcaggttcatcgaagaagatgatcgcaacgcaagaagagatgtctgcagctaaaatagcacttggatctagagatatgtgcgctcatctcttgattccgctcaacaaatgtcgtcaggctgagttttaccttccatggaaatgtgaagacgagcgtcacgtttatgagaagtgtgaatacgagcttgttatggagagaatgcttgcgatgaagaagatccgtgaagaagaagctttggctaaacagaataaactacaaggaaacgctgctgttcctcttatccctaaaactgctaatgcttaagattcgattccttctccaat

SEQ ID NO: 167306 - DNA, 384 bp, Arabidopsis thaliana nossen
cccacgcgtccggtaaaattgaaattcaaatttttgccggagctccatcggataaaacagtgggcgacgtgcggtgatggggtctcacagatccggtctccggcgagttctgttattgtcgttctgtgtcgctgggatctgggcagcttacatataccaaggcattcttcaagagaccttgtcgacgaagaaatttggtgaagatgggaagagattcgagcatcttgcatttctgaatttggctcagaatgtaatctgcttggtttggtcttatataatgattaagctctggtccaacggaggttctggtggagccccatggtggacgtattggagtgctggcattactaataccattggtcctgctatgggcattgaagcttt

SEQ ID NO: 167307 - DNA, 372 bp, Arabidopsis thaliana nossen
cttgactggccgaaagatcgaatactggttcaggttctcgatgattcggatgatgaaagcatccaacgggtaattaaagctgaggttgccaaatggagccaaaagggagtcaacataatctacaggcatcgcttggttagaactggatataaagctggtaacctcaaatcagcaatgagctgtgattacgttgaagcatacgagtatgtcgcaatctttgatgccgatttccagcctactccggatttccttaaactaacagttccacatttcaaggataacccagagttaggtctagttcaagctagatggacatttgtgaacaaagacgagaacttgttgacccgtcttcagaacatcaatctgtgtttt

SEQ ID NO: 167308 - DNA, 378 bp, Arabidopsis thaliana nossen
tatgaaacaggtagctggaaaattaaaattggaattggctcaattcgctgaattagaagccttttcccaattttcttctgatctcgataaagctactcagaatcaattggcaagaggtcaacgattgcgtgagttactgaaacaatcccaatcagcccccctcacagtggaagaacagataatgaccatttataccggaacaaatggttatctggatggattagaaattggacaagtaagaaaatttctcgttcaattacgcacttacttaaaaacgaataaacctcagtttcaagaaatcatagcctctaccaagacattaaccgctgaagcagaaagctttttgaaagaaggtattcaagagcaactagaacgttt

SEQ ID NO: 167309 - DNA, 371 bp, Arabidopsis thaliana nossen
  unsure (1)..(371): unsure at all n locations
cggaaatttgcatatattttattttatgacctaccaaannctattggtgaatttctaaaatatttgtttgttttatccccattttttatgaattgagccaaaattcattacaaaaattctattaaaggaaatcattgcttcatctaatattataatataccattcaattagaagtttactagattgaaaatttattacattcaaaaaactatcgatcctatatcacattcagtaaaaatttatgatacttgtatacaatgtactcaatatgtccgaacattccctacagacatattataaattatacctttgcatggatgttaaccttaacaaataagttttgctccaagaaccaatgactgttttagttg

SEQ ID NO: 167310 - DNA, 416 bp, Arabidopsis thaliana nossen
  unsure (1)..(416): unsure at all n locations
gaacaaaaaacccgggtcgttnnangncgtcgctcatgtatcttattccattttttaatatgactgcaccacnagcagagggcagattggcccaatttgtggttaatacttgaaaggggaaaggataacacttctcattcgtagccaatgtgagaagacaatgtatagacttcaatgtttaaagaaatggtgtccaaatctatctgacgatgatgttcttgacaaatgtactttatgccgacaaaattgtaattgcagcaaatgcttgcatttgaatggtgtaattgagacatccaagagggaactcgccaaatctgaaagacgtcatcatatccagaatttgattacgttgatgcttacttttcttaataaattatccatattccagaagctttatattgaattttaagcaactt

SEQ ID NO: 167311 - DNA, 401 bp, Arabidopsis thaliana nossen
  unsure (1)..(401): unsure at all n locations
gaaaacccggggcgatnnagnatccggaggagtggcttcatcaatttttttattatcttccaagacactgcttcgggctgttggaatacattgggctgcaaatgaaaccaacaccttaacatccttagtcaagtacggtctatatcgagggtatctggaactacattgatttgcaagctcaactactatgaaaatgcttctgagagcctattcgtcgacctacattgttacaaatatcgcctttgtgaatgaacctctgttgataaacatcttgctaaaccatgaagcaagatgtacttttatctaaaagcgagttacattaaaagctttaccacccgttagtagctccattgaggataactacaaagctgtaaacaacaaacctttgttgtaacttttat

SEQ ID NO: 167312 - DNA, 387 bp, Arabidopsis thaliana nossen
gaaaacccggggcgaccaatcgtccggacagctcgtggtcatcccacatggtttctcatacgttgtccaaacccacggtggcaatttagagtggtgtctgtttcaaaacaaatgaaaacgcaatgatcagcactttggcgggtagaacctcactcttgagggcattgccattggattttatatcaaatggtttccacaatctctcccgaggaagctaggaagatcaagttcaacacacttgagaccactttgacccccgctgccggtagtcaacaacaacagttgatctacgagattgtccaggcttaaatcaaaacatttttctttttcttaataaactatggtcagtttgtaatcacatccctttacctttaacgtacgtgtaaa

SEQ ID NO: 167313 - DNA, 355 bp, Arabidopsis thaliana nossen
  unsure (1)..(355): unsure at all n locations
aaaaaggaaagggcaaagcggggacacaacaaaaaaaaagggggggagaaaaaagggagggggggagacaaacaaaaggcggagagagacgaggaagcggagaggcaagcggangaggancggcaggacaaaaacaaanacgggggagcggaggagacaaagnagaaggggacggagagaacaacagaacaagcaccggagcaagaaaggcacggggaganaggaacaggganaaggggggaacaaggaacggangagcangcgagagacgcnggaggnggaaaaacccacgaagcgggggaggcaaccaaagaaggagcgcagaaaggggcagagaaagcggaaggagcaaagg

SEQ ID NO: 167314 - DNA, 376 bp, Arabidopsis thaliana nossen
attgaattggtattttcttcattaaaattatcatcataattattgtggggaaacgtccacaataattggtcttggacaatttttttgtgaaaatgtatgtatagctaaaaaagaaccgcacctaaaatcgggtcaagttttaattgttcaaagggattccgcagtaataagatccgctaagccctatttggctactccgggagcaaaagttcatgggcattacagcgaaattctttacgaaggggatacattagttacatttatatatgaaaaatcgagatccggtgatataacccaaggtcttccaaaagtagaacaagttttagaagtccgctcgattgattcaatatcgttgaacttagaaaagcggattaag

SEQ ID NO: 167315 - DNA, 360 bp, Arabidopsis thaliana nossen
  unsure (1)..(360): unsure at all n locations
aaaaccgggggcgttccancctccgcgcctatgcacttgccacaattttttttacctcagaacccaaacacttgtgagatgctaaatttttgtgctctgccaaaaacagataaacaatctgctctgtgtgctgatgcaagctttgcttcttgccatccacaagatgaaattattataagaacagcgcatggcaagcattgatacacatgaacctcttttcggctttgctctaagctgtggaatgtactcttcacctgctgaaacttaactaagtaacaatcttcgtttccaaaagtcataaacagtcattttcttaacacgaagaggtttttgcatgttaagatcttactctgcgaaaag

SEQ ID NO: 167316 - DNA, 364 bp, Arabidopsis thaliana nossen
aaacccggggcgttccacccttgcgcagagctgtatatgacctacattttctttacgccgaattcagcaagtgcggcggttcatagattgtggggcgtctcaaaaaactcatgtccgaccgcttttagcattttgctcaaatgttcaaaaatgttatctcatataatagataaatttcagagctatatatacagatcgtgaatgcacgttttccttttaccaagatataattctgctatatatgggaccatcaaactgctggcgattatctgagaacttaaaagtaattccgacctatcattcagaagttctattgacatcatacatagccttggagaaaagaaagcatatcaagaaattggat

SEQ ID NO: 167317 - DNA, 378 bp, Arabidopsis thaliana nossen
ggccgcggatctcgccagcaactttatttagcttgaccgcaaccttagaccatgtttgatagcctgtaacatcgccacaagggcaggaatggctacaaggccgaaagcaacagaagcaaaacaacatcttcaatggcttcgcacctgagatcttggctcaagccttcaagatcaatgtcgagacggctcagcagctccagaaccagcaagataaccgtggcaacatcgtcaaggtcaacggacctttcggcgtcattaggccacccttgagacgcggcgaatgcggccaacaaccacatgaaatagctaatggtttagaggagactttgtgcaccatgcgatgcactgaaaaccttcatgacccgtcggatgctgacg

SEQ ID NO: 167318 - DNA, 239 bp, Arabidopsis thaliana nossen
  unsure (1)..(239): unsure at all n locations
nattctcgtccgatcaactcccatggcatttattttgcaacaatctttacccgctctgttgatttcactgcaaaaggggtggcaaaacaaattgaaaaggatgaatcttttttcttctgattaaaatggtaatatacatagaacaaaatcatacaaaacataaataaaaactgcataaacgattaagctaaagatagaaggaagagtttgttagtttgtgatacaaagtttccaacttt

SEQ ID NO: 167319 - DNA, 387 bp, Arabidopsis thaliana nossen
acgtccgaaacaccattgttatatcattttttaccagcaatcaaataactcatatgtgctttaaaccaagactttggagattcaaatggctttggttagaggtatttatgcttcaaagaagacacttgaccgctctatagcagctgcagcagcaacattgagcaaaagacatgtgggttctgcgctagcctttgtcctagcttcttacttgaaccagcctttgtttcaagctcttctcagtaaatccgaagaggagttagggtttgattatccgatggttggcctgacgattcgttgcccacgagataactttctcactatactgtaacttaataggattcaaggatgatctaaattaaaattggactacacgtgcattttgctatc

SEQ ID NO: 167320 - DNA, 380 bp, Arabidopsis thaliana nossen
  unsure (1)..(380): unsure at all n locations
nnanacgtgcgcactaaaccaatgaaaatgcatgctgttcttgttatcttggttttctccgggggactttcggttaaggcggggtgagcagcacgacatgtgatcggcgggagccaaggctgggaacaatccgttgattttgattcttggtcttctgatcaatctttcaaagtcggcgaccaaatcgtttttaagtattcagaactacacagcgttgtggagctaggaagtgaaacagcatacaagagttgtgacctgggaacatcagttaattccttaagctctggaaacgacgtcgttaagctttctaaaaccggtactcgttacttcgcttgtggaaccgttgggcattgcgaacaaggcatgaagattaaagtcaa

SEQ ID NO: 167321 - DNA, 373 bp, Arabidopsis thaliana nossen
gctcccagaagagaggtttctttttttgctcaaagcactcgctgggagttttacatacacaagtggtggggaagcaaggcagctgcttccttcaatcgttgagcttttaaagatatacatgcctgctagaaagactggagaggaaatgaacttcacatacgtcgagtgtttgttgtatgcgtttcatcaccttgcccacaaggttccaaatgctacaaacagcttgtgtgggtacaagattgtgaccggccagccattcagacaagattgtgggaggacttttcagagttgaacaaacactttactgagagattaaccattgttgaggatctaactaaggcatccatgaaaaaattaacttcaggaatgactg

SEQ ID NO: 167322 - DNA, 381 bp, Arabidopsis thaliana nossen
tcggctcccagaagagaggatacttgatttgctcaaagcacttgctggtatttctccatacacaacggctggggaagcaaggcagctgcttccttcaatcgttgagcttttaaagatatacatgcctgctagaaagactggagaggaaatgaacttcacatacgtcgagtgtttgttgtatgcgtttcatcaccttgcccacaaggttccaaatgctacaaacagcttgtgtgggtacaagattgtgaccggccagccatcagacagattgggggaggacttctcagagttgaacaaagactttactgagagattaaccattgttgaggatctaactaaagcaacgatgaagaaattaactcaaggaatgactggtcacaa

SEQ ID NO: 167323 - DNA, 374 bp, Arabidopsis thaliana nossen
ggttctactcaaaaaatttttgtttcagatgtttatggtacctatgcagatgaagcatcactttagttgcggaacgagaagatgcttgctcacagggattttgttcacgaacaccatatattcgaagatgttggggacaaacgaagacaaatcagtaaaattatgttgctaaaggaggagaaagagtatctccttccagggacatatcagagagactcaaccaaacaagaaccaaaaggacagctttttatggaactgtttgaagaagaactatatatatggctcatacataaagtgactgaagagggtaaaggtccaaacattttggatgaaaatggacagggtattttacacttttgtgcagcgcttgggta

SEQ ID NO: 167324 - DNA, 377 bp, Arabidopsis thaliana nossen
cacaaattaaaaagagagagtgtgagtgagacagagagagagagagatgctgcggaggagcttcttcttgggagggtgtacatcgttattaacgttatcgcccctacgtcagctccatctccagaaacatgggtgcaggtggaagaatgccggttcctacttcttccaagaaatcgggaaccgacaccacaaagcgtgtgccgtgcgagaaaccgcctttctcggtgggagatctgaagaaagcaatcccgccgcattgtttcaaacgctcaatccctcgctctttctcctaccttatcagtgacatcattatagcctcatgcttctactacgtcgccaccaattacttttctatcctccctcaacctctctcttac

SEQ ID NO: 167325 - DNA, 300 bp, Arabidopsis thaliana nossen
  unsure (1)..(300): unsure at all n locations
ttcgaagaggatgaaaaatgttttttttctcataaattaacacaaacaggggggcacttttgatattgtgtggtggctacactgcccaacanaggcccaacgagtgccagctcgatcaactcaatgcgctcgaaccatcccaaatcatctagagcgagggtggtcgcatcgaggtctgggaccaccatgcaccccaactccgttgctcctgctttgccttttagcttttcctcattgaccctcacggtcttttcttgcccactttattgaactccggcaaactcacgtttgttgttcact

SEQ ID NO: 167326 - DNA, 377 bp, Arabidopsis thaliana nossen
ccttagcagacatgactgggaacttgttatcgcagactaggaggagagagtctgcggtggtgagagcgggtggtatccaagaaaatgaggctgaactagcggtcgagaagcttgcggaggagctgctgtggatgacagagaagcttatgcgttatggtgcggtggcagaagggattaagcggtggagctacgcttccggtttagcttccttgtctctcacggctgctcccagggttcaaggcctcatggttaagatttcggcgctcttaattggagagttagcaagagacagcacacaagttccaggacaagtgacattcaggctccttgcaaactggctcccactgtttagtcacgcaaggaacgggcttgcgttt

SEQ ID NO: 167327 - DNA, 377 bp, Arabidopsis thaliana nossen
tctaaacaagcttactccggatttgtacgagcttcttaaaggtcaattggtggactctggcatcacttgggcagatatcctaaaggaagtgatacagctaatttttgagaatgctatactgcagcccacattctgcgagatgtatgctcttctgtgttttgatattaacggacagctaccttcgtttccctctgaggaacccggtgggaaagaaataacctttaaaagagtgcttttgaataattgccaagaggcatttgaaggtgctggcaaattgaaggaagagatcagacagatgactaatccagaccaagaaatggaaagaatggataaggagaaaatggcaaagctccggacacttggaaatatccgtctga

SEQ ID NO: 167328 - DNA, 322 bp, Arabidopsis thaliana nossen
tccggaaaagaaaaacactttttttttatcacttctcaaataacaagcggcgggataaataataaatgctgggggaacttcactactccaacaacaaaaaaaaaaaatgaattcaaaatcgctagaaaatcttcaccgtccattaatctaatcatctaaatcgatcgacgattatcgtctctagactgctttaacaaatctagagttaccgtattctcacctgatttatctatcgatgatgatctatatgaagtttctctttcatctgactgctccggcaaatcttgtttaccttatcaacaaccgcatttcaatttttaca

SEQ ID NO: 167329 - DNA, 390 bp, Arabidopsis thaliana nossen
  unsure (1)..(390): unsure at all n locations
aaaaaacccggggcgttnacgcgtccgcagcgaaggcgtcattactgtttttttataaatcgaatcccacccaggcgcacattcccaaattcttggggccaaaacaaactacctgcctccaatccttacaacctaatctcactaagcatgtcaaggaatgatctctctatccctctctgcttagctgctgctgaacgctccaaataaaacttgtgtgtctacctttagaattaaaaaatcaaatggttgttatgatgatgcactcttatacccctttggattttatattcccacaatgacctggtgagagaattgtagctttaagaacttcttttgctgctgttatttaccctctgacttatcaatcttatatctgagtcttttcctttt

SEQ ID NO: 167330 - DNA, 344 bp, Arabidopsis thaliana nossen
gcaagactcctttcatattcttacttgcagctatgggtaaagagaagggtcacattaacattgtggtggttggtcatgtcgattctggaaaatcgaccacaactggtcacttgatctataagcttggtggtattgacaagcgtgtcatcgagaggttcgagaaggaggctgctgagatgaacaagaggtccttcaagtacgcatgggtgttggacaaacttaaagccgagcgtgagcgtggtattaccatcgatattgctctatggaagttcgagaccaccaagttctactgcacagtcattgatgccccatgacattgtgattttattaaaaacatgattact

SEQ ID NO: 167331 - DNA, 363 bp, Arabidopsis thaliana nossen
  unsure (1)..(363): unsure at all n locations
naaagatccgcaagctcttagttgttcatttttttgctaatccaacgcacgttaatgtggttggcttgatagccacgttttcttcataaataatcataacttgaaattattattttaaaatatacgttggcttcatgattctctgtttttgggcttctttcttctgtatttgttcactgtctagataaaaccttattgtcagaattgtgatttgattgttggcacacaccgatcttaatttttaagtatagttgaacgagtatatgagaacatgcagtaattctagtttattaatttcttgattgttcgtggataaataaaccttaccttggatacacttcatttttgctaattgaaaacagt

SEQ ID NO: 167332 - DNA, 362 bp, Arabidopsis thaliana nossen
caaagtagacgactacttgtagtaaacaaaacctttggctttaacactctcctccaaatcccagatctctctctgtctctgtcccgcggagtccccgagagattgatcaccatcacttttgtaccttccttgtactacctatggcgtctgctagcttcgttaagcctaacaccctctcttctccatggatcggccaacgctcctttgctcacacctctgcttcttcttctcctcctcctcgagtctccttcgcgatccgcgccggtgcttactccgacgagcttgttaaaaccgccaaaagcattgcatcccctgggagaggtatcttggcgatcgatgagtccaatgcaacctgtgggaag

SEQ ID NO: 167333 - DNA, 362 bp, Arabidopsis thaliana nossen
tctgctttgagaatttcttcttcacgcttagcttcaatcatcgctctctgctcttctgcttccttgtgaatgggagctattttgttcttcatctgctccacatactctgccttcttcttctccaattgctcctgttgttaaaaaaaaaattccacaattttgaaaaagctcggagctaaatcagaaatgcttaaaaatctctaactaaatattaacttcaaacatacctccattttcttgagctcagcttccacaactgctttcttgttgttctcccatgatccaattgaataaagcttcttcttagctctgtttcaaaaatatatttttcaagacctttatgataatatcttgggttcatt

SEQ ID NO: 167334 - DNA, 359 bp, Arabidopsis thaliana nossen
acggttatattatatgagtaacattttcagttatgtatttctaataaaaaaattaagaaaatattaaatccggggcgggtgatgtctatgtaccaccacatttttcttatgccacttacaacttttgtaatatttgaacataaaaaagcttgcgttgtggatagatagatgaaaattaatctattcaatcgattaattaacattgccaatattcaaccactagatcattactctggtacttgttagtagcttaatttatcattatcttgaacattttatatttactaatgtcactgttcactggtgcgcaattaattaatggtctagttttttttttctcaattaactaatgttcaact

SEQ ID NO: 167335 - DNA, 187 bp, Arabidopsis thaliana nossen
ggcgtcgtctctatcgccacttgtagaagcttcgaatcaccaccggcggaccaaaagatacaacacctggtcttcttcaaccaccaacggaatcatcgaatcatcggtttccgatttcgtcaaacgtcccaaaatctttcattcgaatttcatatcaagttccgagatcgaatcaaagttttcttat

SEQ ID NO: 167336 - DNA, 368 bp, Arabidopsis thaliana nossen
atcttggaagatcttgtttgcttagaggacaacaagagatgatacgaagccattgatctacacactttgagtgaaacttatgtgaacatggaagcttccttacttcttctttgtctttatactttgccaaacatatacaacactcctgcaaaaccaaatcaaaactcaaaatctaagtccttttcaatcataaacgagactaatagacaacattcgacatcagattcccttagtggatcaaaacagagctatcacagattaaaccttatggtccaagaaaacttgtggatttggcttgaattgagagtaaaaggattaggacttactggatcatcagttacagtagctgaatctgaatcagaatcaga

SEQ ID NO: 167337 - DNA, 364 bp, Arabidopsis thaliana nossen
tttagacgcaggaaggtttttcataggagaatggagaagtttcaggaaagcaagtggaagcagaagtgggcgtagactattcaaacattatcgaccaatgtttctggcaacaacatcctcacattcttagcttctcctaagacaggtattcattgctaccaaaaaaaaattccaaaccgaaaaccgaatgagattcagctcttattttgataaaccgaagctaaagtacaaaacaatcgaaccgaatggtttacttttttctttcactatttttttttttttccattattttaaattaacctttttcaatttggtagttatttttttccttcaatgagagatttgggttgttaattttcctttg

SEQ ID NO: 167338 - DNA, 369 bp, Arabidopsis thaliana nossen
cggacgcgtggggagatagagtttccttgcaaatggacatgaaatcgtgatcggtggtgcggtcaccgaggccaagatccggtgagtcatcgccgaactctttcaagatggctaatctcttgagatcaccaacaagaacaccaggctttttcacaaaaccagtagctttcatcgttttggggttaacttcaatctctgttcccaaaactttatcttctcccaaatagtctttgacgaatggctcaaccatcactatcggattcgcagtcaccactactttcctcttcttacatttatcaaacacctcaaaactatctttcctcacatccggcgcgtaaaacctaacatttgaaaacgaagattaaaaat

SEQ ID NO: 167339 - DNA, 281 bp, Arabidopsis thaliana nossen
tccaaggctcgccagcgtgaggcgccgtttccaaactcctgccatttcagccaaatcaacagccttgcgcccgctcaggcgacgaagttcgaagccggtcagatggaagtatgggaccacatgagccctgagctccgatgctccggtgtaacggtggctcgcatcacccttcatcccaattccattttcttgcccgctttctttagcccacctgcccttgcttacgttgtccaaggagaaggagttatggggacgattgcttctggttgtcctgagacttt

SEQ ID NO: 167340 - DNA, 370 bp, Arabidopsis thaliana nossen
agaaaacgaaactcaactaattttgttatcacccaaaaagaagttcaaacacaatggctttcgctttgaggttcttcacatgccttgttttaacggtgtgcatagttgcatcagtcgatgctgcaatctcatgtggcacagtggcaggtagcttggctccatgtgcaacctacctatcaaaaggtgggttggtgccaccttcatgttgtgcaggagtcaaaactttgaacagtatggcttaaaccacaccattacctcaacaatcttgcatatgcatccattccactgcgaagagcatttttcggctcaacccaagtctaaccttttgcctttctggaaagtgcggttttagcattccatatcccatctc

SEQ ID NO: 167341 - DNA, 152 bp, Arabidopsis thaliana nossen
  unsure (1)..(152): unsure at all n locations
aaaaacgaaaacgaagggnnccatcgaagaagaagcaagaccncncagggaagaagggggaannanacaggaagggaaacngnacgccgaagaaggnccagcggacnnnaagggaaacccaccacngaaggagaaaacaggaaacnggaaag

SEQ ID NO: 167342 - DNA, 91 bp, Arabidopsis thaliana nossen
ttgattttttcttcattcattacacctcatgtgcttagatatgaaatcaaaagagaggatttgattctttgagcccaaaaaaaaaaagcac

SEQ ID NO: 167343 - DNA, 358 bp, Arabidopsis thaliana nossen
tcgacaaatctgaataagccctatttgctccagtggagcaatatattcgaggctccgatcactactccgacgggacactaatcccgaattgcatcgctgccgcttccttgctactaaccagaaaatttatctattgatgtaataaaaaactgataatgtctctcctccattgtcgtcggcgagagagaaagagacggctcataggttcaatggagaaagaggtggatcgctcggagaaacaagggcggcgttcagtagtggagtgaaacccattggtattagggttttcaagaaatgaaatggtcgcaatttaaggagctgtgaattgcaagattgaattgcattttcatgatgattc

SEQ ID NO: 167344 - DNA, 316 bp, Arabidopsis thaliana nossen
atcgttactctatctttttttttttttcgacctcactatcacctggggggggataatcacctagggagggacggcaccggttgattttagccacaagtatatgatctccttagcctttacttgaagcaaagatcaaggaacctcagaagcttcaagtccttgattccaaagatgtttccagaataaacacacatcccatatcgtatcttctgaaattatgggagggatcaacattctcaatggtgaagtctcaataatctattgtatgccttaaggacaacagtttgtaagcattggtaaagctcgaggccaaagc

SEQ ID NO: 167345 - DNA, 193 bp, Arabidopsis thaliana nossen
gcaatggcggcgagaggtgctttgctttgatacctgagagtcaacgtcaatccaacaattcaaaaccctagagaatgtgtacttcctttctccattctccttcgtcgtttctccgaggaagttagaggctctttccttgacaaatctgaggtcacagatcgcgttctctctgtcgtcaaaaacttccaaaaag

SEQ ID NO: 167346 - DNA, 346 bp, Arabidopsis thaliana nossen
cccacgcttccgatctaatccaaaaaatcaaaatttgattgccacaaagtttgtcgtgcttctcgtgattggcgttttgtgtgccattgacaccgcaaggcaggtcaaagatttgtccacggagaccaaattaggggcctctctttcaaaaactactaccaaaggcattggagctcagctttctgcaactggcacaacttacagcaccaacaatgttgttagctatgctaatggttttaacaatcccaaaggttcaggggccaattcattctaaagtgccaacacatttaccagcggacaaattactgtcaagggtcgcaaggcaagaatttcttttgcaaatgct

SEQ ID NO: 167347 - DNA, 303 bp, Arabidopsis thaliana nossen
tgttaattagtatttaataatttctagcttctgacgtcaagggcacgaagattcaagcacgttcactcgtgttcccaaaatgttactctatcgaaatgtataacatcatttattaatacagactatgcaatagcataagcaaggcaagctagctatatgtactagtatcatattaggattttttaaaagtaaacactaaaccttcgtaggatattcaatgcgccactacatgttactattttatcattattactagtatttttttgttgcaatatgttacatttatcaaacccacttttaggg

SEQ ID NO: 167348 - DNA, 376 bp, Arabidopsis thaliana nossen
acattattttcactgatcgcatatcatttttgagacaagagacggggtggctctctcttctctggtgtggtccccctctctccggcgatggttgttgctatggaccaacgcaccaatgtgaacggagatcccggcgccggagaccggaagaaagaagaaaggtttgatccgagtgcacaaccaccgttcaagatcggagatataagggcggcgattcctaagcactgttgggttaagagtcctttgagatcaatgagttacgtctgtagagacattatcgccgtcgcggcttttgccattgctgccgtgtattgttgatagctggttcctttggcccttttattgtgccgcccaatgaacacttttttgggccatc

SEQ ID NO: 167349 - DNA, 312 bp, Arabidopsis thaliana nossen
tgaaaacaacaagaaataatggttttttcttttcatattaatcataacactggggcgggcttatctccatagctggggtgcactgattatccttccgtgtggagatcgactgagttcgagccaccacatcaaggagaacaagaaggttctcttcttccttctggtgtggtctttttcaatgtatggtttgaatagattactaattatccataccattttattaagtggagttttagtaattgattccatgtaaaggatttgtttgtgatagttctgcctaagttcacataatatgctccggctcttttttcg

SEQ ID NO: 167350 - DNA, 189 bp, Arabidopsis thaliana nossen
accgggtcggcccactcgtccgcacgtgaccggctcgtgagattttcttttcctacggcgattcaattctacgagggtcaaaatagacttggttgggaccaacacaacaaaactttctatctgctaatcactaatgttaaatccgtcattgatgatcttgctcagcttccttcttgtaaccccccctat

SEQ ID NO: 167351 - DNA, 374 bp, Arabidopsis thaliana nossen
gtttcattgaaaatttcaagatccctagttaataacgataatgggttcgggagttttggcttccttctgtgttttcttaatcttcacggtcatcacattgcctcccacgatccaagcttgcactccttgtactcgtcctcatcctccggttccgaaacctccacaacacggcggtggtggaggtggtggtagcaagccgcctccacatcacggtggaaaaggtggtggtaaacccccaccccacggtggaaaaggtggaggaccgccgcatcatggtggaggaggaggaggaggagggaaatcaccgccggttgttagaccttcttccgtagtggtgaggccaccgccaatcataagacctcctccgggcgtct

SEQ ID NO: 167352 - DNA, 251 bp, Arabidopsis thaliana nossen
  unsure (1)..(251): unsure at all n locations
tccggggggggtgtattcatgcggngtttttagagtatgaaagtatttttttttaaaatgggaggcaaaagtgtgaggggggtggcgatactgttggcgtgtggacacactctgcaacatctgaagcagtaacagaggctgagccaggtttgatgatgaacttctacaaggacacgtgttcttaggccgaagacattgttcgtgaacaagtcaaacttctttacaaacgccacatgaacaccgttttctct

SEQ ID NO: 167353 - DNA, 285 bp, Arabidopsis thaliana nossen
aaaattggcgtcttcacgatgagcgtgcagtagcgtatacggggcgtgacggatcatataacttacctccgggagatccaaagacgatgaatacggtggtgatggataaaggagcggcgatgatgcaatcgttgaaaccgatcaaacagatgagtctccatttgtgttctttcgcttgttatggtcacgatcctagccgtcagaattgaagtcaacttctatgttcattgactcaaccaatactttcttcattgtgctgttaacgattgcgactcttttaaaccc

SEQ ID NO: 167354 - DNA, 363 bp, Arabidopsis thaliana nossen
ggctgttctagtggacattgttgctggattaaaagtctttttgtttgtatctaatccagaaaaatcaggagctgaattaatgtttgttcagacaaaaaccacgtaaagaggaagatactcaaaactctgattgcttgtgttttgtattttgttcttcacttcttctgttttgtcctttgtgttctgtactcaggctgttgtgatatgagagaaagagaggtttcatttttaccgttaagattttgatcctgactgtgttaacattttacctcagttcctccacttttaatgtgattctccattccatcaatgtcaaatcaacgaaacaactgctaaagcagagctttcctatattttaacata

SEQ ID NO: 167355 - DNA, 364 bp, Arabidopsis thaliana nossen
ttccgaagcactggtcttcaacacgctccagcattctttctgggacattgtgggtgagaatctgaccgagagagtccgtgagaagatgctgagcgctgtactcaagaatgagatggcttggtttgatcaagaggagaacgaaagtgcaagaatcgcagcaagattagctcttgatgctaataatgtgagatctgcgataggagatagaatatcggttattgtgcagaacacagcactgatgcttgttgcttgcactgccgggtttgttctacaatggagactcgcacttgtgcttgtcgcagtcttccccgtaagtgttgctgcaactgtcttacagaagatggtcatgactggtttctcggga

SEQ ID NO: 167356 - DNA, 374 bp, Arabidopsis thaliana nossen
ctcatgtacaacactttccttgaggtgtatgagaatcactgtgcacggaatgaccgagaggcagatctggcaattacccactttaaggagcaactcaatcaagctatatcagggcaaatatcagcagaggcaataggagatcttcgtctgcaggcatatattgacatcacaaaaaccttggtcaatgacagtatcttttctcagtacatgtacaagacgttgatgagcggaagccatatgtgggctttcaagaaacaatttgcagtccagctagcagtctccagtttcatgtccttcatgctacaaattggtgggaggtccccgaacaaggtcttgtttgcaaaaaacaccgggaaaatgttccagacagattt

SEQ ID NO: 167357 - DNA, 328 bp, Arabidopsis thaliana nossen
  unsure (1)..(328): unsure at all n locations
ggggggacccagcgagcgcggacgcgagggcaaancaaaaccagcccagaagaaagaagaaaccggggggggaccaaaaaacaggggggggagaaanacaagacagccaanccgaaacgaaacgaaaaccccagcgcaacggggaagcccgcagcgacgaggaacaagaacncgggcggacaccaacacccgcaaaaaaccaaacgcggcaacacggaaaggggccagagaacgaaaaaccgcgggaagcgaaaacacagcgaaaagaccggggacgggccaaaaaaaacaagaacaancagcagacaaagcaagagggggaagggga

SEQ ID NO: 167358 - DNA, 372 bp, Arabidopsis thaliana nossen
aacaaacagagagcgagtcacgcgccgagttttcctcacttgttctcaataaatctctctctctttcttctctatcgctttcatttttctcctccagatctcgattccaatctctctctccctctctacttccttcaacagaaatggaaacgttcctatttacctctgaatccgtcaatgaaggacacccagacaagctttgtgaccagatttctgatgcgatccttgatgcttgcttagagcaagatcctgaaagcaaagtggcgtgtgagacatgcaccaagaccaacatggtgatggtgtttggtgagatcactaccgctgcgaaagttgactatgagaagattgttagatccacttgcagggagattg

SEQ ID NO: 167359 - DNA, 272 bp, Arabidopsis thaliana nossen
gcgcatcgatcgaaacttgatttgaaatctgtgatctaatcacacagggcaagtctaaaaactgttgtgcaacaccaacggaagctctttaccctctcaacggctaatggatcctcgcctacacatcggtcgagaatatgttctcgttgctatcaccaggaatcttcccttgtatataagtctattagatctctcaaactcttgattcacataatttcactgaccagaacgtctgtttgttcaagcttgttccttttacgctctaaacttca

SEQ ID NO: 167360 - DNA, 257 bp, Arabidopsis thaliana nossen
ataaaaaatggcattaaccattttttttatcataacactgcttctccggatctgcatatctgtcgtggattggttaaccaaccgtgtggtgatcgacttgttcgagccaccacagcatggagaacaagaaggttcccgacgtcgtactggtggtggctcttgctagggaatggaggaagaatctacttatcatccataccccttttatgaagcgtattttctattgattgtttcctagttcaaagtgaaggtttttt

SEQ ID NO: 167361 - DNA, 364 bp, Arabidopsis thaliana nossen
acccacacgaccgcatggctgtattcacatgactttctttccaccttgaaatattgcgtgtgtggggctaatttcttaacgggtgggcagaacacggggaaagaactggtggattttatgccttcaaccggaatgaggcggctaagcaagaacggttgtttgatgaggctgaaaggaggcgagagatggcaaaaaattcgctagagagatacactcattactatgaacgctgggcaagcaatcaagtgtctaggcaaaaagctatgggggatcttgcagaaaatgcaatcatagaagcttgggaagcttattgacattcagtgcacaccataatctcagctcaagtttttcccattagctttgt

SEQ ID NO: 167362 - DNA, 388 bp, Arabidopsis thaliana nossen
  unsure (1)..(388): unsure at all n locations
ccacgcgtncgtaatgacctaccatataagttttgtttaaattaaataatgctgtcatggttggatcattaagagatgggtgggttgcttacacagtgcctgaaatcaagatacttaatgctaataaaataatatcgaatgtcacaagctttgcaaaggaagtgtgtgcttaaccggttgacccgtagaagcaaaggcacttacaccacatgtagtattaaacaatgacaacgaccaaatctgatattaacctacaaatgtaccgttttcagagagatgccctcaacaaataacagtaagttagattcttacataatataatttgacgaaaaacttctctcatcgatgctatactcaccttaaaattagcctgcagtacattgtactt

SEQ ID NO: 167363 - DNA, 225 bp, Arabidopsis thaliana nossen
cttcgactctttttatagtaaagattatagaaaaataagaaacaagatctgatttgtaatcggaagcagccaaggtgaaccggagataagttggtttgccacattgaaccaaaccagatatagcatttatcatcccaacacaaagaaaaaccttaccaagagcaaaactatataaataaaataatattggttcctaatttacaaagaattttgattacttcaatc

SEQ ID NO: 167364 - DNA, 302 bp, Arabidopsis thaliana nossen
gagcacgtgaaccatgcaatgtttgtttttctgaagctttttggtggggatctggttcctgatcctggggggtgggaaaatactgactggggcactgatccttacagttatggtgcctactcttatgttgttattggtgctcttggtgaagattatgatgtattgagaaggcctgttcataattgattgtttttttgctggtgtggcaacatgcaaagagcattctgacactgttagtggtgcaattgatgacttgagttcggaaatgttggcgtataattgatatacttaaaattggtaat

SEQ ID NO: 167365 - DNA, 349 bp, Arabidopsis thaliana nossen
tcgtggtgaaagatacatatattttatcaaaggtgtacctcaggagccatcgcattaaggagttccgagcagtgagtgagtgttaaaatcagcctcgttgagttttgtggcaactccaaaatcatcaagcttaacaaggccctgaagtataatatagtcaagtaatagcctagaagatcttgtgcatcccataatacaacagattttgaaacggaaaagcgtaccaaagacatgagaattactaataagatccacaaggtacagaaaaacacaccttcttggtttgcaaaatatttgcacccttgatatcacgatgtatgtcacctctgttatgaagatatactatacc

SEQ ID NO: 167366 - DNA, 378 bp, Arabidopsis thaliana nossen
tcgtcttctttggtgtcaatgtatttgctatgaatagtcatcgactccccggaaaggttaaaagaagggggcctattctgggacatacaatgcattacagacgtatgatcattacgcttcaaccgggttattctattccacctcttagaaagaaaagaacttaaatcaaaatacttaatagcatggcgatacatttatacaaaacttctaccccgagcacacgcaatggagccgtagacagtcaagtgaaatccaatccacgaaataatttgatctgtgggcagcatcattgtggtaaaggtcgtaatgccagaggaataattaccgcaaggcataaagggggaggtcataagcgtctataccgttaaatagattttt

SEQ ID NO: 167367 - DNA, 403 bp, Arabidopsis thaliana nossen
cggaaaccgggggcgacccacgcgtacggttgtataagaaaaagtgctttttttttcatttgctgtagcttctcatatgatgggaaattgttgggtggggctggacatgataagaaggtatttatatggaacatggaaacactacaagttgagagcactccggaagaacatgctcatatcatcacagatgttcgcttcagaccgaattcaactcaactggcaacgtcatcattcgacaaaacaatcaaaatctgggatgcttctgatcctggttacttcctacgaacaatttctggtcatgctgcacctgttatgtccattgatttttatcctaagaaaaccgagcttttatgcttctgtgatagcaacaatgatattcttttttgggacataaacgcctttt

SEQ ID NO: 167368 - DNA, 345 bp, Arabidopsis thaliana nossen
gttttcaaataatgttatggtttttttataatcctgaaaaataggtcggccggtacaatttgagaagggcgattgaggattatgacattttagtatagcaaaagcttaaatcaaaagcttcataatttatatgttttaggttatagacatttgttcaataaagctagtttaaagcagagcagtcccttctaatctcgccttgattcccaaccttaaccccaacgcggccaagattccttatatcagagctaaaagcgctgtataattcttcagctttgttagcaaacctaaccaccttagtctgagacgagagatcgttaaacagagcttgatcggttgtgaaaa

SEQ ID NO: 167369 - DNA, 385 bp, Arabidopsis thaliana nossen
  unsure (1)..(385): unsure at all n locations
acccacgcgancgcaacaaaaaggggancagagatcggcagannnncacaaccacaagnagggcggcttaaancagcagggagagaaagcncgnagcggatggcgcattctacgctgaatagaatgaggttctcacaagagagctagcagaggatggttactctggtgttgaggttagggttactccaatgaggactgagattatcatcagagctactcgtactcagaatgatcttggtgagaaggggaggagaattagggaattgacatctcttgtccagaagagattcaagtgtccagttgacagtgtcgagctctatgctgagaagggtaacaacagaggtctctgtgccatagctcaagctgagtctctacagtacaagct

SEQ ID NO: 167370 - DNA, 372 bp, Arabidopsis thaliana nossen
aatggtcctaattccaataagtatattacactctcttacagattggaccgaaacactcatgtggggatgaaaaaataaactaagaatacaaaaagaagaaaataaaagaaaaaatcagagatcccgtcggagaaagaaaaagagaagatagagagatacaagtaacggcttccactaatctttcgccttctacatttttgctgctccgtccaatttttgtgtctataaaataagacagcttctttctcttgactttccaaattcactcaactttctctcactccttttttctctctctctctatcctctacagagctcgcagcaactagcgcaagatgttggagaaggttgaaactttcgacatgaacagag

SEQ ID NO: 167371 - DNA, 376 bp, Arabidopsis thaliana nossen
aataaaaagaagcatcttctatagagagacatattgagaaagagagagaaagctttagggtttcaaaggagagaaactgagaccctttagaaatctcctaacaggaatttttttctcaatcgctatagaaaatgggagtcatgatcaatcaccatttcctcgcttttatcttcggcatcttaggaaacgtgatatccttccttgtattcctcgctccagtgccaactttttatagaatatacaagagaaaatcgacggagagtttccagtcgctaccgtaccaagtgtcgctatttagctgcatgctatggctctactacgcattgattaagaaagacgcttttctcctaattaccatcaactcctttggctgcgt

SEQ ID NO: 167372 - DNA, 368 bp, Arabidopsis thaliana nossen
gttttcgtgaaagagcaaagattgatactggaatcacatgtgggacgggataaagcaagacttaagggtaaggatcctgccttacaagatacttgtggaaaagcttctaagaattcctttagaagttcgtttccttcttcaaaagatggtttctccacaaagaagcatggattagtttcatccgtaccagatcattcgaggaaacgtaaggatattgatccatccataaagcataaaatggttccacaaaaattccagaagatgatggaagactcccgtgaagctggcaaaaacaagctgggagtaaaagaagcctgtgatgctggtaaaagcaagatttcactgggtgagaggttgtttagttatac

SEQ ID NO: 167373 - DNA, 310 bp, Arabidopsis thaliana nossen
  unsure (1)..(310): unsure at all n locations
nacggaacgggaggaaagcgaggcggagagangcagagcggaagacgacgggagggacnagacggagagcggagggagcgcgcgaggagaaaaaaccgaagaaacccccacgcaagaagcaaaaacgaaccaaagggcgcacgaaacgaaaagagcaaccgccagaagaaagagaggcacaaaaaaagaagagggaagaaccgaaaaagcagcaagagagccaaaaacgacgggacagggaaaaaaaaaacaacccaaggaacagaaagagcggagaaagagggaaaggagaaaaaaacgacgcaagaag

SEQ ID NO: 167374 - DNA, 377 bp, Arabidopsis thaliana nossen
actaactcttgaactggtgttttttcctccgctggaaactccaaagcgggctaaaggacctgtcggcgcgagcacgagcttaaggctcatcatgactagtccactacctcgcttgcgttggagatggaaaatcatccggctatgctcctggtacttgtaacgcaactacggtgtgcgtcttccaaaccctatgtattggacgctgatgctatctcctattcaaaagccctaaccgacgaaaacctaatacttccgaggcaggaagtgatacgctgattgagattacttaagcagccgatgactctttttggagaagatgatctatcacggctcgatcgactcaagtacactttgaatgaaggcttgttctgagttga

SEQ ID NO: 167375 - DNA, 331 bp, Arabidopsis thaliana nossen
  unsure (1)..(331): unsure at all n locations
cggaaggccgggggcgacccacgcgnnccgcaagagagaagaagacgctttaacgaaaagaccctaagaaagcggggagagggaacaacagagggggggancacacanagancggaacagcgaaaaaaaaaaacgggaaggccaaagaagaacgagaacaaaggcgncngcgacgccaagacnacgggcaacaccaagaacggaaccgccgcggcgagagccggnaacggcgagcaagggaaagaaggagacgaggccacaaagccagaagggggcaaggaagaggccgaagaggaagcncagaaaggaaaggggaaggaccaggaacgag

SEQ ID NO: 167376 - DNA, 367 bp, Arabidopsis thaliana nossen
atttaatgtgcatggggtgtttatattatataaacaacagtggtggtgggtaacctataaatttaagggtataatggtctgggtttggtcttacatctcgaaacatgaaagaacacagacaattacgttggcgtgggacacatcacataacaactgcagatcgcagacagattctctcttaagtatcaaaccattaaaccactcgtattagtctaattagtcagattagtttatcttcctagggacataattctattttatatttcagatagatcggattcatcgcaatgcatagtacaaatcttacattcactcggtcaaaattttcagatcttgtagcaatagattgtatgagcgtgtgttagta

SEQ ID NO: 167377 - DNA, 344 bp, Arabidopsis thaliana nossen
atcatcccaggatggtctctatggttgttaccaggccagggcggaccaggctccattgtccaacgagggtcaggaatcttctgtgctttagcgacgaggatattgatcctcactttaaactcctcatactgtctttgccaacatacgacataagaaaatgtgacattcactctttattctcgtgtatatgtctaatggataaaacaaccagaatctttttatgcaattatagtagtccaagggaccttcattgcccgtttctctttgtcaaaagagggtcggatcttgttcttcaagtaatctatttttctgggaaaaatagaacttaggagctcttggttcaa

SEQ ID NO: 167378 - DNA, 349 bp, Arabidopsis thaliana nossen
  unsure (1)..(349): unsure at all n locations
cganaggaaagagaggacgaaaggnnaggcngaacaaacggagggggaagaggaggggggggggagcagagcaacnnaaaaagccaacgagacgaaagagaagggcaaggacaaagccnaagaggggagagagaagacgaaagagcacgcagaagagggcaaggagaaggggaaggaaggagccnagggagccggcgagaaagcgnacgagacaaaagagaaggcgaaagacaaaggcgaggaagggaaagagaagacaaaagagagggcgggagaaaccaaggggaaagggaacgaaggagcgaggggaggagcagaaaaagcncacgagacgaaagagaagggcaag

SEQ ID NO: 167379 - DNA, 358 bp, Arabidopsis thaliana nossen
tttccctctttgtcgcaaacctcacattgttgagcaaaaccctaaaacgggggcgttccatggcgagggtgggtgaggaagaagaagaaagcagtagcagccgacccatgatatttccctttagggcaacactcagttctgcaaacccattagggtttttggagaaagatttcgactttctcggagaacagagcgattttttcaagaaaccctccgtggaggacgagatcgtcgtcgcggttagggcggcgaaggagaagttgaaaaaggctgataagaagaaagctgataaagatagtgtgaagcctgtggagaagaaagccgagaaggaaattgttaagcttgtggagaaaaatgt

SEQ ID NO: 167380 - DNA, 316 bp, Arabidopsis thaliana nossen
gtttattgtgtgaaccaaatatctttgaggaattcagcccttaaatactatcgacaatctgttatttgagagattgcatttaaggtaacttgcataatataagttaggatttgattaaacttgctaggcatatggatttggttaaaatgatcaaggcaataagttagagaatattgggagttcttgcgttttcaaaccttttccacgggttcggcttttttgttttgcttgagggcaagcaaaagctaagtctgggagagttgatatacctctatttttactacttgcatctatgatttacgtataggtgttagag

SEQ ID NO: 167381 - DNA, 297 bp, Arabidopsis thaliana nossen
agataaccccaaatgattctttcaatattagcccctgtgataggcaccggtctatacggtggaggcggggacggacccagctggatacatagacactcttaccagccttttccattctcttaattaccttaacggtggcttatatacactttcttggagatggagctctcaatctttcaccgcggttcaattttaacctcaatctgtttgctcagggttcaatatcaaccacagctcattttatgtgatcaaatctaaccggacattctctatcatattccctaccgactgtaatgt

SEQ ID NO: 167382 - DNA, 202 bp, Arabidopsis thaliana nossen
  unsure (1)..(202): unsure at all n locations
ccgccgcaccgagaanncggggggaggcgggacacngcgaggnngggagnnaaacnggggcggaagccaccaaaagagaaacggaggngngcgaaggnaggcncaagcnaagaaacngcncgngagcgnaanggaanaagccngccngacggagagaccgacnggncgaacagagacgaaagncggccatagngaaccggga

SEQ ID NO: 167383 - DNA, 374 bp, Arabidopsis thaliana nossen
cacccgtcgatctcccgtcgtttttgtccaggaagttgtcaaggagaagcaatccaccaataataccggcctgttgataaccaaagaggaaggattggagttgtatgaagatatgatactaggtagatctttcgaagacatgtgtgctcaaatgtattaccgaggcaagatgtttggttttgttcacttgtacaatggccaagaggctgtttctactggctttatcaagctccttaccaagtctgactctgtcgttagtacctaccgtgaccatgtccatgccctcagcaaaggtgtctctgctcgtgctgttatgagcgagctctttggcaaggttactggatgctgcataggccaaggtggatccatgcaca

SEQ ID NO: 167384 - DNA, 369 bp, Arabidopsis thaliana nossen
agacgagagaccctctcaaatttcaagctcctttccttccttccttcgagtctacactctcagattctgggtctctctctttcctctctctttgtcttctctcaggttttgtaatggcggaatcttccaaagtcgttcatgttcgtaatgttggtcatgagatttctgaaaatgatttgcttcagctttttcaaccatttggtgttataactaagcttgtgatgctcagggcaaagaatcaggctcttctccaaatgcaagatgtttcttctgcagttagtgctcttcagttttttactaatgttcagccaactataagaggtaggaatgtgtatgtccaattctcttctcaccaagaattgacaacga

SEQ ID NO: 167385 - DNA, 366 bp, Arabidopsis thaliana nossen
ctaaaatggcgacggcgttgaagaagaacagaaagaagagaggtcacgtcagcgccggacatggacgtatcggtaagcaccgtaagcatcccggaggtcgtggaaacgcaggaggtatgcatcaccacaggatcctcttcgacaagtaccatccaggttacttcgggaaagttggtatgaggtatttccacaagcttcgtaacaagttcttttgcccaatcgtgaacctggacaagctatggtcacttgttcctgaagacgtgaaggcgaaatcgagcaaggataatgttccgttgatcgatgtgacgcagcatggtttcttcaaggttttggggaaaggtcatttgcctgagaacaaacctttcg

SEQ ID NO: 167386 - DNA, 358 bp, Arabidopsis thaliana nossen
cccactcatggcgtcttggattgtcttatcatctcttctccgttcatgttccggtagatctgccgcgggattaggcaaccgtaaccccaggcttccttctccttcacccgcgcgtcacgccgctccatgtagctacctcctcggccgcgtcgccgagtacgcgacctcttcacctgcaagctcagctgcgccatcttctgctcctgctaaggatgaggggatagacctatgattacggtggcaaaggtgcgatcgggcgtgtttgccaggtcattggtgccattgtcgatgtgagatttgaggatcaggaaggattgccaccaatcatgacatctcttgaggtgcaggatcaccccac

SEQ ID NO: 167387 - DNA, 379 bp, Arabidopsis thaliana nossen
cttgtccctggcgatgaagcttaggcccataactaggcccaatatatatgatcacatatggtccaagataacttatcgttatgcgcagtaatttactgaaaaccaaagaccatatttttatgtaatgtccgtatagctaggacttttagagattgtgtctggctagaataattgcccatttcataattctgagaattgaaagaaatttggtatgctaagttttccaatgtaaatcattcaatgacagtagagagagcttctgtctttcgtcaaagggaaagccatcaaaaaagtcaagagtcaacaacttctaggccactccgacatcttaggtgacacgtgtgagtttggtaagaagatttaaaacggcttttacttg

SEQ ID NO: 167388 - DNA, 372 bp, Arabidopsis thaliana nossen
cggacgcgtgggccgcggggcacttcctctcgcggttccttgagctagaccgaggacgtttgcgtctgggacaaaagaacccacggctgtcgatgcacagtgggttccgtgtccaattttgtctagaggggacataacctcacctttctctgccgcgttaaacgatccgttgtacttactctcaagaccctttgagtagtacatagctccaatcaactttctgttacagctcgatgcgttgaacgcttctgctgaaacacattttcctttccaacgtgctgggattggtccaagaccgttgtcgttgaatgacttggaatctggccatattcctgagtccaggattccaacaattgcttcacttcccatatc

SEQ ID NO: 167389 - DNA, 308 bp, Arabidopsis thaliana nossen
cagagatttctaaacctctattgttttcaagatccaaccaactctgtgggggatcttaactagttgtgggggcgaagaatgggatacgcttgagacaactaagcctacgaggaggagctcttggactatgaagaagaagacaagaaggttccagattctggaaacaaagttaacggtgaagccgcgaaaaaagggtactgtgggaatacacagttctggatttagagacttacttttaaaaccggagcttcttagagatattgttgactctggatttgaacattcatctgaagtgcaacatgaatgta

SEQ ID NO: 167390 - DNA, 357 bp, Arabidopsis thaliana nossen
tcgcattgcttcattattaccaatttatcaacttaatcgtttctctcaaatggagggttttctcttttctcgaaagtcttgcggatttctgaatcatctctatctggtttgagggtttcgtttgatatctggagaaaggggtttctggaaacaaggagttcataattcgcgatcttgatctatcgatcttcatttatatataaaagcgtgaatgagattatgatggagtcgaaaggtggtaaaaagaagtccagcagtagtagttccttattttacgaagctcccctcggttacagcattgaagacgttcgtccaaacggtggaatcaagaaattcaaatcttctgtctactcaaac

SEQ ID NO: 167391 - DNA, 351 bp, Arabidopsis thaliana nossen
cctaattggagataaaactccggaaattagaaatgccaaaacaggaatagcacttgatattagtaaaaatgcccagaaaatatcatattcgtaaagcagaaacatagacgaactcctatgaatgtggaaaaaatacccgcttagtcaattccaatcggagtggattgggcaagggatatagaactcttgagtcaaaacaaaaattcaggttaatcgaatcatttttttttcgtttggttgttgtggtagacgtctcgttttaagatttattgatttcttattttcagtacacttattacttaatagttccatgtttctattactaatagtttctaatataataatataata

SEQ ID NO: 167392 - DNA, 436 bp, Arabidopsis thaliana nossen
  unsure (1)..(436): unsure at all n locations
aattcccgggtgcgatcccaacgccgtccnngccgaaaaccaattcgtatgtataattttttgttcttcacacannttggtttacggtgctttgtagtaattgttccctaaataatattgcgcctaaaaagccngnngtgccaagtggctttgaaccggtaacccccggnntttacagctatnctgatgaatcatacgttnntcgtttggttctccacgtcagaattttcttcgcttcttacantagcacattccaacgtgaattnctccggcgttttcacaacaggattttccgtcttaaaccgccggttataattcgactatatccggaaataacataagcagggctctgtttcagccggttaagggtactaaactgtataaactaaagtatggatctcgagttcaagttgttttacaggatacaaacattgtt

SEQ ID NO: 167393 - DNA, 352 bp, Arabidopsis thaliana nossen
cattactctggtcagcgattcttctttcttcttcttctcagatcctttgaccgagtaagaagattttaaagatgccgtcaacgccgacgacgccgactacaacaacgccgatcacggcttcgtattggtgttacagctgtacgcgtttcgtcagcgtttgggctgatcaaggcacaacaaccgtcggtagcgtcgcttgccctcactgcgacggcggttttatcgaacagattaacgattcttcctccgccgctaccgaattaacgattccggcttctactgaagtaagatcgatcaataacaaccgtagatccgtgattagacgccggagatccggtcgtcgtccgtcctt

SEQ ID NO: 167394 - DNA, 350 bp, Arabidopsis thaliana nossen
gagagaagcgaagacgatggctatgatagggatgaacattattgggctattcatggttcttatgttgcgtctcatctccctcatcatccttttcgcctgcaagccatggcgatatttttctcgtttccgatcctcctctcgtttttcttctaccttcaaggtgggggatttgcagagaccacttatttctgatgatggaaatttgatccaaggacaaaccagtgaggtaacaagggaatatgatttagagggagcttgctaccaaaatgatggacttttgcattcatctctgactgagggacggctttacaaacaaaggcttccttcgtcatctccccatttctcccaag

SEQ ID NO: 167395 - DNA, 346 bp, Arabidopsis thaliana nossen
aaacgttacgttctcgttttctcaaattccaaacaataccaagaaacctgtacttgaaaagagaagatgtgttggcgcgtgtgtgcctaagagcgatggcgtctgagaaacaaaaacaacatgcacaacctggcaaagaacatgtcatggaatcaagcccacaattctctagctcagattaccaaccttccaacaagctttgtggtaaggtggcgttgataactggtggagactctgggattggtcgagccgcgggatactgttttgcatccgaaggagctactgtggctttcacttacgtgaagggtcaagaagaaaaagatgcacaagagaccctacaaatgtt

SEQ ID NO: 167396 - DNA, 262 bp, Arabidopsis thaliana nossen
ccactacaacaacgccgatcacggcttcgtattggtgttacagctgtacgcgtttcgtcagcgtcagggctgatcaaggcacaacaaccgtctgtagcgtaaatagccctcactgcgacggcggtattatcgaacagattaacgattcttcctacgccgctaccgaattaacgattccggcttctactgaagtaagatccatcaataacaaccgtatatccgtgattagacgccggagatcccgtcaccgaacgtcctttaa

SEQ ID NO: 167397 - DNA, 368 bp, Arabidopsis thaliana nossen
ccggggggacccacgcgtccgggcggtttcgtttctgaaattttatttgcccatttctcatatgccttgcttgacttcacttcttctgaaaaggaaatcacacttgataatcagcaactctcccaagtttacatagatttcagatcaggatcaccaaactggaataaaaaaattagaatgcatatttaggtggaatatgaaccatcaaacacacagctaaagggatatggtacattttacactcatcctctaactggagaaggcacaatatcaaattctattgcgttatcaaaattcatagatgtacaaatagaaggcaagctcatcttataacgtcaaggattccatagatgagaagataatcttgt

SEQ ID NO: 167398 - DNA, 280 bp, Arabidopsis thaliana nossen
  unsure (1)..(280): unsure at all n locations
gctacttcctttttctgagttttgaccaccaccaccatctatgaaatgttctacattaccagttatccggcaaatcaactacagctggagaagcagattcagggaagtctttgactcttgagaatatatttgggagtgccttcatgaatgaactgcagncgattggagaacctgtctctggaagagctatggtttctgatgctccaggggtcccgcttttatcagaaaggtcaatttgttaactgatccaaagaaaccaaatcagaccttgaggtcttcc

SEQ ID NO: 167399 - DNA, 352 bp, Arabidopsis thaliana nossen
atcaaacgtttcgttctcgttttctcaaattccaaacaataccaagaatcctctacttgaaaagagaagattatcgccgcgtgtgtgcctaagagcgatggcgtctgagaaacaaaaacaacatgcacaacctggcaaagaacatgtcatggaatcaagcccacaattctctagctcagattaccaaccttccaacaagcttcgtggtaaggtggcgttgataactggtggagactctgggattggtcgagccgtgggatactgttttgcatccgaaggagctactgtggctttcacttacgtgaagggtcaagaagaaaaagatgcacaagagaccctacaaatgttgaag

SEQ ID NO: 167400 - DNA, 388 bp, Arabidopsis thaliana nossen
gccccagatccgggattcgccgcgcatcggcgcccggcaagcggtcatttctgagtttatgaggaccggacctcccgtttttttgctcctgctccaagacctggttagatgcctggactggtagctggtgactccagtttcatggatgacggtgaagactctttggcagagctatccaatacctcattccggaagtttaacattctttgcactggtgatcgtgatgggaacatatgcttcagtatatttggaatatttcagataggaaagattaacatacacgagctgtctcttcctgtgcctcatctcgatgagcatgcctcttgcaaactatttaatgcttccatttacaaggttgctctgtcaaaagacctttgccgtctggtag

SEQ ID NO: 167401 - DNA, 354 bp, Arabidopsis thaliana nossen
  unsure (1)..(354): unsure at all n locations
naaagctctttttgctgtgtctatctcctctctctctggatctcgccggcgaacggtcactcttgggtgtaaacggtagcaatcaagctatagaatctcagatatcgctgaattagctgttggattttatccgccttttcttcgttatccggggctcgggtataatgtttcatcgtcttatttcatctgtaaatgggctgcttccactcaaaggcatcaaaagaatttcgaggacacgaagaccctgttaagcttgcctctgagacaacttttagtgtgagtgaggttgaaacattatttgagctattcaagagcataagcagttcggttgttgatgatggtctgattaacaag

SEQ ID NO: 167402 - DNA, 355 bp, Arabidopsis thaliana nossen
caatcatcatacactaaaaattaaaggttacaaaaactttttgatcttgaatattgttgatagtgatgatttacctttcttgagtgaggaagtgaccaacggctaaaagcttatagccggcgatgttttcaacagctaagttgatgagagtagcgattaaaccagtgaaaagaccaacaagacaagctaacgtccatttcaagaacacgtattgaagtacttgtgcctttgatctttttctccaatcatgcttaaacagatcgttctcgtttattctgtcaatatttagattaaagattaaaagaagacccctgaattcaaaattatgcagagaagaagaagaagaagaacatac

SEQ ID NO: 167403 - DNA, 356 bp, Arabidopsis thaliana nossen
ccatcacacaatcctcaaaacagagtatcccaaaaaacagagcaatctctaaaaaatctcaagaaacctcactaaaatgggttcaacggcagagacacaattaactccggtgcaagtcaccgacgacgaagctgccctcttcgccatgcaactagccagtgcttccgttcttccgatggctttaaaatccgccttagagcttgaccttcttgagattatggccaagaatggttctcccatgtctcctaccgagatcgcttctaaacttccgaccaaaaatcctgaagctccggtcatgctcgaccgtatcctccgtcttcttacgtcttactccgtcttaacctgctccaaccgta

SEQ ID NO: 167404 - DNA, 347 bp, Arabidopsis thaliana nossen
aacgattcgggtcaaggttattgactttctcattcagtgaagcttgaatcatggcctcgagaattgctaaagatgtgactgaattgattgggaacactccattggtgtatttgaacaatgttgctgaaggatgtgttggtcgtgttgctgctaagcttgagatgatggaaccgtgctctagcgtcaaagacaggattggttttagcatgatttctgatgcagaaaagaagggtcttatcaaaccaggagagagtgtgctgattgagccaacaagtggaaacactggagttgggttagcattcacggcagctgccaaaggctacaagcttattattacaatgccagct

SEQ ID NO: 167405 - DNA, 277 bp, Arabidopsis thaliana nossen
gtcacaactgatgtgagttctagcgatatcaaattctagatttttgcaaagatcatctatgatataatacagtggtgaatttgaaagatcagattcgcttgcttttaatctgttttagtgggaatctcaacagtttttatttatccaaaaaactgaaaaactgcagaagaaaaagaacaatctacacttttccgaatgtttataggatcatgaaagttttatgtttctctaaaaaaaaaaaaaacaagaaaaaaaatgaacaaaagtaaacaaaaag

SEQ ID NO: 167406 - DNA, 270 bp, Arabidopsis thaliana nossen
ccaaaatctaacagatcaaagcctcttgcccagcaaatccgacaatgggaacctcaacaaatcaaaaccatgcacaaaaccgcaaaactgaacatgacaccgaacaatccacaactctcacgcacgtgtatcggatcaagaaagtcttctgcaactctcggtgccacaaacccaaccaactcttgtccagaccacggaataagtataccgatgccgagcacacagataccatcattgcccaaccaggtgcagcccacaatccctaacatt

SEQ ID NO: 167407 - DNA, 354 bp, Arabidopsis thaliana nossen
caagaagtagtcaaagcacaatacagcagtagtagtagcaccatggctcctctcaagaactcctttgtaacatctctggtcattgcactaacattcacaagcttcttcaccagcctatccgctcatcgtcaccttctccaatcaacaccagtgactcagcctccagctttaacattcccacctctgcccaaaaccactatgccaccggttccttctctaccaactccaggacaacaaacgttgccacagccacaaccaactctgccacagcccactgggttgccaccgatgccgagcacacagataccatcattgcccaaccaggtgcagcccacaatccctaacattccacag

SEQ ID NO: 167408 - DNA, 355 bp, Arabidopsis thaliana nossen
caagaagtagttaaagctcaattcagctttcgtagccgcaccatggctgctctcatgaactcctttgtgtcatctgtggtcattgcactaacattcacaagcttcttcaccagcctatccgctcatcgtcaccttctccaatcaacaccagtgactcagcctccagctttaacattcccacctctgcccaaaaccactatgccaccggttccttctctaccaactccaggacaacaaacgttgccacagccacaaccaactctgccacagcccactgggttgccaccgatgccgagcacacagataccatcattgcccaaccaggtgcagcccacaatccctaacattccacaga

SEQ ID NO: 167409 - DNA, 284 bp, Arabidopsis thaliana nossen
  unsure (1)..(284): unsure at all n locations
gagagattgttcaccttcatttttgttcctaaccngaaccaccnatggcgtcggctaacttctatggtttttggacacccacaccnctccatggatcgaccaacgctcctttgctcacacctatgcttcttcttctcctactcctacagtctacttcgcgatccgcgaccaaacttactccaacaagcttgttaaaaccgccaaaagcattgcatcccctgggagaggtatcttgacgatcgatgagtccaatgcaacctttgagaagaggatagcttttatcc

SEQ ID NO: 167410 - DNA, 346 bp, Arabidopsis thaliana nossen
caaattttgaattatattatatattatttgtatttgatttgagcaacagttttagatcgccctgtttcaattttttttatagagtttttatcataattttgcatataatagaagtagtaattataaaaatattatatattaattatcaattgggtttttgctaaacggagcctggatacttcattttattagtccgatcacgtaaaccataaaaaaattttgataatctaatatcaatctaaatactccctgcatttaattccactttattttttgcgcttcgcgttacaaatttttgataattcaatcaatctttttgagcgaaacagaggatatctcgatcgag

SEQ ID NO: 167411 - DNA, 345 bp, Arabidopsis thaliana nossen
aataaattatctttttctttttgtgggaccaaaaaaaacggtctcggtcactgtgaagataaaagaggaatccccccacgagcatacttaaaaaaccaccccggaatattttcattccatagtgaaccccaacacaaacaaatgcaactcttacccacccccactcgagttttaacgtttaacataacaacctcactttctcaagcagcattacaacttctctccgccgacaagcttttttacaacagagatattcttcctctagacctcctcttcgataaatcaaagattcagtccgaccccaatataatagaatgcgacccggatccatcttcttttactggt

SEQ ID NO: 167412 - DNA, 358 bp, Arabidopsis thaliana nossen
acgcgtatcacacactcactcatggagtatagtacagggacatgatcagatgcgacgcttatatggtggtaggtgtgccgaaaaaagagggaacctaaacccaaggctttcttgtccttgacccgggcgtgacgccgcttcatgtagctacctcctatgccgcgtagacttgtatgcgacctcttcaccggcaagctctgttgcgccatactctgctcctgctaaggatgaggggaaaaagacctatgattacggtggcaaaggtgcgatcgggcgtgtttgtcacgtcatcgatgccattgtcgatgtgagattccaggatcaggaaggattgcctgcgatcatgacatctctagag

SEQ ID NO: 167413 - DNA, 366 bp, Arabidopsis thaliana nossen
  unsure (1)..(366): unsure at all n locations
cacgcgnncganctnggaaactcagncttcatttaaattatgagcaacgagtacgaatatctgtgcaagcttttgtagttctgggactcccctanaggaaaatcgtgtcttcttctccgattcgctgatgatgcttacattgacagctacataagcaccattggtgttgacttcaaaattaggacgattgagcaggatgggaagaccattaatctgcaaatttgggatactgctggacaggagccgttcaagaccatcactagcagctattacagaggagctcatggaatcattattgtttatgactgtactgagatggaaagcttcaacaatgtgaaacagtggttgagtgagatcgatagatat

SEQ ID NO: 167414 - DNA, 346 bp, Arabidopsis thaliana nossen
atgatcactactcatttgaagagaaaagttcatggacgggtagagatacaaccaattttggtgtcacttcgttgaaatcagatggaagtatagaagaagattatcatgaccttgaccttgacgttgttagcctttcttctgcctctcctcattccgttgaaacattcagaaatctgcagcaaggaattgcacatctcaagcaaagcgtggctcacttgactgtgtacggatacaggtccctgtctctggaagttccttccggaacctcgacttttgaaacatttgcaaagttgctggctacattatcttcactcaaggaggttcagtctggtctttcccttgggct

SEQ ID NO: 167415 - DNA, 322 bp, Arabidopsis thaliana nossen
  unsure (1)..(322): unsure at all n locations
ccaaaacacattacataaaattatggctcccactgctctctcgagcgccgtcgnctgtacttgtttcaggcgtcgctccccagctccaatcagtctccgttcccttccatcagccaacacacaatccctcttcggtctcaaatcaggcaccgctcgtggtggacgtgtcacagccatggctacatacaaggtcaagttcatcacaccagaaggtgagctagaggttgagtgtgacgacgacgtctacgttcttgatgctgctgaggaagctggaatcgatttgccttactcttgccgtgctggttcttgttcgaactgtgct

SEQ ID NO: 167416 - DNA, 348 bp, Arabidopsis thaliana nossen
ggtgaaatgtcaaatttttcatctcaggataaaaaatcagactcctcgaccatagagtgggctcaccagagaatgcccctacctccacactggtttctcagcgccatctcagcagtccacagtggtaaaacctcaacagggccaccagaatccacagagttgcttgaagttgcaaaagctggagttttctttcttgcaggacttgagtcatcgtctggttttggatcgcttccctctcctgttgtgagtgtaccgttggtttggaagtttcacgctttgtctaccgtattgcttgttggaatggacatcatcgaagacaagaacactaggaacttgtacaattatctg

SEQ ID NO: 167417 - DNA, 345 bp, Arabidopsis thaliana nossen
gtcaagtgaataaatataaatggatggataaaaaaaccagttttccttattccaggaaaaaaaaagaaacgagcttccattcgtaatttgaaaaattaccccaactaattaaatgttaaaaatagattagtgcctaatacgggtatgggaaggcatttttttcttgcgtgttattatcaattttttcatgagtcctaattattgttttaactagtccatttggattaggttggagtgtgtaaaagaagcagtatattgataaaaaatatatatatttccaaaatcaaaagagcgattaggttaaaaaaataaaggatttctaataatcttgttttgttattctat

SEQ ID NO: 167418 - DNA, 211 bp, Arabidopsis thaliana nossen
  unsure (1)..(211): unsure at all n locations
cattcntaatttgaaaaattaccccaactaattaaatgttaaaaatagattagtgcctaatacatgttttttaaggcatttttttcttgcctgttattatcaattttttcatgagtcctaattattgttttaactagtccattttgattaagttggagtgtgtaaaagaaacaagttattgattaaaaatatatatttttccaaaatcaaa

SEQ ID NO: 167419 - DNA, 352 bp, Arabidopsis thaliana nossen
cgtggttgattgtttttgtgttgaaaatcaaaatggcgtcgagcgatgtgcgtccatgagcgtatccggcacgtgacggatcatagaacttacctccgggagatccaaagacgatgaagacggtggtgatggataaaggagcggcgatgatgcaatcgttgaaaccgatcaaacagatgagtctccatttgtgttctttcgcttgttatggtcacgatcctagccgtcagattgaagtcaacttctatgttcatcgactcaaccaagactttcttcaatgtgctgtttacgattgcgactcctctaaaccccatctcatcgggatcgagtatattgtgtcggagaggttatt

SEQ ID NO: 167420 - DNA, 349 bp, Arabidopsis thaliana nossen
ttagattctcaaaatctcagagtgagctcgttaggaaaaatgaaggcagtgatagggacagtggtgtcgaacaaaatgcagaagtcggtggtggtagccgtcgacagactcttccacaataatatctacaatcgatatgtcaagcgtacttccaagttcatggctcacgatgaaaaggactcctgtaacatcggcgatcgagtgaaattggatccttcaaggcctttgagcaagcataagcattggattgtttcagaaatcataaagaaagcccgcatttattctccacaagctgctgctgcggctctcaattcctcaacctccattgctgagcagtcccctgtttcgt

SEQ ID NO: 167421 - DNA, 351 bp, Arabidopsis thaliana nossen
ctgactctctatctgaaatctcaaaacggagaacgcgagggaacaagagattaaagcatagtgagaccctaagagagagagctttaggtctagaggggatcttcacaattcacacaacaactacgagataggatcgtgcgcgtcaaaagaagctggtactgctgattccagccgaagattagtctccgcttctggttgttccggtggagactcgtcggaaatgagaggtcttttcaaatccaaaccgcggactcccgctgatattgttcgtcagactcgcgatctcctcctctatgcagatcgatccaactctttccctgaccttcgagagtccaaacgagaggaaaagat

SEQ ID NO: 167422 - DNA, 359 bp, Arabidopsis thaliana nossen
cttaatgtggtctgtgatcattacatcaacaacagcaaggcaattagagaagctatgtgtttcatgatggacccgcagtccggaaagaaaatatgttatgttcagtttcctcagaggtttgatgggattgatagacacgatcgatactcaaatcgcaatgtggttttcttcgatatcaacatgaaaggtttagatggcatacaaggaccgatatatgtggggaccgggtgtgtcttcagaaggcaagcactttatggatttgatgcaccaaagaagaagcaaccaccaggcagaacctgcaactgttggccaaaatggtgctgtttgtgttgcggtatgagaaagaagaagacaggtaa

SEQ ID NO: 167423 - DNA, 350 bp, Arabidopsis thaliana nossen
cgagatctgatcgccgaatctcataatctcccatcgaagcagaatggagacttttctattcacatctgagtctgtgaacgagggacacccatacaagctctgtgaccagatctctgatgcagtcctcgatgcctgccttgaacaagaccctgacagcaaagttgcttgtgagacatgcaccaagaccaacatggtcatggtctttggcgagatcactaccaaggctactgttgactacgagaagattgtccgtgacacctgtcgcgccattggattcgtctctgatgatgttggtcttgatgctgacaaatgcaaagtcctagttaacattgagcaacagagcccagata

SEQ ID NO: 167424 - DNA, 343 bp, Arabidopsis thaliana nossen
aacttctctctgaatctcagttagttctcataaaatgagagggatggtgagttttgccgtttggtctctctttgctgctttactctcacagcagctctttgcttctgttgcttccgtaaggtttgaggatgccaaaacatactacttatctcctccctctggctcacatggaactcctccatcacacacgcctccttcttctaactgtggaagtccaccttacgacccttctccttcaactccttctcacccttcacctccatcacatactccaactccttccactccatcacacactccaactccacacactccatcacacacgccaactccacacacccct

SEQ ID NO: 167425 - DNA, 355 bp, Arabidopsis thaliana nossen
  unsure (1)..(355): unsure at all n locations
attttcgtagtcgcttgacttttttcagattcttacttgcagctatgggtaaagagaagtttcacatgaacatngnggtcattggtcatgttgattctggaaaatcgaccacaactgggcacttgatctataacctggggggattgaccaggctttcattcaaaggttcgagaaggaggctgctgagatgaacaagaggtccttcaagtacgcatgggtgttggacaaacttaatgccgagcgtgagcgtggtattaccatcgatattgctctatggaagttcgagaccaccaagtactactgcacagtcattgatgccccaggacatcgtgatttcatcaagaacatgattact

SEQ ID NO: 167426 - DNA, 357 bp, Arabidopsis thaliana nossen
gtttaccaaaatgcccttggctccaggaaacttctctgcaatctcgacccaagcctcgtaggactctctcacgaatagacctggaggcaaaaccttcgtcggcacggagcagacgtagccaggaattggatgttctacgttgccggagcttaaatctagctcagaagtggttatgcgatgtctctcagggagatacttcatcatacttaaaaacccagcgttacacgttaggaagatgtaagaaggaaggttaagctcgtttgccacttcgatcattggaacacaaaaaaaatcgataaccaaaccgactacacgaaccgaaccggattctttacgtgaagaaactagagtggagag

SEQ ID NO: 167427 - DNA, 354 bp, Arabidopsis thaliana nossen
  unsure (1)..(354): unsure at all n locations
gggnganccacgcgnncggtttaccaatttgcttttgtctccaaaaacaccncactncaaggtcgtcgtaaacttataaggtctctgtcactaataaacctggangcaaaaccttcgtcggcacggagcacacgtagccaggaattggatgttctacgttgcctgagcttaaatctagctcagaagtggttatgcgatgtctctcagggagatacttaatcatacttaaaaacccagcgttacacgctaggaagatgtaagaaggaaggttaagctcgttagccactttcgatcattggaacacaaaaaaaacctattaccaaaccaacttcactaacccaaccgtattcttta

SEQ ID NO: 167428 - DNA, 350 bp, Arabidopsis thaliana nossen
caaaccctttgtacttacttcaacaaagaaagcacggacctcctcgagagaagaatttttgtcccaattcaagactaaacaagttcgaactaattgaatacttgtgtcagaaattcctcgagttggtttgccatttccataaaggatatagttgaaaactcgaagttgaatattatccttttcccgaaagagatcttgtgggaagagtgttgccaaatttatactgtccgctatctcataggtggctacgggccgcaccaaaacaaaaaactttttcttggttggtgtaatccgttggacataaatccaatttttaaattttttggattccttcgagtttgtttttcctc

SEQ ID NO: 167429 - DNA, 317 bp, Arabidopsis thaliana nossen
  unsure (1)..(317): unsure at all n locations
gnnntgagtttcctcaatcatttcaactcaatgacatcattctctgctggttccatattcacatcaagatcttcttcagctntctcttcttcctccatcatgctttgatcaaccaaattgctacttctgggtgtcggttcttgaacatccagtatatcagttccgttggcaaagcctcaacaccaagcctctgtgagctgtttggattccagttttgcagtgattttgggtttctctctaataagttgctcaaatcccataatcacttatattgatagggaatatatcagtaagaaagatactgcatggtggtttat

SEQ ID NO: 167430 - DNA, 349 bp, Arabidopsis thaliana nossen
gttcctctccttctcgcccatttcaccgtccctgtcaacaatcccggcaactacaaggattacttccctgctgcatcccaatttcagcaatcctacttcaatgggtttaccaaagaagtcctctctaccagtttcaacgtgccggaagaattgctagggagattggttacgagatcaaaagaaattggtcaagggattatccgaagaatttctccagaccaaatcaaggaacttgctgagcacgctacatctccttcaaacaaacacaaagccaaaaaagaaaaggaggaagacaaagacctaagaacgttgtggactcctttcaatctctttgcaatagatccaatct

SEQ ID NO: 167431 - DNA, 350 bp, Arabidopsis thaliana nossen
caaacaaaaagtaaaatggttattctcagcaatctcctcgttgcaaccttcggggttctcctcgttcttaacggctgccttgcgaggcagtcacttggggttcctcctcagctacagaacgagtgtaacctcgacaacctagatgttctccaagccaccgaaactatcaagagtgaagccggtcagatcgagtactgggaccacaaccaccctcagctccgatgtgttggtgtttccgttgctcgttatgtaattgaacaaggcggtctttacttgcccaccttcttcacttccccaaaaatttcctacgtcgttcaaggaacgggtatcagcggaagagtggtccctgg

SEQ ID NO: 167432 - DNA, 346 bp, Arabidopsis thaliana nossen
gtaatacgaaaacatctttggtttcggagaaacgagaaaacaaaacgccaacatgtttcacagatttaggttgttccacatgaagaacggaggggaagcatcgggcttcaaaggactccactcagctttttcattgtgtgcaacaggatatattttatcagcctcgcgccttcaatcccacctacaacaaacgccaaacattcaatgcttccaaaataatcttcatatttcagataaagcgagagaaagaaaaaagaatccacaacgttcaactttttttaagacatataattgtaaaccatatgcacgctaactacacctgatacgtccatgacgattttgacag

SEQ ID NO: 167433 - DNA, 354 bp, Arabidopsis thaliana nossen
cttcaactctctcactcacggtcacagactcacagagatctgtttctttcttttatttttgctttcactcttctcttccagtgagagagagtgagagaaaacaaaatggtgaagcttttgttagtagcgtttgttgtggctggtataatactgggaactcaagcaaatgaatatttagatttcaatgtgacagaaatagatcgcattgaggaattagagtttggattttccaaatatagctccaatttgaaccctttaatggttggtctcacccttatcagaggagctgattctggagctggtactttctctatgcttctgtcactagctagatctctacatgtctctctttct

SEQ ID NO: 167434 - DNA, 359 bp, Arabidopsis thaliana nossen
gatgccctggttgagtacatgtatgtgggtcatgaccaaagggcagacttgattctggcgtgcagaatccgagaaaggaaagaatctgtgactgttctactgtgcggtactagtggctgtggcaaatctacactctccgcacttctgggaagtaggcttgggattacaacggtggtctcaaccgactcaatccgtcacatgatgaggagtttcgttgatgaaaagcagaatcctttgctatgggcttcaacataccatgctggagagtaccttgaccctgtggcagttgctgagtcaaaagccagaagaagaagagccaaaaaaatggatagtattgaggacgaaaaagcgaaagcctc

SEQ ID NO: 167435 - DNA, 349 bp, Arabidopsis thaliana nossen
cacattttcgttgccgcaagactcctttcagattcttacttgcagctatgggtaaagagaagtttcacattaacattgtggtcattggtcatgttgattctggaaaatcgaccacaactggtcacttgatctataagcttggtggtattgacaagcgtgtcatcgagaggttcgagaaggaggctgctgagatgaacaagaggtccttcaagtacgcatgggtgttggacaaacttaaggccgagcgtgagcgtggtattaccatcgatattgctctatggaagttcgagaccaccaagtactactgcacagtcattgatgccccaggacatcgtgatttcatcaagaa

SEQ ID NO: 167436 - DNA, 356 bp, Arabidopsis thaliana nossen
cggacgcgtgggaggaaataaaaagagttagagaatggattactacctatgccaagatcgcgtataaatggaaattttattgataaaacctttacaattgtagccgatatcttattacgagtcattccgacaacttccggagaaaaagaggcatttacttattacagagatggtgcgatttgattatcattattttttttctcgccgattttgattggaatagaaagaaaaactagtattgaaaaaaaatctacgcttttgaaggtgaagtttataatataaaaaaaacaatcccttctgtcatgtatccacgattaatgcagccttagatgcttcaattgtgaattatagtattg

SEQ ID NO: 167437 - DNA, 341 bp, Arabidopsis thaliana nossen
tgctaaatcctgtgtacatgatgtgatcactagaagtttttgatatgatgagacgatgtgggtgtgttgcaaccgttcatactttcaatggtttgattaatggtttagttgagaaacgtcaggtatgtttcacgaatctatgtcttgatgttttcctatagagattatctgattgaactaatctcttgtcaaattatttttgtagatggaaaaggcggttgagatattagacgagatgacattggcgggtgtaagtgcaaacgaacatacttacacaaagatcatgcaaggctatgcatcattcggtgataccggtaaagcctttgagtattttacaaggc

SEQ ID NO: 167438 - DNA, 357 bp, Arabidopsis thaliana nossen
aggcgatgatgaaggatcagtttgcaaattacgtggtccagaaagtcttggagatcagtaaagatcagcaaagggagattctggtgcagaggatgaaaattcatctccaaagtttgcggaaatacacatacgggaaacacatagtagcccgattcgaacaactgtttggtgaaggtacttttctctaaaactaaaacttgagttgtcaatatgactctgctaaagaaatctgaacgttctaatatgttattgttacagagagtgaagtctcagaagagggaacagaaggttagacagaagattttcttttgggttgcagatttgtacaatgtttgacttagacaaatatgtatttga

SEQ ID NO: 167439 - DNA, 217 bp, Arabidopsis thaliana nossen
  unsure (1)..(217): unsure at all n locations
gagtaacgaatgtactgtagttcatggctgcagcacaagaacgccttgtcctcttgccacgtctacggtttctggtcattcaggancctatcatgcaccagacaactctgctagtaatacatttgctacctgagcaagaactatatattctactactgcactatatgccatatctgatgatgatgatcaacctgctgaaagaaattgaggttccaaa

SEQ ID NO: 167440 - DNA, 359 bp, Arabidopsis thaliana nossen
ctagttttttccgccacactcttccgccattatttttgttacttggagctagctagctaaaaaatatgggaagcgataccgaagcacataagtcgattcaaaaggagaagaagaagtacgctattactcttgctcctatcgctaaacctctcgccggcaaaaaactccagaagagaactttcaaactcattcaaaaagctgctgggaagaaatgtttgaagagaggagttaaagaagtggttaagagcataagacgaggccagaaaggattatgtgtaatagctggaaacatttcacctattgatgttattactcatcttgcaatcttgtgtgaggaggctggtgttccttatgtatac

SEQ ID NO: 167441 - DNA, 345 bp, Arabidopsis thaliana nossen
  unsure (1)..(345): unsure at all n locations
tcgcacatagcaattaatgtcaattatgttgcccctcgtctgcacagctctggctctctgctttcggctgaccaacacaaacanctaccgcaccgtcgttgagttcgaagaagatgacgccactaaccccataggcccaaaaatgaggaaatgccgcaaggagttccagaaagaacaacacctaagagcttgccagcaatcgatgctccagcaagcaaggcaaggccgtagcgatgagtccgatttcgaagactacatggagaacccacagggacaacagcaggaacaacaactattccaacagtgctgcaacgagctttgccaggaagagccatattgagttcg

SEQ ID NO: 167442 - DNA, 351 bp, Arabidopsis thaliana nossen
gtgattaacaaaaatgctatgattacgtatcaccttaatatagctcctgaactcttttaattaattctgcataatttactaaaatatatatttacaccaactagccatcggtatttaataacacttatattactcattaattaatccaaatataaactaaaaaaaatgaatttatcgtagtataagatttaatatgttctgatttcaattaattaaataaaacgatattatatttaacatatgcaataagagatgcaaatctttagaagattaaacacttaacattttgtgtaccgattaactttataactatacatgtttatataaccatgttacttttaaaaatatgaa

SEQ ID NO: 167443 - DNA, 350 bp, Arabidopsis thaliana nossen
cacagtgagatttattcaaaaggacgcagaagataaaaagacatcactcaattctaaaccatatttccgattgttcatcaactggctactggacttgtgttccctggatcctgggacggatggtgcaaactttcaggttctcacagcttttgccaacgccttccacgcattgcagcctcttaagattcctgctttcagttttgcatggctagaacttgtcagccacagaagcttcatgcccaaactacttacagtaaatggccagaagggttggccatatgttcagcgcctgctggtggacttgcttcagtttcttgagccatttttaagaaatgctgaactcggaggac

SEQ ID NO: 167444 - DNA, 348 bp, Arabidopsis thaliana nossen
ctcttcttcagatgatgaacctgcacccaagaaggccgttgctgctacgaacggaactgttgctgtaggggtctaaggatgactcatcatcatctgatgatgattcttcagacgaggaagttgctgtcaccaagaagcccgcagctgctgctaaaaatggctctgtaaaggccaagaaagagagttcgtctgaagatgattcatcttctgaagacgaacctgcgaagaaacctgctgctaagattgccaagccagctgctaaggattcttcatcctctgatgatgactcagatgaggattctgaggatgagaaacctgctaccaagaaggcagctcctgctgctgcca

SEQ ID NO: 167445 - DNA, 345 bp, Arabidopsis thaliana nossen
  unsure (1)..(345): unsure at all n locations
aacggttacacttacttagcttgtagatgcatcanggaattaggggncgcgtntttccatcatttggtggtgaagagggctttggttctggcgatggattctccaaccgctgagtcacttgtactaaagctgttgaaggaaactgctgaagaaggactgatcagttcgagtcaaatggtgaagggattcttccgagtagcagagagtctcgatgaccttgctctagatatcccatctgccaaaaagctgtttgattcgatagttccaaaggctatttctggaggctggctcgatgattcatttaagataacctctgatcaagatggagaaaaatcgagtcaagac

SEQ ID NO: 167446 - DNA, 338 bp, Arabidopsis thaliana nossen
  unsure (1)..(338): unsure at all n locations
cttttcactgatctattcactcactcaaatcgcctcctccgcgaaatcgatcaacattttcgttttcgggacacaanattccataccgcatttctcttttctaggttcgccggcgctaaacattccccgttattgccgactccatcgcttactttatctacttccggcattcatcttaaaaccaaaccgaattctcagtttcactccaccatagcatcatcctcatcttcatatacattcgccggaactgatatcattgagattaaatcgctgcccacgaatcctattgaaggacaaaagactggaactagcggactcctgaagaggtgaaagttttc

SEQ ID NO: 167447 - DNA, 384 bp, Arabidopsis thaliana nossen
  unsure (1)..(384): unsure at all n locations
cggaatncccggggcgggcgacgcgtgcgaaaacttatgatctttctttaataattagaaacagggatttacatanacagaaggtggagctcatctgtgtgcgggtacgtntatcaatatcagttagaccatgatatttgtctggaagtggaaggagagactttgtgagaattgaaaaagaattcacacatatagaaagctcccctggaaaattagagaacaaacagttacaaaacaaaccccaaaaaaaagattctccatcgagtataatcatcttagtcaagctcacctttctcagtcctcttcatcgagccactagcacccaaaatatcaccaatgtcgataaattgcttcaactgttcaaactgatcatctgaaagtctt

SEQ ID NO: 167448 - DNA, 347 bp, Arabidopsis thaliana nossen
  unsure (1)..(347): unsure at all n locations
aagagaattaattgattggtgtaatggagaaggcagttcatttatccagcaaaaatggaccctttgttgcaggagagccaacnaagaccggaacctccatggttgacacggcagcttcagccgtacaaagcttcgctccgattaaccaaatccaccaacatctctgcgcgtttcatttctatgcatatgacatgacccgacaagtggaggcacaccatttctgtggtcacatcaacgaagacatgcgccagtgtctgatctacgacggtcctgatgccaacgctcgtctgatcggtctggagtacattgtgacagagaagctctttatgacattgcctgacgatgag

SEQ ID NO: 167449 - DNA, 343 bp, Arabidopsis thaliana nossen
  unsure (1)..(343): unsure at all n locations
ccggtcccgaaggccggggacgccccacgccaccgctattcaccgatctatacactcacccaactccccaccancccgtaatcgtgcaactcttacggtgtcgtacacaacaaacnaccccncattactcttttctacgtccgcccccaccaaacatacgccggtattgccgactccatcgattactttatctactcccggcattcatcttaaaaccaaaccgaattctcagtttcactccaccatagcatcatcctcatcttcatctacagtcgccagaactgataccattgagattaaatcgctgcccacgaatcctattgaaggacaaaaaactggaact

SEQ ID NO: 167450 - DNA, 348 bp, Arabidopsis thaliana nossen
cattttcgtagccgcaagactcctttcagattcttacttgcaggtatgggtaaagagaagtttgacattaacattgtggtcattggtcatgttgattctggaaaatcgaccacaactggtcacttgatctataagcttggtggtattgacaagcgtgtcatcgagaggttcgagaaggaggctgctgagatgaacaagaggtccttcaagtacgcatgggtgttggacaaacttaaggccgagcgtgagcgtggtattaccatcgatattgctctatggaagttcgagaccaccaagtactactgcacagtcattgatgccccaggacatcgtgatttcatcaagaac

SEQ ID NO: 167451 - DNA, 342 bp, Arabidopsis thaliana nossen
  unsure (1)..(342): unsure at all n locations
ctgagtgaaaaaagcttatcgcggcgattagttcccggcgaagagagaagaggagagatattaggtgggggactaatggatctgctagctcagcgcagctctctcagaaggaagctgatgtcaggatgatgtgtgccgctgaggttcatcttggaaccaagaattgcaattaccagatggagcgttacgtcttcaagagacgcaacgatggtatttacatcttcaaccttggcaaaacatgggaaaagctccagatggctgctagagttattgttgccattganaacccacaggacatcatcgtccagtcagctaggccctatggacagagagctgtgttga

SEQ ID NO: 167452 - DNA, 358 bp, Arabidopsis thaliana nossen
aagaacttaaatcaaaatacttaatagcatggcgatacatttatacaagggttctgaccccgtgtttacgctatggagccgtagacagtcaagtgaaatccaatccacgaaataatttgatctgtgggcagcatcattgtggtaaaggtcgtaatgccagaggaataattaccgcaaggcatagagggggaggtcataagcgtctataccgtaaaatagattttcgacgaaatgcaaaagacatatatggtagaatcgtaaccatagaatacgaccctaatcgaaatgcatacatttgtctcatacactatggggatggtgagaagagatatattttacatcccagaggggctataat

SEQ ID NO: 167453 - DNA, 358 bp, Arabidopsis thaliana nossen
caaagaacaaaaatgggtctggtaacaaaagctctcaaatatctcttgcgccttgcgatttccttggcgttcagctacaccaatgcagtttcatccgcttctccaatgactccaccgtcatcgccggctaagatgagcaggagacttgtggcagttgaaggcatggtttattgcaagtcatgcaagtattccggcgtcgatactctcttggaagcatctcctcttcaaggagcgaccgtaaagcttgcatgcaacaacacaaagagaggtgtgacaatggagacaaaaacagacaaaaacggatacttcttcatgctagccccaaaaaaactcaccacctacgctttgcacacgtgcc

SEQ ID NO: 167454 - DNA, 364 bp, Arabidopsis thaliana nossen
  unsure (1)..(364): unsure at all n locations
gggggggcgatgcgtccgggacatancattccccgctcattttcatggatggaaggccatanancggaatggggtcaaggttcttggtgtgggttccnaaancctaccaggcatataagaagcagcaacaccgttggcattcgggacctatgcagcttttccgcttgtgtcttggttcaatcttgacctctaagatagcgatatggaagaaggcgaatctgatacttctcttctttcttcttaggaaactcatacttcctttctactccttcactttgttctgcataatccttccactcaccatgtttgttccagaagctgagctccctgtttgggtcatctgctacataccagttttcatgtc

SEQ ID NO: 167455 - DNA, 353 bp, Arabidopsis thaliana nossen
gcgctgattcagatgacctgagcatacctcgccagagtacctccgggccatggtaacccattgtggtttaagtacaccaatgccaagccatccgcttatgcaatgactccaccgtcatttccatctaacataatcactgagacttgtgtcagcatgaaggcaaggtttatagcaagtcatgcaagtattccggcgtcgatactgatcttggaagcatcctctatccaaggagcgaccgtaacacttgcatgcagcaacacaaacagaggtgtgacaatggagacacaaacagagatacacaggtacttgttcatgctagccccaaaaaaactcaccacctacgctttgcacac

SEQ ID NO: 167456 - DNA, 355 bp, Arabidopsis thaliana nossen
gttttatgctttcgatgattcccaaaatctttctcatgcgttttttactttcttgatttggcaacatgtgctgattttgatttcttctttatggttgccgacacgaaagaagctaggacacaaaacaactcaaattttgtttggtgagaaaaatcaaccaagaaaatattgattcttttggagcaaggagttggtttgattgaagaaggaatggtgggaagcattgaggcaaagagtctgcaatcaaacgggtctgttcatcatattggtcttaatttggaggagaaacttgatgaatttcgtcgtcttttggggaaatcagaaaaagatccgttaaggattgtaagtgttggtg

SEQ ID NO: 167457 - DNA, 346 bp, Arabidopsis thaliana nossen
  unsure (1)..(346): unsure at all n locations
ccaactccgctgcttctttttatcggagctctcatcttctggggcgggggtactgttttatgcgatgcctccnaccaccgttacaaggacggtgactccgttcctctctacgccaacaaggtcggcccctttcacaatcccagtgagacgtatcgctatttcgatctccccttttgtattccagagggtgtgaaagataagaaggaagctcttggtgaggttttgaatggggataggcttgttagtgctccatacaagcttaactttagagatgagaaagactcagaggtgtactgtaaaaagaagcttagtagagaagaagttgaacactttcgaagagctgttg

SEQ ID NO: 167458 - DNA, 359 bp, Arabidopsis thaliana nossen
  unsure (1)..(359): unsure at all n locations
gcgtccgccaaagtctcgtcctttacgttcaattaggtcattttgaaaccctgttcttagagttangaagggaagtatttgggtgatcnaaactgtttgatttcgttcgaggatcttccttctcatttgatcttggaggtgttgacctctgggaggcttagtgcggttgatctacttagcttggaattgacttctaaggttttcggagggagccatggattctatcctttgaaattcagatcattagctgattatgcggcgtctcagctttgctctatgcaccctgtctacgtgggaatgggtttgactacacagaaagagctctttgccaattgtgagggaaactggaagcggctttt

SEQ ID NO: 167459 - DNA, 330 bp, Arabidopsis thaliana nossen
  unsure (1)..(330): unsure at all n locations
gcaacggcaggaccattaaggttaaaggtttcggtcctcaacccanagggaacagtgccaatgtaatgctgcgtgtccccacacangccttgaactttgccttcaaagatcacttcaaaagacctttcaactgtaagaaggacagatattgttaccggaagtggaacgctggtaacttggcatctggaggagcagctggtgcctctccccttctgtatgtgtactccctcgactatgcccctacccatctagctaatgatgccaaggctgcaaagaaaggagaccctttaaaacagtttgatggtcttgatgatgtctacagaaagacac

SEQ ID NO: 167460 - DNA, 358 bp, Arabidopsis thaliana nossen
gcggctctctcatgtcttagcccttagactacgagtcgactcagccgaactgggaatgcagttttgatttggatcccttaggatcttagttatggctacttgcttgcgtggaatcacgaagagagttaatcttctacagagacgagtttatccatcgtgtggtcatctaattcgtgatgatagagatgaaactaaatctggttcttcggatacaatgattcgtgaagtcttagcacgtaatgggactaataagcttagctctatgtttgcggataggcattatcagtcgtttgctactggtccgttgggtcttggattgtcttcgtgtcggcatatgagttctacaccaccagaatgg

SEQ ID NO: 167461 - DNA, 361 bp, Arabidopsis thaliana nossen
acccacgcgtacgatcaacttaatcgtttctctcaaatttagggttttctcttttcgcgaaagtcttgcggttttgtgaatcatctctatctggtttgagggtttcgtttgatatctggagaaaggggtttctggaaacaaggagttcataattcgcgatcttgatctatcgatcttcatttatatataaaagcgtgaatgagattatgatggagtcgaaaggtggtaaaaagaagtccagcagtagtagttccttattttacgaagctcccctcggttacagcattgaagacgttcgtccaaacggtggaatcaagaaattcaaatcttctgtctactcaaactgctccaagaggccatc

SEQ ID NO: 167462 - DNA, 350 bp, Arabidopsis thaliana nossen
  unsure (1)..(350): unsure at all n locations
ctccccatctctttcgacagatctcttctctctctcgtgttaatggcggctcaattcagcgtttttgtctcattgcaaactncttgtctggcaacaacaaggattagtttccaaaagccagctttgatttccaaccatggaaagactaatctatccttcaacctccgccgttcaatcccatctcgccgcctctctgtttcttgcgcggcaaaacaagagacgatagagaaagtgtctgctatagttaagaagcaactatcacttacaccggataaaaaagtcgttgcagaaaccaaatttgctgaccttggagcagattctctcgacacggttgagatagtaatgggttt

SEQ ID NO: 167463 - DNA, 373 bp, Arabidopsis thaliana nossen
  unsure (1)..(373): unsure at all n locations
gggcgtgcacgcgtgcggctctctcatgtctcatcccttagacttccagtcgactcagccnaacggggaatgcagattttatttgtttttcggttangatcttagttatggctacttgcttgcgtggaatcacgaagagagttaatcttctacagagacgagtttatccatcgtgtggtcatctaattcgtgatgatagagatgaaactaaatctggttcttcggatacaatgattcgtgaagtcttagcacgtaatgggactaataagcttagctctatgtttgcggataggcattatcagtcgtttgctactggtccgttgggtcttggattgtcttcgtgtcggcatatgagttctacaccaccagaatg

SEQ ID NO: 167464 - DNA, 375 bp, Arabidopsis thaliana nossen
cgggggcgtcccacgcgtgcggctctctcatgtcttatccctatgactaccagtcgactcagccgaacggtgaatgcagtttttattttgtttcccttaggatcttagttatggctacttgcttgcgtggaatcacgaagagagttaatcttctacagagacgagtttatccatcgtgtggtcatctaattcgtgatgatagagatgaaactaaatctggttcttcggatacaatgattcgtgaagtcttagcacgtaatgggactaataagcttagctctatgtttgcggataggcattatcagtcgtttgctactggtccgttgggtcttggattgtcttcgtgtcggcatatgagttctacaccaccagaat

SEQ ID NO: 167465 - DNA, 295 bp, Arabidopsis thaliana nossen
  unsure (1)..(295): unsure at all n locations
acaaacacacacaaatctctttagaaaaacgacaaacccnggggcagtgtcacattaatgtgtgtgttgggccttcaaaaaacaccacccatagcatacgaccacagcatcatccagatacaacagggaacaagcccgcacacggaccatgacaccacaagacccctagcacccgagaccacaagagaacacatcaacatccgcctaggcgatgcccacagcaacaaggcgtatgcaccgaaactaggaagaaagctaagaggaccaccggaaaaagggaacgacccaacaaaca

SEQ ID NO: 167466 - DNA, 352 bp, Arabidopsis thaliana nossen
aacgcacttattacatggctgccagagcttaccaaagcggaaatatcgagttcaacaactccactaccataggaatcttaagttacacctcttcatgcaaagctaaaacatcatcgttttcaggatattacccaacccttcctttttacaatgacacctcagcagcttttggattctttaccaagatcaaatgcttattctccggtcaagttcctgtccaaatctctcgtaggataatcacgacggtttcaataaatcttcgcatgtgtcctcaaaactcgtgcgaaggtccaaatgggtcgagattagcagcgagtatgaacaacatatcgtttgtcacaccaagtcacgt

SEQ ID NO: 167467 - DNA, 356 bp, Arabidopsis thaliana nossen
  unsure (1)..(356): unsure at all n locations
gtccgctttgttatttagccatcacttcagagtgactcacacactnnnnncaaggattggatcagttttttgcggttggtataaactaatgtctgcagttcgtagagtcatggcgttagcatcaaccacgttgccgacgaagtccggattatctctttggtgtccgtcttctccgtctctcgctcgccgatttcccgctcgtttttctccgatcggttctagaatcgcttccagaagcctcgtcactgcttctttcgctaacgagaatcgcgagtttgtgattgttggtggaggaaatgctgctggttatgctgctagaacttttgtggaaaatggaatggctgatggtcggctat

SEQ ID NO: 167468 - DNA, 366 bp, Arabidopsis thaliana nossen
  unsure (1)..(366): unsure at all n locations
gtcgtcccacgcgttcggagaaacaagttaaagtgtcattgctaacgaaaggagagattctgatgcgcaacggtggttctatgtgttctggagccaaagntgtaggagttaaagtcgatctggctaaactgcaactgactgcgcctgtttgtaccagcaaaggagagaaagtggctctaagcagacgtgtggaaaagcattggcgtttgattggttggggtcagattcaagctggaaccaccatcgaagttcctccttcacctttctaagctatgtgttatttttgtcctttttgtttgtgtttctgaaaaaaagattgttaaacccctcaaaaagataataaaactctttttctcgttgggggat

SEQ ID NO: 167469 - DNA, 346 bp, Arabidopsis thaliana nossen
  unsure (1)..(346): unsure at all n locations
cttcagtctaaccctaatagttatgctgttgttgtgagtactgagatggttgggtttttttggtgcgtggnaantnacaagtcaatggttatacctaattgtttctttaggatgggttgttctgccgttatgctctctaaccgtcgtcgtgactttcgccatgctaagtaccgtctcgagcacattgtccgaactcataaggctgctgacgaccgtagcttcaggagtgtgtaccaggaagaagatgaacaaggattcaaggggttgaagataagtagagacttaatggaagttggaggtgaagctctcaagacaaacatcactaccttaggtcctcttgtcctac

SEQ ID NO: 167470 - DNA, 348 bp, Arabidopsis thaliana nossen
  unsure (1)..(348): unsure at all n locations
ngattatgtgccaactattcctcatacaactgngaccccnccgaanatggtatcattttatgttttgggggtcacaaaggcatcaagagatatacttctactgttctacacatggaaacgaaacgctctggtaatattttaccatcttgtatatgttataaccagcctttggtccccaatatgaataggcgcctaaaacaaagttgtaagcaatataccctgagaaaagaaggaaaacagttgcaggtaatcaataaatcatacaagaacacagatgctttttaatacatgacaagggaaaatggttaccaagaatgtttgtaacataaaccttatctaccaaaagca

SEQ ID NO: 167471 - DNA, 351 bp, Arabidopsis thaliana nossen
aaatgccgcattgaacctacctttctttttcgcaatcgcgaaccacaggctcaccgtagtctttttcgatggacactacatcaaacctataaaggctacttatatcactatatcccctggcgaaacactagacatgttattacacgctgaccaagaccccgaacgcacttattacatggctgccagagcttaccaaagcggaaatatcgatttcaacaactccactaccataggaatcttaagttacacctcttcatgcaaagctaaaacatcatcgttttcaggatattacccaacccttcctttttacaatgacacctcagcagcttttggattctttaccaagatcaa

SEQ ID NO: 167472 - DNA, 349 bp, Arabidopsis thaliana nossen
  unsure (1)..(349): unsure at all n locations
gctgttgttctcaaatgaaaggtttgtgcaaccggngccggagggnctgtgggatctttggtgttttggctcaccctctctaaggattacttcgtccatggcactgtcagagaccctgataatgaaaagtatgctcatttgaagaagctcgagaaagctggtgacaaactcaagctcttcaaggctgatttgttggactacggctctcttcaatctgctattgcaggttgcagcggagtcttccatgtcgcttgcccggttccaccagcttcagtccctaatcctgaggtagaattgatcgcacctgctgtggatggcacgctgaatgtgcttaaggcatgcattgaag

SEQ ID NO: 167473 - DNA, 349 bp, Arabidopsis thaliana nossen
  unsure (1)..(349): unsure at all n locations
gtttcaaactttggggaaggttaaggctgttttattgntcatgcctgggtggagtcttcttgttgtcgggttctatatcttatattgaaatcaacaaagaagaaaaaagcgagtgttgtgtggcaaaactgcaattgctaactggagactgatgtggatgtaactagagagactgatagaatcaaaccttaaaatctttttactaacaatagaaacttgttcaagatcaaacaagagctttcatagataagcagatgttcttatagatatagaaacaatgaagaggataaagtcttgccgtctgagttatagattctcacagaggcaatgttaaaaatggtttcaggaa

SEQ ID NO: 167474 - DNA, 354 bp, Arabidopsis thaliana nossen
agatccgattcggaagtttctttgacatcaaaacacaaacccggaaaggttcgggtgccatttttcattcttcgaagccctagctcaaagctttctctctcaaatccgccatgactaaacagcacgcgaactggtctccttacgataacaatggaggaacatgtgtggccatcgctggatcggattactgtgttatcgccgccgatactcggatgtctactggttacagtattcttagtcgcgattactccaaaatccataaactagcggacagagctgttttgtcttcctctggcttccaggctgatgtgaaagctttgcagaaggttctcaaatccagacacttgatctatc

SEQ ID NO: 167475 - DNA, 356 bp, Arabidopsis thaliana nossen
acgcaaaaaatcaatcttcttgaaacaaatatttttcttagaaaatcaaatgaaaaagaacagatggtgtgtctatatattaataaagataacaataaataaaatcatcaaacctaaattgtttcccacgaatcagtttcgagacattggcacgttaaattgtcgatctggtaatgaagtaggctttacatgtagtagactaaagtgttaattaggacctagaccctacagatttgggcataaaccgtcctttgttatgggacgtgttctacttggtatctctagaaccgcggtctttggcagatggatcagattatatctttttgacacttgtatttatatatgttatatgttat

SEQ ID NO: 167476 - DNA, 367 bp, Arabidopsis thaliana nossen
  unsure (1)..(367): unsure at all n locations
gggggggtcccacgcgggcggtctgctttttattcacagagtaggagcacgaaagannnngagtatcagtctatttcgtggggttaagggtaacaaaccnnanatnatccganaatcgcaacgccggagatttgccagcgttgaaatcggcgatgagatcattaagctggacaaggaatggcgacagcgtcaatttgaagttgatagcttcagaaaggagttcaacaagctcaataagcaagtggcgcagctcaaaattaaaaaagaagatgcgagtgagattattcaacaaactgagaaaaacaaacaagattctactgcaaaggaggctgaagttcgtgaagcttatgctgctttgaaagccaag

SEQ ID NO: 167477 - DNA, 352 bp, Arabidopsis thaliana nossen
ctttctgcagattcttctatatatcaaaaagaacaaattgatgagcctgataagaaaagatggtagtgtcataaacaaaattcctttgaaatttacctacaaaatcctcagagtactccaagaggaaaaaaaaagcatcaaacgaagaaactaagaatcaaaaatgaaggaaactaagaagatgtttgtttgaatgatgggttgagagcgtatacaggtgatacggcaaacaaagagtgcaaaaatgtttgtttaaaccaaaattttcgttaatctgatggttacaatttgtttatctattactatcagaaatcaatcaaaaattagaattagtatatagaaattacgttat

SEQ ID NO: 167478 - DNA, 348 bp, Arabidopsis thaliana nossen
atcacaacacataacaatctcactcgaaattcctttgactcatcatcatgaccatgtgttgatgtttcgtctcctctcagctcaaaaccctagccgccgatgtcgtcgctgcttctcctcgtcgatcgatagccgccaccaccagacctgtcggtttctatctcgccgccaatcgatcagccatttccgcatcttctttcgttatccctcgtcgtttcagctccgattcagtagagactcctgcgacgaagaaggtggaggatgtaatgcccattgcgactggacacgagaaggaagagcttgaagctgaacttgagggaaggaggctggatgatattgacttccctg

SEQ ID NO: 167479 - DNA, 368 bp, Arabidopsis thaliana nossen
  unsure (1)..(368): unsure at all n locations
ggggcgggcgacgcgtacggagaaagagataaagagagacttatatattggcgcacagcgccccnggggtacaggagaactttttaatgttcctgttcctcacaancatcancnncctcctcatcccancgtcacgtgtcgctctccaaacctgttcagatcatctgtaattctcaacagtctcatgaaaacaataactccgccgtctcccgccgtcttgctctcactctcctcgtcagcgccgctgctgttggttccaaagtatctcctgctgatgccccctaccgtgaagctgcaaacgggtttgggaagccaaaaacgaacacaaacttcttgccatacaatggaaatgggttcaaaaggcaagt

SEQ ID NO: 167480 - DNA, 348 bp, Arabidopsis thaliana nossen
  unsure (1)..(348): unsure at all n locations
cccaacactatggcaactctatttctcacaatcctcctagccgcggngcgcttcctttttttgcgtatgttctctcaccgncgcagccgcagccacaacaaccgtcttccaccggggccaaacccatggcccatcatcggaaacctccctcacatgggccctaagcctcatcgaaccctttccgccatggttactacttacggccctatcctccacctccgactagggttcgtagacgtcgtggtcgccgcttctaaatccgtggccgagcagttcttgaaaatccacgacgccaatttcgctagccgaccaccaaactcaggagccaaacacatggcatataactat

SEQ ID NO: 167481 - DNA, 367 bp, Arabidopsis thaliana nossen
  unsure (1)..(367): unsure at all n locations
ggcgtccgacgcgtccgntaagcttgaacttggtggatcaatggccgacgttcgcacacactcgcgccaggttcaagtgctctcgttcgccagcatnaaggaggcatcaaagtcctttatcctcagagtggcccttcttccactcaggtgctagccgtgtttgtcggtgtaccgataggaggaacgctgctgactatagccggtttgacattagccggttcggttataggactaatgctagcattcccgttgtttctcatctttagtccggttattgtaccagcagcctttgtcatcggtctagctatgactggattcctggcttcaggggccataggtctcaccggactatcatccatgtcgtggg

SEQ ID NO: 167482 - DNA, 350 bp, Arabidopsis thaliana nossen
  unsure (1)..(350): unsure at all n locations
cacactactaataaaccatgaagcttcttatgctcgcctnnggggttcgattagctttggttattgtgttaggnnacnagtttgtttgtgaagagaacgagccattcacatgtaaccaaactaaacttttcaacagtggcaatttcgaaaaaggcttcatcttcggtgttgcatcttctgcttaccaggtggaaggcggtagaggccgtggacttaacgtttgggatagcttcactcaccgattcccagagaaaggtggagctgatttgggaaatggagacactacttgtgactcatatactctttggcagaaagatatagacgtgatggacgagctcaactctactggc

SEQ ID NO: 167483 - DNA, 343 bp, Arabidopsis thaliana nossen
  unsure (1)..(343): unsure at all n locations
gagagaagcaaaaaacaatttttatagaaagaacagaaaaatcagaaagggagagataaattgattaaggcncncnacncnctnnntcttcttcgtctcccatattctccgatcaaaaatatatttctctctcactttcctcggttttctcggcggcttcttcttctcctatttctccctaaatccctttctccagttttcttgggataaatcttcctcctttctgcagacgccatgtccgacaaaggtcgtcccttgccaaaatttggtgaatgggatgtgaatgatccagcatcagcaaaaggttttacagtgatattcaacaaagctagggatgagaaaa

SEQ ID NO: 167484 - DNA, 339 bp, Arabidopsis thaliana nossen
tggaggaggttgaggcggcgtgtaaacaaccaacgagtccgatgaatgggtgtgaagcttgttggctgtggcgatgttcagggaggattgatccatataggactaggaaatacggtggagaatgtgggttgaccagtgttacaagggttactcgagctagaagcagccgtgtgtctttgcacaaccataagacttaagcttctcaactgaaacatcttcattcccctcgcacttcaagctcttatcacttgtgggatcaatcctacttgtggatttgactgccctactctcactagatctaaaaacatccccttgatttaacaaatgtacgtatgatca

SEQ ID NO: 167485 - DNA, 353 bp, Arabidopsis thaliana nossen
  unsure (1)..(353): unsure at all n locations
aataccgaaagcacatttagatagaccctgccttggaaagaanattccgggcagtgaaagttctttatgtttccgtggatgaaactattcagatccttaagggtctgcgagagcgatatgaaattcaccacaagcttcgttacacagacgaatctttagtagcagctgcacagttgtcataccagtatataagtgatcgtttccttcctgacaaggcaattgacttgattgatgaagctggttctcgggttcgacttcgtcatgcacaggtccctgaggaagctagggagcttgagaaggagcttaggcagataacaaaggagaagaatgaagctgtccgtggccaggacttt

SEQ ID NO: 167486 - DNA, 350 bp, Arabidopsis thaliana nossen
ccctattactgcttttgttacttaagacaaaaaaacaaaacagggcaagggtcatcttttgctgtttaacagatggctcgtaccaagcaaaccgctcgtaagtccaccggaggtaaagctccaaggaagcaacttgctactaaggctgctcgtaaatctgcaccaactactggtggagtcaagaaaccacatcgttaccgtcctggaactgttgctctccgtgaaatccgtaagtaccagaagagtactgagttgcttatcaggaaactgccatttcagaggctagtccgtgagattgctcaagatttcaagactgatttgcgtttccagagccatgctgtcttagctct

SEQ ID NO: 167487 - DNA, 347 bp, Arabidopsis thaliana nossen
  unsure (1)..(347): unsure at all n locations
ggtttttgaatctgtaggctcttgtgggtggtccttgngtccgggctcgtaattttgttggggtgacgtgtgtgaatgctggaattgcttctgttatgaagcggattagaggcaaagaggatattgaatctgcgtaagtttcattctttgtgatttggttaccattgagaatgaaagtaatggttttaagtttgcagagtggtggcagcgttaggatctggatttgcatactcattggtgagccaaggattgcaaggacaacctatgaatgcaatcactactgctgctggttttgctgtttttcaaggagtgttttttaaagtgagtgatcatattgaaaactctct

SEQ ID NO: 167488 - DNA, 371 bp, Arabidopsis thaliana nossen
  unsure (1)..(371): unsure at all n locations
gggggggggggaggttgaanncacccctcctctcgcaaaccaacgtttaacactaactaananaacaagatagcgtgaaagtttaagtgtgttggcatccccaaggcnngcatgacngaggccagcccaatcacagcgaacgcacttatgagttgaggcaccgccaacggcaacctggcagggtacataacctactagacccgaggtgctccacttacccaagggaaccgcaacggcgttactaaccctaaaaacatggccagtacaaccccagaccgacagcaagcttgccgctgccgtcaatctgccacaaaagccgttggccccggactaaacactgcccgtgcagatggacttcccaacacatgcaa

SEQ ID NO: 167489 - DNA, 354 bp, Arabidopsis thaliana nossen
acggaatcttatcttcgttagggttatggcaaaaagaagcaaagatctggtttcggggtctcttttatgctggcgaaaactacattacttcacatgctcaaagacgagagattagttcagcatcagccgacgcaacatccaacgtctgaagaacttagcattggaaaaatcaagttcaaggcttttgatttgggtggtcatcagattgctcgtagggtttggaaagattactatgccaaggttgatgctgttgtctaccttgtggatgcttatgacaaagaaagatttgcagagtcaaaaagagagcttgatgctcttctctcggatgaagcccttgcaactgtcccgtttctg

SEQ ID NO: 167490 - DNA, 351 bp, Arabidopsis thaliana nossen
  unsure (1)..(351): unsure at all n locations
gtaatgaatacaaaatatgatttatggctacacaaactgttgaagataggtctagatctggttttaggggcttctactgtanggaagttattgaaaccattgaattccgaatatggtaaagtagctcccggatggggaacgacccctttgatgggtgttgcaatggctctatttgcggtattcctatctattattttggagatttataattcttctgttctactggatggaatttcagtgaattagactgagaagaatcttgaagttctagcttttagctcgatacaaaaaagtaaagtatgcaggtctaacaattttagcctattctcctttggtagttcgaccgcgaaa

SEQ ID NO: 167491 - DNA, 362 bp, Arabidopsis thaliana nossen
  unsure (1)..(362): unsure at all n locations
gcaaagagtaagtagtgtagaaacaatgagtaaaattacctaaacaaagatgtcgagttgctgttattatgttgatgtaacnnnnctggtggaacaaaaatcacctgatcaaaaaccaaacacatgaaaatcagaacacaacacaaaaccaagtagaaaaaatgtcactatatctcaaactaattctctgacctaaaacatgcaatacaaccataaaaacactctggtttcagttaattaatccacaattaagaaatttgaaataaacccttaatcaaaaacaacaaatttttcagaacaaaaccaacacaatgaaaaacttgcctgaggagcttccataggataatgttgaggaaactcaa

SEQ ID NO: 167492 - DNA, 348 bp, Arabidopsis thaliana nossen
cggggttcccccgtgaaaggtatcaccgtacccacaaatatcaagctcggcatataatgacgtgtgttggtggcgtaatatgacacttaaattacatctcatgtcaatgaatattggaagtagttttttttttctttttcaacaatgtattgtttatttcttttcttttccctaaagtaaattatatttaatatatacccgttaacgatattaattagaattcaaaagaatcatttttgaaaaatattataaatgcatgatataaaggagtttagtacaaatatttcattcaaattatctattttaacatttgcactatgaaaaacaagctattgtatcattatattg

SEQ ID NO: 167493 - DNA, 233 bp, Arabidopsis thaliana nossen
gctgcataggatatataagttatgtggatcgccttcagaaaaatattggaagaagattaaacttttttgtactcataaacatgctcatcacaagcctttaccacagtttaagagaagaataagagaggtttacaaaaatttcttttctgaggcgctttctctactcgatacgcttctagcgctcgatccaactgaaccccagacagcttccgatgtgttgatgagtgatttct

SEQ ID NO: 167494 - DNA, 322 bp, Arabidopsis thaliana nossen
ggggttcccggggcgacccacccctcccattggatttttcgttatttaaatcgcgtatctcccccacctggggtgggttatcattccatgggacgggttaaaaaaaattcacttatccaattttaatctttcgtaccctattcattattacccaatcaaaggcgtatttactttactttttttacccatgagggattccctgtatatttcaacaaaaaaaaatttatttttttcagttaatgtgaatagcacaattttggcttgggaagtatattatttacccaacttactttattggagaaatttttcggataaatgattt

SEQ ID NO: 167495 - DNA, 337 bp, Arabidopsis thaliana nossen
  unsure (1)..(337): unsure at all n locations
ggggcgaccacgcttccgatcgaggtctgggaccttcatgcaccctatctccgctgctccnncttgggctttgtgcgttttttcaggtttccgcacgcacacncctngcccactttctcagaacgccggcaaactcacctatgttggtcacgcaacgggtctagagggaagagtcattacattatacgccgcaacgtccatggaggcaccaaggtttggagaaggtcaaggtcagggtcagagtcaagggttccgtgacatgcaccagaaagtagagcacctacggtgcggtgacaccattgcaacaccatctagtgtagataaatggttctacaac

SEQ ID NO: 167496 - DNA, 376 bp, Arabidopsis thaliana nossen
  unsure (1)..(376): unsure at all n locations
ttccgcggacgcctccgcccacgcgttcttgagaaagaatattattggtcgtagaatgttaaatcaaaatgcgttgaatgaaatgtctttcgatggctccnaatcgatagagccgaaatgaaacttacgtgattttttttcagttctgaattcatttcattcttatagcttccaggagaaaaacaaaattagtaaacacagaatagatttttttttctcttagaaactatattgatttttttgggctatttcattatgtcaacctacaaaatgaagagcctagtgaagggtcttaggtatttttctcaaatatttggtgagttttatatatatactatcttctccgaatgtagcctaataattttgtaaatttctc

SEQ ID NO: 167497 - DNA, 297 bp, Arabidopsis thaliana nossen
  unsure (1)..(297): unsure at all n locations
ataggatatataagttatgtggatcgccttcagaagaatattgggagaagattaaactttcttgttctgataaacatnctcatcacaagcctttaccacagtataagagaagaataagagaggtttacaaagatttctctcctgaggcgctttctctactcgatacgcttctagcgctcgatccagctgaacgccagacagctacagatgtgttgatgagtgatttcttcacgacggagccattggcatgtcaaccttctgatctcccgaaatatcctccaagtaaagagattgatg

SEQ ID NO: 167498 - DNA, 364 bp, Arabidopsis thaliana nossen
cgggtatttataacatctagtttaaaacctctaagacgtaaaatttccgttctcttcttagtctttggcatctgagattctgtcaggatagctagacccatatctctttcaacgttatgtaaattataatataagtttctaatttttatttttaaatgattattacttttgatccctcattgttttttaaaagtttttttacaccttttcattcaagattttattttaaagttgagttttagcatttaagtccaaacagaaagttttataatactagaaacttggatgataaatttgcaatacaatataaatataaactggattttggatcatgttatttgatataatttattcatcattagag

SEQ ID NO: 167499 - DNA, 347 bp, Arabidopsis thaliana nossen
cggacgcgtggtacgcattcgtcatttggtccctccacttggggagaagcagacagttcatgtcttaagtctagaaaaatggcaaacagtggtgaaggtaaagtggtgtgtgtaacaggagcctccggttacatcgcctcatggctcgtcaagttcctacttagccgtggctacactgttaaggcctccgtccgtgatcccagtgatccgaaaaagacacaacacttagtttcactagaaggtgcaaaggaaagacttcacttgttcaaagcagaccttttggaacaaggttctttcgactctgctattgatggttgccatggagttttccacactgcttctccatt

SEQ ID NO: 167500 - DNA, 349 bp, Arabidopsis thaliana nossen
cttctccgccttagcgctctttttggctccatccgtaaaaacgctatggtgctaccgcaatggaacgtaaacgcaaacgcggcactctacgtgacaaacggaaaggctcatatacaaatggtgaacgacaacggagaaagagtgttcgaccaagagatctccagcggacagttactagtcgtgccacaaggcttttcggtcatgaaacatgccataggcgaacagttcgagtggatcgaattcaagacaaacgaaaacgcacaggtcaacacactcgcgggccgtacctcagtcatgagaggtttgccgcttgaggttataaccaatgggtaccagatctctcccgaag

SEQ ID NO: 167501 - DNA, 394 bp, Arabidopsis thaliana nossen
cgacccacgcgtgttatcatgggacatggaccatcgttaggattgaatcggcaaggagatcggaggcctgatgggggatataagaattttaaggggtttgagccggcggcaccaccggctcgtgtagggaggaagcaaaggaagcagaaagggccagaggcggcggcgagacttccgacggtgactccgtctactaagtgtaagctccggttactgaaattggaacggatcaaggattatttgttgatggaggaagagtttgtggcgaatcaagagaggttgaaacctcaggaagagaaagctgaggaagatagatctaaggttgatgatcttcgtggtacacctatgagtgttgggaatttggaagagttgattgatgagaatcacgctattg

SEQ ID NO: 167502 - DNA, 372 bp, Arabidopsis thaliana nossen
gcgttcttcttctttttccgtaagtatctctctctccttcagggtcttgggtgtgtttttctcactttctgtgtcacaaacatgtaagtcacagactttttccggcgataaaacttaccctcactgccttgacctccctcaactcaaagccttccttcactattcctatgatgcctccaacacaactctcgccgtcgtcttctctgctccaccggctaagcctggcggatggatcgcgtgggcgattaatccaaaagctaccggtatggtcggatctcaaacccttgtcgcttacaaggatccaggtaatggtgttgccgtggtgaagacgctaaacattagctcctatagctcgctgattccgtcgaagct

SEQ ID NO: 167503 - DNA, 370 bp, Arabidopsis thaliana nossen
agagaagaaagatagagaaaaaaaatgggaggcaaaggtgtgatgatggtggcgatactttgcctttgggcactctctgcaacatctgaagcagtaacagaggctgagccaggtttgatgatgaacttctacaaggacacgtgtcctcaggccgaagacatcgtccgtgaacaagtcaaactcctctacaaacgccacaagaacaccgctttctcttggctccgtaacatcttccatgactgcgccgttgagtcatgtgatgcgtcgcttttgctggattcgacaagaagagagctaggagagaaagaacacgacaggagcttcggacttagaaactttaggtacatcgaggagatcaaggaagctctcg

SEQ ID NO: 167504 - DNA, 384 bp, Arabidopsis thaliana nossen
ggcgttcacgcgtgcgagactaattgttgaagtgcattaaatcaaagtaccaaaggagggctgggggcacatgaaacttttgtggctgcagagaagattattaagaaggcgaggacatatgtgagctaagaagtaagacttatatgacatttagaagtttcatttgcattgtcctgcttttataccttccagtgtttctttaggattatgtttatcaatgtgtaggagtgtgtcttgtaacatcattcaagttgattatcaatgtagtgtgtaactctatctatatctttctttacatttttcttcttcactgcaaactatacacttctattcaacctccatcatcatcatcatcatcatcatcatcatcatcatcatcatcat

SEQ ID NO: 167505 - DNA, 385 bp, Arabidopsis thaliana nossen
tcggtaacttcatctccttggaactacaagggctcatcacactacattcgctgctaatatcgaaactttaaggctctaacggtttctgcccgcggctaagatctttgatctcaatgtttttcttcataattatatccattagattcttgttctctgccctaacattcccaatctgctccatcaaaagatgatacttcaacttccggctctaaacttcatctctcatcatcatatctcttttattcgcgtttcgtcttcctatctccatcttcttttcttcaccttcatctctcatgaaacttctttcgaaatagaagtcttaacctttggcattcagcttcaagctcaacaatcttattcacattcctaagttgttgtttatgcg

SEQ ID NO: 167506 - DNA, 382 bp, Arabidopsis thaliana nossen
attgaagatccagggtttgtctttcgaaattcagagagaaaatgggtgatgaggcagagatcaaggaacatttaaagccacaagcttcatctgaaacaatggacaagaaacataatgtgaaagggaagaggttatggcagaaagtcaagtatcaattggtggagtttcattcattgcctgcttatttaagagacaatgagtacatcattggtcattaccgatccgaatggccgatcaaacagattcttctcagcatctttaccattcataatgagactttgaatgtttggacgcacttgattgggtttttcctgtttttggcgctcactatatacactgcaacgaaagtaccgagtgtcgtggatcttcattcgcttcaaca

SEQ ID NO: 167507 - DNA, 377 bp, Arabidopsis thaliana nossen
aaaaaatatcagtaaaaaatgtcagagaccaacaagaatgcgttccaagcgggtcatgccggtggttaagctgaggagaagagcaatgttctgctggacaaggccaaggatgctgctgctgcagctggagcttccgcgcaacaggcgggaaagagtatatcggatgcggcagtgggaggtgttaacttcgtgaaggacaagaccggcctgaacaagtagcgatccgagtcaactttgggagttataatttcccttttctaattaattgttgggattttcaaataaaatttgggagtcataattgattctcgtactcatcgtacttgttgttgtttttagtgttgtaatgttttaatgtttcttctccctttagatgt

SEQ ID NO: 167508 - DNA, 384 bp, Arabidopsis thaliana nossen
  unsure (1)..(384): unsure at all n locations
tcgctggaatctttctatgagaagttcgatccagatttcatcaacatcangagaaacgccgcagaggttttgcgttttgaggacnancttaatgaaattgtccagcttgtaggaaaagatgcgctagcagaaggggacaaaatcacattggaaacagctaagctattgagggaagattaccttgctcaaaacgcgtttacaccatatgacaaattctgtcctttctacaagtccgtgtggatgatgcgtaacattatccatttctacaacctatccaaccaggcggttgagagagcagctggaatggacggtcaaaagattacctacactcttatcaagcatcgcttaggagatcttttctaccgtttagtgtctcagaagttc

SEQ ID NO: 167509 - DNA, 378 bp, Arabidopsis thaliana nossen
tcgaaaaaaaagggttcgacacatatacattaactatcacgctatcacactcgtgaaccgcgccaatttctagtctttcgaacacagacccaacaagagccacctcgaacaactcaacgcgcaaccaccacaccaaatcaacaagaccgaaccaactctcacctaacgccaggaccaccaagcaccaaagctccaccgctcacgatggccactggaacgcccactcatccatccagaccggcaactacacaccacattctaaaacaccggcaaacacacagaagagggacacagacaaccacaaaagggaagagacattacaggacgcgccgagactgtcatggagccaccgaaattggaagacggcaaaggccaggg

SEQ ID NO: 167510 - DNA, 411 bp, Arabidopsis thaliana nossen
  unsure (1)..(411): unsure at all n locations
ccgaaatnccgggggggaccgaggcgttcgaatagcagcttgccgaccgtttaatcctcctccttttctcgatggatcagttgacatgccagtttcttggtttacaccgaanctcgncatccttcatatgaacatggcactccacgtttacgaggatatcatgagaatgacagagaatctaagtgagaagtatatcattgggcacggagcatcaagcactgtatacaaatgtgttttgaagaattgtaaaccggttgcgattaagcggctttactctcacaacccacagtcaatgaaacagtttgaaacagaactcgagatgctaagtagcatcaagcacagaaatcttgtgagcctacaagcttattccctctctcacttggggagtcttctgttctatgactatttgga

SEQ ID NO: 167511 - DNA, 371 bp, Arabidopsis thaliana nossen
aaacaagaaagatcaaaaaaacaaatgggccacaaagcagggagcatcggggcaattttgggtctttgggaaccaaacaaaacatctgaagcagtaacagaggcaaagccacatacaatgaagaactcgaacaacgacacgtaacctaaaacccaaaacaccgactcgagaacaaatcaaactcactaacaaaacccacaaaaacaccgacggcccttgacacacaaacactaaccatgacagcgccaatgagaaatgcgatgcgtcactaacgctggattcgacacaaacagaacgcggacagaaagaacaccacaggagcttccaactaagaaactttaggtacatcgaagagatcaacgaagctctcg

SEQ ID NO: 167512 - DNA, 374 bp, Arabidopsis thaliana nossen
cggacgcgtgggttgcaattgatgttcgatatcgaagagaaggaagagagcttagtaagggggtttttgatgatcccataactaatcaaacttttttaaacctttattctcgattttcttaaaaaaggagctcaaccaacaagaacagctcatgatatttcaaagaaggctgggatttttacggaatgaagtcttactaaaacgaaatgaaattaatgaaatataaaaaagaggatgtgaaagactcgtatataacgtgatataaaattttatctactcttctctttcacttccatcatatttattttgatttattataatttctatttattattagtattcctcctaaggtacgaatactaaaaaataccttg

SEQ ID NO: 167513 - DNA, 371 bp, Arabidopsis thaliana nossen
cttcatcattaccaaatcatcatcttaatcgtttctctcaaatttagggttttctcttttctcgaaagtcttgcggttttctgaatcatctctatctggtttgagggtttcgtttgatatctggagaaaggggtttctggaaacaaggagttcataattcgcgatcttgatctatcgatcttcatttatatataaaagcgtgaatgagattatgatggagtcgaaaggtggtaaaaagaagtccagcagtagtagttccttattttacgaagctcccctcggttacagcattgaagacgttcgtccaaacggtggaatcaagaaattcaaatcttctgtctactcaaactgctccaagaggccatcctgag

SEQ ID NO: 167514 - DNA, 386 bp, Arabidopsis thaliana nossen
tcgagcatcaatggcgacttctctctccgtttctagattcatgtcctcctccggcaccgtgggctttttcggtgtttcgggactttcccccaccgtatccttcaccgcgccgctctccttcacacgctctctcgctcctaatctctctctcaaattccgcaaccgccgcaccaattccgcctccgccaccaccagatccttcgctacgacacccgtcaccgcctccatttccgtcggagacaagctcccagactccactctctcctacctcgatccatccaccggagacgtcaaaacagtaaccgtctcatccctaaccgccgggaagaaaacaatcctattcgccgttcccggcgcattcacaccaacatgctcacaaaaacacg

SEQ ID NO: 167515 - DNA, 384 bp, Arabidopsis thaliana nossen
  unsure (1)..(384): unsure at all n locations
atctagaaaaaaaaagagaagagagaagagagaaatgtcgagagctttgtgagtcgttggtgtttttctggtcatatccttcgnctgngcacgtgctcgtcaggtgccgggagagtctgatgagggaaagacgacgggacatgacgatacaacaacaatgcccatgcatgcaaaagcagctgatcagttaccaccaaagagcgtcggcgacaaaaaatgcatcggaggagttgctggagtcggtggattcgccggagttggtggtgttgccggcgtgggaggtctagggatgccactcatcggtggtcttggcgggatcggtaagtatggtggcataggcggtgcagctggaatcggtggatttcatagtataggcggtgttgg

SEQ ID NO: 167516 - DNA, 351 bp, Arabidopsis thaliana nossen
ggagagaggcttataaaaaaaaacaaaaaaaatgcaaaggctatgaacactggctttttgggtgtttgactcctaatggcggtgacactgaaccttttcccacggagaggcaaaaacggagtagagatgctcctatagtgaaaggctctatggaactttaccagaaagcatgccaaagtcgaaaacatatagaaaagagctcaagaaagtcttcaagagagatattggtttagccgcagccatccttcgatacatttccatgattgctttgttcagggatgtgaagcatcaggctgctagctggatcagccagtggaccaggagaacaatataatcccaaattgcactacg

SEQ ID NO: 167517 - DNA, 404 bp, Arabidopsis thaliana nossen
tccgggggggaccaaggcgttcgaggaccaagagttatccaccgattaagctccttttccttctcttttttcggaagaaggggaagatctggacataatcgatgaaatggaagaaatccgagtgaatggaaaagacaaaattaataaggatgatgaattccacgttcgaacatactataactataaaactgtttctgaaaatctatatggaaataaagaaaattcgaatttagaatttttcaaaataaaaaaaaaagaggatcattttttatggtttgaaaaaccatttgtaactctcgttttcgattataaaagatggaatcgaccaaaccgatatataaaaaatgataaaattgaaaatattgtaagaaatgaaatgtcacaatattttttttatacatgcc

SEQ ID NO: 167518 - DNA, 372 bp, Arabidopsis thaliana nossen
aaactctgaatttcgatttcaatggagtcacgcgtgctgggacgcgccagcgcgaatgtcgtttttatgccgaaattgagacgaccaatcggagcgatccaccgtcaattcagcactgcatcgtcttcctcgttctcggttaaaccaatcggaggaatcggagagggagcgaatctgatctccggtcgtcagcttcgtccaattcttcttctcgattcgtcggcgatcaacggaggagagaaaagagagattctcaaaccggttaaagccgccgctgctgaaggtggagataccgctggggaagctaaagttggattcctcgccaagtatccatggctagtcactggattcttcttcttcatgtggtacttc

SEQ ID NO: 167519 - DNA, 372 bp, Arabidopsis thaliana nossen
aaacaatataatctccacttgtttttgcatttgaataactccatttgtggatatgttcaggttgtgggaagagttatttagccaagttgttgcgtgacgtcgaggtagaaaatggtggtagtgctccacgaatccattctatggatgattacttcatgactgaagttgagaaggttaattaatcctcatagttctttagacgtttctaaaagaatggtttctttactttggaccagcaaaggactctaaaattgtgttgttttgtcaatgtaaaaggttgaggagagtgattcaacttctttaagctctggtagaagcaaaagacctattgtgaagacggtcatggaatactgctacgaacctgagatggaa

SEQ ID NO: 167520 - DNA, 377 bp, Arabidopsis thaliana nossen
cggacgcgtgggttcagatgcatctcctcgaaaacccgtagaaccggcagggagccaatcgtgttttatggtctgattcatatccttagcgttttcagaaacaaaatggtgggttggaagaggaatttgcagactgttattcgtcaagttggtagaagagtgaagaacagtcacatttctacagcaaattactcttcttctactcggaatttagaatcccctttctcacaaggttacttgcagagtctcctgagaccatcctactcctcagaccactgtatcatcatctacaacaactggggatctctacctcgagacaattgcaggcgagtgaagagcctgtatcatcacctttgtcatctccagctctgttgggt

SEQ ID NO: 167521 - DNA, 352 bp, Arabidopsis thaliana nossen
tttttaccaaaatctgcaaatgagaaatctcttcctttttccgaaaattccctaccaggttcaaatcacttgaagattttggtaaaaaaacaacaaacaaatttcaaacactgtctgaaacgtcgttttgaggacctgcaaacaacatgttctcaaatcaagaaacaaaccaaaatagcatgttcttaaatcaagaaacaaacccacgagaatattctcacaagattcacaacgtgatcacatggatcaatgatatataaattagataccatctacaagtagtacaaaacacaataaactatatataatagacgaaattagaaacataattacataaatggaatcaaaacgt

SEQ ID NO: 167522 - DNA, 383 bp, Arabidopsis thaliana nossen
  unsure (1)..(383): unsure at all n locations
aaaaatttcagtggtataattggatgtcaaagacatttattattttattgtttcgtacgccgtttttgtgtttttctgtcaaatnnnattatatattattttcaaaacaaaaaagacattcaaaagtttcaaacccaactttttttttaacgtttgaaatccgtatgagagtactcatttaaataatctatactgatagcttatattataaaaaaattataatatttcttcacatcatatgtaaaaaaaacatatgattatagtaatctttcttaaaaaatataaataaaaaaagctcacttagtgtactgaaagacaatcactaaattccacgatgaaaatccattccttaacaatcctaaataatcaaactcaaataactt

SEQ ID NO: 167523 - DNA, 395 bp, Arabidopsis thaliana nossen
  unsure (1)..(395): unsure at all n locations
gggggacccacgcgttcggatttgaagccaggatgcagtttatgaccaatccaacctacaccgccatggggcancgcgccattaacaagatgccggctattgaaancgncccaacccgtaaacatgtccgcttgactgctgtggatctgatggcttattctcacatggataacccgcagagtcctgatttcttgttagggaagctggaagaactggacccttttgttgaacaaatccgcgaggaaacactgaaggagacactgtgtcatggtattggatacttgcatgagggtttaagcagtctggatcaagagattgtgacacagctctttgaagctggacggattcaggtttgtgtgatgagcagttcattgtgttggggcactccattaact

SEQ ID NO: 167524 - DNA, 381 bp, Arabidopsis thaliana nossen
tcgctgtctcacgctagaactctgttttcgtctctatattattgaccctttggatctctgtgtgtctttctgtgtttctcgcgtggacctttttcgaaaaatatcaatcccagaatttcgcttcattttggattataaactcccagatctgctactctctatctccgattttgtgatttttcaaaccctagatttctccggaagagtttatttttttctctgtaactaaaccgagatttttttttcaaaattccgacattaccctaggttgtgtattaccgtagaaaaccctagttcctttttggtattcttggtgtacagatcccttccttagtcagagtttttggttattagtgtttagaggtttgtgatgaacaatcg

SEQ ID NO: 167525 - DNA, 390 bp, Arabidopsis thaliana nossen
  unsure (1)..(390): unsure at all n locations
cacgcgtgcgacaagnaacnaattaacaacatttggcaaacaagctcatccaccccngcgcactctggcacttttttggattctcaccaacncacccgnctatcaaacgagcaacgagagcaacgaacatgacgccagaaacccaacacgcccaacacataaatgtcagaaggagtttcagcaagaacaacacccaagagctcgccagaaagagatacgcaagcaaatgtggacaaaaccgagaggtggtcctcacaacgacgacaagacccaaatggaagacgacaccgagaacccccaaaaccacagctactccagaagtgctacaaagagcttcctcaagaagagccagtgggcgttagccccaccaggagacaagatgaacaagcc

SEQ ID NO: 167526 - DNA, 401 bp, Arabidopsis thaliana nossen
gggcgcccacgcgtccgatacatcttcatcagtgatttttgggtttgaaatttctctagatcgattgtggatttagatctttttgtgttctactgcttttcatcgttggatctgcgttttgcaaagggagatacagaaaggaatagctttgaattgacaaggtttctctctaatccaaccgaatctcaagcttccatggctctcaatctccgtcagaaacagactgaatgtgtaatccggatgttgaatctgaaccaacctttgaatccaagtggaactgcgaacgaagaagtttacaagatcttgatttacgataggttttgtcagaacattctatctccattgacccatgtcaaggatctgcgtaagcatggagttacactcttctttctcatagacaa

SEQ ID NO: 167527 - DNA, 374 bp, Arabidopsis thaliana nossen
actacttgtagtttacaaaacctttggctttaacactctccgccaaatcgcagatttctctgtgtttctgtcccgcggagtccccgagagattgatcaccatcacttttgtaccttccttgtactacctatggcgtctgctagcttcgttaagcctaacaccctctcttctccatggatcggccaacgctcctttgctcacacctctgcttcttcttctcctcctcctcgagtctccttcgcgatccgcgccggtgcttactccgacgagcttgttaaaaccgccaaaagcattgcatcccctgggagaggtatcttggcgatcgatgagtccaatgcaacctgtgggaagaggcttgcttctatcggcttggg

SEQ ID NO: 167528 - DNA, 389 bp, Arabidopsis thaliana nossen
  unsure (1)..(389): unsure at all n locations
cggggcgttccacgcgtccgaaaaaatctcacctttaaagcctaaacactctacacnctccggcnaaacgtagctttttagcgtttttgaccacccgaannccgctacatatactgcgatacctacaatctatcaagcttcagatgtctactctgtaagatttttcgaaaagatacaacctcgcatgtgcgtaaatcagccttgaatacaactgagattcacgtgaagctttggattggtttctttgttctctctgttcttgagaagggaacaacacaaacacggcggcggggctcggaaaatagattatggaacatggtttaccgtctattaaatcatggaagtcacttgtcaagagaagaaacaatgctcaagaagggggtaaatcg

SEQ ID NO: 167529 - DNA, 383 bp, Arabidopsis thaliana nossen
  unsure (1)..(383): unsure at all n locations
tcggagataatgtattccaccacctttccaaattcccccttcaccgnctctctgcgncggtgattctcattcggatttggtgtctnnnntactctnaacaagtcctcaaaaaccctacttttactcgagattttgtctccgccgccgagtaccaagtgcctcccgatctacgccccaatccctaaatggctacggaggctacaaccgtacccaaattccaggaacctgatctccggcaggtttctcagacaccggatttcaaaccggaaatcgctcacgatggtcttaagttctggcaatttatgattgctggttcgattgctggctccgtcgaacacatggcgatgtttcccgtcgataccatcaagacccatatgcaagcg

SEQ ID NO: 167530 - DNA, 380 bp, Arabidopsis thaliana nossen
  unsure (1)..(380): unsure at all n locations
tcgtattccttcattgaatgaataataaattgaattccacatccgcttgggggggaccaaggaaattttttgctttctcccacttnnnatngaattaaccgattaatttgctatcgaagattttttctgtattcgaaaaaattcgtaacaaaatttaacatattttttttattatgagaacaaatcctactacttcaaatccagaggtttcgatacgtgaaaaaaaaaaacctgggacgtatcgcccaaatcattggtccggtactggatgtagccttccccccgggcaaaatgcctaatatttacaatgctctggtggttaagggtcgagatactcttggtcaagaaattaatgtgacttgtgaagtacagcaattatt

SEQ ID NO: 167531 - DNA, 376 bp, Arabidopsis thaliana nossen
  unsure (1)..(376): unsure at all n locations
gcgggtgtatacaataaaagcagacttataaatacatcaaacatattncgaagagaatctactggtttttgaagaaatgagcaagtctatctaactaactccagaaaagtacaaaatttcagctaatgtaactttacacaagcattatgttggtctccatccacttgagatttgccttaaatattgtaaatcacggttaaccaaacttccctagctacatgtgcataatatagaagaatgtcagatagaaacgatagagatggattgtttcataccttaggagtgagctcattcatctcgagagcattaacaatggcaggaactctagcgctgcattctggatgtgattcctgcgagtaaaagattgcttaaatga

SEQ ID NO: 167532 - DNA, 371 bp, Arabidopsis thaliana nossen
  unsure (1)..(371): unsure at all n locations
cggacgcgtgggctttattggataaaccctaatcggcgacaatgggtatgtctcgcgactctattcacatgatgcgtgccactanangcaagcanaaccaatggaggaagaagcgaaagtatgagatgggaaggcagccagccaacaccaagctctcaagcaacaagacggtcagaagaataagagttcgtggtggaaatgttaagtggcctgcgttgaggctcgatactggtaactactcgtggggaagtgaagcaactacccgcaagaccagagtccttgatgtggtctacaatgcctccaacaatgagcttgtacgtactaagacacttgtcaagagtgctattgttcaagttgatgctgctccgttc

SEQ ID NO: 167533 - DNA, 386 bp, Arabidopsis thaliana nossen
  unsure (1)..(386): unsure at all n locations
tcggtttcattgaaaatttcaagaaccctagttaataacgataatgggttcgagagtttgggcttccttctttgttttcgtaatcttcacggtcatcacattgcctcccacgatccaagcttgcactccttgtactcgtcctcatcctccggttccgaaacctccacaacacggctgtagtggaggtggtggtagcaagccacctccacatcacggtggaaaaggtggtggtaaacccccaccccacggtggaaaaggtggaggaccgccgcatcatggtggaggaggaggaggagganggaaatcaccgccggttgttagacctcctcccgtagtggtgaggccaccgccaatcataagacctcctccggtcgtctatccaccac

SEQ ID NO: 167534 - DNA, 395 bp, Arabidopsis thaliana nossen
  unsure (1)..(395): unsure at all n locations
cacgcggtcgcaccaccagaactcatggccattttgaaaactacgagtcacgggttccgcgaccagaaagagtgtttatagagttttccccacancacacggatgctcagatacactgtccctctccccatgctcgcatatcctctctatttgtgctacagaagtcctggaaaagaaggatcacattttaacccatacagtagtttatttgctccaagcgagagaaagcttattgcaacttcaactacttgttggtccataatgttcgtcagtcttatcgctctatctttcgtcttcggtccactcgcggttcttaaagtctacggtgtaccgtacattatctttgtgatgtggttggatgctgtcacgtatttgcatcatcatggtcacgatga

SEQ ID NO: 167535 - DNA, 369 bp, Arabidopsis thaliana nossen
cgaccgcaaccctagagtgttccatttggccggaaacaaccagcagggagtctttggcgggttttttgggcaacaagaacagaaaaacttgtggagcgggttcgacgcacaggtcatagctcaagcattgaaaattgacgttcagttggctcagcagcttcagaaccaacaagacagcagaggaaacatcgttcgtgttaagggacctttccaggtcgtgaggccacctctaagacagccctacgagagcgaggagtggagacacccacgtagcccacagggcaacggccttgaggagactatctgcagcatgaggtcccacgagaacattgacgaccctgctcgtgctgacgtgtacaagcccagcct

SEQ ID NO: 167536 - DNA, 369 bp, Arabidopsis thaliana nossen
  unsure (1)..(369): unsure at all n locations
gccaatgtctatatgtaggtgttttttttatagaataatgagcggncgtgaaatgttccgattttttgggtgacccaatactngntcaaaggaaagaagaaatatattagaccatggggaagagttgacccatagcctttatgtacgcatatgatatggggaccgatcaataagtgagagaggtaatataatagaagccgcttcatcattggaactcccatgtgacctcctctcaagttttgagcatttctttaatctttttataactagagtcacttttattaatttcttttgaatgttcttctctactgttgctatactattctctaattattcacaaatagttattattagtgttttcaatatata

SEQ ID NO: 167537 - DNA, 379 bp, Arabidopsis thaliana nossen
  unsure (1)..(379): unsure at all n locations
tcgctcatatttctcacattttcgttgccgcaagactcctttcagattcttgcttgcagctgtgggtttagagttttttcacattaacattgnggtcattggtcatgttgattctggaaaatcgaccacaactggtcacttgatctataagcttggtggtattgacaagcgtgtcatcgagaggttcgagaaggaggctgctgagatgaacaagaggtccttcaagtacgcatgggtgttggacaaacttaaggccgagcgtgagcgtggtattaccatcgatattgctctatggaagttcgagaccaccaagtactactgcacagtcattgatgccccaggacatcgtgatttcatcaagaacatgattactggtacc

SEQ ID NO: 167538 - DNA, 380 bp, Arabidopsis thaliana nossen
  unsure (1)..(380): unsure at all n locations
aaatcgacgtattggtaatgaacacaaggcaccattggaaccgcnnnaggcgcaacgcgaacattttagatttttacggtaatggcanncccaacactaacacgaagttagctgctcttggaaaccccaagaatttcacaatccacatcacagttagttggcctaactcacaactccctctccatcccggtctcaaggcattctacagaagcctttcaccgagacatttcgtgggtggggaatggaacaccggagggagctgcaataacacaaccccaatgtctatcgggaaagaagttttgcaagaggagtcaagcgactacagcgacaggaaacaaatccagatagaatgagaaataagctttggtctctcaagaccc

SEQ ID NO: 167539 - DNA, 364 bp, Arabidopsis thaliana nossen
ggctaagtcttgctatttcagaccagctcttcttcttctggtagttcttggggttcatgccgtgtcacgcggtcggttcgagccaaagattcttatgccgacagaggaagctaacccggctgaccaagacgaagatggtgtcggtacaagatgggcggttctcgtcgctggttcttctggatatggaaactacagacaccaggctgacgtgtgtcacgcatatcaaatactaagaaaaggaggtttaaaggaagagaacatagtcgttttgatgtatgatgatatcgcaaaccacccacttaatcctcgtccgggtactctcatcaaccatcctgacggtgacgatgtttacgccggagtccct

SEQ ID NO: 167540 - DNA, 285 bp, Arabidopsis thaliana nossen
  unsure (1)..(285): unsure at all n locations
agccaaanatncttatgccgacagaggaagctaacccggctgaccaagacgaagatggtgtcggtacaagatgggcagaactcgacgctggttcttctggatatggaaactacagacaccaggctgacgtgtgtcacgcatatcaaatactaagaaaaggaggtttaaaggaagagaacatagtcgtggtgatggatgatgatatcgcaaaccacccacttaatcctngtccgggtactctcatcaaccatcctgacggtgacgatgtttacgccggaatcccta

SEQ ID NO: 167541 - DNA, 126 bp, Arabidopsis thaliana nossen
cgagtatgttggtggaaatgggactttatgttctgtttttgcctctttgtgatcatcaatgtttttaaagtacctgaaacaactccagaatgcagaatgtatgcaagactagtcctagactcgaat

SEQ ID NO: 167542 - DNA, 393 bp, Arabidopsis thaliana nossen
tgctagggagattggttacgagatcaaaagaaattggtcaagggattatccgaagaatttctccggaccaaatcaaggttcttgctgagcacgctacatctccttcaaacaaacacaaagccaaaaaagaaaaggaggaagacaaagacctaagaacgttgtggactcctttcaatctctttgcaatagatccaatctactccaacgactttggtcatttccacgaggcacatcctaagaattataatcaactgcaagaccttcacatagccgccgcttgggctaacatgacacagggatccttgttccttcctcattttaactctaagaccacatttgtaacgtttgtggagaatggttgtgcccgcttcgagatggctactccttataaat

SEQ ID NO: 167543 - DNA, 191 bp, Arabidopsis thaliana nossen
  unsure (1)..(191): unsure at all n locations
acccaaaacacaaacnaacgaagaaagtaacgaaatcccaccgccgaagcaaaaacaactcaccatcagaactcaaatcacgagcgtcatacacgccactcactataacattgtggagaagaaacagaatctaacaacaccgataatcccggcgctcaatatctccgacggtttgcttggattcaccattg

SEQ ID NO: 167544 - DNA, 369 bp, Arabidopsis thaliana nossen
  unsure (1)..(369): unsure at all n locations
cagccgactgatcaatgtcacgtccaaagatctaacggacagaaaccgcagcttttttaggttttatgcacanctacactaacccacgcaatgaacacattggtggctaactccatctcagccctcccagtggctgcaccttcaggccactggaacggagccggaggttccatgatcatggaatcagacaaacaaactggagttgtaagaaaacactatatcgggattctcacgatgcttgacatacttgctcatatcgccggtgaagattccaatctctctgatcttgatcgcaagatgagttcacaggtgtcatccatcatcggtcattgcctcaaaggactcagtctctggacactgaatcctaat

SEQ ID NO: 167545 - DNA, 435 bp, Arabidopsis thaliana nossen
  unsure (1)..(435): unsure at all n locations
cccggggcagtatctccacgcgtgtcggagacaagggcgaggtagatataggtttgagagacgaattcccnnattcccatattcaggagcacaagagaaaatattctggatgtttgtggggacaaagnnnnnntatcttttcgntcgtttggaatttgggggagcgaagaaggaaacggtgtaaggatatgggtcagtgcgtgtcaactgagaggtgcttgctggacgtgaagctctcctcctccgcatcggcgaggaggcttccgtcgcagcactacctcagcggtagccttagctcttctggctacggcggagaaccgtcggatcaatctgatatcggcggtgcgaagatgaaagggcttttcaagtctaagccacgcactcctgctgaccttgttcgacaaacccgcgatctccttctcttctccgatcgat

SEQ ID NO: 167546 - DNA, 408 bp, Arabidopsis thaliana nossen
  unsure (1)..(408): unsure at all n locations
cgaaccgcgcggaaacccagggcggtccgaaacgttcaatgcatgaagtttttaggaaaaaagattttaggaaaaatgggcangcggaggggttcgaactttttcgcgcttatgngcanaagaacttaagtcttcccccttaaccactcgggcaaacctgcttgttgaatatctgttaataaaccaagtacttgttattattctacaacccaaattcaagaaatttttgtccttcaccatcacttgattaagcttatttcaacagaaagtgaacgataaaagtgataaaccgagaagaaaatgatttatctacacaattttgtatgaatgtttttctagtcatcttcagatagtgttcacaccttttttacgtgtgaactcttgttgaataatagtagtcatgaacac

SEQ ID NO: 167547 - DNA, 374 bp, Arabidopsis thaliana nossen
  unsure (1)..(374): unsure at all n locations
acttttaccaaaaaagctttcaaaacttaactagacncncggganacacgcgcgatttaagaattttcagccaaccaacananctacaaaactggtgagaccagaggcaaagcccaagagaagactggacaagctatgggaaccatgagggacaaggctaaggagggcccggacaagacttctcaaacggcccaaacagcccaacagaaagcccatgagacaacccaatcagctaaagataagacatctcaaactgcccaaacggctcagcaaaaagcccatgaaaccgcccattcaacaaaagaaaagacatcntaaaccgcccaaaccggacagcaaaaagcccatgagacgacgcaagcagcaaaagaaaa

SEQ ID NO: 167548 - DNA, 380 bp, Arabidopsis thaliana nossen
gtcgtattacaaatggacaaattacgattcaggttgggtcatgtgtcagagagtttaccggattttccgggttttcatggactttcacaaaaactggatcccgaaattaagaacccattaattcatgacgctgatttgtcacttgtaggacatatatccctttaacattaggaaattaaatatcatatatcaaatatctggttgatatatcatatatcactcacaaaatcacttgatacatgaaaagtgatattaattcatcaagtgaaaatgaatccctaataaacgttgcgatcaaaaaagaagaaaaaaaaaaacgttgcgatcagatggaggcttaaccaacagtcaaacccatctttcatctgtctttttttctt

SEQ ID NO: 167549 - DNA, 381 bp, Arabidopsis thaliana nossen
  unsure (1)..(381): unsure at all n locations
atcctacatcgttcatgtgcagagatctcataagccttccgtctnctccgcccacaacaactggtacgtgtgtctccancnctctctcccttcttctccccaaccagcaacgctgctctactcttattcacgcgccgttcatggcttctccgctcgtctctcccctatccaaaccgccgccctccgccgtcatccttcagtcatctccgttatacctgatcaagcgcgtgagatccacacaactcacacgcctgccttcctcggtttctcccaaaactctggactctggagcaactcaaattacggggaagacgtgatcgtcggcgttttagatactggaatctggccggaacatccaagtttctcggattcaggtctcgg

SEQ ID NO: 167550 - DNA, 378 bp, Arabidopsis thaliana nossen
tcggaaagtttcaacttcaagcattacacattaccaaaaagagagatcacaaaggaagcatgtcttttattgggatttatcaacaacaacaaaaccaaaaacttaattagtgtttctctgcttttttagttcccccacaaaatcgaatccttctgttcggttaccaaatgggttccaactgattcgtccgttattattcttttcattttctacgtgtttttttttgtgttgaaaaatgatgaagagagagacgttaatagaagcaggaataatcggaggattggccggagctcaagtgatttacgccggaaactcggagctactgagtcagttgctgtctctcggaattgacccacttcttatcgttatcttatgcac

SEQ ID NO: 167551 - DNA, 374 bp, Arabidopsis thaliana nossen
gcgagtccagcaagtaaatgagatataagagaagcctgaaatggcgaaaaaaggaggtgttttgattcttggtgctggacgtgtgtgtcgcccagctgctgatttcctagcttcagttagaaccatttcgtcacagcaatggtacaaaacatatttcggagcagactctgaagagaaaacagatgttcatgtgattgtcgcgtctctgtatcttaaggatgccaaagagacggttgaaggtatttcagatgtagaagcagttcggctagatgtatctgatagtgaaagtctccttaagtatgtttctcaggttgatgttgtcctaagtttattacctgcaagttgtcatgctgttgtagcaaagacatgcattg

SEQ ID NO: 167552 - DNA, 376 bp, Arabidopsis thaliana nossen
ttacaccaagatttgaagataaccggattgagtgacaagcgttgcagggaacatttgtgggttttgaagaaaaggaacccaaatgaaaatggagagttcgaaactactgaagttacagttgctgactacttccgcgatacaaggcatattgatttgcaatattctgcggatctgccttgcatcaatgttgggaagccaaagcgacccacttacattcctctcgagctctgcgcgttggttccacttcagaggtacacaaaagcacttaccacgttccaaagatctgcccttggtgagaaatccagacagaaaccccaagagaggatgactgttctgtccaaagctctgaaagttagcaactatgatgcggaaccac

SEQ ID NO: 167553 - DNA, 284 bp, Arabidopsis thaliana nossen
  unsure (1)..(284): unsure at all n locations
aattannganatgcaaccttantatcttaaatttaacctgcaaatttgatctccatcgtccttaataaattctcaaaacacactgagaattttaacaacanncaccttgcatcaatgttgggaagccaaaacgacccacttacattcctctcgagctctgcgcgttggttccacttcagaggtacacaaaagcacttaccacgtgccaaagatctgcccttgttgagaaatccatacagaaaccccaagagaagatgactgttctgtccaaactctgaaagtta

SEQ ID NO: 167554 - DNA, 273 bp, Arabidopsis thaliana nossen
aaaaaaatctatccttccgaaagtagttcaacaagctctttgcaaagaaagagatgcttatcctcatggtgggtctcgatgcagctggtaagactaccatcttgtacaagctcaagcttggagagatcgtgactaccattccaaccattggtttcaatgtggagactgtcgaatacaaaaacattagctttaccgtgtgggatgtccgtggtcaagacaagattcatccattgtggaggcactacttccagaacactcacggacttatctttg

SEQ ID NO: 167555 - DNA, 367 bp, Arabidopsis thaliana nossen
  unsure (1)..(367): unsure at all n locations
gggggggatgttagaaaaattacaaacttgactcttagcccaagtgttatgttgggttatgtacttaaagctccctcngggggagaaggatggattgttagtgtggacgatttggaagatataattggaggacatgtatggttaggttccatttgtatatttggtggaatctggcatatcttaaccaagccttttgcatgggctcgccgcgcacttgtatggtctggggaggcttacttgtcttatagtttagctgctttatctgtttgtggtttcattgcttgttgttttgtctggtttaataataccgcttaccctagtgagttttacggacctacggngccagaagcttctcaagctcaagcat

SEQ ID NO: 167556 - DNA, 371 bp, Arabidopsis thaliana nossen
attctcttctctctcgatatcatctaaatctctctcgatctcaatttcggaaaatggctgacttttagatcagaatcggaatcaacggtttcggaagaatcggtcgtttggttgctagagttgttcttcagagggatgatgttgagctcgtcgctgttaacgatcctttcatcaccaccgagtacatgacatacatgtttaagtatgacagtgttcacggtcagtggaagcaccatgagcttaaggtgaaggatgacaaaactcttctcttcggtgagaagccagtcactgttttcggcatcaggaaccctgaggacatcccatggggtgaggctggagctgactttgttgttgagtctactggtgtcttc

SEQ ID NO: 167557 - DNA, 365 bp, Arabidopsis thaliana nossen
  unsure (1)..(365): unsure at all n locations
ttttcttatacattaaactgnaaggggcngatcgactatattcgagtgtttacgcgagnnacagaaattaggagatgcaacttagttcttaatttaactgcaaatttgattccatgtccttaataattctcaaaacacactggaattttaacaacagccataatctggttccacttctgctttctcttcacttgtaaaactcaaagtccgtgtctggcttcttaacatttgcgcggtagcccttctcgaaatccttaggtagtatcacatatctgttctttcgcaccgcatgcataccagcttcctggcaaattgctgctatcngcattgttcaacataaaatcaaaatagtgtgtcattaataa

SEQ ID NO: 167558 - DNA, 384 bp, Arabidopsis thaliana nossen
  unsure (1)..(384): unsure at all n locations
ngcgaccatnnnttgttctttggacgtccannnncgacagtgttaagtctaggggcttcttcttcttttgcggggttttttccccggcttgaaaaatgggtctatccttcggaaagttgttcagcaagctctttgcaaagaaagagatgcgtatcctcatggtgggtctcgatgcagctggtaagactacgatcttgtacaagctcaagcttggagagatcgtgactacgattccaaccattggtttcaatgtggagactgtggaatacaagaacattagctttaccgtgtgggatgtcgggggtcaagacaagattcgtccattgtggaggcactacttncagaacactcnaggacttatctttgtggtggacagcaatgatc

SEQ ID NO: 167559 - DNA, 381 bp, Arabidopsis thaliana nossen
tcgattatttgcactgagcgcataacatttttgtgacaagagactctctctgtctctcttgtgtctttctctgcccctctctccggcgatggttgttgctatggaccaacgcaccaatgtgaacggagatcccggcgccggagaccggaagaaagaagaaaggtttgatccgagtgcacaaccaccgttcaagatcggagatataagggcggcgattcctaagcactgttgggttaagagtcctttgagatcaatgagttacgtcgtcagagacattatcgccgtcgcggctttggccatcgctgccgtgtatgttgatagctggttcctttggcctctttattgggccgcccaaggaacacttttctgggccatctttgt

SEQ ID NO: 167560 - DNA, 384 bp, Arabidopsis thaliana nossen
  unsure (1)..(384): unsure at all n locations
cgcgttggcatatctaaacttaaacctaaattagaaaaattaaatggctaactacatgggcnccgtggagaagtcgaagtttttgcgtctccaacangncnncttgattcaacaacatcgccattctgcctctatcgtcaagtttcttcctccttttgaaagatctcttccctttgagctcgaaaccgcgtatattggtatcggtgaggaagaggaagtgcaactgttctactacttcatcaagtctgagaggaatccaaaagaagaccctcttcttctctggctaagtggaggacctggctgctcttccatctctggccttctttttgagaatgggcctctggctatgaagctcgatgtttacaatggaactctcccttcttt

SEQ ID NO: 167561 - DNA, 377 bp, Arabidopsis thaliana nossen
tcggtcttcttctttttccgtaagaatctctctctccttcattttcttggctgtgctaatgtcaccggctgtgtctcagacatgtaagtcacagactttttccggcgataaaacttaccctcactgccttgacctccctcaactcaaagccttccttcactattcctatgatgcctccaacacaactctcgccgtcgtcttctctgctccaccggctaagcctggcggatggatcgcgtgggcgattaatccaaaagctaccggtatggtcggatctcaaacccttgtcgcttacaaggatccaggtaatggtgttgccgtggtgaagacgctaaacattagctcctatagctcgctgattccgtcgaagctggcgt

SEQ ID NO: 167562 - DNA, 379 bp, Arabidopsis thaliana nossen
aatcatctctctctgcctagcaacaatcctagcctttcttctcctaagggcacttctgaattttttctgtgccaaagacaacctaccaccgtctccgtggcgagttccggtaattggaaacctccaccagctaagcctccaccctcaccgctcccttcgttctctcagccaccgctacgggccactcatgctccttcattttggccgtgtcccgatcctcgtagtctcttcatctgacgtagctcatgacgtcatgaaaacacacgaccttaaggttgcaaaccgcccgcgattaaaagtgattgaaacaatcctcaacggtgggagagaagtggttttttccccttacggagactattggaggcagattaagagtgta

SEQ ID NO: 167563 - DNA, 374 bp, Arabidopsis thaliana nossen
gttggtttgtcttatccttttttagaggaaacaacaacaacaagggccggtgatgagattttttgtttgtggatccactttgactaaactgtctctactgttagggtttctgatgggaggctcaaacctaatcagacaaaccactatgacgagaatggagacagagttttaacagtgtagcccatataaaacccatcaaaatcaaatgacagatatttctcattttctaacgagacattgtcagtgaaactcatgaaacggccaaaagatgcaagctttgtaaactgtaatgaaactaaagcgtcgaattagattacctcagtagaagaagagagtttctcgaccgattttctcaactgggtcaaggcaagttc

SEQ ID NO: 167564 - DNA, 369 bp, Arabidopsis thaliana nossen
atccttctcccttgtgcgatatcgtttgcgtgagatttgtctgggaagtggctaaccatgggtgttggggagtttcacatcaacattgtggtcattggccacgtcgattctggaaagtcgacaaccactggacacttgatctacaagttgggtggtattgacaagcgtgtgatcgagaggttcgagaaggaggctgctgagatgaacaagaggtccttcaagtacgcatgggtgttggacaaacttaaggctgagcgtgagcgtggtatcaccattgacattgctctctggaagttcgagaccaccaagtactactgcactgtcattgatgctcctggtcatcgtgatttcatcaagaacatgatcact

SEQ ID NO: 167565 - DNA, 369 bp, Arabidopsis thaliana nossen
ctccgccttcgtaagttccgccgaaaagaaccaaatccttcactactctggctcaactttcgtcctttctcttctcattcctttgcaacttctcacttctcgaattccttctcttcaaaatcagaaatggctcaagtggttgctaccaggtcaattcaaggctcgatgttatctcccaacggtggatctgtgtctacaagatccgagaagctattgaaaccagcgagttttgcagtgaaggttcttggaaacgaagcaaagagaagtggaagagtctctgtaagaagcagaagagtggttgatactactgtgagatccgctcgtgttgagactgaagtcattcctgtttctcctgaagatgtgcctaac

SEQ ID NO: 167566 - DNA, 391 bp, Arabidopsis thaliana nossen
acccacccgtgcaagcaacaatattgccacgatcttgattagatccacgattctgggtcgggcaaaagtttatgttttggggatcgccagaggatccattaggtttagaaatgacagtagtgagaccaccatctgctaaaagaggattcgtcggaccaccgacacgaacaggatcattatcaccggactcattagcgaaagtacgccactcagaagtttcatcgattgagtgagattcaagcacgagaccacactctgaacaaactgtatctccggcggaatggtcaaacacaacctccgtgtgcctcttacagtccgaacaaaacgcgtgactcatagcttctctttctcttctcacaagaaaacccgttgtgacttattggactttgat

SEQ ID NO: 167567 - DNA, 379 bp, Arabidopsis thaliana nossen
aatttctcctgttagccaaagtttttgtccccaacaagaaactcatgcggcatggttcacccactagcttactaacgacttccattcttattaatctctctcaattcttcatttctgagattcatcgctctctcttctctttgtcacaatgaatttcaattcttcttacaatctcactttcaatgacgttttcttctcttcttcttcctccggtgaccctatggtttcacggaggctgtttctcttgagagatgttcagattcttgagctccttattgccattttcgtctttgtcgcaatacatgccttgcgtcagaagaaataccaaggtcttcccgtgtggccgtttcttgggatgcttccttctctagcttttggc

SEQ ID NO: 167568 - DNA, 379 bp, Arabidopsis thaliana nossen
gggctcatatacaaatggtgaacgacaacggagaaagagtgttcgaccaagggaggtccagcggacagtttctaggcgtgccacaaggcttttcggtcatgaaacatgccataggcgaacagttcgagtggatcgaattcaagacaaacgaaaacgcacaggtcaacacactcgcgggccgtacctcagtcatgagaggtttgccgcttgaggttataaccaatgggtaccagatctctcccgaagaagctaaacgagtaaagtttagcacgattgagaccacactgacccatagcagtccaatgagctacggaaggcctagggcttgaggcttgatgagcgcgtggtggaatagcgtttgaatctaaagttcggtttg

SEQ ID NO: 167569 - DNA, 378 bp, Arabidopsis thaliana nossen
  unsure (1)..(378): unsure at all n locations
tttctctcaaatttagggttttctcttttctcgaaagtctngcggaantgtgggtgatcactatctggtgtgtgggtttcatttgatatctggagaaaggggtttctggaaacaaggagttcataattcgcgatcttgatctatcgatcttcatttatatataaaagcgtgaatgagattatgatggagtcgaaaggtggtaaaaagaagtccagcagtagtagttccttattttacgaagctcccctcggttacagcattgaagacgttcgtccaaacggtggaatcaagaaattcaaatcttctgtctactcaaactgctccaagaggccatcctgagtaccagcgtgcaccgatcttcataatatagttatagct

SEQ ID NO: 167570 - DNA, 371 bp, Arabidopsis thaliana nossen
agcatttccagtgcagttcttatgatccattcaacgacttaaccggtcctatccaaaccatcctttgtgaagacagcaaccaaagcatgtactgtcagttactagccggtctgattcaccgtcacaaggtgatgcgtttaggagcagtctttgcttcagcgtttctccgtgcaatctcttatctcgagaagaaatggagtcagctctgtgaagacatccgcaccggtagtctcaaccccatgatcaccgatccaggttgccaaatggcaatgtcttgtcttttaatgtcgccgaatccagagttagctagcgagatcgaagagatctgtgggcggtcgtcgtggaaagggattctgtgtcagctctggcct

SEQ ID NO: 167571 - DNA, 379 bp, Arabidopsis thaliana nossen
gcggtcaagaaaaatcttaggcagtgtcgtcttacaaaaaaaaaaagacaacgtcaatggcaaaatttttttggtttaccatcaatgcttttgtgaaactctttgctattattttgacctcaatccaccaaattctcaatggtcagtggatcaatgattctaaacattgaacactaaacatatctacgaaaacagaacaaataaataaatttcttcaaccttcatttctcacaagatagaataatggcatgagttcagctgttgttatgcttcaccattctttttgtatctgtgtcccttctggacattgtttcagctcacttgaagattaagccatctttacctcaaattccagatccgcaatagagccttgcaccgt

SEQ ID NO: 167572 - DNA, 283 bp, Arabidopsis thaliana nossen
attgcttcatcattaccaaatcatcaacttaatcgtttctctcaaatttgcggttttctcttttctcgggggtcttgccgatttctgaatcatctctatctggtttgagggtttcgtttgatatctggagaaaggggtttctggaaacaaggagttcataattcgcgatcttgatctatcgatcttcatttatatataaaagcgtgaatgaaattattattgaatccaaaggtggtgaaaagaaatccaccacaagtaggtccttattttaccaagctcccct

SEQ ID NO: 167573 - DNA, 374 bp, Arabidopsis thaliana nossen
  unsure (1)..(374): unsure at all n locations
gtcacaccttcttcgcctgagaataccacctaacaatgaccaccgggcggggctttatcgccctcttgggcttncnagacgccgccgtttctggtgacttcatcaaacttccttctctaccttttaagttcttccgcccaactgaaaacgacaatgattctactaagtgggctgtctcgtcgccggatccaacggatactggaattattgtcatcaagccgatgtttgtcatgcttatcaacttttgaagaaaggtggagtgaaagaggagaatattgtggtgtttatgtatgatgacattgcgaagaacgaggagaatccaagacctggagttattatcaatagtcctaatggagaggatgtctataatggag

SEQ ID NO: 167574 - DNA, 379 bp, Arabidopsis thaliana nossen; identical to SEQ ID NO: 131899

SEQ ID NO: 167575 - DNA, 380 bp, Arabidopsis thaliana nossen
cacaaacacacacaaatctctgaagtaaaatgacgttcccttctctttcgggctgatttctcttctttggcttggtattcgttacgcatgcattcgacctcagcatcatccagatgcaacagggaacatgtccgtacacggtggttgtcatgacaagctgtctttctccggagtcgacaagagatcagatcagcattgtttttggcgatgccgacggtaacaaggtgtatgcaccgaaactagggggtttggtaagaggaccagggggtttggggaagtgttcaacgaacacattccaagtcagaggtcaatgtttgaatgaccctatctgctctctctatatcaaccggaatggacccgacggttgggtcccggagtcc

SEQ ID NO: 167576 - DNA, 405 bp, Arabidopsis thaliana nossen
aaaccgggggggacccacgcgtccgaccatctcctcctcctctatcttcacaccatcaacatcatcaaaaacgggggggaatcgcagattgttcggggccttcaccactgccaccgcatctcatatctccaaagaagtcaaaccgtaaaggttcaatgactcctcctccacaatcgcaccatgctccttctcctcccattcctgattctttgatttctcctgctcacgctccagtctctttctctatgaaacgcatctccccggctctagcaccttctccaacccaagtgtttcctctcaggtcctcttcaagaccttcaaaatctcggaaattccctctaggtccacctcttcaagcatttcctcctcctccccctaattcagattgttcttcaactatttgtt

SEQ ID NO: 167577 - DNA, 383 bp, Arabidopsis thaliana nossen
gcggccttgtaatcgtcttctctggaactctcctctaaaaccaccttatcagctggcttcaatccatcctctcgccggagttttctaccgccgactagagttggacttaagatctcttccgccgccgaatcggagcctgatctcagtgtcactgtaaatggcctgaaaatgcccaatcctttcgtgatcgggtcgggtccaccgggtaccaactacaccgtcatgaagagagcctttgatgaaggttggggggccgtcatcgccaaaaccgtatctttagatgcatccaaagttatcaacgtgacacctagatatgctcggctacgaaccggatccaatggctcagccaaaacagatgtaattgggtggcagaacatagaact

SEQ ID NO: 167578 - DNA, 376 bp, Arabidopsis thaliana nossen
aaaagatctccggtaacgttttaacgtcggtgaaaaaatgcggggggtggcggcggttaattttgttctgaaacggaacaattatcttcttccgcgccatggctcctcacaaacagcagctcagagaacatcctccgtccgcgagaccgagaccgaaacaaaacttccgaaaatgcccccgttcaattattctccgccgccttacgacggtccatctacggcagagatcatcgcaaagcggcgagagttcctcagccccgctctttttcacttctacaacacacccttaaacattgtggaggcaaagatgcagtatgtgttcgacgagaatggacgtcgatatttagatgcctttggaggaatagcgacggtttcg

SEQ ID NO: 167579 - DNA, 354 bp, Arabidopsis thaliana nossen
gcggcttaatatatttaatttgatctgtattttttttaattctaccctgttttcaagcacttttttagtcggcaaattgccagaggcctacgcctttttgaatccaatcgtagatgttatgcccgtaatacctcttttctttcttctcttagcctttgtttggcaagccgctgtaagttttcgataaaattcttaatactgtcttaaacaaattcacgattttgatttttccaacaattcaaaatatgcaaaaaatcttgacgtatgaacgaactctcaattcaaacatgtaatttttttgggagccatactaaatctgggatcattctattttctaaaatttatgctcttttt

SEQ ID NO: 167580 - DNA, 358 bp, Arabidopsis thaliana nossen
  unsure (1)..(358): unsure at all n locations
aatttctcaaaatcttaaaaactttctctcaattctctctaccgngatcgagatgcagatctttgttgtggactctcaccggaaagacaatcaccctcgaggtggaaagctccgacaccatcgacaacgttaaggccaagatccaggataaggagggcattcctccggatcagcagaggcttattttcgccggcaagcagctagaggatggccgtacgttggctgattacaatatccagaaggaatccaccctccacttggtcctcaagctccgtggtggtatgcagattttcgttaaaaccctaacgggaaagacgattactcttgaagtggaaagttctgacaccatcgacaacgt

SEQ ID NO: 167581 - DNA, 379 bp, Arabidopsis thaliana nossen
gcgcagctaaactttattggagaaaccctaatcggcgacaatgggtatttctggtgactctatccattttaggcgtgccactggaggcaagcagaagcaatggaggaagaagcgaaagtatgagatgggaaggcagccagccaacaccaagctctcaagcaacaagacggtcagaagaataagagttcgtggtggaaatgttaagtggcgtgcgttgaggctcgatactggtaactactcgtggggaagtgaagcaactacccgcaagaccagagtccttgatgtggtctacaatgcctccaacaatgagcttgtacgtactaagacacttgtcaagagtgctattgttcaagttgatgctgctccgttcaagcagtgg

SEQ ID NO: 167582 - DNA, 380 bp, Arabidopsis thaliana nossen
cggacgcgtgggagcaactctggagagagcgtgttcgtcattgaaatcggggcttggagattcaatattgcttcgatctcgcgttcttcgtctcgtttcgtcggtccagtgttaataaaaaatgagttcaactgtttcaaatccccaaggaatcctgcaaccaggctcatttctgcttccagaatcagaatctatgaaaaaagaggaagcagagttagtttctgtgtgttggaatcaggattcaagttgttttgcagctggaacgagtcatggttttcgtatatataactgtgaacctttcaaagaaactttcaggcgtgagctaaaggacggtggttttaaaatcgtagagatgcttttccgtagcaatatactggcac

SEQ ID NO: 167583 - DNA, 388 bp, Arabidopsis thaliana nossen
  unsure (1)..(388): unsure at all n locations
cgaaaaacccggcgggtcgcacgcgggcggagtctaatcatcaaacgtgactttctcgctnnctcaaattccaaacagggccgtgaaacctatacttgttgggagaacgaaatcgccgcgtgtgtgcctaagagcgatggcgtctgagaaacaaaaacaacatgcacaacctggcaaagaacatgtcatggaatcaagcccacaattctctagctcagattaccaaccttccaacaagcttcgtggtaaggtggcgttgataactggtggagactctgggattggtcgagccgtgggatactgttttgcatccgaaggagctactgtggctttcacttacgtgaagggtcaagaagaaaaagatgcacaagagaccctacaaatggtg

SEQ ID NO: 167584 - DNA, 203 bp, Arabidopsis thaliana nossen
  unsure (1)..(203): unsure at all n locations
tttaacatnccacaccccaactacgagaaccgcgctgggtttgttttgaactgtttggaggctcactatcgaaggatacattaaggatggaagcaggttcaggatgttcaaccctaggctgattacaatatccagaaagaatggctttggagctgatcttgttcggatcgatgcacactccatgtgttcgcctgatttctatt

SEQ ID NO: 167585 - DNA, 395 bp, Arabidopsis thaliana nossen
  unsure (1)..(395): unsure at all n locations
cggggcgttcacacacangcaaaaaactatactcacatttgctttgaaaaaacggaaactaaaagggagggagaaaaaatagtttgttggcgcccacaaaaaaaccncatatcaactgcctcgtgtgagcgaaatggcgatggaacgattagaataggattgaagaagaggaaactagaccggagcaacaggctagcttctcagctttttttgaaaaaccgagggtctcattggtctcccaaacactattttcgcctgaacgatgaaaatgcggatatggttccgctgaaaaactatggggatgctcaatactatggtgacattaccattggtactcctcctcagaagttcactgacatctttgatactggtagctccaatctctggataccatc

SEQ ID NO: 167586 - DNA, 374 bp, Arabidopsis thaliana nossen
atcgacaaaaatggagttgatatacgactttctcaacctaactgcgcctgtcttcaccttctttgttctgtgcttctacttgcctcctttttacttcttcaagttcttgcagtctattttctcgacaattttctctgaaaatctttacgggaaagttgttctcatcactggtgcttcctccggtataggcgagcaattggcatatgagtacgcatgtagaggtgcatgtttagccctgaccgcccgaaggaagaaccgtctagaggaagtggcagagattgctcgtgaactcggatctcccaatgttgtcaccgttcatgctgatgtctccaaacctgatgactgtagacgaatcgttgatgacaccatcaccc

SEQ ID NO: 167587 - DNA, 374 bp, Arabidopsis thaliana nossen
ctctcagtgaataatgatcaagtgagccaaaaattttttagttccgattgtgccgatccaaatatattagggatttacgattattcagaattgaatggaaacttaggtactagtcattataatttaatatattctgctatttttcatgagaactcggatttattagcaaaaagacgaagaaatagatttctcattccattccaatcgattcaagagcaagagaaagaattcataccgcagtcaggtatctcggttgaaatacccataaatggtattttccgtagaaatagtatttttgctttttttgatgatcctagataccgaagaaagagttccggaattcttaaatatgggactctaaaggcggattcaat

SEQ ID NO: 167588 - DNA, 377 bp, Arabidopsis thaliana nossen
cggacgcgtgggttcgaaatcgtcacactttgttgcgtgtcgacttctcgctctcataattcttgagtttcacgtctcaagatttgatcacttctgccaattttccagattgatctctctaattatggcttccatgagtttcgccttgaatcgcttctctggactctcctctaaaaccaccttatcagctgacttcaatccatcctctcgccggagttttctaccgccgactagagttggacttaagatctcttccgccgccgaatcggagcctgatctcagtgtcactgtaaatggcctgaaaatgcccaatcctttcgtgatcgggtcgggtccaccgggtaccaactacaccgtcatgaagagagcctttgatg

SEQ ID NO: 167589 - DNA, 360 bp, Arabidopsis thaliana nossen
  unsure (1)..(360): unsure at all n locations
cacgcaaccaaaaaatttgatcactttttttacccacaanaaacaaaaaggggggggaaaaaatatttttgcgtggcacaaaacacaanganncgagtatgagctaaagagtcttgaatggaatagaaaagagatagagaagaatctcctggaagcaataaaagaatatcgaatcatggaacaggacttagatgaactagaagatgaacatgatcaagccatttccaaaacagaaaagctagaggccgacgtacaaaaactggattagtagacatggggcataaccacatatacatatgttctaaacatttggattttggcagctacaagaactaaacgaggaaaatcctcaactgatgg

SEQ ID NO: 167590 - DNA, 378 bp, Arabidopsis thaliana nossen
ctttccctcaaacccaaaacacattttgttttttgtttcccatctaaaatgcgtatgagttgtaacggatgtcgagttctacgaaaaggctgcagtgaaaactgtagcataagaccttgtcttcaatggatcaaatccgctgaatctcaagccaacgccaccgtcttcctcgccaagttttatggccgtgcggggctcatgaacctcctcaacaccggtcctgaccacctccgtcctgcgatatttagatcattgttgtacgaagcatgcgggaggattgtgaatccgatatacggatccgtggggttattgtggtcaggaaactggcatctttgtcaagcggccgttgaggcagtaatgagaggctcacccgtgact

SEQ ID NO: 167591 - DNA, 374 bp, Arabidopsis thaliana nossen
gtccgttaacgttaagctcctttaccgttacgtcttaaccaactttatcaaccggtgtttgttcccgttttcggcgttcctcgccggaaaagcctctcggcttaccataaacgatctccacaacttcctttcctatctccaacacaaccttataacagtaactttactctttgctttcactgttttcggtttggttctctacatcgtaacccgacccaatccggtttatctcgttgactactcgtgttaccttccaccaccgcatctcaaagttagtgtctctaaagtcatggatattttctaccaaataagaaaagctgatacttcttcacgggacgtggcatgtgatgatccgtcctcgctcgatttcctga

SEQ ID NO: 167592 - DNA, 244 bp, Arabidopsis thaliana nossen
aaaacctctcaaacttaccacaaacgacctccacaacaacctttcctatccccaacacaaccttataacaccaactttactctaaccaatcactattgcccggctgggtctctacatcgtaacccaacccaacccaccacaccccaccaactacacgtataaccttccaccaccacacatcaaagagagtggctataaagacatacatatcctctaccaaataagaaaacctaaaacttcatca

SEQ ID NO: 167593 - DNA, 384 bp, Arabidopsis thaliana nossen
gtcacgctcagttccactcgtggcgtactccagggtaatgcgaacgagcggccggagtacaacatgattgtttggcgagatctgggactgaactggacagacaaggaaggatccaagtggacaacgacaacggacagaacgtgttggaccaacaggtgcagaataggacagctcgtggtcatcccacaagggttcgcatacgttgaacagtcccacggaaacaagatcgagtggatctctttcaaaactaatgaaaacgcaatgatcaacactttggcggatagaacctggctattgagggcattgccattggaggtcatatcaaatggtttccagatctgtaccgaggaagctaggaagatcaagtgcaacacactggagacc

SEQ ID NO: 167594 - DNA, 376 bp, Arabidopsis thaliana nossen
  unsure (1)..(376): unsure at all n locations
attttgattgagctagatcttttaatgtataatttaacaaaaaagaaggggatattttgtattttctggttgagcagagnatttatgatttgaggtatgagctagagagtcttgaatggaatagaaaagagatagagaagaatctccgggaagcaataaaagaatatcgaatcatggaacaggacttagatgaactagaagatgaacatgatgaagccatttccaaaatagaaaagctagaggccgaggtacaaaaactggtttagtagacatgttgcataaccacatatacatatgttctaaacatttggattttggcagctacaagaactaaaggaggaaaatcttcaactgatggaagttaatggaaaagact

SEQ ID NO: 167595 - DNA, 379 bp, Arabidopsis thaliana nossen
gtgagaacaagctcagcaccaatggatctcatcgtcactctcctctccaagctagtgtacgaaggcatcgtcattataatcctgtaccctttcatagcagccatgaaagccaaactgattcccatgtttcctgaagtaggctctatcagtgttgtctgaaaattaagcatcaaattcagagggtaagaaactcttgattcaccattaatttgagaattaactaagagaaaagaaaaaagctatttacttttccagggatgattagttttttcttctctgcatctgcaatcatggctatagctggtctaaagacaggaaatggaacaaaatcaatacttgctactagtgcttttgaaggatttgaagactaagatttcac

SEQ ID NO: 167596 - DNA, 375 bp, Arabidopsis thaliana nossen
ggacatttgagtcggaactgttgtgatttcaaattttcatttctggagtgataatttcattttttgatgtgtgcgttcatcaatggaggtttcttctttacccagatactgtaactcacgctcctttgttccagaattgtctcgtttcaggggattcaaagttcacttatgggaccaatctcttgttcctcttcatttcagcattcgaaaacgaaagaacacccctcgttatttgatttcttgcagtcagaagaaagatgtcactgttgttgatggaagttgtatggatgagatctatgataagttggcggaacgtcttgtccctacagcagcggcaatgtttagccccaatcttaaacgtttggtcggtttggc

SEQ ID NO: 167597 - DNA, 379 bp, Arabidopsis thaliana nossen
tttttggtggccatatgtgcattctttggacgacttcttaatggttctcgcccgtcttgctccatttgagaggggaatatacgaggattacgtggcaaatttctggtgcactacttccatactcataaaatggaaaaatctgttcacaacacaatccctcaagtctatcagcttagctgcaactatattggcttctcttccttcaatggttcaacaaatcttgtcaccaagcaatgaaggtttcctatatggcttgctcaacagttcaatggctttctacttgttttcctttccagtgcatgagaaatcaatcctgatgccttttctctccgcaacactattagctgtcaaactacctgaccatttcagtcatttaacc

SEQ ID NO: 167598 - DNA, 378 bp, Arabidopsis thaliana nossen
cttagatcttcttttcaaatttcaatggcgtccggtgatgttgagtatcggtgcgttcgttggaggtctagcatgggccactgatgacagagctcttgagactgccttcgctcaatacggcgacgttattgattccaagatcattaacgatcgtgagactggaagatcaaggggattcggattcgtcaccttcaaggatgagaaagccatgaaggatgcgattgagggaatgaacggacaagatctcgatggccgtagcatcactgttaacgaggctcagtcacgaggaagcggtggcggcggaggccaccgtggaggtggtggcggtggataccgcagcggcggtggtggaggttactccggtggaggtggtagcta

SEQ ID NO: 167599 - DNA, 359 bp, Arabidopsis thaliana nossen
cggacgcgtggtgtttcatcttctgcagatggcttgaaagtaaaagagggtgggggagacccttttgtgtttgcggatgccttgaaatcactaatcaggctattacgacttgcacagccattgggaaaaggccttctgcagaggcttctcttaaatctatgtgctcacagttttacaagggcaaacctggttcaacttttactggatatgattaggccggagatggaaacatcaccgagcgagttggcaataactaatccgcaaagactctatggctgtcaatcaaatgttgtttatggtcgatctcagctattgaatggtcttcctcctttagtgttccgcccggtgcttgaagtttt

SEQ ID NO: 167600 - DNA, 368 bp, Arabidopsis thaliana nossen
  unsure (1)..(368): unsure at all n locations
cgcaaatattttacgaaattttatactattaataatctaattccctaagtgtagatattttgctttttgtacatcatatattnntttgcctaaaattttatacgagaaattttatactattaagaatcttattgcctaaaattaaccacttctttttttggtgttctatttcatgcaccgatattaaaaatcgtaggaatatcgatggccaaaataaaataaaatggaagaggatctaaactttgtattttatactggtcctagtcctagaaaatcgaattattcagtgttttcattaaatgcatagttcaacatattatttggcatgatagattgtctgcaaatgacacatcacttttcctttctgc

SEQ ID NO: 167601 - DNA, 378 bp, Arabidopsis thaliana nossen
cttgtctagctacttttgctctcgcagtgttagtaacacaaggaagcgtgtttagtttgtgttttttcggctctgctactacaaactctgttcctaattggtttcatcattggccgccgtttaaatggggaccaaaatttccatattctccacctaaaccgccgccaatcgagaaatatcctccaccggtgcagtatccaccaccgatcaagaagtatccaccgccaccatacgagcatccaccggtgaagtatccaccaccgatcaagacttaccctcatccgccggtgaagtatcctccaccagaacagtatccaccgccgattaagaagtatcctccaccagaacagtatccaccgccgattaagaagtatccta

SEQ ID NO: 167602 - DNA, 358 bp, Arabidopsis thaliana nossen
  unsure (1)..(358): unsure at all n locations
ccaacaaacccggggcgtcccacgcgtccgactagattcactacacaatgcattaaaaacccaccaaacccgncggacgcggacgaaaacatgtttgtgggctcaaacaacagcacactcaacagctacaatcgaacaaacctcagacttctccgccaaaccactcaccaacgctccatccgaaaaaacgcaatagcgctaaccaaaaacaacgaaaacccaaactcggaactctaaacaacaaacccaaaggctcatatacaaatggagaaccacaaccaataaagaaaaacaaccaatagaactccaacccacagtaccatgtatgccacaccacaaaatgaacaaaaaacatacc

SEQ ID NO: 167603 - DNA, 375 bp, Arabidopsis thaliana nossen
ggaatcggacctttgttcgaattccagtgtaggagtttgtagggggggggactttctcagcgtttttggcaggatcaaactttgaggggtagtaattgatctgtaaaaagtacaaaccaaatgagaattttgattccaagtaaaaagactaacaatggtagctcaagtggtgtactaagacgtacctcctcatctctgtgcatgaagttcataaaaccttcatggtgattgttgtggtgagcacatttgggagcattgactggaagctgcaaataattcggtccaaggcgatgtctctgagtgtcaccataagcaaagatcctacactggagcagcttgtcgtctgagtagtagattccaggaaccacaagaccc

SEQ ID NO: 167604 - DNA, 367 bp, Arabidopsis thaliana nossen
  unsure (1)..(367): unsure at all n locations
aaaaaatttaccttaatttgaatttcaaaaaaaaaaaaaaaangggcgggaaaaaaaatttttgtttggctgtatcaaactaaaggggaaataattgaacaaggaaaagtacaaaccaaataagaatacacattccaactaaaaagactaacaatggtagctcaagtggtgtactaagacgtacctcctcatctctgtgcatgaagttcataaaaccttcatggtgattgttgtggtgagcacatttgggagcattgactggaagctgcaaataattcggtccaaggcgatgtctctgagtgtcaccataagcaaagatcctacactggagcagcttgtcgtctgagtagtagattccaggaaccac

SEQ ID NO: 167605 - DNA, 383 bp, Arabidopsis thaliana nossen
  unsure (1)..(383): unsure at all n locations
gcgatttctcacattttcgtagccgtaagactcctttcagattcttacttgcagctgtgggtaaagagaagtttcacattaacattgtggtcattggtcatgttgattctggaaaatcgaccacaactggtcacttgatctataagcttggtggtattgacaagcgtgtcatcgagaggttcgagaaggaggctgctgagatgaacaagaggtccttcaagtacgcatgggtgttggacaaacttaaggccgagcgtgagcgtggtattaccatcgatattgctctatggaagttcgagaccaccaagtactactgcacagtcattgatgccccangacatcgtgatttcatcaagaacatgattactggtacctcccaggct

SEQ ID NO: 167606 - DNA, 282 bp, Arabidopsis thaliana nossen
tcaggttacctctgaaaaaatcgaccacaaccgggcacacgacccaaccaacgcttcgaatcaccaagccaatcaactaaagcaacgaactggcatcgaccagctacaacaagaggtccttcaagtacgcatgggtgtaggacaaacttaaggccgaacctgagcgtggtatcaccatcgatattgctctatggaagttcgagaccaccaagtactactgcacagccattgatgccccaggacatccagatttcatcaagaacatgatcactgatacctccc

SEQ ID NO: 167607 - DNA, 380 bp, Arabidopsis thaliana nossen
caagagaacatgtcggttaaattagaaaccactccaccgtcaattgaggggagcggtctcgtggccttgtgtctctctcatctcggcgtaacccacatgttcggcgtcgttggaatccccgtcacatctctagctagccgagctatggctttaggtatacgtttcatcgccttccacaacgaacaatccgctggttacgccgcttcagcttacggttacctcacgggtaaaccgggtatccttttaacggtttcgggtccgggttgtgttcatgggctcgcgggtctttccaacgcttgggttaatacatggccgatggtgatgatctctggttcttgtgatcagagagatgttggtcgtggggatttccaggagcttga

SEQ ID NO: 167608 - DNA, 413 bp, Arabidopsis thaliana nossen
  unsure (1)..(413): unsure at all n locations
acctaaaaaacagggccggcgcactcaacccgagcataaaatgtaaatgtgattgaattcaaaactaacaaanaancacgggccggcaaaattttttttttttggggcaccaaatgcaaagcgcatatgggttcaaaaggttcatcacttagaatacaagctcacacgagcattcgatcaccaagacaaattacaggaattcacaaatctgtctttcattacacagtgtttttgatacacataaagctcataaagtacacatatttctatttttacattcattagttgaaagggataacaatatcgccaatgttgttgtgccatggatccgccaaatgagttgccaaattctacaatggtcctgtccccgggaaaaccgactgttgcacacagaatcctacaaacgccaacaa

SEQ ID NO: 167609 - DNA, 391 bp, Arabidopsis thaliana nossen
aaaaacccggggcgttccacacattcgcacaaaacaaattccaaagctttttacgaccaagaagaagagagggggggggaaaggcgtaattttctctgtcaatcacaacaacaatccgttcctcttctcctctcacttccgcttccactcatcacttcctttccaaacccaccgcaatcgaattcccatttcgtctcagctcttcttctaaccaccgcgcaatcaacctccgtcctatctccgacgtcaaagctccggagaaaatcgagaagatcggatccgaaatctcctccttaaccctcgaagaagctcgtatcctcctcgactatcttcaagacaaattcagagtctccccactcttcttaacccccgcagcagcggccgatgcagc

SEQ ID NO: 167610 - DNA, 372 bp, Arabidopsis thaliana nossen
  unsure (1)..(372): unsure at all n locations
cttaagtgaaaggaatgccttataattcatacgggatttatttggctatgtattgttccattctatcttttaggtcctgcgtcacctcgatggttatgccacaatattcttaaagcttatatgcgatgtatagacttctgcaaccatgacatatttgtttactttatataaaaataaaataatataaaactataaaaaaccaaatttattttcttttagaaagataagggaatgcgtaattcgacaaaacaaggtcttcttttcacgaggtacgcctatcaatttgaatttctgaatcgaccatagaccaatcgcctttttttttatattggaagatngaatacacccacaattataagctgcatggtcctt

SEQ ID NO: 167611 - DNA, 380 bp, Arabidopsis thaliana nossen
caacccacccttagttccgaaatgggtactttacaagaaagaattacttggacgaaaaaggggttttttgcctctattcaagcagtttatgtacctgcagatgatttgactgaccccgcacctgccaccacatttgcacatttagatgcgactaccgtactatcaagaggattagctgccaaaggtatctatccagcggtagatcctttagattcaacgtcaactatgctacaacctcgaatcgttggcgaggaacattatgaaactgcgcaacaagtaaaacaaactttacaacgttacaaggagcttcaggacattatagctatcctggggttggatgaattatccgaagaggatcgcttaaccgtagcaagagcacg

SEQ ID NO: 167612 - DNA, 406 bp, Arabidopsis thaliana nossen
cgaaaaacccggggcgtcccacgcgtgcgcggaaaccagacagaaaccgacttaacaacggctgcttaatcgggtccgggcaaaattttctgtgtttccttacaagagctgcaactcacatactcatccgggaaattaccatttcaccctcgagacctgctaccgctacatccgaggcaagtctcctggccggtaatcaaatctctcaacactgccccagatctcctccctactataatcggctccaattctgtaaaaaacaacgccgtggaaaacaaaggtgcttgctaatatgaaaacaaagcttgataaaagctcaataacaagtacggttccgaatactgcagctgcacactacacattaatgtcgataaggcacatagttggacgtgcatcggatatatat

SEQ ID NO: 167613 - DNA, 392 bp, Arabidopsis thaliana nossen
ggggcgtcccacgcgtccggctgggcagaaccagatccaatcaaggagcttacactcattaggtacgggtaggcattttgttttttctgacccatctctgaagtcatctgatttttggggtacggctcttggatcagccgaacgtgtgagtgattcttgtgttaaatctaaatctggtagacctggtaactcctctctgcatttctcctttggctctggctcctctagagacacctcagctgctaaagtttctgagcagaggagtagcattttaaaagaagctcctagggggactggttatatatctgatggagtaaacttaagagaaagaaatgctaaaagatttgatgaagctgaaattgcattaccaatttcctcttctactgatgcgc

SEQ ID NO: 167614 - DNA, 289 bp, Arabidopsis thaliana nossen
atctgatttttggggtacggctcttggatcagccgaacgtgtgagtgattcttgtgttaaatctaaatctggtagacctgaaaactcctctctgcatttctcctttggctctggctcctctagagacacctcagctgctaaagtttctgagcagaggagtagcattttaaaagaagctcctagggggactggttatatatctgatggagtaaacttaagagaaagaaatgctaaaagatttgatgaagctgaaattgcattaccaatttcctcttctactgatacgctg

SEQ ID NO: 167615 - DNA, 368 bp, Arabidopsis thaliana nossen
  unsure (1)..(368): unsure at all n locations
gcagcccacccaaaatttcgaaatgggttctatacaagaaagaannacngcggcgggaaatggaaactttttctgtcttcaaacaaaanatanacctccanataatttgactgaccccgcacctgccaacacaggagcacatcaagatgcgactaccgtactatcaaaaagattaactgacaaacgaacccacccagcaaaagatcctttagatacaacgtcaactatgctacaacctcgaatcggtggcgaagaacattatgaaactgcgcaacaagtgaaacaaactttacaacgtcacaaggagcttcaggacattatagctatcctggggtaggatgaataatccctatgcgcactcgacaccg

SEQ ID NO: 167616 - DNA, 406 bp, Arabidopsis thaliana nossen
aaaacccggcgcggcccacgcgaccgcagaaagtaaagcacctacggtgcggtgacaccattgcaacaccatctggtggggctcaatggttcttcttcggtggaaatgagcctctcattcttgttgcagccgcggatctcgccagcaaccagaaccagcttgaccgcaaccttagaccatttttgatagccggaaacaacccacaagggcaggaatggctacaaggccgaaagcaacagaagcaaaacaacatcttcaatggcttcgcacctgagatcttggctcaagccttcaagatcaatgtcgagacggctcagcagctccagaaccagcaagataaccgtggcaacatcgtcaaggtcaacggacctttcggcgtcattaggccacccttgagacgcggcga

SEQ ID NO: 167617 - DNA, 381 bp, Arabidopsis thaliana nossen
  unsure (1)..(381): unsure at all n locations
atggggtcaaatacggagatgatggagagagacgcaatggctacggngggtccgtatgcgccgttcacttaccatcgccgngctcgtgttgacttggatgatagacttcctaaaccttatatgccaagagcattgcaagcaccagacagagaacacccgtacggaactccaggccataagaattacggacttagtgttcttcaacagcatgtctccttcttcgatatcgatgataatggcatcatttacccttgggagacctactctggactgcgaatgcttggtttcaatatcattgggtcgcttataatagccgctgttatcaacctgacccttagctatgccactcttccggggtggttaccttcacctttcttccct

SEQ ID NO: 167618 - DNA, 381 bp, Arabidopsis thaliana nossen
ataggcgtgacttgcacgttatttctccaaagcaaccaaattcttcctggtctgtgttcttcatttttgtttataaaagaccattctctaaaaactgactttgtaatcttgtatacctttctttcttttacttttgtttctattaaaaaatcaaaatcaaacttccccctattcatccaatcccttacaacatcatgcttacctcttttattaaaatatctaatgttccagaagaaaccagacattaagaatgttgtggaggtttacttgtcttcaagtagttaggatttattatcctagaattgtgcatgtttttgttgacaaaaattcgtgaccatcctttgaatacatgttcgattgattacatcctcagcgtgacaa

SEQ ID NO: 167619 - DNA, 376 bp, Arabidopsis thaliana nossen
accagaaatcatgaagttcatctttcgttatcttctccagtttctggctgcttctcctagctttcgcgtggaatacactcaccgcaaagtccttcgaatccaccatccctttaaatttacaaaacagtggattggtccatgatcattttcgtatgtatatatagatatttattgacttaccaacgcactcgccaaaatcgtctcgggcgagtaatccatttttagaaagcgattcgaatcgcttttcaacttttttccacatctgatcgcaatcgcaatcccaatcgcagacgcagctgtttcctctcgtggttttattgataaactgtaatccttttaacgctctttgcgcactcgacgttgatcgctgtagttt

SEQ ID NO: 167620 - DNA, 377 bp, Arabidopsis thaliana nossen
gttattacacgctgaccaagactccgaacgcacttattacatggctgccagagcttaccaaagttttggtgtcgatttcaacaactccactaccataggaatcttaagttacacctcttcatgcaaagctaaaacatcatcgttttcaggatattacccaacccttcctttttacaatgacacctcagcagcttttggattctttaccaagatcaaatgcttattctccggtcaagttcctgtccaaatctctcgtaggataatcacgacggtttcaataaatcttcgcatgtgtcctcaaaactcgtgcgaaggtccaaatgggtcgagattagcagcgagtatgaacaacatatcgtttgtcacaccaagtcacg

SEQ ID NO: 167621 - DNA, 377 bp, Arabidopsis thaliana nossen
gtgagaaccgcataagtttcaccatctgactccaagagaataagcacaggtacagctggtccttgttcagatacaatacctggaacctaatgacgttttagcttacatatggcaagcaaaactaacatatacaatgaccacaacgagcgagatgatactagttttgaagatgattagataccttttgaccagtttccttgtcgaaaatatccgctttgaatttgagaaatccaattcttttgccaaacatatcaactccctaaaaatcataaactaatcaagaaagctccaagattctatatatgttctgatcactgatcataatcatcatcagataattcattaggatcaagagtatctcaatgtgcttttatata

SEQ ID NO: 167622 - DNA, 137 bp, Arabidopsis thaliana nossen
caacataagaatagtgatcgaagctcatggcgtctcttgcaaccggcggggctgataaaccatttttcggcataaaaggactccgcggcagctcactcgccggagctaaactctccatcaaacctttccgcctgagc

SEQ ID NO: 167623 - DNA, 373 bp, Arabidopsis thaliana nossen
actattttcacattctcttctctctcgatatcatctaaatctctctcggtctcaatttcgcattttggcgtgacaagaagatcagaatcggaatcaacggtttcggaagaatcggtcgtttggttgctagagttgttcttcagagggatgatgttgagctcgtcgctgttaacgatcctttcatcaccaccgagtacatgacatacatgtttaagtatgacagtgttcacggtcagtggaagcaccatgagcttaaggtgaaggatgacaaaactcttctcttcggtgagaagccagtcactgttttcggcatcaagaaccctgaagacatcccatggggtgaggctggagctgactttgatgttgagtctac

SEQ ID NO: 167624 - DNA, 206 bp, Arabidopsis thaliana nossen
atcgaggcaaatccaaattaagttgtcacaacaatgttgtctcttctttgttctgattcttctctattatcactcctctttctctttctcatcccttgtctctttatcacaagctatataggcttccctgtgttcttgctaaaactcatcggactcatcaaaatcaaagctgctcgagacaacgagaaacgtgatgagggaactta

SEQ ID NO: 167625 - DNA, 377 bp, Arabidopsis thaliana nossen
ctttgcatcagtcatgggagatgccacgaatctgagaagaatctcatacacaacttgaacatgatgctctgctggctccaaagaaggttcttcatcatccatatcatgtatttcaaggattttactctcgtgattcgcagaaggaaaagttctaaacagattaaccgctaccatcttcgttaactcttgcatcggaacatcgttaaacttaaaaccaactggtgccacataatcaacaagctcaagcaatgtctgcctcttaatctctttctccttaaggttcttagaccgatcacttaagtcaaaaaccacacagcacatactcaacttcccgataaagagattcggtttctccgatataagaacatctctaaagc

SEQ ID NO: 167626 - DNA, 200 bp, Arabidopsis thaliana nossen
  unsure (1)..(200): unsure at all n locations
cgaccctggacaaattccacatagattaaaattcgcccaattccangagctgcggggtggcattcaattttttgtgtccncaccaataccgactngtctcgccgtaattcttcttctgcttcatcttccccttctataagatcatcgcaccatctccgaccaaatcctcacgccgatcactccagaatcagtttccctta

SEQ ID NO: 167627 - DNA, 373 bp, Arabidopsis thaliana nossen
cttcgtcgagctgcaacaccttttgatcttcgacgatggctctggctgtggctactcgttgcttttgtgcgcctgataattgaattcctctttctcccaccatcgtatcataaccctaaatcagaccactgatgaatccatgggcgtttgataattcagctgaagatacgatttcggattcactcgcgtctcctcctttgccataagcaatgttggctctaattgtctcgttgaacaagattggttcttggctcacaagtcccgtttgttgtcttagccattttagtcttaggctcttgatctctacaccgtcaagagtgatctcacctgaatctggatcgtaaaacctctgcaacaatgcaatcacccgtga

SEQ ID NO: 167628 - DNA, 279 bp, Arabidopsis thaliana nossen
  unsure (1)..(279): unsure at all n locations
ccggaccgaaatnccgggggggaccaacgcgtccaatggcaagcttatccaacggaggaaaacgccgcgtcagttactggtacgagccaatgatcggtttcttctactacngcgttaaccagccaacgaaacctcaacgaatccgtgtcactcacaacctcatcctcagctataacctccaccgccacatggaaatcaaccgcccaaacctcgccgatgcttncgatttcgaaaaattccactcgccggagaatatcaacttcctcaaatgcgtcacgc

SEQ ID NO: 167629 - DNA, 411 bp, Arabidopsis thaliana nossen
tcgaagcaaccttgtcttcaacattctccatcttcctcctcacttaatccccgaggttcacacttcaaatccactctttctatttctctccttcttcttctatgtctcgcctcctccctcctcatctctccgtcaaccttcctaccatggagaaaactacttcttccgagttaaccccaactcgactcggtttccctaacgagttcccttacgagttcgactctccttccttctcccctggtttcacttctcccggtgactccactgagacggaagacgaaagcagtgatgacgaggaagacttcctcgctgggttaactcgccgactcgctccttcgactcagcgtcttccttcccctctcttcaagtctgaggagaaacgtcaagttgcagctacttcaccacagtcaa

SEQ ID NO: 167630 - DNA, 403 bp, Arabidopsis thaliana nossen
  unsure (1)..(403): unsure at all n locations
aaaaacatnagaagaaacagcaggatccttgagaaactcgtccactcggataacctttgtgaaaaacttctgtttcgcattggctccacggagatcccgagaaaaccctaaggagcaatggcagatccgacgactacaacaaaagagagtcgattaaacagagaaggagataatagtgaagcgttaaaggaatagatagatagagataccatgtaattggacaagctacgtgaaaggccatcccatatatcctcaccccaacaaaaattattcctctcgcctccaaacggaaaaaaaaaaaaaaaaaaatcgagattttgatttttagagatcgcttctttctctttttttttttatatttaatataataatataagggaccggtaatgttaataactctatt

SEQ ID NO: 167631 - DNA, 402 bp, Arabidopsis thaliana nossen
acgctcaaaacaagacccatcgataacagcgatcatggtggctaaagccttagcacagctgataacatgcatgatcttattctgccacgttgtagcttccgtagaagacctcaccatacgccaagtcacggccgacaatcggcgaattcgcccgaatcttctcgggactcacacagagagtaaattccggcttttcatgtccgattacggcaagaactactccacgagggaggagtacatccaccgcctcggaatatttgccaaaaacgtccttaaggccgcagagcaccagatgatggacccctccgccgtccacggagtcacacagttctctgacctcacggaagaggagttcaagcggatgtacactggagtagccgatgttggcggcagccgtggcgg

SEQ ID NO: 167632 - DNA, 405 bp, Arabidopsis thaliana nossen
atttctcacattttcgtagccgcaagactcctttcagattcttacttgcagctatgggtaatgtgaaggttcacattaacattgtggtcattggtcatgttgattctggaaaatcgaccacaactggtcacttgatctataagcttggtggtattgacaagcgtgtcatcgagaggttcgagaaggaggctgctgagatgaacaagaggtccttcaagtacgcatgggtgttggacaaacttaaggccgagcgtgagcgtggtattaccatcgatattgctctatggaagttcgagaccaccaagtactactgcacagtcattgatgccccaggacatcgtgatttcatcaagaacatgattactggtacctcccaggctgattgtgctgttcttatcattgact

SEQ ID NO: 167633 - DNA, 403 bp, Arabidopsis thaliana nossen
  unsure (1)..(403): unsure at all n locations
cagctcagtttcttcaaaataaaaacagttaatctctctaaaacaatttgtggntttctctcttttttgagagtaaccagagagttcagaatcattttgattctctttgtaatctttagttgttgtacctaacatcatggctgaagaggaaccgaagaaggtgacagagaccgtgtcggaaccaactccaacaccggaagttccggtggagaaacctgctgctgctgcagatgttgctcctcaggagaagcctgtggctccacctcccgttcttccatctccggcaccggcagaggagaaacaagaagactctaaggctattgttcccgtcgtccctaaagaagtagaggaagagaagaaagaaggatcaagtaatcgagatgctgttctggctagagttgag

SEQ ID NO: 167634 - DNA, 395 bp, Arabidopsis thaliana nossen
  unsure (1)..(395): unsure at all n locations
gaccgccgcatcatggtggaggaggaggaggaggagggaaatcaccgcgtgttgttagacctttttcggtattgnaaaggccaccgccaatcataagacctcctccggtcgtctatccaccaccaattgtgaggccaccgccaatcacaagacctcccatcataatccctccaattcaaccaccgccggttacaactcctccgggactcctccctccgatcacaactcctccgggactcctccctccagtcacaactcctccgggacttctccctccagtcacaactcctccaggacttctccctccaatcattaacccacctccggtcacagtcccaccaccatcgtccggctatccaccatatggtccaccttccggtggaggaggaggaggc

SEQ ID NO: 167635 - DNA, 395 bp, Arabidopsis thaliana nossen
ctcttttgctcgaagccaagtctctgcttttactttgatccaccaacttgatcttcaacctctcgattgtaggtaagattcttagagtgattttgacttatctaagaatggagctaaagagcattaaggatgcgtttgatcgtgttgcgacgaagcagaagctctcttatagcaaaactaatgagattgttcatatgttgtctcaagaaatcgataaggctttgagcatattagaggagacaccatcatcagatactatgcttcttgatcatagatctatcctcgctgatgtgaagaaagtgtttatggagattgctccaatcactcaacttgaagctactgagaaagagctacatgcggctttgaccaagtaccctaaagttcttgagaaacag

SEQ ID NO: 167636 - DNA, 403 bp, Arabidopsis thaliana nossen
gtcagattatctcctcggccacgatgtctctccgccgcactatcctcgatctccaccggggaacccagagagccactcgctcaaagtctctacctttctcgatgagtcacatctcctccgcatccgccaccgccgccgtgagaaacccactgggaagagacctctcttcaatccccttcgcacaagcccagaaactgaaaccagattcaaccaatctcgtcaccgatcgctcgatttcgtcttcaattgggcaatctgaactcaacaaggcagccaaattctcgcgtcaatcgtcttctcgaggttacactaatggctctttcttacgcaaaatccctgtagtctttcacatacattaaggaatggaagatattttggcggattttgtttcacctagaaatga

SEQ ID NO: 167637 - DNA, 406 bp, Arabidopsis thaliana nossen
tctacttggaccaagtgtgttcttaattacaatctcaatttccttgcaagcttcatttcgtacaaaatgaatagcagtggctaatatgaaaaatattagacgactcatttgttcaaacttgaaatatttgttgtggtaacaaggacatcatcatgtagtatttatagtttctttgtgtgaaagatgttttttctttacttagcaaataatttgttaaaagtgtaagctaaatttagaggcaaacatgaatgaagaaattaaaaatttggtcaaaagagagtttagtgtcgaaatttatggtttaccaataagattaaaccaaatgaaagcagcaaacttattacaattgacatcgaaacttatcaacagtttcgataagtttattggaaacagtttcgaaagcaac

SEQ ID NO: 167638 - DNA, 400 bp, Arabidopsis thaliana nossen
atctagaaaaaaaaagagaagagagaagagagaaatgtcgagagctttgtgcagtcgtttgtgtcttgctggccatatggttcgtctgtgcacgtgctcgtcaggtgccgggagagtctgatgagggaaagacgacgggacatgacgatacaacaacaatgcccatgcatgcaaaagcagctgatcagttaccaccaaagagcgtcggcgacaaaaaatgcatcggaggagttgctggagtcggtggattcgccggagttggtggtgttgccggcgtgggaggtctagggatgccactcatcggtggtcttggcgggatcggtaagtatggtggcataagcggtgcagctggaatcgggggatttcatagtataagcggtgttggcggtctaagcggtgt

SEQ ID NO: 167639 - DNA, 398 bp, Arabidopsis thaliana nossen
taccgccccaggatccccggggcgacccacgcggccgctccgtaggaaaggggaagcaaataaattatcgtatcccactactttcggagctcatcgggctctataggtctcttagacatatcataacctaataaaatttatccttttctaaaaatggagctaaatagcattaatgatactttttatcgccattctacgattcactacctctcttatagaaaaactatagaaattgtccatatcatagagaaagtaaattacactgtcatctatctattatatgatacaccatcattaaactctattcttatggaacatatatcaccactcgttctgatccataaaatggtattcgtgatattcttacttacaaccgtggaactgtcatagaactagct

SEQ ID NO: 167640 - DNA, 397 bp, Arabidopsis thaliana nossen
tctcgcatcctttccactgcgaaacctaaccaaaccttgttcaacttctgaaatcccaaaacccattcaaaattctacaaaacaacctccaatacatctcctaaccaaaaccaatctctctgtaaccatttcccaactaatcatcacttcccctgttctcgcatctgaatcattcgactcaatttcatcagacccatcttctggaagaatcgatttagagtcaattttggtcacaattgataatttcttcaacaagtatccatttttcgtagcgggatgtactttcatctatcttgttgtttatccagctgtgatgttttacttgaggaagtataaaccaatatccgccatgaacgcgtttcgtaagcttaagaatgaatctgattctcagcttttg

SEQ ID NO: 167641 - DNA, 408 bp, Arabidopsis thaliana nossen
  unsure (1)..(408): unsure at all n locations
tcggtttgttttgttagtggcaaactagtagtgttttctacatttttttttgtccttcagatgttaacattggtattattaggnnnnctctggcttttgattatacctggctatgttgattgtaatctgacgaaggttttaaaaaaaaaaataagcacgtaaattaaatgatattttatattttagattccagatatatgattatttgaatggaaataaacgacaaaaattagtggagcaatgttttcgtattatctgacgtcttcataatattttaatctaacaaaagttggaatttgaccgtttaatgtgtgcttttaaaattgagagattaatttggataagatatggctcttttctttttgtaagtggagatatttaactaattagaatgttacattagttttt

SEQ ID NO: 167642 - DNA, 264 bp, Arabidopsis thaliana nossen
tcgatcaaaccgatttgaaaccatttcgaagtacaaatggttgtacatgtgttatcactttttacataaccgaaaaaaattgagaaaagaaaaacaaaattcgatctgaatccaaacccctaaaccggaatgtccacccctaaccaaaacattgaagagaagtgcaaaaatgtgtgttctgttttgagttcttttgacatggcgtttcaatatctagtttggttgaaattattcagtttcttatatccaattttcgttataaaa

SEQ ID NO: 167643 - DNA, 395 bp, Arabidopsis thaliana nossen
cacgaagacgcttgagcaagactgaactaaagttttatgcaaatgggaagaaatctctgatatttttggcgatgatctcttcattcgcgtcattatttcaccggccagtaaaaccaccaaaccgggaaatcgaaccatctcgatgtcgtaccaagctcagtttctcggagactccaatcggctcttgcaggtatgatagtgttcaaatccaaacttaagggtctaaatttgaactcttttatcttttcggttttaacaattcaagcaataaacttttaaatttgtaaatttcaaccacaacaggtgatgcagaagagtttccctgagttaggactgacgaagaaggactgcacagaaatgagctggatcaaatcagtgatgtacattgcaggttt

SEQ ID NO: 167644 - DNA, 393 bp, Arabidopsis thaliana nossen
cccccggaaaatttgttcccctttttcgaaaaactaataattcgtaacttcatatccaacatgtttaggtatggaggcaacttatttctttcattctctcttttaaagagtacttgctaaaccctagcttttgttctatagagaatccaagaaccaatcactttaaaaagatgagcactcttgaagaatctttgagatctctatcgttggatttcctaaacctactaatcaacggtcaagctttctccgacgtgactttcagcgttgaaggtcgtttagtccacgctcaccgttgtatcctcgccgcacggagtcttttcttccgaaaattcttttgtgggacagactcaccacaacctgtcacaggtatagacccgacccgacatgggtccg

SEQ ID NO: 167645 - DNA, 423 bp, Arabidopsis thaliana nossen
  unsure (1)..(423): unsure at all n locations
ggagactcacgcgtgcgcaaaaacaaattatttccacttttcttaaaaatttcgtccatgaaacacgttcatctttgccgtttttgtcttttattcgnnnncactctctttcaacgcttaatttcatgtttcttcgattttccgatactgatcaaaatcgcagattcgttcttatctctgtatttcttagttttctgcgatctccgacccgtaactgtcgatctagacgacggagaaaccacagtccatttctggatctccggccaccgtagaatctctcggcagaatctcgtcatgctccatggatacggaggaaactccaaatggcaattcgttcatcaagtctcggatctctcgaaatcgtttaatctcttcatccccgatttggtcttcttcggaaaatcgtattcgaagaatagagat

SEQ ID NO: 167646 - DNA, 397 bp, Arabidopsis thaliana nossen
  unsure (1)..(397): unsure at all n locations
tctttgctctactaaagccaagcaactattagttggtatgtaaaanggagtagcattgactgtttgtcggtatatnanagatataccccttcataactccctttaaagccaacacgaaaaccgtgttcataagtcgttgattgacttccatctcttctttgtctaagtacagctactggaagattatcaagaatcctgtacaacaattcgcgttaaggtcaactatatctagaaaatatagtaaatctatatgacacagatacaaagaacaagcatgctataactactacttacatattagccctgtattcatcatcaatcttttccttgaaattcttggtggagtcagcattaagtttaacacggcaacctactttgcagggctgatcttccagca

SEQ ID NO: 167647 - DNA, 310 bp, Arabidopsis thaliana nossen
  unsure (1)..(310): unsure at all n locations
atttagcggacggaaacancccngaaccgcatggaggggcccatgccgatccttcatggacgtcacagcaaataaagatcgctatcaatgaaaacacgaacgaaatccgaaaaatgagtggggaggagctcctgaaacacaggatggctaactaccgaaagattggagtgttcatagagggcgaaccaacagagccaagtaggaaaatcaacatgaagaaaacggaagccgagttctcagatagccggaagctgcagggtgaggatgacaagctaaaagagcagattctgaaagccaaggagacgactac

SEQ ID NO: 167648 - DNA, 403 bp, Arabidopsis thaliana nossen
  unsure (1)..(403): unsure at all n locations
gagtttcgagaatatccctattcataggtctgagatccacatctatgagtggaaaggtgcgaacgatcaactctgcagtcanttgntaaaatcaataggtcttcaaatcgttcatttgaaaaagttgaaaccctttttattggatgatcataatacttctcaaaaatcgaaattcttgatcaatggaggaacaatatcaccatttttgttcaataaaataccaaagtggatgattgactcattccatactagaaagaatcgcaggaaatcttttgataacacggattcagcctatttctcaatcgtatcccacgatcaagacaattggctgaatcccgtgaaaccatttcagagaagttcattgatatcttctttttctaaagcaaatcgacttcgattcttg

SEQ ID NO: 167649 - DNA, 408 bp, Arabidopsis thaliana nossen
gaaagttcgagcggaagagaattggaaagctctaggagtcatcaatggtgacggacgagagcatcttctgtgttctaatcaagtctcatgtagatgatgatgatgatggtgaagaagaagaagatagactcgagggtttggaaaacagattaagtgagcttaaaaggaaaattcaaggagaaagagttaggtctattaaagagaaatttgaggctaatagaaagaaagtggatgctcatgtttctcccttttcatctgctgcatcgagccgagctaccgcagaggataatggaaatagcaatatgctttcttcgagaatgagaatgccactctgcaagttaaatggtttttctcatggtgtgggagatagagactatgttcctactaaggatgttatatcagcaagtg

SEQ ID NO: 167650 - DNA, 334 bp, Arabidopsis thaliana nossen
  unsure (1)..(334): unsure at all n locations
gcggtctataagaactttattgatcttaaataacgtttatgctttnncttacgcatatatgggacctttttgaacatattcggtcaaanaaatttgntttatatgaacacaattatgtatattgattgtccatttatgaagaaaagaataatcttatgcttcacaccgttgacaaaaaaagataaacgtatgtcattaaccctctctttttctggtacatgtcagagcaaaaaaaatttactaaaaagttattttgtttttccttggttgtctataaatctactgaaagctttaaatgccattttattattttcaagaatcggtctttttacac

SEQ ID NO: 167651 - DNA, 398 bp, Arabidopsis thaliana nossen
  unsure (1)..(398): unsure at all n locations
tctaatcccaaaaatcaaaagatgaatgccacaaagtttgttgtgcttcgcgtgattggcgttttgtgtgccattgncaccgcaaggcaggtcaaagatttgtccacggagaccaaattaggggcctctcttccaaaaactactaccaaaggcattggagctcagctttctgcaactggcacaacttacagcaccagcagtgtcgttagctatgctaatggttttaacaatcccaaaggtccaggggccaatgcattcgaaagtgccaacacatttaccagcggacaagtcactgccaagggtcgcaaggcaagagtttcttctacaagtgcttctgccgctgaaggcgatgctgcagctgcagtgactcgcaaagctgctgctgcacgtgcaaaggg

SEQ ID NO: 167652 - DNA, 396 bp, Arabidopsis thaliana nossen
  unsure (1)..(396): unsure at all n locations
gaaatagagtgtagtgaccttcttttttatttgaatttagatatatatcgattatatcgatcgttttgggaatnnnacatatagtatttttaaacggccgaatcagcatattttttgaagccccgtaactcttcctcagccaggcttgggcagaatagcggagcaagtattagtagcatagcaaaaatgcgttcctcatcattaagtcattaaattcatatgtttgctcgcggtaattgtgaactctcgggagaatcgatgactgcatcaaagatgcacttgttagtacatctgaaaattctgaattggctagttgtaaatagccccaggactatagaataaaggattatcccgaacctacaccgaggtattgacggtgattctcaaatatcacag

SEQ ID NO: 167653 - DNA, 399 bp, Arabidopsis thaliana nossen
ctcttcaatgcctctgtatcgttcttaaaccctaaacaagaccccatcggccgtctccggtctttttggctcctccgccaccgccccgtcgtcatctcctgtaccgccgatggcaacaacatcaaagccccgatcgagacagcggtcaagcctcctcaccgtaccgaggataacattcgagatgaggctcgtcgtaatcgttccaacgccgtgaatccattttcagctaaatacgttccgtttaatgcagctcctggatccacggagtcttactctctcgacgagatcgtgtaccgtagccgctccggtggtttgcttgatgtcgaacacgatatggaggctttgaagcgattcgatggcgcgtattggcgtgatctcttcgattcgcgtgttggtaaa

SEQ ID NO: 167654 - DNA, 395 bp, Arabidopsis thaliana nossen
  unsure (1)..(395): unsure at all n locations
acaatgttactgcttttaactatgtcttagatatacgtggttgattctgtttgttattggtagtttctgtttanagnctttcactacaagaaatatctatattattaacgagagaaaagagctattatatgttatctatagcgttttcataaacgctatgttatgcccctgttatggtagaccccctacatacggtagctttttgtttgtatgctctggtagatgattctattataacactaatcaaatgctttaatataatttcttatagaacatgtttagtgctgctttatattgtttcacaacacttttattttgctattttgattaatataatttttctatttttaccctatttacagaatttatgaaattgaatttatataagaaaatta

SEQ ID NO: 167655 - DNA, 410 bp, Arabidopsis thaliana nossen
gcgacttacttaattacatatcgttcgtgtttttttcttcaaaaaatggcgtgaaagcaacggagcatagaagagcttgatgagaaggcgaagcaaggagagaccgtcgtcccaggtggcaccggtggccacagcctcgaagctcaagagcatcttgctgaaggaaggagcaagggagggcagacgaggaaggagcagctaggacatgaaggttatcaggagatcggtcacaaaggtggagaggcgaggaaggagcagttagggcacgagggttatcaggagatgggtcacaaaggtggagaggcgaggaaggagcagctagggcacgagggttatcaggagatgggacacaaaggaggagaggcgaggaaggagcaactagggcacgagggttataaggagatgggacg

SEQ ID NO: 167656 - DNA, 405 bp, Arabidopsis thaliana nossen
  unsure (1)..(405): unsure at all n locations
gcgcctaatcacaaacacacacaaatctctgaagtaaaatgacgttccctgggctttctgggggatttttcgtctttttctgcatatncgttacgcatgcattcgacctcagcatcatccagatgcaacagggaacatgtccgtacacggtggttgtcatgacaagctgtctttctccggagtcgacaagagatcagatcagcattgtttttggcgatgccgacggtaacaaggtgtatgcaccgaaactagggggtttggtaagaggaccagggggtttggggaagtgttcaacgaacacattccaagtcagaggtcaatgtttgaatgaccctatctgctctctctatatcaaccggaatggacccgacggttgggtcccggagtccattgagatctactcag

SEQ ID NO: 167657 - DNA, 407 bp, Arabidopsis thaliana nossen
  unsure (1)..(407): unsure at all n locations
ggattagtaggtttggtcagatctcctgtttctgcaactctgccacagaggggnncaaggctatttctgactttttgcgtccnatacagnnntccagaggtccgatctcattttcttgttacgtcgctggtcataagctggtctatcacagagattattcgctactccttcttcggctttaaggaagctctaggctttgcaccttcatggcacttgtggctcagatacagcagctttttattgctataccctaccggtatcaccagcgaagttggtcttatctaccttgccttaccacacatcaagacatcggagatgtacagcgttaggatgcctaacatattgaacttctcatttgacttcttctatgcaacaatactcgtccttgcaatctatgtcccaggtag

SEQ ID NO: 167658 - DNA, 396 bp, Arabidopsis thaliana nossen
atccgatggatttttagataaaaaaagatttgaaattagaaaaaaaaggggaatttaattcgcttttactaattttcttaagtcaactctagttttttctaaattttttcagatttttttattacacccccgattactttgttcgacaaaaggttaatttatatgcaataattgcattgtagcgggtatagtttagtggtaaaagtgtgattcgttcctttaatccctttaatagttaaagggtctctcggtttgattaatcttccgatcaaaaattttatttcttaaaaggatttagtcctttccctttcaatgaaagattcaaggaagattatagattctcgtaatttatatccaaagactctaatcaattgtaaatttggattatgaaattcc

SEQ ID NO: 167659 - DNA, 379 bp, Arabidopsis thaliana nossen
ataagagaataaaaggatttttgattgagtaagttcaacaaagtctttggagactatctgtctttatggtttccttatataaaaaatatattaaaaactcaatcaaaattaaattatccacaagaacaccaatttttgttatgcttaatatatttaatttgatctgtattttttttaattctacccttttttcaagcacttttttagtcgccaaattgccagaggcctacgcctttttgaatccaatcgtagatgttatgcccgtaatacctcttttctttcttctcttagcctttgtttggcaagccgctgtaagttttcgataaaattcttaatactgtcttaaacaaattcacgattttgatttttccaacaattc

SEQ ID NO: 167660 - DNA, 364 bp, Arabidopsis thaliana nossen
  unsure (1)..(364): unsure at all n locations
cggggcgacccacgcggcctttagngtgagtgtgcggatgtatgagttgataaagagacttgaataagtggtcnccatgtaattttcagatgtttacggtaaannnaataangttngaactaatgatccttgaataatggctggtggacttgcactgagagagtcgatgaccaatacatttgtcacattagtgatcgttctcattgtgccttagttgtgatatgcataattcgaaaggaaacaaaaataaatggcactctactggaacttacgattgtcagtcaagaactggaggtccattcagaacaatgaggtttgatgcagaacaagttaatggagccaactatggtattcaaattgctct

SEQ ID NO: 167661 - DNA, 188 bp, Arabidopsis thaliana nossen
  unsure (1)..(188): unsure at all n locations
cctccnctnccttcccaaccacccncaatgctaacaataacattactcccaccacaagcaactgcngaagagttaactgcatacaggtgtggcctccgattggaaagaagaagtntgagactctctcttaccttcctgaccttaccgattccgaattggctaaggaaattgactaccttaaccccaac

SEQ ID NO: 167662 - DNA, 399 bp, Arabidopsis thaliana nossen
  unsure (1)..(399): unsure at all n locations
tgcacggcccgatcaatagttcaagtcacacactcccataatccattatctcttcatagaatttttttgagactttntatgtcaaaaaaataataaaatattgtggagttgaagggaaatatccaaatacatgttttatttttttaataatccatatttatagcaataaaatactatcgttccttcaccaagtaataagtaagtacaaatacctagaatctatattatttataagggaccagaaataccttgcttacgtatcattaggaaatgcattaacataaagacggccgtaagaagaggtaatacaaaagtgtgtaaactataaaaacgagtcaaagtggattgtccaacactagcacttccgcgtaataattctacaagaggtgatcctattac

SEQ ID NO: 167663 - DNA, 344 bp, Arabidopsis thaliana nossen
ctaaaccagagttgatcaaagggcttagggctcacacagatgcaggaggcgctcattttgctgtttcaagatgataaggtcagtggtctccagcttcttaaagatggtgattgggttgatgttcctcctctcaagcattccattgtcatcaaccttggtgaccaacttgaggtgataacaaacgggaagtacaagagtgtaatgcaccgtgtgatgacccagaaagaaggaaacaggatgtctatcgcgtcgttttacaaccccggaagcgatgctgagatctctccggcaacatctcttgtggataaagactcaaaatacccaagctttgtgtttgatgacta

SEQ ID NO: 167664 - DNA, 409 bp, Arabidopsis thaliana nossen
  unsure (1)..(409): unsure at all n locations
gttagttacacatcatcgtcttcttcctctcgctccctctgatagcggggccctaaaatgcttttatggtgctactttccgnaaccaaatcccgacgaattaaccctttttttttttggggggataaaatcatcggagtctcttctctggttcggctgtgatgggtgcgagccggaaattacaaggcgagatagatcgggtgctgaagaaggttcaagaaggtgttgatgttttcgacagcatctggaacaaggtatatgatacagacaatgttaatcaaaaggaaaagtttgaggcggacttgaagaaggaaatcaagaagctgcagcggtatagagaccagatcaagacatggattcagtctagtgagatcaaagataagaaagtcagtgcatcttatgagcaatcc

SEQ ID NO: 167665 - DNA, 404 bp, Arabidopsis thaliana nossen
gctgtctgaatcatatttcgattctgatttttcttcatggattcgtatggccaataagtgtttttattggttttataacaaaaaccccatcaaaataatctccggaccagtttctctttcgattcagtcggaccggaaaaacaatggcgtctatgaaccctttcgatctcttggacgatgacgcagaggatcccagccagattgttgcgtctaagccattgaaggttgtggctccggttcagactgctaagtctggtaagatgccgactaagccgcctcctccttctcaagctgtgagggaggcaaggaacgctcctggtggaggtcgtggtgctggacgtggagggagttatggtcgtggtggacgtggtggaaacaacagggattcaaggaacaatgatggt

SEQ ID NO: 167666 - DNA, 414 bp, Arabidopsis thaliana nossen
  unsure (1)..(414): unsure at all n locations
cacgcgtccggagaaagagaaagagagcaagttaaaacaaaaaacaactgagaaagaagggggaagaagaggtattttagtagttcttagtctttnngcaattcacacacacacatcgaaagagggattttaaagtttccaactttttctttcaattcccagaatttcgatcttcaaattttgaaggaagaaaaaaaccaagagcaagagttgaggaatcgaatcccaagaatcgaggtgtgagaagcagtatcaatcactagatgcatgacatttgaaagttggagtggaacttgttcttcgcgcgtattgaactgtctggtcgcttgtacataaagcttgtactaaaaatatctggtttgacgggtaagctaaaggggagagaaatggagactgccaaagctnggctgaata

SEQ ID NO: 167667 - DNA, 393 bp, Arabidopsis thaliana nossen
  unsure (1)..(393): unsure at all n locations
cttctttatccattaaggtgtgatcctctcacttaaatggggatnatggagggtttcaggtgttataggagcananggattcgggagagctgacgaggcgactcacccggactccattagagccactttggctgagtttctttccacgttcgtcttcgtctttgctggagaaggctcaatcctcgctctagacaagttgtattgggacacggcggctcacacggggacaaacacgcctggagggttagttctggtggcgttagctcatgcattggccttgttcgcggctgtttctgcagccatcaatgtctctggtggccacgtcaaccccgctgtcacttttgctgctctaatcggaggcaggatctcggtcattcgagctatctactattg

SEQ ID NO: 167668 - DNA, 396 bp, Arabidopsis thaliana nossen
  unsure (1)..(396): unsure at all n locations
ctcccactttcctagtgtgtctgccctgctaagtttacgttaaacaaatgcctattagggattggtaaggnnacgtactttaccctagttcatatagttacctcatatttctaagtaactacactatagccaaacataaatgtgaaacggaagcactcaatcgtcagcgaacttgagagcaaaatacaatacgacggtacggtatcagcataaacgtgaattaatggaaccgcatatttaaaaaaatcataactggataaggtttcaaaaaaagaattgttgcgcaataaacgagtttttttgtttattacaataaacgagtatcaattccttccatcgtcaaaaaccaaagagctttttgtaccgagcgaacgacattataatcacgaacaagat

SEQ ID NO: 167669 - DNA, 408 bp, Arabidopsis thaliana nossen
gtcgtttacgataaaagaagaatagcaaaaagacataagacttgttcaaaaggagatgagattggttggctgttggtgtttatagccacatataaaattaccttttttatgtgattttttgtgatcatttcaatagatatatataaacatgaaaaagaaaattacaaaagaagaaaagcagagactttttcaatgcgaatatattggtttttggagttcattggctttttggttaaaacctaaagtttgatgtacgtatatcaacattatcacctttgctttttacgttgaagtcggcactattttatctctttcggatttgaagtcggtactctttcttaactgttgggttttctttaaaaaaatggtacacaagtttataggctgcttggattttcttgtaaatag

SEQ ID NO: 167670 - DNA, 215 bp, Arabidopsis thaliana nossen
  unsure (1)..(215): unsure at all n locations
cggacgcgtgggcaacaatgaacatagtgagatggttgcaagtgtgaagagtaccaaagagaatgttacgcatanaangctgaatccaggaaaataaaacggngctntttcggagagaaacaacgctaaatcaaacaaaattagttatttgttaaaagctatagaaagttaatttttccccatatatgggctataatttttttttaaaatggggt

SEQ ID NO: 167671 - DNA, 312 bp, Arabidopsis thaliana nossen
aaaatcactatcaaacttttacacgtaattttgaaggttattccaatattttaccttttaaaatctcttgtaaaatcctatttaaaatgtctgtttaaatccttttaaaataccttgtaaatctttcgttatgccacttacatatactttaaacgattgtaaatcaagttaaacacttttacaagcttttaacttgaatcttttaaaatgtcttgtaagtcgcttactaaaattactatcaaactttacaagtaatcttaatagtaattccaataatttacctttttaaatatcttgtaaaagcctgtttaa

SEQ ID NO: 167672 - DNA, 410 bp, Arabidopsis thaliana nossen
ccgaaaattctcacaagtcgtctgcaaaacatatcaagagaatcagaccgacagtaaaagctacttggaggctacgttgaaagctaaagaatcttgcctggttggtgcagataaggtagaagtggaagacagtaagtccaccaacaaaccaaacggaaacaaagcagtagagaccaagaacacctaatattaagtcatcagcgagaacaacatagaattccccatggactttaagcatgctgacccatgagaagacgaaaacgtagatgcagaggagtgttgaacatgataagaaacagacgaagaatggatagttacgctgcaaaacaaaagcccgtagataacatatcaactcatagatcttactcagttctttgtctaggaagtgagaattaatagtaagacttacc

SEQ ID NO: 167673 - DNA, 387 bp, Arabidopsis thaliana nossen
tgttagctccctttggcatatcgcaaaagccatacatgaacttgagttctcttttggagttatatcaaaaatgagggcaaagggcaaagcatcagttcgtgttgcagacattctaaaccgcatgcaagtggaggaacctgtcaattcgaatgatgtgggaaggcctgaagtggatacactcattctattggatagagaggttgacatggttactcctatgtgttcccagttaacttatgagggactaatagacgagattttgcatatcagcaatggagctgtcgaggtcgactcatctgtgatgggtgctcagcaggagggaaaaaagatgaaagttccccttaattcaagtgataagttgttcaaggagacaagggatctcaactt

SEQ ID NO: 167674 - DNA, 440 bp, Arabidopsis thaliana nossen
gctccaaaaccgggccggacccacgcgtccgcatatgattacctgcaaagaggaaggagaggtctatctcgtctttggtggtaagcacacgcagggtttcagcacatgctggtacaacaggaaaaagaacaaaagctgctacgagaaaagatgtaagaggtagtggttcattcactaagagaacagtgaagaaggaagaagaatttggagatgatcatgtagagagcgcaagctcgcctgaaacacttaaaaagtttactcagaataaaagacagtcttcatatgcaaatcctaaccagtccctctctaatcgaagaaacaaggatgttgatgaaccatgggattccaaattacatctttggaaacctctaaattttcttgtggatgtggcaaacggaacaaaggacccaaaatctgagcttggaaacgcatcccacaat

SEQ ID NO: 167675 - DNA, 392 bp, Arabidopsis thaliana nossen
gaaagtatctctcttttttgtttcctccgaagtcagtgagagagagaagaagaaacgtttgagttctgatgagttctggaggaatcgtggctggaccaacaggagcagcatcagctccttcaagcggcggtggaaacgtggagtggcacgtcagaccaccgaaccctaaaaacccagtcgtcttcttcgacgtctctattggtggtatccctgctggtcgtatcaagatggagcttttcgctgacattgctcccaaaacagctgaaaacttcaggcagttctgtactggtgaactcagaaaggctgggaagcctcttggttacaaagagtgtcagtttcacagagtcatcaaagattttatgattcaaagtggtgactttctcaagaatgat

SEQ ID NO: 167676 - DNA, 387 bp, Arabidopsis thaliana nossen
acggaaagaagtccggctacgaggtttgagtatttaagttatgaatcatagttcgaatactttgtgatctatttgatctatttcgtgctccagatactcgaatgaatatccgacgaagtaaaaccatcttgataaagatgacagaccccattctctgtactatccataggggcaattctaacaagtcacacactcatattccggaaatatacaatgcagaaaaaaatttcgcggtcgaactaccaaaggagaataggctaaaattgttagacctgcatactttacttttttgtatcgagctaaaagctagaacttcaagattcttctcagtctaattcactgaaattccatccagtagaacagaagaattataaatctccaaaataa

SEQ ID NO: 167677 - DNA, 389 bp, Arabidopsis thaliana nossen
gcggaagaagactggttcatacgtaaccaagctggtccagaaacagatccaagtcttgtcaaaacatttgtaggagaccatttccacttaaataagagcagtgagagagatgtcctgaccgatgactctttcatgatccattctcgtgttgagaaccaagtagaagattctcggttaaggacagaaatcatggacttagacgtttacggaaccacccaacaagaaaacagtgccccggagaacactccgcatgaaccagatgacctatacatggttcttggacgggaacaagatgttaaacctacattgttaccatggacccctgaaattgactttgagactaacactttggctcaaagaacaagcagaatcgatttgataactgccac

SEQ ID NO: 167678 - DNA, 390 bp, Arabidopsis thaliana nossen
cgtacaaagtagttgtacagtatacaacttattagatagtatggcgagacaataattagaaaaagattggactgcgtgaaaattaaaggaaaaaagattcatagccaaatcgtaagtaaataaaaattattacttcttatgatgaagcaaaatgtttgggatatgaaataatatgaacaaaagaaaaaaatcattaagttcacagttgaataagtggtgatggtctaacggttttttaaataaatgaaatatattttaaacacgatattatcaacgattgatattttattagttttaaaaatgaatacttaaaatcactagttaaattctatttttcttttaaatcttaaatcttataacaaaaatccgaaattgcttaacttttacata

SEQ ID NO: 167679 - DNA, 392 bp, Arabidopsis thaliana nossen
cacaaccagacgaagcactccttgaacggttacgcgagaggtcctcgtggtctcgactgggccaatcagcctaatcccttccgccggtacctctctgctcctcttcttcctctccaacaccccaatcacgacatcgacgacgactccgactctcctctctactctactctattcgactcgcttcctccgcccaaacccatctctcttcctacaatctctcaccttttctaccattctctcgctctctccgcctggaagaccaccggatcctccacgtggcccctccgcgtcaaccccagcagcggtaacttgcatcccaccgaggcctatctcattgctcctcccatcccttccctctcccaatccgctttcgtctcccactatgctcccaa

SEQ ID NO: 167680 - DNA, 390 bp, Arabidopsis thaliana nossen
gatataattgagactggcttgcttagccgcggagaactcagaactcattcgctgcaaacatggcaagaggtttgaagaagcatttgaagaggctcaatgctcctaagcattggatgcttgataaacttggtggtgcctttgcccccaagccgtcttctgggccacacaagtctagggagtgtttacccttggtccttatcatcaggaacaggttgaagtatgctctgacatacagagaagtgatttcgatcttgatgcaaaggcatattcaggttgatgggaaagtgaggactgacaagacttaccctgctggtttcatggatgttgtgtctatccccaaaacaaatgagaacttccgtcttttgtatgacaccaagggacgtttccgtc

SEQ ID NO: 167681 - DNA, 389 bp, Arabidopsis thaliana nossen
agggtttcccaacaatcaagattttcagaaacggaggaaaggctgttcaagaatacaacggacctcgtgaagctgagggtattgttacttacttgaagaaacaaagtggacctgcttctgctgaaattaagtcagctgatgatgcttctgaggttgttagtgacaagaaggttgttgtggttgggattttccctaaactatctggctccgagtttgattctttcatggccattgctgagaaattgcgctctgagttagatttcgcacatacctcggatgccaagcttcttccccgtggagagtcatctgtaacaggacctgtggtcaggctattcaaaccctttgatgaacaatttgttgattccaaggatttcgatggtgaagctctg

SEQ ID NO: 167682 - DNA, 391 bp, Arabidopsis thaliana nossen
caaatcatcaacttaatcgtttctctcaaatttagggttttctcttttctcgaaagtcttgcggttttctgaatcatctctatctggtttgagggtttcgtttgatatctggagaaaggggtttctggaaacaaggagttcataattcgcgatcttgatctatcgatcttcatttatatataaaagcgtgaatgagattatgatggagtcgaaaggtggtaaaaagaagtccagcagtagtagttccttattttacgaagctcccctcggttacagcattgaagacgttcgtccaaacggtggaatcaagaaattcaaatcttctgtctactcaaactgctccaagaggccatcctgagtaccagcgtgcaccgatcttcataatatagtt

SEQ ID NO: 167683 - DNA, 386 bp, Arabidopsis thaliana nossen
gaaaaaatggcaataaccaacaaattaatcataacacttcttctccttatctccatagctgtcgtccactgcttatccttccgtgtggagatcgacgagttcgagccaccacagcaaggagaacaagaaggtccccgtcgccgtcctggtggtggctctggcgagggatgggaggaagagtcgacgaatcatccataccacttcaggaagcggagtttcagtgattggttccagtcaaaggaaagttttgtgagagtgctgcctaagttcacaaaacatgcaccggctctcttccgaggaatcgagaactacagattctcgttggtggagatggagccaacaactttctttgtgcctcaccatttagatgccgatgctgtttttat

SEQ ID NO: 167684 - DNA, 390 bp, Arabidopsis thaliana nossen
tcgacgacggtgctggagcctcaaagctactctctgatgctccgtacaacaaccacttctctttctgcgccgtagacaccatgctcggaagcgccgccattgctccttctcagtctcttcctttctcttcttcaggcctctctctcggactccaaacaaatggagaaatgagtagaaacggagagattatggagtcaaacataagtcgtaagagtagtagaggagaagatgtagaaagcagatctgaaagtgataacgctgaagctgtctccggtgacgatttagatacctccgatagacctttaaagaagaagaaacgttaccatcgtcacactcctaaacaaattcaagacctcgaatcggtttttaaagagtgtgcacatccagacg

SEQ ID NO: 167685 - DNA, 380 bp, Arabidopsis thaliana nossen
cgccaagtcacggccgacaatcggcgaattcgcccgaatcttctcgggactcacacagagagtaaattccggcttttcatgtccgattacggcaagaactactccacgagggaggagtacatccaccgcctcggaatatttgccaaaaacgtccttaaggccgcagagcaccagatgatggacccctccgccgtccacggagtcacacagttctctgacctcacggaagaggagttcaagcggatgtacactggagtagccgatgttggcggcagccgtggcggtacggttggagcggaggcacctatggttgaagttgatggattgcctgaagattttgactggagggagaagggtggagttactgaggttaagaatca

SEQ ID NO: 167686 - DNA, 389 bp, Arabidopsis thaliana nossen
cttctcctctccgatattgttctcgccttcatgtgggcaaccacaacttgcctccggtataaaccggttcgccggaccgagtaccctgagaaatatgcagctgaaccggaggacttcccgaaactggacgtgtttatatgcacggctgatccgtacaaggagcctccgatgatggtggtcaacactgccttatcggtgatggcttacgagtatccgtccgataagatctcagtctacgtatcggacgatggaggttcgtcgttgactttgtttgctcttatggaggcagctaagttctctaagtattggttgcctttttgcaagaagaataatgttcaagatcggtctcctgaagtttatttctcatcaaagttacgttctcggagtga

SEQ ID NO: 167687 - DNA, 392 bp, Arabidopsis thaliana nossen
caagatctaaaaaaaaaagcttttatcatttagaaaaatttggtttcgaatttcttcgaagagtgaaaatggcgtctcatcaagaacagagttacaaagctggtgaaaccagaggcaaggctcaggagaaaactggggaagctatgggaacgatgggggacaaaacacaagcagctaaggacaaaactcaagagacagcccaaacagcccaacaaaaggctcatgaaacagctcagtcagctaaagacaagacgtctcaagctgcacaaacgactcaacagaaagctcaagagtccaaagacaagacaggaagctacatgtcggaaactggagaagcaatcaagaacaaggcacacgatgcagctgaatataccaaagagactgcagaagca

SEQ ID NO: 167688 - DNA, 388 bp, Arabidopsis thaliana nossen
agagagagacatattgagaaagagagagaaagctttagggtttcaaagaaaaaaaactgagaccgtgtagaaatctcctaacaggaatttttttctcaatcgctatagaaaatgggagtcatgatcaatcaccatttcctcgcttttatcttcggcatcttaggaaacgtgatatccttccttgtattcctcgctccagtgccaactttttatagaatatacaagagaaaatcgtcggagagtttccagtccctaccgtaccaagtgtcgctatttagctgcatgctatggctctactacgcattgattaagaaagacgcttttctcctaattaccatcaactcctttggctgcgtcgtggagactctctacataaccatgttcttcg

SEQ ID NO: 167689 - DNA, 392 bp, Arabidopsis thaliana nossen
ctacaacaacaaatacttttacgaaaaaagcttttaaaacttatctagtttcgtttgatacacatttgaagaaagaaatggcatccaaccaacagagctacaaagctggtgagaccagaggcaaggcccaggagaagactggacaagctatgggaacgatgagggacaaggctgaggagggccgggacaagacttctcaaacggcccaaacagcccaacagaaggcccatgagacagcccagtcagctaaagataagacatctcaaactgcccaagcggctcagcagaaggcccatgaaacggcccagtcagcaaaagagaagacatctcaaactgcccaaacggcacagcaaaaggcccatgagacgacgcaagcagcataagaaaagaca

SEQ ID NO: 167690 - DNA, 392 bp, Arabidopsis thaliana nossen
tcattacctaaaaggcaaaaaatattaattttttaaatattattatttatatatttaaacttcataaaacattattaatatttgaatttataaaaagtttaatctatcaaaaataattaacattattatataatatatagaattaaaaaaatctcaaaaaaaatttcgtcatattttgtgattcgaaattttaagaatgaacatatattaaccaattgacgaaaaatgtgtgggttcaacgtcccgcaacgactaaaatattttgacaatgattcataaacatattataaataagatcaatattaataaaataaatagttttttttttggacgggtttggcaggacgggtttgacaggacgttacttagtaataatggtaaactataaaata

SEQ ID NO: 167691 - DNA, 390 bp, Arabidopsis thaliana nossen
attaacttcatcttttccctggagaaaagattctctaagccaagctaggcgactttctaagctggattgggacatctcctctggtaagtcaatggaaacgatcaaatcttttagtctgttgtattcctgggaaacatttgtgagctctttcctctcttctgcaagtgaccttactttttcaacgatatcaaaagagtgaccttcttcaggtgtatatatgtttgacaggatagtttcaatattttcaatgatagagttcctcaccgataacatttcctgatatgatgcaaccatagcatcggattttgctaactcgcctttgtcgagttcagattgatccaatgctgttgacatctcttgtagtttcgtcaaacactcttcaagttcttt

SEQ ID NO: 167692 - DNA, 345 bp, Arabidopsis thaliana nossen
aaatacttttacgaaaaaagcttttaaaacttatctagtttcgtttgatacacatttgaagaaagaaatggcatccaaccaacagagctacaaagctggtgagaccagaggcaaggcccaggagaagactggacaagctatgggaacgatgagggacaaggcttgaggaggccgggacaagacttctcaaaccggccaaacaggccaacaaaaaggccatgaaaacagccaatcaagttaaaaataaacatcttaaactggccaaaccggttaacaaaaaggccattgaaccggccaatcaagaaaagaaaaaacattttaaaatggccaaaccggacaagaaaa

SEQ ID NO: 167693 - DNA, 366 bp, Arabidopsis thaliana nossen
gtggttgtttcagctcagatattttagctgcaatcgataaagccatcgccgataacgtcaatgtcctgtggatgtcactcggcggtggaatgtcggattattatagagacggtgttgcgatcggagcattcgccgccatggaaagagggattttagtatcttgctcagctggtaatgctggtccgagtagttctagtttatcaaacgtagctccatggatcacaactgttggtgctggtactttagatcgtgattttccggcgcttgcgattctcggtaacggcaagaatttcaccggagtttctttgtttaaaggagaagctttaccggataaattgttgccgtttatttacgctgggaatgcta

SEQ ID NO: 167694 - DNA, 385 bp, Arabidopsis thaliana nossen
ggatccatacagggttcgtccttcaagcgctcatgattcccctttcttcactacaaactcgggtgctcctgtctggaacaacaactcttctttgactgtcggaactcgaggtccaatccttctggaggactatcatctgcttgagaaactcgctaactttgacagggagcggattcctgagagggttgttcatgccaggggagccagtgctaagggtttctttgaagtcactcatgacattacccaacttacttctgctgattttcttcgaggacctggtgttcagactcctgttatcgttcgtttctcaactgtcatccatgagcgtggcagtcccgagactctcagagatccccgtggttttgctgttaagttttacaccaga

SEQ ID NO: 167695 - DNA, 391 bp, Arabidopsis thaliana nossen
aaaaccttgaaacctttaaaaaatcgaaactatggctaagctcattctcgttttcgcaactcttgccctcttcatcctcctagccaacgcatccatctaccgcacagtggtggagttcgaggaagatgatgacgtgagcaacccacaacaaggtaagtgccagagggagtttatgaagcatcagcaactaagaggttgcaagcaatggatccgcaagagagctcaacaaggaagaatcggatacgaagctgatgactttgagctcactcttgatgtcgatcttgaggacgatgagaacccaatggggcctcaacaacagtcatctcttaaaatgtgttgtaatgaattaaggcaagtggacaagatgtgtgtgtgtcctacactgaaaaag

SEQ ID NO: 167696 - DNA, 389 bp, Arabidopsis thaliana nossen
ctaagttcatcttgttggctatgagtgggaagccgcttcccatccatggagatggatctaatgtccggagttacttgtactgcgaagacgttgctgaggcttttgaggttgttcttcacaaaggagaaatcggtcatgtctacaatgtcggcacaaaaagagaaaggagagtgatcgatgtggctagagacatctgcaaacttttcgggaaagaccctgagtcaagcattcagtttgtggagaaccggccctttaatgatcaaaggtacttccttgatgatcagaagctgaagaaattggggtggcaagagcgaacaaattgggaagatggattgaagaagacaatggactggtacactcagaatcctgagtggtggggtgatgtttct

SEQ ID NO: 167697 - DNA, 391 bp, Arabidopsis thaliana nossen
ttttaccattcgaaggatcggatcatagacccctagtcaccaagttttgcaataccgtggaacaaagacgaagtcacttccggtacaataaccgtatgttttttcgggaaggtttcagggacacgctgataagaagttgggaggcaaatggcccacatctctctttggataccagattacgccaaaccagaaaacagatggctctatggaagcgtcagaaccaattaaatgcctcagtccgtatagctacacttaagcgagaactggatcacgcatataccaacggaacacactccacagaagaacttcatggaattatcactgacctgaaccaagcttatctcgatgaggagcatttttggaaaatcaagagtcgaaagaactggatgaa

SEQ ID NO: 167698 - DNA, 385 bp, Arabidopsis thaliana nossen
cggacgcgtgggcggacgcgtgggtttaaatgatatcataaatattcttataacatcataacttaaggtcaacgagccaataaaatgaaaacaaaaccaaacatcgcactccaaataacaaaataaacatacataattatttctcgtcatggctaacctcagcctcaccagagagttcttcaagggacttgcctttgggctctgggacaaggaaggtgaagagcataccgataaagttaagaacaccaagcatgatcaatgagttcttaactccgatgcctggtgggtatcctgcgtctaccttggccttgtcttgtgattgagccgcatataggaacccaaaggctccaacaatggctccagccttaccagccgcggctgatat

SEQ ID NO: 167699 - DNA, 149 bp, Arabidopsis thaliana nossen
aattgcctttcattttacttccaaaaataaaaaacgataaaagaaataaaaggtgttcttctttctacatgtgagtcagattccttggatacttcaaaaatgtcggtttgcttgtgtttacatcttgtcgattctactagaaattctat

SEQ ID NO: 167700 - DNA, 345 bp, Arabidopsis thaliana nossen
aaaaagaataatcttatcctttgagaaaccccaaataaaccacctgctgggttcaaccatgacactggggcactctcattccatcatactaatcctcacaatgcggagtctggggctcaaaacggcgattctactactatccccgttactaatggatgatcagccaagcctgagcttttaagtgctattctatctgcgaacggtgttaacaggacgctgagtggacacattaatgaactttccagtggtgcggcaaagactacaaaccctggtaaacgtaaaagtgccagagatcctccgccttctgagtccattaataaccctaccgccgaagggggtactgat

SEQ ID NO: 167701 - DNA, 387 bp, Arabidopsis thaliana nossen
caacgactgcttcacttctagcttgattcttcttcttcgtttatatgtatactgtacattagattattgttgtttctcgagcttctgctatagattttgattcttttttttgttgtctttgtttcgtttccaggatcagatcttagctaaattgagacaagctcaaaatgagtaagcttcagagtgaggccgttcgtgaagccatcactactatcacagggaaatccgaggcaaagaaacgtaactttgtcgagactattgagctccagatcggtctgaagaactatgaccctcaaaaggacaagcgtttcagtggatctgtcaagttaccacatatcccccgtcctaaaatgaagatctgcatgctcggagatgcccagcatgttg

SEQ ID NO: 167702 - DNA, 390 bp, Arabidopsis thaliana nossen
acaagtctcttctctcccccaccacccaatgggctacactaatgccatctccgtctacttttctcgcctctcgcccccgtggaccggccaagatatcggccgtggcagcacctgtgaggccggctctaaaacaccaaaacaaaatccacaccatgccaccggagaaaatggagatattcaaatctttagatggatgggccacggatcaaatcttgcctcttctcaaacccgttgaccaatgttggcaacccgcttctttcttacccgacccggccttacccttctccgagtttaccgaccaggttcgtgagctgagggaaagaacggcctcactgccagacgaatacttcgtggtgttggttggagatatgataacggaggacgcgttgc

SEQ ID NO: 167703 - DNA, 380 bp, Arabidopsis thaliana nossen
ggagattcgcatctttttgccccatgactcagtggtgacgaaggtggtgagcaaaccctttgaaggtaagagcttaccaagacgaagaagtggattaacgtggccttgccctggaaaagatacgagcatcacatgaggaggtagaggaggagaagattctagctccatttttaagaaaacttggtttctctttttgtgtgctctgtttttgttttgttttgttttgctttaagtgtgtgacttgttggatggtagaagagaagaaatacgtcttaaataggagagacaagcaaggtgaataattaaggagctcttaattattaccgtcgcatattggcccattgcgttatttaatactagttgattttctctattgaaat

SEQ ID NO: 167704 - DNA, 387 bp, Arabidopsis thaliana nossen
tcggtcgaaatgaacaatcccaattcgcaaaccctagatcaacctcctgctggctccaacggagacactggtgcactcgcattggatcatatgaatcctcagaattcggagtctgtggctttaaacgggtcttctactcctatccccgatactaatggttcatcagcaaagcctgagctcttacgtcctttgctatcggagaacggtgttagcaagacgctgagtggtaacgataaggatcagtctggtggagaggaagagactacaagccggaggaagcgtcggagtcggtgggatcctccgccttctgagtccattaataaccctagcgccgaaaggggtactgattccggtactgggactaggaagcgtaagtcgagatgggca

SEQ ID NO: 167705 - DNA, 351 bp, Arabidopsis thaliana nossen
aaaaagaataatcttatcctttgagaataatcaaaaatagaaagtgttcagttggaacatgaaaacgtgaccgagtttgtcctagttactcttcgggacggagtggaagaagggaggagattcgcgaacgaggaaagggacccaatgacttcgaaagaattgaacgaggagccgtatgaggtgaaaatctcatgtacggttctgtagagtggcagtaagggtgacttatctgtcaacttttccactatcacccccaaaaaaccaaactctgctttacgtaaagttgccagagtacgattaacctcgggatttgaaatcactgcttatatacctggtattggccataattta

SEQ ID NO: 167706 - DNA, 389 bp, Arabidopsis thaliana nossen
cacaaacacaatctaatccaaaaaatcaaaagatgaatgccacaaagtttgttgtgcttctcgtgattggcgttttgtgtgccattgtcaccgcaaggcaggtcaaagatttgtccacggagaccaaattaggggcctctcttccaaaaactactaccaaaggcattggagctcagctttctgcaactggcacaacttacagcaccagcagtgtcgttagctatgctaatggttttaacaatcccaaaggtccaggggccaattcattcgaaagtgccaacacatttaccagcggacaagtcactgccaagggtcgcaaggcaagagtttcttctgcaagtgcttctgccgctgaaggcgatgctgcagctgcagtgactcgcaaagct

SEQ ID NO: 167707 - DNA, 384 bp, Arabidopsis thaliana nossen
ggcaagaggaaccaaaggatcaagcttttgattcttacaacgcctctaaccagatgtcacgtggcaatgacttctaccagaattcttcagaacgacagagtcctaatatgggtatgtttgggacctataatggtctttcatcttgttatcgcaggggactagactacgtcacggaaagctccactttgccctcatcctataaacctacttctgttccaagatgtccggtttcagcaccacctggcttttcagttccaactccaagtcgacctcctcctccaggcttctcctcaaatgggagagaccatcagatgattgatggcttttcaggaaactctcgtttttctgattcaattgcgtacggtaatcactatcagcagtcac

SEQ ID NO: 167708 - DNA, 385 bp, Arabidopsis thaliana nossen
ctctcatggctgttgtcgttgcagagacgtcgttgattttcgatttggatttcaagcttttcacgtactcattggaacgatccaatctcaaaagtctctgattttgggagagagcttcgttaaactcagcgcgaattgtaatttcccttttgccgcgattttggattacaaggtgaaataatttgacagctgaggatttaagcatttatgtgctgcaactctgcaagcttgtcatgtaccactgtttgtatattgtttataaataaaacagtggacttaaagttaagggaatgtcagcacctgcgaagtttgattattcttctggtgggccagagaggcctttatacaagtccaacttagctgcacaaatggaaagatctagtag

SEQ ID NO: 167709 - DNA, 389 bp, Arabidopsis thaliana nossen
ttcgttttttcactttataatgaaaaagaactcatagactatatattggttaaatcttgaaatacattggactttctgcgtcactcagataaattgcagacaaaactaagatcagaaggaggtattgcagctttgttgggaatggtcagatgtggacatcctgatgttcttgcacaagttgctcgcgggatcgcaaactttgcgaaatgcgagtcaagagcatcaacacaaggtataaaaaaaaacttatttaacatatcgttatctaagaatgattgactaaatgcatcacttagcaggaactaaaagagggaaatcactattaatagaagacggtgcactctcctggattgtacaaaacgccaaaaccgaaactgcagccataagga

SEQ ID NO: 167710 - DNA, 387 bp, Arabidopsis thaliana nossen
gtcaaaaggaaatgacattggcaaatttttaatcagacaggacacctaaacttcaaagtgtttttaactattttgaaagtcttaagagttgcgacttctatgtaaatcaagactattgtataatgaaaaattgttcttgatttcttcttcgaattaaccaagcaatgattatagtaacaatttcatatgtattatattgtccatagtattaagctcaatttcctttggtatcgatcaactcatctgagattttccatttagttagacgaatattttcacggattggaatgatcacggtacactgggggattttacgtagtttttattgacacaattatgaatgatctcgccagttcatcggcaaaagctatggcaaaatcagtttgt

SEQ ID NO: 167711 - DNA, 392 bp, Arabidopsis thaliana nossen
ggattctgcgttgatagcttctagttctacagacaaaaatcatcttacagctggttacatacataatataattaatgcttttctgtttttgttcaatttaagaaaatctggagatgattcttttgggaagataatgtcatctaaatcacattacttaagacgcaggtgtgcctagctctgacaaaatgttgttcatatcctcaaaatgtggccaactcgtcttgcttctctcatcagccttgctctcctgcacaaaaatgtattacatcaaatcttggttgctaacttaagagcttttgatcttgtaatcatgaacttcaaatctacggctacagattcatatgttcagagacgaacctcgtatttctgaataagtgatgcccagagagatt

SEQ ID NO: 167712 - DNA, 393 bp, Arabidopsis thaliana nossen
gaaacatcaatctcaacattcgccggagatttaactccgacttcgtacacagcgtcgacattgcttgcgacgtttttgacaacccttttgtatttcacaacttccccggtcgatgcgaaaaccacggagaaagatgggtaattgagatcgccggcggttcttagcttgctcgtttcacatgcgtcgtaaagagttggatcttgaagaaagactagaatccccggaaactcgtatcccacggcgcagaggaaagctacgtactctttgacctcgatgtcgtaaaccaaaccaggattcaaagctttgtttggatcgacgtgtccagctccgtggatgaatgagttcgatgatttaccggtggcgagatcctcgattggttcgccggagttttcg

SEQ ID NO: 167713 - DNA, 383 bp, Arabidopsis thaliana nossen
ctcttcacagcatttatctgcattggatgtgttgttatcggaaatctggatcttatcacacctactgtgaccatgttttatcttttgtgctattcgggagtaaacttgtcttgtttcctgctcgatcttcttgatgctccaagttggcgtccacggtggaaatatcatcattggagcctttcctttgttggagcctcactttgcatagtgatcatgttcttgatatcttggtcattcactgtggttgccattgcacttgcaagtcttatatacaaatacgttggcctaaaaggaaaggctggggactggggggatggtttcaagagtgcatattttcagttggcccttcgtagtctcaggtcactcggagcgaatcaagtgca

SEQ ID NO: 167714 - DNA, 385 bp, Arabidopsis thaliana nossen
cggacgcacgggtaaagaggaagaaacatcggtcacgtctgatctattatgctctttctctttgacagtgtggatcctcttcaacggctacactgaccaacaaaggcccatcaagcgccagatacatcaactcaatgcgctcgaaccataccaaatcattaaaagcgagggcggtcgcatcagaatactgggaccaccatgcaccccagctccagtgctacgactatggctataagcgttgtcgtgattgtgcctaaacgctttctcttgaccactttctcgaacgccagcgaactcacgttcggtgactacggaaggagactacaaggaagagccattccgggatgcgccgagacactcatggagtcaccgggatttggagaag

SEQ ID NO: 167715 - DNA, 385 bp, Arabidopsis thaliana nossen
gtctccgtcgccgtcgtagctcctccgcatcgttgcccattctctagtcatctgaatctgaacaagctttctcttcaaattcctagaaccggctggcggaggaaacagctagggtttgctttagcttctactgcggcttcagaatcgccatcggaagctacatatgatccggagctccgtttagttttcgagctcgctaccgattccgagttatatgagcttgagaaaatcctttttggtcccagctacttcagccctttgctgaaatcaatcccaaacaaaggaggaggtgaccggcttatgataggccaagacattgaagtgcgagatggttttatcgaagctcttgaatcgagattcttgtttctagctgcagatgctcgtt

SEQ ID NO: 167716 - DNA, 388 bp, Arabidopsis thaliana nossen
ctcacattttcgtagccgcaagactcctttcagattcttacttgcagctatgggtaaagagaagtttcacattaacattgtggtcattggtcatgttgattctggaaaatcgaccacaactggtcacttgatctataagcttggtggtattgacaagcgtgtcatcgagaggttcgagaaggaggctgctgagatgaacaagaggtccttcaagtacgcatgggtgttggacaaacttaaggccgagcgtgagcgtggtattaccatcgatattgctctatggaagttcgagaccaccaagtactactgcacagtcattgatgccccaggacatcgtgatttcatcaagaacatgattactggtacctcccaggctgattgtgctgtt

SEQ ID NO: 167717 - DNA, 364 bp, Arabidopsis thaliana nossen
ggaattaccggggggacccacccacgcgttcaaaattttacctctttttctctttagctcgatttatctcctcgacgtggtgctcctcaactgtgggggaggcctatgtccccttcgctaggtgccttctccatcaagaagatgccgatgagacactcttctttcaagctcgatcctgtgcgagggcattgacgttctgtgacagacccaatctggtctccctttctcaaatgattcctaatactatctcccaacatatgctactccctatgctccctcctcatactgctcataatcagcgcttggatctacacgcgccttctcctccacaccaccgttctgatatagaaaacaaccgctacga

SEQ ID NO: 167718 - DNA, 390 bp, Arabidopsis thaliana nossen
gatttggtggtgagattggagagatagttgattgcagtgaaagtttggagtttttggatgcttcgtcgaatgagttaaccggtaggattcctactggtgttatgggttgcaaaagtctcaagcttttggatttggagtctaacaagctgaatggaagtatcccgggaagtattgggaagatggagagcctctcagtgatcagattagggaataattctatagatggggtgataccaagagatattggaagtttggagtttctacaggttttgaatctgcataatctcaatctcattggtgaagttccagaggatatatccaattgcagagtacttcttgaactagatgtttcagggaatgatttagaaggaaagatctctaagaagctat

SEQ ID NO: 167719 - DNA, 362 bp, Arabidopsis thaliana nossen
atcaaacgttacgttctcgttttctcaaattccaaacaataccaagaaacctctacttgaaaagagaagattatcgccgcgtgtgtgcctaagagcgatggcgtctgagaaacaaaaacaacatgcacaacctggcaaagaacatgtcatggaatcaagcccacaattctctagctcagattaccaaccttccaacaagcttcgtggtaaggtggcgttgataactggtggagactctgggattggtcgagccgtgggatactgttttgcatccgaaggagctactgtggctttcacttacgtgaagggtcaagaagaaaaagatgcacaagagaccctacaaatgttgaaggaggtcaaaa

SEQ ID NO: 167720 - DNA, 389 bp, Arabidopsis thaliana nossen
gttttgaatccattcaaattgaattggtattttcttcatcaaaattatcatcataattattgtgaggaaacgtccacaataattagtcttggacaatttttttgtgaaaatgtatgtatagctaaaaaagaaccgcacctaaaatcgggtcaagttttaattgttcaaagggattccgcagtaataagatccgctaagccctatttggctactccgggagcaaaagttcatgggcattacagcgaaattctttacgaaggggatacattagttacatttatatatgaaaaatcgagatccggtgatataacccaaggtcttccaaaagtagaacaagttttagaagtccgctcgattgattcaatatcgttgaacttagaaaagcggat

SEQ ID NO: 167721 - DNA, 387 bp, Arabidopsis thaliana nossen
cggcgatgtatccccaagttgatcaatccattcctgataatccttttgcttcgacaaatccttacgtcgcttcttccccttatctctatccttctctatcctctcacaatctcggacctaatctcttcccagaccacggagatgcatccaacgaccaatcaccatctgctcctcctcaggcgacggaggaggttctcatccgtgttcccggcgctattctcaaccttatcgacaaatcctacagcgttgaactcgcgtgcggtgatttcaccatctttcgaatcatccaggggcaaaatattgtagcggttctagctaatgttgggaatgagattcaatggccgttgacgaagaacgaggttgctgcgaaggttgatggatcacact

SEQ ID NO: 167722 - DNA, 392 bp, Arabidopsis thaliana nossen
gtcttgtgttaagtgcacttatgctgaagctcgattaagcagcgattcatggtcagctcctattgacgttgtggcagatgtcaaatccgaaagggttgtagttcttggtgggaatggtttcgttggctcagctatctgcaaagcagcaatctccaatggtattgaggttgtgagtgttagcaggtcaggtcgtcctaacttcgaagattcatggttggatcaggttacatgggttactggtgatgttttctatttgaattgggatgaagtacttcttggtgctactgctgtagtttcaaccattggtggttttggaaatgaagaacagatgaaaagaatcaatggtgaagctaacgttactgctgtgaatgctgctaaggattttggggttc

SEQ ID NO: 167723 - DNA, 388 bp, Arabidopsis thaliana nossen
ataaaaaatgtcttcgataatccatggagctggagctgctacgacgacgttatcgacgtttaattccgtcgattccaagaaactcttcgttgctccttctcgcacaaatctttcagtgaggagccagagatatatagtggctggatctgatgcgagtaagaagagctttggttctggacttagagttcgtcactctcagaaattgattccaaatgctgttgcgacgaaagaggcggttacgtctgcgagcactggacatgaactattgcttttcgaggctcttcaggaaggtctggaagaagagatggacagagatccacatgtatgtgttatgggtgaagatgttggccattacggaggttcctacaaggtaaccaaaggccttgct

SEQ ID NO: 167724 - DNA, 394 bp, Arabidopsis thaliana nossen
  unsure (1)..(394): unsure at all n locations
caagatccttcacttctctcaaactacgaaaactatggcttcaaaatccatcggcgttttgctcttcctgactctcatagcttcttcagccatagctcaagctccaggaccagcaccaacaagatctcctcttccatctcctgctcaacctccaagaaccgccgcaccaactccttcaatcacaccaacaccaactccaacaccatccgctactcccacggcggctccggtttctcctccggctggttcaccacttccctcctccgcttcaccacccgctcctccaacttctctcactcccgatggtgctcctgtcgctggtccgactggatctactcccgtcgataacaacaacaacgccgncactctcgccgctggatctttagccggattt

SEQ ID NO: 167725 - DNA, 370 bp, Arabidopsis thaliana nossen
attcctttactcactctctctctctctctctaaaaacagagctcaacaataatgatccactaaaaaagagtctcttttctcttcttctccggtgatttacttacttaacaatcatggcgtcgtcggagggattagcaagcgttgatccttggtcattccgtcaaaacttcaacatcgattcgtggctactctctgattccttctcacacgacagtgatatactcgctaaagctcttcacagatccatctccacttccaccgaatcatctcctctttctccttcatctttcttcgactcttcaaccgccgccgtcgatttttctcctcctcaaactctctccaacgtctctttcggctcagatccagaaat

SEQ ID NO: 167726 - DNA, 385 bp, Arabidopsis thaliana nossen
caggtgggtttggagatatcttgaccgatcagaaagttgacaagaaacagctagtcgatgacgtgaggaaggctctttacgcatccaaaatctgcagctacgcacaaggcatgaaccttatccgtgccaagagcatagaaaaggggtggggattgaagctaggtgagttagctagaatctggaaaggaggctgcatcatcagagcaatcttcctagacaggatcaagcaagcttatgacaggaacgcagagctagctaacctcttggtggatccagagtttgcgaaagagataatcgagagacagtccgcgtggagaagagtcgtctgcttagctatcaactcgggtatcagcacaccgggtatgtctgcgagtctagcctactt

SEQ ID NO: 167727 - DNA, 388 bp, Arabidopsis thaliana nossen
aagaaattccgttacgacaaacgtgtataccttggagcccttaaattcgtccgtcacgcagttttcaaggtgttggagaacatgcctatgccctgggagcaggtccgagatgtaaaagttttgtaccacatcaccggagctattacatttgtgaacgagataccatgggttgtggaacctatttacatggctcagtggggtactatgtggattatgatgcgaagggagaagagggatcgtcgtcatttcaagagaatgcggttcccaccttttgatgatgaggagcctccactagactatgcagacaacttgctggacgtggatcctctggagccaattcaattggagctagatgaggaagaagattctgctgtccacacttggtttt

SEQ ID NO: 167728 - DNA, 326 bp, Arabidopsis thaliana nossen
accgccttcatttcctcgatctccgtcttcctccttctccgtctgtcgcagagcatcgctcgaatgagggtttctgctgagagaagatgagggaaatcattagcattcatatcggacaagccgggatccaagtcggaaattcctgctgggagctttactgtctcgaacatggaatccagcccgacggaatgatgccgagtgatactacagttggtgttgcacacgatgcgttcaatactttctttagcgagactggtgcagggaagcatgttcctaaggctgtcttcgttgatcttgagcctactggtatcgacgaagttcgtact

SEQ ID NO: 167729 - DNA, 346 bp, Arabidopsis thaliana nossen
aacaagatggatgccaccacccccaaatactccaaggctaggtacgatgaaatcatcaaggaggtgtcttcatacctgaagaaggtgggatacaaccctgacaaaatcccatttgtgccaatctctggattcgagggagacaacatgattgagaggtcaaccaaccttgactggtacaagggaccaactcttcttgaggctcttgaccagatcaacgagcccaagaggccatcagacaagccccttcgtcttccacttcaggatgtctacaagattggtggtattggaacggtgccagtgggacgtgttgagactggtatgatcaagcctggtatggttgttacct

SEQ ID NO: 167730 - DNA, 396 bp, Arabidopsis thaliana nossen
aaacaaaacacacccaaatatgcataagcttttgttttctcttctctccgtcgtctcactctgatttctcctcttcttccatggcgccgaggcacgccagcgagaggcgccgtttccaaacgcctgccatttcagccaaatcaacagcctcgcgcccgctcaggcgacgaagttcgaagccggtcagatggaagtatgggaccacatgagccctgagctccgatgcgccggtgtaacggtggctcgcatcacccttcagcccaattccattttcttgcccgctttctttagcccacctgcccttgcttacgttgtccaaggagaaggagttatggggacgattgcttctggttgtcctgagacttttgcagaagttgaaggatcatcaggaagagg

SEQ ID NO: 167731 - DNA, 394 bp, Arabidopsis thaliana nossen
ctcttctttcttctctctcacctaaatcaagggatttgttctgatcaactttgaacagaatttacaacggatgcctagaaaaatctgacccttccttcttcctctggaagatttaagatacttgttgataaggatattcggaagaagcttttgaaacttttggcaaaagtctcatttagatccgacttttcgtgtgaaggcgaaagatatacaaaaaaaaatgggctcagaggaaaacaacagcacaagctttccaccaacagagccaaagctctgtgataacggatgtggattcttcgggtcaccatccaacatgaatctctgctcgaaatgttacagaagcttaagagccgaggaagatcaaaccgcggtagcgaaagctgcggtgaagaac

SEQ ID NO: 167732 - DNA, 395 bp, Arabidopsis thaliana nossen
cactttccatttgaagagattcaagaataatgggttatatatggagaagatctataagcatgtcaagatcccattagagatagacttgcagccatatatgaggaatatccaggaaaacgaagtttctacaaaataccatctttatgctctggtggaacattttgggtattcagtagcttatggacattactcctcctatgtgagatcagctcctaagatatggcatcactttgatgattcgaaggtcactagaatagatgaagatatggtgctatcacaggattcgtatattcttttttatgcacgagaaggaactcgctggttttctagtgtctatgaagagatgcagccattggttgaagcgagtttactaaattcgtccccaaagtctgtgc

SEQ ID NO: 167733 - DNA, 364 bp, Arabidopsis thaliana nossen
gtcaatctcttaaaactataacctgcaaaaaaaaaagagattcatagggggtgaactaaacagagagagactgttagagctgcttcagagtttgcatcaagaaaccaactcccaccaaatatacaagaccaaatgttatcacacatttgcttaaagtttaaaacagagggtctgaaacaacaagaagctttaaatggtttgccgaaagcaattcgatcaagcattgcaaactatctcttcttcccaatcggtcagaacgggtacctatttcacggagtgtctcgcaacttactatttcagtgggaaaaacactcaattgtaaactgttcgtttggcaattccttcctgacatttggtccattac

SEQ ID NO: 167734 - DNA, 375 bp, Arabidopsis thaliana nossen
acgataatgggaagcgcaccagctcagattccgactagcttcggccatgagcttagggcttgtcttcgttgccgactcgtcaagacctatgaccagtttagagacgctggttgcgagaattgtcctttcttcaagatggaagaggatcatgagcgtatcgtggaggtcactacccctaatttcaatggtataatctctgtgatggatccaagtagaagctgggcggctaggtggttaagaatcgggaagtttgctcctggttgctacacacttgctgtctcagagccactccctgaggaaatgcagcacttatgccaagaggagcgtgtacaatatgttctgccgaaacgcatgtgaagaaatctatcacgatga

SEQ ID NO: 167735 - DNA, 388 bp, Arabidopsis thaliana nossen
tagtgatctagcaaagacaggtttgttggtttaagacctccctaagtttttgtaagtttgagctcgtttaaggaagggtagaaagaattgcatttaagaagaatgaatgaatatagtaaaacatttttttacaatcagctaatctagaagctttgaaaacaatccaatgttgattttttccagtttgaccctctgaagcttaagtaactacgagttgagagtgtccaagagatggacaaggagataacagaggcacggaaaatattcccatgtctttactgtctgctccgtcccaaaaccccttccaacttgatggcgttaatggacaagcatcagcctgaacctgagcttcttccctcttaacagctttatggctgatcagctggct

SEQ ID NO: 167736 - DNA, 391 bp, Arabidopsis thaliana nossen
acagatgcaagaagtactacgaagctggtgctcgtttcgccaagtggcgtgcagtccttaagatcggcgagaacgagccatctgagcattccattcatgagaacgcttacggattagctagatacgctgttatctgccaggagaacggtcttgtaccaattgttgagcctgagatcctagtcgatggatcccatgacatccagaagtgtgctgccgtgactgagcgtgttcttgcagcttgctacaaggctcttagcgaccaccacgtcttgctcgagggtaccctcttgaagcctaacatggttacacccggatctgacagccccaaggtttcacctgaagtcatcgctgagcacaccgtccgtgcccttcagagaaccgtcccagcagc

SEQ ID NO: 167737 - DNA, 405 bp, Arabidopsis thaliana nossen
  unsure (1)..(405): unsure at all n locations
gggggttaaacccatgcgtccggtttttttttctntggattttttctgcagtataagccctttcttgtcgcgccanaatgcttaatggggtgaaaacgcatcacaaacatgtaaaaacctgaaaagaactaccaaagactttagaaacctacgccggtttttggtctctggatttcttctggagcataaagtctcttttttcctccagaatgctcaataatttccaaatgcatcacaaacatgtaaaaacctgaaaagaactacaaaagactataaaaataacaaatagactctaaaacctatacctaaatcatagatacaagtggcaaaaatagaggtttatcaactctcccagacttagcttttgcttgccctcaaacaaaacaaaaaaacccaacccgcgga

SEQ ID NO: 167738 - DNA, 311 bp, Arabidopsis thaliana nossen
cccacgcgtccgaaaaaatctaaaatcaaaaaacaaaactgtcatgcaaaataaaatattgttataaatttgatgtatctgatttataatttatgcaaactcaagtcttgtcacaagtaattactttctacatgtacgagcatagttatttctttttcatttcacggtacacattttttttttcacggtacacatataaatcacatcattcaaatcacgcattaactaacgaattatatctaccggtacatagatttataagtacattaacatcttctatttcaccggtacgaagccgcaaacctggtgat

SEQ ID NO: 167739 - DNA, 386 bp, Arabidopsis thaliana nossen
aaaacctttggctttaacactctcctccaaatcccagatctctctctgtctgtgtcccgcggagtccccgagagattgatcaccatcacttttgtaccttccttgtactacctatggcgtctgctagcttcgttaagcctaacaccctctcttctccatggatcggccaacgctcctttgctcacacctctgcttcttcttctcctcctcctcgagtctccttcgcgatccgcgccggtgcttactccgacgagcttgttaaaaccgccaaaagcattgcatcccctgggagaggtatcttggcgatcgatgagtccaatgcaacctgtgggaagaggcttgcttctatcggcttggataacaccgaggacaaccgtcaggcctac

SEQ ID NO: 167740 - DNA, 376 bp, Arabidopsis thaliana nossen
gaaagttatggcgtgcaaccaacacagctacacagctgttgagaccagaggcaaggcccacgagatgactggtctagctatcggtacgatcagggtcttggctgaagagggccgtgacaagacttttataacggcccaaacaggcctacagatggcccatgagacagcccagccagctaatgatgtgacatgtgatactgcccaagcggctcacccaaatgcccattatacggcccagtcagcaaatgagaagacatctaaaactgcccaaactgcacagcaaatggcccatgtgacgtcgcaagccgcagaagaaaagacatctcaagcttgcgacaaagctcgcgtggccaatgacaaggccctgagctactta

SEQ ID NO: 167741 - DNA, 385 bp, Arabidopsis thaliana nossen
cttgttaccaagatgagcttctacaaaagaagctttcactctttccttggccaaaccaacaccaaagggatgccgtttgaatccggtcttggccatgatgagacacaatcacatggcttaatgttgtgcacagagtatctagggtttgagagttacgacatgaggatgtccgataacgaggtggagaacaagatgacttgtcatgcggaggtggagaccgaaagggttgaagcaaagaggaggaagacgaaggagaatgtggtggtgcaagcgcagaaaaaacagtttcctccgcctctctcgtcattaaacagccgtggacagcgatatttttatctccgtccggtgagaaaagacggtagattggaacttacgcaagttatgg

SEQ ID NO: 167742 - DNA, 357 bp, Arabidopsis thaliana nossen
accgacggttgttctgatcatgagtctctgtttcatcggcttcgtcaccggtcttcacgtctttggaaaactctacctccacaaatccggatcccaagcttagatccggatcaggacctggatcgtttaatcggtgatcgctgtttttttttttttttttttagtatgtttccttgtgttttgtttcccttttttagtcttttcgatgagaaccatgtaaatcgctccgcgtggagtaagctccgtctcccttggatagtactggtgcatcatcaaatgctgccaaagttgatgggccatcatcagctggaggaaaggagaaaaactcattggaggagtcggctgcttcttcttctg

SEQ ID NO: 167743 - DNA, 384 bp, Arabidopsis thaliana nossen
ctttggtttcatcgagagagaacctaaacccgatctgaaccaataacaataagaagacgaatggcgtcttcgtcgttctcagtcacatctccagctgctgctgcttccgtctatgcagtcactcaaacctcctcgcacttcccaatccaaaaccgctctcgcagagtttctttccgtctctctgctaagcccaagcttcgctttctctccaagcctagtcgcagtagctaccctgtggtgaaagcacaatctaacaaggttagtactggtgcatcatcaaatgctgccaaagttgatgggccatcatcagctgaaggaaaggagaaaaactcattgaaggagtcgtctgcttcttctcctgaattagctacagaagagtctatt

SEQ ID NO: 167744 - DNA, 354 bp, Arabidopsis thaliana nossen
gacgaactagccccacatctgagtgacataccagctgatgaacaaccttcatcagattcaagagcgctggttccagttttggccttggaatccgacgctcttgcacttgttccagttaacgagaaacctaagcgtacagagctttcacaacgcagaaccaggaggccattctctgttacagaggtagaagctctagtaagcgcaattgaagaagttgggactggaagatggcgtgttgtgaagatgcgttcttttgagaatgcaagtcatcgaacctatgtggacttgtaggacaaatggaaaacgttggttcacacagcatgtgtatcaccacagcaacgaagaggagaacca

SEQ ID NO: 167745 - DNA, 397 bp, Arabidopsis thaliana nossen
ctcaattttgctcagacaaaaaatcaatggctttgcaaatgcagcaaacttcagcagccttcacaatctcctcaccatccaccgccgctgcacgcatcaaactctcccctttcagaaccgtggcggttaaccgcggagttagatgcagcggcggtggagtcggagtaggaggcggagatgccgggaagaaaaaagcagttcctaattctaattatgtagttcctattgataaattctcatcttcttcgtcgattactaggcctttgattgagatacttcgtgaccttaataagaagattcctgataacattgttaagagtcatgatcctccttctacttctgctgctacttctggttttatcccttggtattaattatcctttttttttttatcttt

SEQ ID NO: 167746 - DNA, 396 bp, Arabidopsis thaliana nossen
cttcatcagacagtgccgtatcgtccaaggcgatggactacacgtcggcgatctccgggaggtcatggtggtctctggactcccggcggtctcgagcaccgagaggctcgagatcttggacgaggagcgtcacgtgataagctttagtgtcgttggtggggaccacaggctcaagaactaccgatcggtgacgacactacacgcgtcggacgacgaaagtaccgtggtggtggagtcttacatcgttgatgtgccgccgggaaacacggaggaggaaactctaagcttcgttgatactatcgtccggtgcaaccttcagtctctggctcgaagtaccaaccggcaataatctcatctttcttatataaattgcaattatgtatctaattttttttg

SEQ ID NO: 167747 - DNA, 389 bp, Arabidopsis thaliana nossen
cttttgttttctcttctctccgtcgtctcactctcatttctcctcttcttccatggcgccgaggcacgccagcgagaggcgccgtttccaaacgcctgccatttcagccaaatcaacagcctcgcgcccgctcaggcgacgaagttcgaagccggtcagatggaagtatgggaccacatgagccctgagctccgatgcgccggtgtaacggtggctcgcatcacccttcagcccaattccattttcttgcccgctttctttagcccacctgcccttgcttacgttgtccaaggagaaggagttatggggacgattgcttctggttgtcctgagacttttgcagaagttgaagggtcatcaggaagaggaggaggaggagacccgggtcg

SEQ ID NO: 167748 - DNA, 313 bp, Arabidopsis thaliana nossen
ctttgatgtatctgagtaaagctttgtaaaaactaacataggattgaagaagacgacggacaaattatctaatggcgttagagatcactgtttgatcagtgactatgtgtctccttcagctactgctcctcctaaacaacctttcgcgatcggtgttgccggaggaaccgcctccgggaagacgacggttcgcaatatgatcatgtctcaggtacatgatcaacgtgctgtccttgttaaccaaaattcgttctaccactcgcttactcaggagaaattgcaccaaggtgcatgaatataatttcgatcatcc

SEQ ID NO: 167749 - DNA, 400 bp, Arabidopsis thaliana nossen
aaacaaaaagaaaatggttaagctcagcaatctcctcgttgcaaccttcggggttctcctcgtccttaacggctgccttgcgaggcagtcacttggggttcctcctcagctacagaacgagtgtaacctcgacaacctagatgttctccaagccaccgaaactatcaagagtgaagccggtcagatcgagtactgggaccacaaccaccctcagctccgatgtgttggtgtttccgttgctcgttatgtaattgaacaaggcggtctttacttgcccaccttcttcacttccccaaaaatttcctacgtcgttcaaggaacgggtatcagcggaagagtggtccctggatgtgccgagaccttcatggactcgcagccgatgcaaggacaacaacaaggc

SEQ ID NO: 167750 - DNA, 400 bp, Arabidopsis thaliana nossen
gttgctactacttggtatctattttcatatcataacttattttcactttgatactttttgaaaagaggagtttatgtttactgattccctgaaatgggagcatcacggcctctcttgaaatcgtcccatcctctgacccagggctgtccagccgctgcacgagtctctggcgctgcatgcttgttcagattcttcatgactttctcgtgtaacgccgagaacacctttaacatcacaacaaggattgttttaatcactgaagtaaacaaaagacgatatactgtttaaacgtagactcgattaagagattgtgattaccggatttgaactcactgcttccggaggctgttcctgttcagttagccatttccagagatcagggttttcctgcatagaacaa

SEQ ID NO: 167751 - DNA, 307 bp, Arabidopsis thaliana nossen
ggccggtccggactggggggaccgacccacgcgtacactttaagcttcttctatttgccttcgatgagggacctttgttcccactgcctccaaaactgttgggtgtgatctgcttcgctcggttacccatcaaaatcagacaagacccttctccaaatgcgataccaaatcttcatcctaaacctatgcctaaatgggttttggctgttaaaattttggtcttgggcgtcttgttacatgtttatgaatacagggatggtttgcctcagtttgttgtcttggctctctattgtctccatatttacct

SEQ ID NO: 167752 - DNA, 385 bp, Arabidopsis thaliana nossen
ctcaaagatgcctagtcgatttcctcctgttatcttctacactccaaaggaaattggtgggctgggaatgttgtcaatgggacatattttgatcccacaaagtgaccttcggtacagcaagcaaacagatgttggtgtaacccactttaggagtggaatgagccacgaggaagatcagcttataccaaatctttaccgttacatacagccgtgggaaagtgaatttattgattcacagcgggtgtgggcagaatatgctttgaagaggcaggaagcccaagcccaaaataggcgtcttacaactggaagattctgaaggattcttgggataggggaattccctcgtataaatacaactgttcaaaaggataggcacacttttgca

SEQ ID NO: 167753 - DNA, 387 bp, Arabidopsis thaliana nossen
gggtttttcgcctctttctcaactctcttctcgaaaacctagcagtcgtctctttctcagttctccatgggaaagtctaaatccgccaccaaagttgttgcagagattaaggccactaagcctttgaagaaaggcaagagagagcctgaagatgatattgacaccaaagtgagtcttaagaagcagaagaaagacgtgattgctgctgtccagaaggaaaaagctgtgaagaaggttcctaagaaggttgagagctctgatgattcagattctgaatctgaggaagaggagaaggctaagaaagtcccagccaagaaggctgcttcaagcagtgatgagtcatctgatgactcttcttcagatgatgaacctgcacccaagaaggcc

SEQ ID NO: 167754 - DNA, 171 bp, Arabidopsis thaliana nossen
gcgttcgaaaaaaacagaacacacacaaatacacattgttacatttgttttagcatttaacttgtttatgtcgaataataataattcttcgaccaccgcgtattaagaaacgacgacgtctcgtgaagtgtctatcacattggctactggtgaatctcctcaaaactcacc

SEQ ID NO: 167755 - DNA, 354 bp, Arabidopsis thaliana nossen
tatcaaccttcgccggaaataatggctttcccgcgatttctgtctctcctcgccgtcgtcacgtctctctcttttcctcaccaccactgatgcttcctctcgctctctatccactccacctaaaacgaacgtactcgacgtcgtttcatctctccagcaaacacaaactatcctctcactcgacccgactcgttcctcactcaccaccaccaaacccgaatccctatccgacccggttttcttcaattcatcttcaccactatctctagagcttcactctcgagacactttcgtcgcgtcacagcacaaagactacaaaaacctaaacactcagtcgactcgggcgcgactcat

SEQ ID NO: 167756 - DNA, 396 bp, Arabidopsis thaliana nossen
gagagagggaaaaagcgaagaatacgcagattcaatccaatttagggttagagattctcttctaatttggaaacctagtagtcctggtcccagatcggacgaagacgacggagtaacgagaatgggcgcgaattcgataccgacggacgcaaccattgatctcgatgagcagatctcccagctcatgcagtgcaagcccctctccgagcaacaggttagatcattatgcgagaaagccaaggagatcttaatggatgaaagcaacgttcagcctgtgaaaagccctgtgacaatctgcggtgatattcatggacagttccatgatcttgcagaacttttccgtattgggggaatgtgccctgataccaattacctgtttatgggagattatgttga

SEQ ID NO: 167757 - DNA, 395 bp, Arabidopsis thaliana nossen
atcagatgccgccactactccatcagtgctgctactagctccaccaagaagagccactttacgtttgtcgaaccttgaaaggatcatccaaagccagataacagcaggttcgacaacagggacatatgcagggacagcacatgcagcatgtaattagccgaatctaacacacctgtactcacttacctaaagcattgcagcatccacctagttaacagtttgtcccttccagaaaaccatgcctggcccctcctactaaattcaaaacgaaaccatgtgagtgtatataccacaatgatggttgtggtcgctgatgtatgttaacactacgcatccatggtatgtgttccataaataaagtactttcaaatcgctgctgatgtgataagaactac

SEQ ID NO: 167758 - DNA, 334 bp, Arabidopsis thaliana nossen
aaaaaagaagacaagtcttgaaaaacaaatacaaaaatggtggctgaaaacttaatcgaatttgtgtgcgtgtccatcgatgaaacgaaagctgcagtgcatggtggcctcgtcgaacctcaaatcactgagtttacttcaatctttggccttcctccagtgacgtcagatgacaagaaaccttctgtcactgcctcagacttagcagtccctatcatcgattttgcaatgtcacgagaaaacattgtggagaaaatcaaagaagcttcagagaagtgggggatattccaggtgatccacccatggtgttccttcaagcgttcttgaagagatc

SEQ ID NO: 167759 - DNA, 395 bp, Arabidopsis thaliana nossen
  unsure (1)..(395): unsure at all n locations
aaaaaaagtatacttctttttgcttttgttgttttgggttctgttcattgattctttgaagatggagaaatcttcaggctcggatttgaaatcctccgttaacggtggcgttgttgatgtgtatggagaagattcagccaccattgagcacaacataactccttggtctctctctgtttctagtggatattcattgctgagagatcctcgctacaacaaaggacttgctttcactgagaaagagcgagacactcattacttgcgtggtcttctccctccagttgttcttgatcaaaagcttcaggagaagaggctgatgaacaatatccgccaatatcaatttccattacaaaagtacatggcccttgacagaacttcagganagaaacgagaga

SEQ ID NO: 167760 - DNA, 285 bp, Arabidopsis thaliana nossen
  unsure (1)..(285): unsure at all n locations
cttgactctttctctccaccaccgtcgagctcagatctgacttctcatgtnccggataatcgtatacggacnatcatgaaaagatctcacatttcttctcctcgctcttgctctttctctcgcccagcgatctcactgttctttgtcatcctcttgttccttctgggtttaacactaacctcccgaaaaccatccggttcacccncaaaccgaatcctaaccgggaaacccagcatccccaagctcgcgtactttgtaacgggcacaaagggagatgcgaaacgg

SEQ ID NO: 167761 - DNA, 380 bp, Arabidopsis thaliana nossen
  unsure (1)..(380): unsure at all n locations
gaaaactgncgtctctataccagtctttctctgctctcaaatgcacttctgcacgcaccagtggctctcatgtcttcccgtcgacgaaacgcctccacgatcagtcactctctccgccctctggttcgtgcagccgccgtagaggcaatcgtgacaagttctgattcgtccctggttgataagtcggtgaacacgatcaggtttctggcaatagatgcggttgagaaggcgaaatcaggtcatccaggtcttcctatgggctgtgctccgatgtctcacattttgtacgatgaagtcatgaagtataaccccaagaatccttactggtttaaccgtgatcgtttcgttctctctgctggacatggatgcatgttgcaata

SEQ ID NO: 167762 - DNA, 412 bp, Arabidopsis thaliana nossen
caagtgtaaaaacctcaactttcagccaacaaaattagggtttcaagctgagattttgtacttctgttacacataaatacccaatgagtaaagcttcggtgatcctatacattacggtaggaatcctggtgctcttcctcgtctcttattcaccgaagaagaagggtgaccacgatcaccaccatggtggtcacaatcaacatcaccgcttaaaactccggtcttctttcaatttcaaacccactcgtcacgatccagttccgtttgatcctcttgtcgccgacatggagcgccgccgcgaggataaggagtgggagcgacagtacattgagcattctcacccggagcttgtctctcattctcagaaagaaacaaccggtggtggacatgaacatgcacctggtcacgagtc

SEQ ID NO: 167763 - DNA, 383 bp, Arabidopsis thaliana nossen
tatacattaaagaaaatagaacatcttgaaacctctaaataaatacaccgtgcttaaaaaaattctcgagatattcaattgattttttttttgtctagaatattaaataatcaatactccattagatgtcatttacccaaaaaaaaaaaaaaaaaactccattagatgttattattgtagattgtataaataaactctgatatataagtccaacaaaactccattagcagtagtgttggtaagctccccatattcttgggcttttgtttcagaagatttcatgttatccgtcggcttagtttctgggattatcttgttaatcgccacatttatataatttcatatataatctatcttttagtgcaaaaaaagttaaaaaaata

SEQ ID NO: 167764 - DNA, 390 bp, Arabidopsis thaliana nossen
  unsure (1)..(390): unsure at all n locations
aaagatgaagagtcactatacatacaccatttatgttgntgatctcttagtttgtctcttgatctcatgggcctctgcacaatccctcatacgacaatccactgatgatcgaaacacacctctacagcaggagaatggagcaagagcagtctcaatcctgggagaagcgcattacttggataaagatgacctagagatctcctcaagtgattacaaagtctcaccttcaaaccaagtgacgggtatgagaagtcgtcctccaatgtcttactctctcaaaatggagtctttcaacacgctccttcagtcaaatgaaacagagagatacgaatctcgtccttttccggttggtggatacaactggtcacttattgtgtatccgaacgggaa

SEQ ID NO: 167765 - DNA, 358 bp, Arabidopsis thaliana nossen
  unsure (1)..(358): unsure at all n locations
gagaagaagaaacatctccattctccgagagagagatctgagtcgtctgcggaaacaaacgacctagaatccgagagtgtagtanaacaacaaaaatggcgtggcaaaaggagaagatcgtcggaagctgcttcgccgtcggagctgccttcgccgtcagagcttccttcctccacctcttcctcaaaggcgagcttcccttatgcctatgcctcgtccccttcaggaaacgaaaaccagtccgcgtctacatggacggttgcttcgacatgatgcactacggccactgcaacgcgctccggcaggcgcgtgctctcggcgaccaattggtcgtcggcgtcgtcagcgacgaggagat

SEQ ID NO: 167766 - DNA, 400 bp, Arabidopsis thaliana nossen
gagacttttagaggatagtatggcggaaaagatgctagcgagagagatgaaggaaggggactcggtgagtgtggacgttgactcggaaggtaaagtgactgtgctaaatggtggaagtggcactcccacaacatccttggaggagcaggaagattctctccccgttgcttgaaataaaaggggaagtgtgtttcttctctcttcttttgcttttccccccctgaacgaattatggcaagagaagagtctcaatgagatacttgtagggggtttcgtaatatacattctatatatatgtaaccaatgtaatgtatagatgacattgtgtagcttctttgtcaatgcttttttaaggacctactttggtgccaatgtgtgtttattaatgggtttagaatta

SEQ ID NO: 167767 - DNA, 372 bp, Arabidopsis thaliana nossen
tagcttttgaagcctctgtttgtttatggttatatcctctctgttcttctcatttcgaaagactgaattttgaatgtgtttgagggtgtgttttatgtatggatggatttaagggtaaaagaacatctagaccgattatgccacggaaagcaagtggtcttgtgttacatgagaatatgaagaagaaagatgataagagtgttgtccctatctgcagtagaattggttgcagttccagggttagttccactaagggagatttgattgatcataaagcaaaagctactgtgtcttcgtttcgatctcctttgagtggaaaggaaaccgttggtagttcatctcgaagtatgagtggatttggtggtacaaaaa

SEQ ID NO: 167768 - DNA, 380 bp, Arabidopsis thaliana nossen
  unsure (1)..(380): unsure at all n locations
ttcacattctcttctctctcgatatcatctaaatctctctcgatctcaggttcncagggtggctgtcaagttgatcagaatcggaatcaacggtttcggaagaatcggtcgtttggttgctagagttgttcttcagagggatgatgttgagctcgtcgctgttaacgatcctttcatcaccaccgagtacatgacatacatgtttaagtatgacagtgttcacggtcagtggaagcaccatgagcttaaggtgaaggatgacaaaactcttctcttcggtgagaagccagtcactgttttcggcatcaggaaccctgaggacatcccatggggtgaggctggagctgactntgttgttgagtctactggtgtcttcactg

SEQ ID NO: 167769 - DNA, 377 bp, Arabidopsis thaliana nossen
cccacgcgtgcggcgagagatgagtacggcgactgagataacggacagagacccaatggctactgtggcgtcctacgctccagtcacctttcaccgccgtgctcgcgttgacatggatgatagacttcctaaaccttatatgccaagagcactgcaagcacccgacagagagcatccgtatggaaccccgggccataagaattatggacttagtgttcttcagcaacatgtcgccttcttcgatttagatgataatggaattatctatccttgggagacctactccggactgcgaatgcttggtgtcaatatcattgtatcgcttatcgcagacgctgctatcaacttggcccttagctatgctactgttacgggat

SEQ ID NO: 167770 - DNA, 392 bp, Arabidopsis thaliana nossen
caaacacacagtttaatccaaaaaaagatcaaaagatggatgccacaaaggtttatgtgcttctcgtgattggcgttgtgtgtgccattgtcactgcaaggcaggtggaagaagtgtccaaagagaccaaattaggtatctctactccaaaaactactatcaaaggcgtcggagctcagctttctgctaggggcagaactttcagcaactctgggggctctagctttgctagagctactcatggtcgcaaaggtccagaggcttatgcatccgaaggtggctccacaagtaccggcggagaaatcattgccaagggtcgaaagacaagagtttcttctaaaagtgcttcagtctcaaagggagggtctaaagctgcagcgaatcgcaaagct

SEQ ID NO: 167771 - DNA, 401 bp, Arabidopsis thaliana nossen
  unsure (1)..(401): unsure at all n locations
cggacgcgtgggtccaggtaagggagcgcagcaaaaatggtgtctctggggatccagaagcggttcggggcgtcngtgatgaagtgcgggaagggcaaggtttggctcgatccgaatgaatcctccgacatctccatggccaactctcgacaaaacatcaggaagctggtgaaggatggtttcatcatcaggaagccaaccaagatccactctcgttccagggctcgccgtatgaagattgccaagatgaagggtcgtcactctggatacggtaagaggaagggtaccagggaagctaggttgccgacaaaggtactttggatgcgtaggatgcgtgttctcaggcgtctcctgaagaagtaccgagagtcgaagaagattgacaagcacatgtaccatga

SEQ ID NO: 167772 - DNA, 303 bp, Arabidopsis thaliana nossen
ctctctatttcactaaaatggcatgcaactgcagtttagcgaatgttctaggggtagttttagtattcactctgttccacgacccgatcaccgtggccggacaaaatattccggcggtggcattgttcacgttcggcgattccaacttcgacgccggaaacagaatgttcctcgcaggtacaagatttcctcaaaacttctggccttacggtaaatcccgagatgaccccagtggcaagttttcggatggcagaatcgtccctgactttatcgcaaaattcatggggattccacacgatttac

SEQ ID NO: 167773 - DNA, 384 bp, Arabidopsis thaliana nossen
gtttagtaaggcttaacgccattagaggcgttctctacagcggaggaatgatgttgccgcattggaccgcaaacgcacacacggtgctatacgttacaggcggtcaagccatgatacaagtagtggacgacaacggtcagtccgtgttcaatgcgcaagtgcaacaaggagagcttcttgtggttccacaaggctttgcggttgtcaaaaccgctggtgaaacagggttcgagtggatagcgttcaagacgaacgacaatgcttacatgaacacactcagcggtggaacatcgtacttgagagcggttcccgtggatgtgatcaaagcggcgtatggagtgaccgaggaagatgccaagcgggtcaagtttagtcagcaagaga

SEQ ID NO: 167774 - DNA, 345 bp, Arabidopsis thaliana nossen
cccacgcgtacggcaccaccgggtctcccggtttacgacgcaatgtcaggcggtccgtcactcgctccgggtccggcaccaggaccgtgcgggcctcgccaccatttcaacggagaggctcaagtgaaagatttgatccacactctgctccattacggtggatacaacgagatggcggacattctcgtgaacctcacttctctagccaccgagatgggtcggctcgtgtctgaaggctacattttaacggtcctagctgcgaacgacgacactatggctaagttgaccacagaccaattgagcgaacctggagctgcagagcaaataatgtattaccatatcata

SEQ ID NO: 167775 - DNA, 401 bp, Arabidopsis thaliana nossen
  unsure (1)..(401): unsure at all n locations
attctatcttcaaagatggccaccgatgagccttctcaaactcgctggagctttctgtttgggaggaagaagctgcctgaagaagatgtatcaaacaaggaccaaccagaagatggatcatccaacggtaataacggtgatgtcaacaacaactcttccccagtcaccaatcaggatggtaacacagccttggccaatggcaatgtgattcgcgagaagccgaaaaagtccatgtttcccccgtttgagtctgcggaaactcgtactctcgctgagagtttgagtagggatatcatccgtgggaatccaaatatcaagtgggaaagcatcanaggtttggagaacgctaaaaagtgctcaaagagctgtgtgatgcctataaatacccacgtacttaatgg

SEQ ID NO: 167776 - DNA, 392 bp, Arabidopsis thaliana nossen
tgcagaaacctctctcatctgaactcagaaaatctccgagttcgtatatgttctccgtttgagcaatggcgttggtcatccacacttacaagggaaacaaaggtgccaataaggcacttattgctgcagagtatgcgggtgtgaagatcgaggagtccgcagactttcagatgggcgtcactaacaagtcacctgagttccttaagatgaatcctattggaaaggttcctgtgcttgagactcctgaaggtcccatatttgagagcaatgccattgcccgatacgtgagccgtaagaatggtgacaactctttgaatggatcctcccttattgaatacgctcacattgagcaatggatcgatttctcctcattggagattgatgctaacatg

SEQ ID NO: 167777 - DNA, 253 bp, Arabidopsis thaliana nossen
tattgacgtgacaaatcgggactcgacccagaaaaaatcaatgtaaacggaggttcaatgggcataggccatccttcatgcgctacatgagcgcactgtgttgatacattgttgcacgagatgaaacgccgtggtaaaaactggcggattgtagtaatgtcaatgtgcattgatactgagatgggttcagcatctgtatgtgacagaggtgatggatctaatgagcttcccaacgcatggatagtagaagcgc

SEQ ID NO: 167778 - DNA, 371 bp, Arabidopsis thaliana nossen
gccgccactcaccacaggtaccaccaggagacgcacagtttcctcgagccggagaggtacatcaacagctgggagccgcctaaagatcccagagacgctgagaggatgctcgcgcagcttaggagggactacgccaagaaagtgagtctgtatcgtaaagactaccttcacgagattgagatgcttagggtggagaagcagcgtaaggacgaggctaggctggtggctgagcgtgctgctaatgaagagaggcggcggttgaaagctgtggctgctaaggttagagctgaggagcggaaggtcttcgaggaagagttcaggagaaccctgatgaaagaaagagaggagaagctggagttctggagaaatga

SEQ ID NO: 167779 - DNA, 380 bp, Arabidopsis thaliana nossen
  unsure (1)..(380): unsure at all n locations
cttttcctaatcaacaagagcaaaatgacagatacagctggaacccatcacgatatcaccactcgagaccagtatcctatgatgggccgagaccgagaccagtatgcgataattggccgggaccagtaccaagggtacggccaagattactccaagtctaggcagattgctaaagctgccactgcagtcaccgctggtggatctctccttgttctctgcagtctcacccttgtgggaacggtcattgcattgattgttgccactccactgcttgttatctttagcccaatccttgtccctgctctcatgaccgtcgcactgctcatcaccggttntctctgctctggtgggtttggtattgcagctataactgtcttctc

SEQ ID NO: 167780 - DNA, 379 bp, Arabidopsis thaliana nossen
cggacgcgtgggggagtgatggaattgcaaggagaggaaagcaaaacggggacgtattgcgtgacgggtgcaagtggatacatcggttcttggttggttaagtctcttctccaaagaggttacacagtccatgccactctcagagatcttgcaaaatctgaatactttcaatctaaatggaaggaaaatgaacggctcagattattccgagcggatcttcgagatgacggcagctttgacgacgccgttaagggttgtgacggcgtcttccatgtcgccgcttccatggagtttgatatctcatcagatcacgttaatctcgagagttatgtccagagcaaagtcatagaaccggcgcttaaaggcgtacggaatgtac

SEQ ID NO: 167781 - DNA, 355 bp, Arabidopsis thaliana nossen
  unsure (1)..(355): unsure at all n locations
attttcgtagccgcaagactcctttcagattcttacttgcagctatgggtaaagagaagtttcacattaacattgtggtcattggtcatgttgattctggaaaatcgaccacaactggtcacttgatctataagcttggtggtattgacaagcgtgtcatcgagaggttcgagaaggaggctgctgagatgaacaagaggtccttcaagtacgcatgggtgttggacaaacttaaggccgagcgtgagcgtggtattaccatcgatattgctctatggaagttcgagaccaccaagtactactgcacagtcattgatgccccangacatcgtgatttcatcaagacatgattact

SEQ ID NO: 167782 - DNA, 378 bp, Arabidopsis thaliana nossen
  unsure (1)..(378): unsure at all n locations
cagcgatatatcttcatctctctctctctcgccagattttcatcgactcgatttcagatttaagatctcagatacaaaactccgacatgtctacgttcagcggcgatgaaacagctcccttcttcggcttcctcggcgctgcagccgcactcgttttctcctgtatgggagctgcttatggaaccgcaaagagtggtgttggtgtggcttctatgggagttatgagacctgagttggtgatgaaatctattgtccctgttgttatggctggagtgttgggtatctatggattgatcattgctgttatcatcagtaccgggattaaccccaaggctaagtcttactacctctntgatggatacgcacatctctcgtctg

SEQ ID NO: 167783 - DNA, 275 bp, Arabidopsis thaliana nossen
aattttcactgagcgcataacattttggagacaagagactctatctctgtctcttggctatttctctcccgctctgtgcaggcgatggtcagttgctatggaccaacgcaccaatgtgaacggagatccccgcgccggagaccggaagaaagaagaaaggtttgatccgagtgcacaaccaccgttcaagatcggagatataagggcggcgattcctaagcactgttgggtgaagagtgctttgagatcaatgagttacgtggtcagagacatta

SEQ ID NO: 167784 - DNA, 389 bp, Arabidopsis thaliana nossen
cacacaaaagattctctacactatggatactaagaaatcggtagtgatcctattgactaacgtcgtcgtcttcttgcttctctccacgactgtccattcttgcttaccgtccgaccgagcggcgcttctagagttccgagcaaagctcaacgagccctacattggagttttcaacacatggaaaggtctagactgttgcaaaggctggtatggtgtgagctgcgatcccaacacccgtcgagtcgccggcattacactccgaggtgaatccgaagacccgcttttccaaaaggcgaaacggagcggactaatgaccggctccatttcgccctctatatgtaagctcactcgtctctccggtatcatcatcgctgattggaagggatctc

SEQ ID NO: 167785 - DNA, 393 bp, Arabidopsis thaliana nossen
  unsure (1)..(393): unsure at all n locations
cccacgcgtccgcggacgcgtgggtagaaagagagagagagagaagaagctcaagagatggagggcaaggaagaagatgttagagtcggagccaacaaattccccgagagacaacccatcggaacatcggctcagagcgacaaagactacaaggagccgcctcctgcgccgttgttcgagcccggcgagcttgcgtcgtggtccttctggagagccggaatcgccgagttcatcgccacgtttctcttcctttacataactgtgttgaccgtcatgggtgtcaagaggtcaccgagcatgtgtgcttctgtcggaatccaagggatagcttgggctttcggtggtatgatcttcgctctcgtctactgtacggctggtatctncggtggacac

SEQ ID NO: 167786 - DNA, 337 bp, Arabidopsis thaliana nossen
  unsure (1)..(337): unsure at all n locations
aacaattcctccaaggctgaccttgactttggtttccttgcgactaaagcgaggtgctctactgtgacgtttcagacnagcaacccaaacacaagagtccacttgagagtttttcttatccgaaactggttcccaaacaaggtctttgagttcagaatcaatagtaacagtagacgagcttactccacttacggcttggtcaaagtaaagaatcagtggaaaagaaccagactcggaacagaaagtagtcaacttagtagtagaagaagaggcattgaagcagtcaggtccagatagaatgatgatggaaccatctgaaggccatgaggaaaagcga

SEQ ID NO: 167787 - DNA, 383 bp, Arabidopsis thaliana nossen
atcatcttttcttcacagagaggaaaaaaaaaaaatggcgacagattctgaaccaaaccaaaagctaacgcttccgttaaaaacaagaatcgctctcaccgttatctccaccatgaccgataacgctcaacgtcctgacggaactatcaaccgccgtttcctccgcctcttcgatttccgtgctcctcccaatcctaaacccgtcaacatcgtctccacctccgatttcgtcgtggatcaatcccgtgatctctggttccgattgtacactccacatgtctccggcgataaaatccccgtcgttgttttcttccacggcggtggtttcgctttcctcagtcctaatgcgtatccttacgataatgtatgccggagattcgcta

SEQ ID NO: 167788 - DNA, 373 bp, Arabidopsis thaliana nossen
aagttagtcaccaaaaaaaaaaaaaaacacaaaaagtttcaatggccgcgtccacaatggctctctcctgccctgccttcgccggaaaggctgtgaacctttcccccgcggcatctgaagtcctcggaagcggccgtgtgacaatgaggaagactgttgccaagccaaagggtccatcaggcagcccatggtacggatccgaccgagtcaagtacttgggtccattctctggcgagtcaccgagctaccttaccggagagttccccggagactacggatgggacaccgctggactttcagctgatcccgagacattcgcaaggaaccgtgagctaaaagttatccacagcaggtgggccatgctcggagccct

SEQ ID NO: 167789 - DNA, 306 bp, Arabidopsis thaliana nossen
gtcaatattgtgaagaacaaagtcgacctatttctagtagaacacgttggagaagggtcagacctcatattccgtttgttaaacccagaccctgatttacgtcctagcgcaactgaagtgctactccatcctatgttttggaactcagagatgagactgtctttccttcgtgatgctagtgaccgagttgagcttgaaaatagagaagctgattctgaaatcttgaaagcaatggagagtacagctccagtggctataggagggaaatgggatgaaaagctagaacctgttttcatcacaaacatc

SEQ ID NO: 167790 - DNA, 312 bp, Arabidopsis thaliana nossen
  unsure (1)..(312): unsure at all n locations
acgtttcccataacctcatggagcacaagccactaccaccacagtatctaggaaaatctccggctattccaacaaaccctnccntnctccttctcccacaaaccattcatagacgagccacatacacatagcagcccgcatctaaagcaagtaagaagagctaaggctctccacccagagagcatcactctcaaaaactgattccaaacgcagctgcgacgaaagaagcggccacgtctaccaacaccggacatgaactatagcttttcgaggctcttcacgaaagtctggaagaagagatggacagaaaac

SEQ ID NO: 167791 - DNA, 340 bp, Arabidopsis thaliana nossen
gcactttctgtggagcccacaggtacccggagagccacgactgcgagtgtgatttcaaaggagcggctagagaggctattgctaaagcgaatcctgtggtgaaagctgataaggtggagaagatatgattttgaagatggaatcgtgtttctcttttcgagtgtcttttggtgtttggttctttttctgtttctgttatatgattcgatttgctttaagtgtttttcttagggaaaaagtgtaagattctgcttttgtggtttcatgatttattgttctgtaataaaaagtttggtcttatcaaaaaggtttgaatcaaaaaaaagaaattaaatttaat

SEQ ID NO: 167792 - DNA, 392 bp, Arabidopsis thaliana nossen
cacaaacacacacaaatctctgaagtaaaatgacgttcccttctctttctgtctcatgtctcttctttggctttatggtcgttacgcatgcattcgacctcagcatcatccagatgcaacagggaacatgtccgtacacggtggttgtcatgacaagctgtctttctccggagtcgacaagagatcagatcagcattgtttttggcgatgccgacggtaacaaggtgtatgcaccgaaactagggggtttggtaagaggaccagggggtttggggaagtgttcaacgaacacattccaagtcagaggtcaatgtttgaatgaccctatctgctctctctatatcaaccggaatggacccgacggttgggtcccggagtccattgagatctac

SEQ ID NO: 167793 - DNA, 384 bp, Arabidopsis thaliana nossen
  unsure (1)..(384): unsure at all n locations
ggatcgtggtgctgaggctacgcccagtggaaaaccttcatgatcattgattaagcctgattctgcagtaccaaatagtgttattcctgcaggggttcgacttcatcatagagctgtggtggttgctgcagaaacaggtggagccttaggtggaatggttagacagttatccattgatcaatttgaaaatgagggacgccgtgttagttatgggacacccgaaagtgcaacagcagctaggaaattattagatcgtcagatgtcaatcaatagtgttccgaaaaaggttgtagctcatcttttgaaagcctcggggtggaagcctncagttcgtcgccagtttttcttggatggcaatgaaatagctgatctttgcgacagtgc

SEQ ID NO: 167794 - DNA, 369 bp, Arabidopsis thaliana nossen
agattctaagccatgatcattgcgtccaacgccagcgattgaatcgtcgctgaatcgagttagctcagaatctaggtcaggtggagtggaaaagaagcgggattggaaaagagcgagcgcgattgacggatgggtcgtggcggagacatggtgaggagagagagaggagcaagtgtggtgagatcggcggaggtgagggcttacggtggatacctaggcacccagagacgaggaagggcgtagtaagcgacgaaatgcttcggggagttgaaaataagcgtagatccggagattcccgaataggttaaccttttgaactgctgctgaatccatgggcaggcaagagacaacctggcgaactgaaacatc

SEQ ID NO: 167795 - DNA, 311 bp, Arabidopsis thaliana nossen
  unsure (1)..(311): unsure at all n locations
acgcccgcggcaccggtccggggttcgcgccacgcgcccgtctttccactgagcgcataacttttttgagacaagagactctctctctctctgtgctctctttctctgcccctctctccggcgatggttgttgctatggaccaacgcaccaatgtgaacggagatcccggcgccggagaccggaagaaagaagaaaggtttgatccgagtgcacataccaccgtcaagatcggagatataatggcggcgattcctaagcactgtttngttaagagtcctttgagatcaatgagttacgtcgtcagagacat

SEQ ID NO: 167796 - DNA, 389 bp, Arabidopsis thaliana nossen
cttaatgctgcatatgattcgtggcaggtaagttatttatcttcttaatcgttagatttattaacaagattttgtgtttcacatattttgttattcgtgcagatccaagagagtctagctccaaaatctgcagatccaagtggaagttggaatgattgtagacttaactacgccaagtgtagtgcatctcagatccaattcttgcaaggtgaaacataagctaataatgatgttcgtgattttgaataaccaaactaactaatgtttttgaaatgtgtgttacaggttttaggacgcgtatggtgaatttggtaaaaggtttcgcgatgccaagtaagaacggtgtgttcctcaattcgtgcttcgctcattgccaaacagagagacat

SEQ ID NO: 167797 - DNA, 376 bp, Arabidopsis thaliana nossen
caccaccgaaagagagagtccaaattcgaaagagaaaaagagtcaaattgcttcttcttccttttttgattttcaattattactttaatcttctttcccgctctctattcttcttcttctttaggatcaatcaccgtttagctttcttcccatacgtctctccgtttacgaccagtatacagaggctggagctggggaagaaaaggattgtctatggagggagacgtcggaaaaggtttggtatgccagaatactatggatgggaaggcgagtaatggaaatggtttagagaagactgtaccttcttgttgccttaaggctatggcatgtgtacctgaggatgatgctaagagtcactccactggtggttctgggt

SEQ ID NO: 167798 - DNA, 387 bp, Arabidopsis thaliana nossen
gagcaatcttgtgtcgtgaaagtgatgtagtcaaacaaattacggttgagcacgaacctgacaaagagagagatcttgtcaagagcaaaggcggctttgtctcccaaaagccaggtcccttcttttgtatcttttactaagaagaaaagagaaaatgatctatttcggacttccaaggcaaagccaataaacccatgttacttataatgattaggcaatgttccgagagtggatggacaactagcgatgacgcgtgcgtttggagacggaggccttaaagagcatataagtgtgatcccgaacatagagattgccgagatccacgatgacacaaagttcttgatcttggctagcgatggactctggaaagtttctacatatgaatgc

SEQ ID NO: 167799 - DNA, 379 bp, Arabidopsis thaliana nossen
ctctctcttatacaacactcaagaagcgagacacagaggagagagttaggcttcttcgctgtttttgtctctttggctatatatattcaaacattgtgtgaacagaacacaaatcaacacaacacacacaactttgtgttctttaagttttgtttcagagatcaatggccgggactggattgtttgctgagattcttgatggagaagtatacaaatactacgctgatggtgagtggaaaacttcttcctcaggtaagagtgttgccatcatgaacccggccacgaggaagacacagtacaaggttcaagcatgcacgcaagaagaagtgaacgcggtgatggaactggcgaaatcagctcagaaatcgtgggcgaaaac

SEQ ID NO: 167800 - DNA, 386 bp, Arabidopsis thaliana nossen
cggacgcgtgggttttatctctttgatacatctcaattttgttcttttgccttctctttgatcttatctcttacgattgtgcagatctcaatctctatatccttggttgtgtcagattctcttagggtttattttctctcccaattttgtttgattccttgtccaaagtttcttcctttccttttgacttttttttgtggtacattgaatcagaggtgtaagagtaatagtttcataactcaaatccccaagtgtacaaattttcctcttttggttctgggtttggttgattccttgttagaaatgtaaatttagggcttttgtatctgaaaccgatcttcagacttgtgtaatcttcttgatcttcatgcaagattgataattct

SEQ ID NO: 167801 - DNA, 430 bp, Arabidopsis thaliana nossen
cggaccggcccgggcgaccgcgcgcgtccggacttactgagtgaaaaaagcttatcgcggcgattagttcccggccaagaacaacaagagggataagagggtgttgggtaatgcatctgctacctcaacgcagctctctcagaaggaagctgatgtcaggatgatgtgtgccgctgaggttcatcttggaaccaagaattgcaattaccagatggagcgttacgtcttcaagagacgcaacgatggtatttacatcttcaaccttggcaaaacatgggaaaagctccagatggctgctagagttattggtgccattgagaacccacaggacatcatcgtccagtcagctaggccctatggacagagagctgtgttgaagtttgctcagtacactggagccaatgccattgctggaagacacactcctggg

SEQ ID NO: 167802 - DNA, 388 bp, Arabidopsis thaliana nossen
ctttctctctctttctccttaaaaactctaactttactcatctcatctgcaaagtctcaaccttcttctgtaatggagatctgcacttacttcaaatcacaacccacttggctcctcattctcttcgttctggggtcaatctcaatcttcaaattcatcttcaccctcctcagatctttctacatctacttcctccgaccatccaaaaacctccgccgatacggttcatgggcaatcatcaccggaccaacagacggaatcggtaaagctttcgcctttcagttagcccagaaaggtcttaaccttatactcgttgctcgtaacccagacaagctcaaagatgtctctgattccatcagatctaagtatagtcaaactcagatcttga

SEQ ID NO: 167803 - DNA, 386 bp, Arabidopsis thaliana nossen
cacaaatctctgaagtaaaatgacgttcccttctctttctgtctcattgctcttcttggccttcatatgcgttacgcatgcattcgacctcagcatcatccagatgcaacagggaacatgtccgtacacggtggttgtcatgacaagctgtctttctccggagtcgacaagagatcagatcagcattgtttttggcgatgccgacggtaacaaggtgtatgcaccgaaactagggggtttggtaagaggaccagggggtttggggaagtgttcaacgaacacattccaagtcagaggtcaatgtttgaatgaccctatctgctctctctatatcaaccggaatggacccgacggttgggtcccggagtccattgagatctactcag

SEQ ID NO: 167804 - DNA, 372 bp, Arabidopsis thaliana nossen
taaaagttcaattatctcgagcgttcttatacctctccagggtctttagatagtgcccactggctcattagcattctacagtctgcacacttatcacttctttcgaaatctctctctatccctctcaaaaatgaagctctctgtgcgttttatctccgctgctcttctcttgttcatggtattcattgccacagggatgggtccagtcaccgtggaggcacgcacgtgtgagtcaaagagccataggttcaagggtccatgtgtgagcacacacatctgtgcaaacgtgtgccacaacgaaagcttcggcggaggtaaatgccgtggattccggcgtcgttgctactgcacaagacactggtgatccatcca

SEQ ID NO: 167805 - DNA, 226 bp, Arabidopsis thaliana nossen
tggagccaaccatgtgatcatcatcgctgctgatgtcatgaaagaagatgactgccgccggtttatcagccaagccgtcaactattacggccgcgtggatcatctagtgaatacagcgagtcttggacacactttttactttgaggaagtgagtgacacgactgtgttttcacatttgctggacataaacttcagggggattgttaatattacacacttttcgttg

SEQ ID NO: 167806 - DNA, 392 bp, Arabidopsis thaliana nossen
ctaagttaaagatggtgttcttttgcatgaattagatacggggtgcttggttctttgtgttttgcagaattttttgaatttgagctctttattggctttcttttgtgcttaagcggagagctatagacaaataaggttcacgaagaaaacgaatctgttgcaaatggaggaggcaaaaacaggtacggattcgtttttaatttttcatttaagaggcaacgttttgttatgtaagagatgctgttacatgtgcagaagtggagaagaaagtgtctatacttttaaagtttattcaaaacaaaaacaagatcccaaaggttacaaagaacgaacttgttgggattgttgaagatcttcataagcagtgtcagttactttactctgtgtttgat

SEQ ID NO: 167807 - DNA, 345 bp, Arabidopsis thaliana nossen
  unsure (1)..(345): unsure at all n locations
gtagtgagagaagaaagatagagaaaaaaaatgggaggcaaaggtgtgatgatggtggcgatactttgcctttggggactctctgcaacatctgaagcagtaacagaggctgagccaggtttgatgatgaacttctacaaggacacgtgtcctcaggccgaagacatcgtccgtgaacaagtcaaactcctctacaaacgccacaagaacaccgctttctcttggctccgtaacatcttccatgactgcgccgttgagtcatgtgatgcgtcgcttttgctggattcgacaagaagagagctaggagagaaagaacacgacaggagcttcngacttagaaactta

SEQ ID NO: 167808 - DNA, 303 bp, Arabidopsis thaliana nossen
cttggagttcaccgaggcggagttcttcttgaaaggggctaccggaaaaggacttgatgcctataacgcgactcttgctaaaggcggaccaccgccggtaggggccaagaaagccaaccttgatcctataactaaccgaatcatcgaggagtttggttatcaagaaatcggtcatcttagggcgattacggatatgacgggaggaattccacgtccgctaataaatctgacgagagagaatttcgcagtgtttatggacagagcggttggacgcaaatctaatccgcggtttgatccttacgc

SEQ ID NO: 167809 - DNA, 399 bp, Arabidopsis thaliana nossen
gaaccatcactgcatccctcatgaatcttcctgaaattcgaaccacctgccgacacaaacacagcaagcttcttccttcttggttcgtctctcgaaccatcgacctccgctactatatgtggagcagacgaagcagcttttacaagcggtacaatcctcatcgcacatctctctgcgggactacggaaagagaaggagagaacattccgggaaggtgtgagcggagcaatcgaggtttcacgggtcttaaacggtgaattcaccgggaagttgaattgactagagaacaaaacccgtgattccattccgacggtctaatcggagggttttgtcggaataagtgtcagtttggtcgaagagggagacaataatgaagtctcagatgattaccggcggaaa

SEQ ID NO: 167810 - DNA, 396 bp, Arabidopsis thaliana nossen
  unsure (1)..(396): unsure at all n locations
aacacttctaaagtacaccatgtatctctaccttcttgtgcggagtaaggaagcatcaagggctattctgtanaanataatcgatgattcatctctccgagtatatctgatggttctctagtcatcctctctaggtcctcaatcgcttctaaaaatccttctcctatctcctctgcttctccttcttcctcctcgcttgtgatgaattggtctagctccacggaacgtgatattcccatctcgcgaaatatttcagcataattatttagttctcagactgcatattatttccttttatttcttgctattttttgtttttaatttctagttatccatttgtaacttttctttttcattacatttatcttcccgcttctatttttttctaaatttttg

SEQ ID NO: 167811 - DNA, 402 bp, Arabidopsis thaliana nossen
gctcgccccacgcgtccgattctaaattcgaattttctttatttccatatagattttcagaaacagggttatagttatagtatgttcgaacgtggaattcatcatccttattaattttgtcttttccattcactcggatttcttccatttcatcgattttgtccagatcttccccttcttccgaaaaaagagaaggaaaaggagcttcttcggtggatacctcttggtcctgtttagtcccacccgtttctgaggttcctttaagtttcttagtaaaaatgggtgatggtattctgcctaaatagtagacacaggtaataaataagagaatactaaagattcgagccatagaatctctcaattctgacacaaggaacttatacttattagatctaataacta

SEQ ID NO: 167812 - DNA, 395 bp, Arabidopsis thaliana nossen
  unsure (1)..(395): unsure at all n locations
aaacttctctctgaatctcagtgagttctcataaaatgagagggatggtgagttttgccgtttgggctctctttgctgctttactctcacagcagctctttgcttctgttgcttccgtaaggtttgaggatgccaaaacatactacttatctcctccctctggctcacatggaactccttcatcacacacgcctccttcttctaactgaggaagtgcaccttacgacccttctccttcaactccttctcacccttcacctccatcacatactccaactccttccactccatcacacactccaactccacacactccatcacacacgccaactncacacacccctncttgtaactgtggaagtccaccttcccacccttncacgccttcacaccct

SEQ ID NO: 167813 - DNA, 400 bp, Arabidopsis thaliana nossen
gcaaccttgaaaccctagaaaactcattctcaactacgactaaatcgatttcgcaaactttgacctacccttctttcacgataaacccagatcgcttaaattccttgaatttcttcttctgagagttttaggaaaaaatgtcgtctttgagcagagagttagttttcttaattctccagttcttagatgaggagaagttcaaggaatctgttcacaagctagagcaagaatctggcttcttctttaacattaagtactttgaagagaaagctcttgctggagagtgggatgaagtggagaagtatctttctggtttcactaaagtcgatgataatcgttactctatgaaaatcttctttgagattaggaagcaaaagtatctcgaagctctagatcgaaa

SEQ ID NO: 167814 - DNA, 430 bp, Arabidopsis thaliana nossen
  unsure (1)..(430): unsure at all n locations
ggtactgcnggggagacccacgcgtgcgatggctttcccgcgatttctttctctcctcgccgtcgtcactctctctcttttcctcaggaccactgatgcttcctctggctctctatccactccacctaaaacgaacgtactcgacgtcgtttcatctctccagcaaacacaaactatcctctcactcgacccgactcgttcctcactcaccaccaccaaacccgaatccctatccgacccggttttcttcaattcatcttcaccactatctctagagcttcactctcgagacactttcgtcgcgtcacagcacaaagactacaaaagcttaacactcagtcgactcgagcgcgactcatcccgagtcgccggaatcgtcgcgaagatccgtttcgccgtcgaaggagtcgatagatccgatctcaaaccc

SEQ ID NO: 167815 - DNA, 269 bp, Arabidopsis thaliana nossen
ggctttgggcttgctatgtcgcatagcctcacgtcgtgtacgtgggctttagatttctggtacggcggtagactgatacaagatgggtacatcacggctaaagctttgttcgagacgtttatgatcttagttagtactggtcgagtcattgccgatgctggaagcatgaccacggatctagctaaaggttcggatgcggtagggtcagttctcgctgtgttggatcggtacacgtcgattgatccggaggatccagatggatatgaaac

SEQ ID NO: 167816 - DNA, 370 bp, Arabidopsis thaliana nossen
gcaatatgtggactgggctagaagccaaggccgtcctgtatcttctgaagacgacttcttcacagactctcttgttaaagatttctacaagaaccatatcaaggctgtgctgaacagattcaatactttcacaaaatttcaatacaaagatgacccaacaattatggcttgggagctcatgaatgagcctcgttgcccctcagatccaaccggaagaaccattcaggcttggattactgaaatggctgctcatgtgaaatcactagatagcaaccacctgcttgaagctggcctcgaaggtttctacggccagtcctcacctcaaagcaagactctgaacccaccatgccagtttggaacagatttcatc

SEQ ID NO: 167817 - DNA, 374 bp, Arabidopsis thaliana nossen
gcgagagatgagtacggcgactgagataatggagagagacgcaatggctacggtggctccctacgctccggtcacctttcaccgccgtgctcgtgttgacatggatgatagacttcctaaaccttatgccaagagcactgcaagcacccgacagagagcatccgtatggaaccccaggccataagaattatggacttagtgttcttcagcaacatgtcgccttcttcgatttagatgataatggaattatctatccttgggagacctactctggactgcgaatgcttggtttcaatatcattgtatcgcttatcgcagccgctgtaatcaacttggcccttagctatgctactcttacgggatggtttccttcg

SEQ ID NO: 167818 - DNA, 348 bp, Arabidopsis thaliana nossen
ctaaaatggcatgcaactgcagtttagcgaatgttctatgggtagttttagtattcactctgttcgacgacccgatcaccgtggcgcggacaaaatattccggcggtggcattgttcacgttcggcgattccaacttcgacgccggaaacagaatgttcctcgcaggtacaagatttcctcaaaacttctggccttacggtaaatcccgagatgaccccagtggcaagttttcggatggcagaatcgtccctgactttatcgcaaaattcatggggattccacacgatttaccgccggcgtttgaacctggcgccaatgtctcacgaggagctagctttgctgtagac

SEQ ID NO: 167819 - DNA, 361 bp, Arabidopsis thaliana nossen
  unsure (1)..(361): unsure at all n locations
cccacgcgtccgatcttacggtgttgataacgacgagaagcttgtaggagcagtctaagaggcgaaagatagattggacgagcggctgagaaacccgcgaagaaggtttggtttgtttaaacaagtgtatgatagcaaaccaagtcctaattcaccttaaaatgcaccgaatcagctgaagcattttgctttaattccttgataatgacgcatgatgatgcactattatctttctaacatgtggtatcacatgagcatataattgtgagattgccttttgtcggacaattattttatccttttagcgctaaccgacttttctcgactaggcgcattttagcaggggtttcaatntaaagat

SEQ ID NO: 167820 - DNA, 402 bp, Arabidopsis thaliana nossen
cggaaccggtgcggagacccaggcgtgacgccactcgtgcagctcatgctctgagatcactgacactgtttctaccgttgctaaaatcggggcagtattactaagttggggagcacattcattaggactgtgatcttcgatgattgacgaatacagagaagcattagagtcgagagagctaatttatagatagcagtcaccattattgcatatgtacttaagtcctgtactcaaacttacatgtattgatttaagtatgtatgagtacatttcgttgcacatataagaaacgatgtcgttttgtgctgttgcaaatttcttctccaccaagattagagaaccatacttattatatatcagttcaagaagactcagttttaaagcttacgactttatttttga

SEQ ID NO: 167821 - DNA, 368 bp, Arabidopsis thaliana nossen
cggcgattttgagattgttctctgattggcttaatccgagagaatcaaggaattgaatggccagtgaatcatatgcgtgcgagcattgctactctttcctgtgctcgctgcgagaagcctgcacatcttcagtgtccgaaatgcatagacttaaagcttcctcgtgaacaagcctctttctgcactcaagaatgtttcaaggcagcttggagctcgcacaaatcagtacatgtgaaagctcagctgtcttcaatcggtgatcagaactctgatcttatttctcaaggctggctctattgcgtcaagaaaggccaggctagaacacctaagcttccacactttgattggactgggcctctaaagcaata

SEQ ID NO: 167822 - DNA, 362 bp, Arabidopsis thaliana nossen
ggatccgagtcaatggctccgagaaccggctccacatccaccggatccgccatgtcagaaacctccaccgtattctggatcgaccctctcttccacctcctccgcacaatccccttctccttcctccggccgccgcgtctccgcctcaagctcccttccttcacactcccatctacgatggccgtcttctccctgatcctcctcacctacttcctcggcatctccggattcatctacgacgtgatcgtctagcctacaggcatcggatccacccaagacccagtcacgggagcgatccggcccctcgtgttcatgtcgggtcgggtcaacgggcagtacataatcgaggggctctcgtcggg

SEQ ID NO: 167823 - DNA, 372 bp, Arabidopsis thaliana nossen
  unsure (1)..(372): unsure at all n locations
ttcccggggaagacccagggcgtacggaaacttatcatgaatccactggtttctgctgcttcggttatagctgctgggttggcgtggggtcttgcttctattggacccaaaaacngtcaaggtacagctgcggatcaagctgtcaaaggtatcgcgagacaacctgaggcagaacgaaaaataccaagtactttattgcttagtttggcttttatggaaactctaacaatatatggcctggatgtagcattagcgcttttatttgcgaatccttttgtttaagcccagaaatcacaaaattctggattttttttgtaggttctttaattctatcaagaacgaagtgctacaattattgaatgatacaacaat

SEQ ID NO: 167824 - DNA, 398 bp, Arabidopsis thaliana nossen
cggaactgccggggagacccaggcgtgacgccactacatgcagctcatgctctcagatcactgacactgcttctaccttcagctaaaagtggggcggaactactacgttgggttacaacttcattaggactctgatcttcaataagtgacgaatacacagaaacatttccaccaacagagctcagttatatatcgtatggaccactttctgctataggatgaagaagtggccttaaacaaacaacgtgtgcgatcaatgcatttaagctcggatcctgtgctgatagtatgggaggattgatctatataggactcggaaataccttagagaatgtatgttgctcaaggtttcaagggtctcttgagccagaagcagtctattgaatctgcacaaccat

SEQ ID NO: 167825 - DNA, 396 bp, Arabidopsis thaliana nossen
cggaaccgccgcggaaacccaggcgtgacgcgcacgcatgcgctaagcccgaacaacagcacaaacatgcttcatcgctacagcaaaacatgcatacacaacagtgatacactttactgatacatgactaactccatctacttacctacttcctcccacagatcccctgtactatactggctttctgggctcacctgtccagacgagaactttattatcaagtcccgagctcaacgtgctggttctactcacggcatcgctctcgctgttacagatacttcttcaagaagacttaatattgaaggtgaaacacacagttacgactttggtgtaagagctggaatgtacctcaatgctactcatgaaaagaggaagaactggcgtatggatgactat

SEQ ID NO: 167826 - DNA, 347 bp, Arabidopsis thaliana nossen
gcataatgctcttgtgagcagagagcggggggctagcacgaacgaacaacaagaatctttcttcgtcgaaccttgtctttgtcttcatctcaatcggatctgtccgttgccgtcgattctccccgccgttttcagaggtcatggacgtttcagctagaaagtctcagaaagcaggccgtgagaagttgaggagggagaaactgaatgagcattttgttgaacttggaaatgtgctcgatccagacagacccaagaatgacaaagctactattctcactgatactcttcagttgctgaaagagctcacttcagaagtcaacaaactcaaatctgagtacaccgctttg

SEQ ID NO: 167827 - DNA, 364 bp, Arabidopsis thaliana nossen
ggaactccatctttatcgaggccctttgacattttccatcagataaacatgctatggcctggtttgctgggaaagaacaagtatgagtttgcgaaaacctattgtgaagtcgggcttgtcagaggtatacaggggaaaattttccaggatttttcaaagggtactcgcttactggagttgaacgtgctgctaaaccaaacagtgatgataagaagactgaagcagcatgttttaacacagttacccccaaaacgtagacaaattgtaaccatacagctaaagaagtctgatataactttagcaatgactattctcagtgatgctaataaaccaaatgcggctataacagatgtcacagagaaca

SEQ ID NO: 167828 - DNA, 405 bp, Arabidopsis thaliana nossen
aggatccgcggcgggatccacgcgtccgcactcatcaccagcttcgcatcttcttctccggcttgatcttctctcggggctagatctccgacgatcggaatatcaaatccgatcgattaattctgtcaatcacacaaaaaccgaaaaccaaaaaaaaaccatggcgtttgagaagatcaaggtggcaaatcccatcgtcgagatggatggtgatgaaatgaccagggttatttggaagtctatcaaggataagcttattactccttttgtggagttggatatcaagtacttcgaccttggtcttcctcaccgtgatgctacggatgacaaagttactattgaaagtgctgaagctactaagaagtacaatgtggcgatcaagtgtgccaccatcactccagatga

SEQ ID NO: 167829 - DNA, 410 bp, Arabidopsis thaliana nossen
taccgccgcggaaccgccggggcgacccacgcgtgcgaaatcattcaacttttcaattcctctcgctgagatcgagaaccgacccacctgttcctctgatcaccggcggtcaccgccgctacacagatgttcgcttgacgacctcttctcgccgcgatctttgcctcttcctgtaatcgccgtcttttgctcaacaacgagatctgttttttccacgagtaaaggtaaggaggatgtcgactccagcaaggaagaggttgatgagggatttcaagaggttgcagcaagacccacctgcgggtatcagcggtgctccacacgacaacaatatcatgctctggaatgctgttatattcgggcctgatgacaccccatgggatggaggtactttcaaactctcactgcagttc

SEQ ID NO: 167830 - DNA, 371 bp, Arabidopsis thaliana nossen
cacagatccagctaaaccagaccttccacgtctacacgaatggcatttcagatctggacttgatcgctacatatggatcatcggcatgatatatgcatattttcatcccactgtagaaagatggatggagaaattggaggagtgtgatgctaagagaaggatgtcaatcaagacaagcataataggaatttcttcattcgctggttacctttggtatgaatacatctacaagctggacaaggttacgtacaacaaatatcatccctacacatcttggattccaataactgtctacatctgtctgcgaaattgcacccaacagctacggagtttttccctgacactctttgcgtggctgggcaagataactc

SEQ ID NO: 167831 - DNA, 374 bp, Arabidopsis thaliana nossen
aaaatcgtaaagttctaaagcggtttttcatcaattttcaagcaatcgagaaaaaagcaatggcgtcagacaaacaaaaggcggagagagccgaggttgcggcgaggctagcggctgaggacttgcatgacattaacaaatccggtggtgctgatgtcacaatgtataaggtgacggagagaacaactgaacatccaccggagcaagataggcccggtgtgataggatcagtgttcagggctgtccaaggaacgtatgagcatgcgagagacgctgtagttggaaaaacccacgaagcggctgagtctaccaaagaaggagctcagatagcttcagagaaagcggttggagcaaaggacgcaaccgtcgagaaa

SEQ ID NO: 167832 - DNA, 370 bp, Arabidopsis thaliana nossen
ggaattttctctgaaacgtcacgaacgtgtgaattgggttaaaaaattcatctcattggtccaaacgtgaaaccctagtttcgaatctctttgctgatttggtgagatctcaatttcggaaagaagatgacgaaggatttcgcagttccacctgtagttttcccctccggtggatcttcaggcggtgctaatgtccagcaacgaagattcccagcgacaccgtttcaaccgccgcgtccctcttcttccgcaatccctttcatgtcattcgacattggatccgcagccgcgtcttccgctacacctgccggaccattcggcgggacaatcgcttcctcttcttcttttggtggaggttcagcttcgtttg

SEQ ID NO: 167833 - DNA, 360 bp, Arabidopsis thaliana nossen
cttgtttccttccgactctctctctccctgaaagtttctgtctctctctgaaaatgaagctctctatgcgtttgatctcagctgttctcctcttgttcatgatattcgttgccacagggatgggtccagtcacagtggaggcacgcacgtgtgagtcgaaaagccataggttcaagggtccatgtgggagctcaacaaactgcggaaacgtgtgtcacaacgaaggttttggcggaggtaaatgcgcgggtttccgcgcgggtggttactgcaccagacatggtggatctatcgatcgattcttatacctcaaatctaccatatcacaggtgggggggggccctctatataaaatatccc

SEQ ID NO: 167834 - DNA, 370 bp, Arabidopsis thaliana nossen
ctcatctctctcttcaacaagatcataatggcggatactggtagaacccatcacgacataaccagccgggaccagtacccgatattgggccgagaccgagaccagtatccttacggacgatcagactaccagacgtcgggccaagactactccaagactaggcagattgctaaagctgctaccgcagtcaccgccggagggtcccttcttgtcctctccagtctcacccttgtcggaacagtcattgctttgactgttgccactcctctgcttgttatctttagcccaatcctcgtgccggctctcatcaccgtagcacttctcatcactggctttctctcctctggtgggtttggcattgcagctataa

SEQ ID NO: 167835 - DNA, 367 bp, Arabidopsis thaliana nossen
gccgtgatatctctagatttgatgaggcttaaaagggcgcattgaatggtgccgaagaaagataatacgacggtacttgagtattgacaagggtatttgtcgttcactttggattgtattagcatccacgacccgaaacagctactacccgcgaagagaagcacgcatccgacgatccagttctcgggtttcaatgcggggttatggttcgtcaatagatgggattctagtttgtgaaattttgtcaagggaacacctttgtacattgttagtaataaggctcctccaatgcatatcaaagtgcccatcaccatccccatacctgcttttgctttcatgtttagcttctctaccctacgcccaaaac

SEQ ID NO: 167836 - DNA, 409 bp, Arabidopsis thaliana nossen
gcggtaccgtgccggtaccgctgcggagtcccaggctgcgacgccactcgttcattttccatggacggaccttgacctctctgcttcccttcgtgcattttctctctctcactatcctctctctttctagtgtttgtttgatcctctgcgtactctgttcttcttctctcttcagataaaacaagtcctgcaaaattaagacctgatgtcttatcgattgctaagtgtggataaggaggaactggttacatcaccttgtttgaaagaacgtaactacttgggtctctctgattgttcctctgttgatagctcaactattcccaatgttgttgggaagagcaatctcaatttcaaagctactgaactgaggctaggtcttcctgagtctcaatctcctgagagagagact

SEQ ID NO: 167837 - DNA, 327 bp, Arabidopsis thaliana nossen
aaacaagaaaacatacacaaatagcagaacatggctaacaagctcatcctcgcatgcgcaactctcgccctctgatacctcctcaccaacgcttccatctaccgcaccgatggcagaattcgaagaagatgaccccagcaaccccgaatgtccaagacagagatgccagaaagagtttcagcactcacaacacctaacagcttgccagagatggatgagcaagcaaatgacgcaaggacgtggtggctggaccttccctatacgattagttcgacatcgagggccccccatcaggataccaactactccaacagtgctgcaacgagc

SEQ ID NO: 167838 - DNA, 367 bp, Arabidopsis thaliana nossen
cggacgcgtgggccttccctccttctctccttctcatatgcgacaaaaaagagcatctcacagactcactcttcaagtctctccctctctccgatcatcaatggcggcgactatggcgacatcaaccagatgcatgtccctgaacccatctcctcctaaacccctaaaccaaaccaaacccatctcctcctcaaaacacttcatcaccctcccaactccaccaaaacccaccgtctctctcgccgtcacaagcaccgccctagccggagccgtcttctccggcctcagctactccgaacccgctctcgccgctcaccagatctaccagctcgccgccggcgccgtgtcggaaggccgcgacaaccgc

SEQ ID NO: 167839 - DNA, 368 bp, Arabidopsis thaliana nossen
catctctaggccttcgagaactcagcagcttaagaatcctaaactgaggacgaagccttctgttgatgatcttgatggtgatgatgagaagctagatgcaggaaacgggaaagatgaagaagaaggtgagaggcggtcgtccaagaagagcaagagaaagcagaggtcgaaatctgagtctggcagtgacagtgaagcttctgtgtttgaaacagatagtagtgacggctctgaatcgtctggagagagtgattcggagtacagttcatcgtctgagtcggaggaggaaaggaggaggaggaggagaaggaataagaggaagagcaagaagaagccaaagcagaggaaggaaaggcggagaagaaaat

SEQ ID NO: 167840 - DNA, 364 bp, Arabidopsis thaliana nossen
catcggcgagctcttcttcggcgtagcctttcttcccccgggtttgaaagaagaagatggggctgtctttcggtaagctgttcagcaagctgtttgcgaagaaagagatgcgtatcctcatggttggtctcgatgctgctggtaagaccaccatcctgtacaagctcaagcttggcgagatcgtcaccaccattccaaccattggtttcaatgtggagactgtggaatacaagaacatcagcttcactgtctgggatgtcgggggtcaggacaagattcgtccattgtggaggcactacttccagaacacgcaagggctgatcttcgtggtggacagcaacgaccgtgaccgtgttgtggaagc

SEQ ID NO: 167841 - DNA, 372 bp, Arabidopsis thaliana nossen
ataataacaaagtggtcaactctgatgcacccaaaaatgcagcagaagagtggcctgtggctaagcagatccactctttctaccttgttaaataccggtcttacgctgaccccaaaattaaagctaagcttgatctagctgataaagagcttgaaaagttgaacaaagctcggactggagttttggacaagttgagagctaagagggccgagagatcagagttatttgatctgctggacccggtgaagtcagagcgtaagggattcaacacaatgtttgatgagaaaagaaaggaaatggaaccattgcagcaagcactgggaaagataaggagcaatgatggtgggagtgctcgtggccctgctatctgtt

SEQ ID NO: 167842 - DNA, 373 bp, Arabidopsis thaliana nossen
cttcttcaatgtagtttcatgttcctagaaattttcgttttcttctctttgaatcatctatcgttttctaagaaattgagttcactcttcggcgatggagcgaaactcgtcggacgacgaagaagaccaccagcatttgattccccaaaacgacactcgaatccgtcaccgggaggattcagtttcctccaacgccaccacaatcggcgggaatcagagatcggcgtttcagatcgacgacattttacatcgagtccaacaccgtgggaagatctcgctcaacaagcgttacgtcattgtcttcgtttctctaattatctcaatcggtcttctcttcttactcactgatcctcgtgaactatttgcggcgaat

SEQ ID NO: 167843 - DNA, 374 bp, Arabidopsis thaliana nossen
ctcggacaacttgggtgccatcgttgacttaaaaatcttgaagcacttggtccagaacaagaacgaatactgtatggaggttacacccaaaaccttagctgatgtaaagggaggaactctcatttcttatgaaggcaaagtccagctcttggagattgctcaggttcctgatgaacatgtcaatgagttcaaatcaattgagaagttcaagatattcaacacaaacaacttatgggtgaacttgaaggccatcaaaaagcttgtggaagctgacgcgcttaaaatggagatcattcctaacccaaaggaagtcgatggagtgaaagttcttcaactggaaactgcagctggtgctgcaataaggttctttgaca

SEQ ID NO: 167844 - DNA, 370 bp, Arabidopsis thaliana nossen
cggacgcgtgggctcaaaaccaaaatcactaaagaggagaagattgctgagagtttgataaaacattccaaaatcaatggctgataggatcaaaggtccatggagtcctgaagaagacgagcagcttcgtaggcttgttgttaaatacggtccaagaaactggacagtgattagcaaatctattcccggtagatcgggaaaatcgtgtcgtttacggtggtgcaaccagctttcgccgcaagttgagcatcggccgttttcggctgaggaagacgagacgatcgcacgtgctcacgctcagttcggtaataaatgggcgacgattgctcgtcttctcaacggtcgtacggacaacgccgtgaagaatcac

SEQ ID NO: 167845 - DNA, 380 bp, Arabidopsis thaliana nossen
tatcctctaacattttcgtcttcctcatgaccgtatccgctgtgactccagcagtgcccacctaaaaacattatggtctttttatcagtttcagcttcaaaactaaaacctataaggttgcagattttttttacccttgtatagaaatcaggtggagaatatctatcaaagtgtgtgtgaggaaaatcgtagtaccagccttctcccatgtagatagttacctataaagatatgtataagtagtaaagtcaaaaatattataagttcatgaggttttacacaaaggatatatatctgacccttagtgttgtctttacaggtaatgtagcttccggatcaaacacagggtcagacttcaacagaatatctggtttcttgat

SEQ ID NO: 167846 - DNA, 365 bp, Arabidopsis thaliana nossen
ctcttctttactcgtttctctctctctcttttcttttcttttcttcaagcgcttctttaatggcggctgttcaatgtctcactttcctcttcttgtttcttctccaaaacgcgacgtcagcttcacctctccctctcttccggcggccgatccaaagcaaccacagcaacttcgtgaagcatcctcgccgaagtcaggtggttttcccggtgaatcatagtagttgtgatctgttcgccggcgagtgggtgcgggatgagacttacccactttaccggtctaaagaatgcggccgaggaatcatagatccgggattcgactgccagacttacggcagacctgactccgactatctcaagttccgg

SEQ ID NO: 167847 - DNA, 374 bp, Arabidopsis thaliana nossen
agaaaaatgggtcgagtctcatctattatctctttctctttgacactcttgatcctcttcaatggctacactgcccaacagtggcccaacgagtgccagctcgatcaactcaatgcgctcgaaccatcccaaatcatcaagagcgagggtggtcgcatcgaggtctgggaccaccatgcaccccagctccgttgctccggctttgcctttgagcgtttcgtcattgagcctcagggtcttttcttgcccactttcttgaacgccggcaaactcacgtttgttgttcacggaaggggtctaatgggaagagttattccgggatgcgccgagacgttcatggagtcaccggtatttggagaaagtcaaggtcaggg

SEQ ID NO: 167848 - DNA, 394 bp, Arabidopsis thaliana nossen
ggcccgggacgaccgacgcgtccggggacaggtaaaaaactacagaaccagaaagacaacagaggaaacatagtccgagcagacggtccgctacatttcatcagctccccgtcacgtcaatggcaacaagatgggaatggtaatggcatcgaagagacgtattgcacggcgaggctgcacgagaacatagacgatccagaacgtagcgactttttcagcacacgagccggcagaatcagcactcttaacagcctcaatctccctgtcctacgtttagtaaggcttaacgccattagaggcgttctctacagcggaggaatgatgttgccgcattggaccgcaaacgcacacacggtgctatacgttacaggcggtcaagccatgatacaagtag

SEQ ID NO: 167849 - DNA, 366 bp, Arabidopsis thaliana nossen
acgacatgagaaagatcccaacactacttatcggttggtgattgtatcggtattactaggaggtttaaacatggaagggaaaagattggatcttaaatttcatcactctacatcatcacaatctgtggaatctgctgcattggatttggataaaaatggttataatcatattaaattggcgtctagattagcactgcagccgagctcatgaggcggacaacaatctgagactcgggcttctactgctgcttactagtcttggcctactcaaagcatattgaatgactcagcagaagacagagcaaactattttgcaaatcttaagaagagcgtgaagactgcaacgcttgatgatgtacctactgg

SEQ ID NO: 167850 - DNA, 374 bp, Arabidopsis thaliana nossen
caagatgatacggattaatcctttattcttgcgccaaagatcttcctatgtccaaaggaactggagttacatctcttttccatttccattcaagagttcttatgtgtttccacgcccctttaagaccccgaaaaattaacaaattcccttttcttaggaacacgtgcgagataaaaaaaaaaagagagaatggtaaccccacgattaactatttcatttatgaatttcatagtaatagaaatacatgtcctaccgaaacagaatttgtaacttgctatcctataatcttgcctagcaggcaaagatttcactccgcgaaaaagatgattcattcggatcaacatgaaagcccaactacattgcattgccagaat

SEQ ID NO: 167851 - DNA, 371 bp, Arabidopsis thaliana nossen
ctcgattccttgagaataggattcatggagagagtggttattccttcacgtcatccacctcctagatttctacttgattttgtgaagaaacaaattaaaaacctaagtatttcaagcctatataaaaaggtcatgcttcaagtcttggagagacacagtgaagtctttgatagttacacacaaatagcaatagcaaaagctccgacaatctctttctgttaaaagtaagtctcgagagtatcgtagtaactattttcgttagagttgagtttcgagtgatgcaaaatcagtttatagaggttgtatcctgagatccttaaatcacacagaaactgttacactacggggtgatttaaaaggttaagggaaga

SEQ ID NO: 167852 - DNA, 352 bp, Arabidopsis thaliana nossen
ctcatttctctattcaacaagatcataatggtggatactgctggaaccgagtaacgacataaccagccgcgaccagagcccgatattgggccgagaccgagaccagtatccttacggacgatcagactaccagacgtcgggccaagactactccaagactaggcagatagctaaagctgttaccgcagtcaccgccggagggtccgtacttgtactgtccagtctaacacttgcaggaacagctattgctccgactgttgccactgctctgcttgtgatgtgtagcccaatacttgtgccggttgtcatcaccgtagcaattataatcactggctttgtattctctggtggg

SEQ ID NO: 167853 - DNA, 364 bp, Arabidopsis thaliana nossen
tgaaagccggaagctgttaacagtaaaccttctagggctcatcgtcgttgttacctgaatctgcaaagatgttctctgctcagaacaagatccacaaggataagggtgtggcaccaactgagtttgaggagcgagtcgctcaggctttctttgatttggaaaacaccaaccaggagctgaaaagtgacttgaaagatctctacattaaccaagctgtttcaatggatattgctggcaaccgcaaggctgttgtgatctacgttccgttcagacttaggaaagcattccgcaagattcattcccgtcttgtcagagagctcgagaagaagttcagtggtaacgatgttatctttgttgccaccag

SEQ ID NO: 167854 - DNA, 369 bp, Arabidopsis thaliana nossen
ctactcccatcatctcctccagcttcttcttcttcgtctctgaaactagtttgattcagccatggctaatgcggcgtcaggtatggcagtccatgatgactgcaagctcaagtttctcgaactcaaggctaaaaggactttccgtttcatcgtttacaagatcgaggagcagcagaaacaagtggttgttgagaagctcggcgagcctggtcaatcccatgatgactttgcagcttctcttcctgctgatgaatgccgttacgccgttttcgatttcgatttcgtcactgctgagagttgccagaagagcaagatctttttcgtcgcatggtctccggacacagccagagtgagaagcaagatgatcta

SEQ ID NO: 167855 - DNA, 365 bp, Arabidopsis thaliana nossen
ctcaaaaaacgaaaacgatgggttccatcgaagaagaagcaagacctctcatcgaagaaggtttaattttacaggaagtgaaattgtatgctgaagatggttcagtggactttaatggaaacccaccattgaaggagaaaacaggaaactggaaagcttgtccttttattcttggtaatgaatgttgtgagaggctagcttactatggtattgctgggaatttaatcacttacctcaccactaagcttcaccaaggaaatgtttctgctgctacaaacgttaccacatggcaagggacttgttatctcactcctctcattggagctgttctggctgatgcttactggggacgttactggaccatc

SEQ ID NO: 167856 - DNA, 366 bp, Arabidopsis thaliana nossen
aaatagacctcgtcgtccgtcactgatctcccaactcatctctgcctggtcttctcggcgagacttttgggatcaatcatggatgaagagtacgaggttattgttctcggcaccggtctcaaggagtgtatcctcagcggtctcctctccgtcgatggcgtcaaggtgcttcacatggacaggaatgattactatggtggagaatctacatctcttaacctcaaccagctttggaagaagttcacgggagaagacaaggctcctgaacatttaggtgctagcagggactacaacgttgacatgatgcctaagtttatgatgggaaatggcaagcttgtgcgtacccttattcacacagacgttaca

SEQ ID NO: 167857 - DNA, 366 bp, Arabidopsis thaliana nossen
gtatatttcaaacgcctacaggctctgtcaaagaatcctgagttggaactgcgtctgagattcatggttcagaatatcatcgacatgcgctccaatggctgggttccaaggcgggaagagatgaaagcaagaactataaccgaaatacatactgaggcagagaagaatcttggtctccgaccaggtgccactgcaaatatgagaaggggtatggtttctagtggtgggcctgtgagccctggccctgtctaccctggtgggcgacctggtgcgggtggcttgatgcctggtatgcctgggacgcgaaggatgcctgggatgcccggagtggacaatgataactgggaggtaccccggacaagatca

SEQ ID NO: 167858 - DNA, 351 bp, Arabidopsis thaliana nossen
ctgagtcttacgaacatagcaaaatccaaatcaaattcctgaagaaaccggtttcgctgtcgtcttcggtttcagatcaacaagaaatggcaacagcaacatcagcttctctgttttcaactggttcttcatcttactccaaagctagctccataccacattcaagactccaatctgtgaaattcaactcagtccctagcttcaccggtctcaaatcaacctctctcatctccggatctgattcctcttccttagccaagactctacgcggttccgtaacgaaagcacaaacatctgacaagaagccttacggattcaaaatcaacgcttcatacaaagtagctgttcttg

SEQ ID NO: 167859 - DNA, 368 bp, Arabidopsis thaliana nossen
atccatctggtcttctttctcctcatactatcactcgcaggtctgttacaactgacgatgtttcactcacaatcactcattgcggagtgtgttacgctgatgttatctggagtagaaaccaacatggagactccaagtaccctttggttcctgggcatgagattgctggaatagtgactaaggttgggcctaatgttcaacgattcaaagttggagaccatgttggtgttggaacgtatgttaactcctgcagggagtgtgaatattgtaatgaaagacaagaagttaattgtgcgaaaggagtttttactttcaatggcattgatcatgatggctctgttactaaaggaggctactctagtcacatt

SEQ ID NO: 167860 - DNA, 371 bp, Arabidopsis thaliana nossen
tcatctctctcttcaacaagatcataatggcggatactgctagaacccatcacgacataaccagccgtgaccagtacccgatattgggccgagaccgagaccagtatccttacggacgatcagactaccagacgtcgggccaagactactccaagactaggcagattgctaaagctgctaccgcagtcaccgccggagggtcccttcttgtcctctccagtctcacccttgtcggaacagtcattgctttgactgttgccactcctctgcttgttatctttagcccaatcctcgtgccggctctcatcaccgtagcacttctcatcactggctttctctcctctggtgggtttggcattgcagctataacc

SEQ ID NO: 167861 - DNA, 412 bp, Arabidopsis thaliana nossen
cggtgcaggaatccgccggcggcgattccacggcgtgcgctatgtcttcaacaagatcataatggcggatactgctagaacccatcacgacataaccagccgtgaccagtacccgatattgggccgagaccgagaccagtatccttacggacgatcagactaccagacgtcgggccaagactactccaagactaggcagattgctaaagctgctaccgcagtcaccgccggagggtcccttcttgtcctctccagtctcacccttgtcggaacagtcattgctttgactgttgccactcctctgcttgttatctttagcccaatcctcgtgccggctctcatcaccgtagcacttctcatcactggctttctctcctctggtgggtttggcattgcagctataaccgtcttc

SEQ ID NO: 167862 - DNA, 366 bp, Arabidopsis thaliana nossen
cgtggctggatgcgaggaggcgaaacaggagatcatggagtttgtgcattttctcaaaaaccctaaaaagtacgaagacttgggcgccaagatacctaaaggcgctcttttagtcggtcctcccggaacggggaagactctcttagccaaagctacagccggagagtcaggcgtcccgtttctctccatctcaggctcagacttcatggagatgttcgttggtgttggaccttcgagggtgaggaacttgttccaagaagctagacaggccgcgccgagcattatctttatagacgagatcgacgccattggtcgagcgagaggacgcgggggggtaggtgggaacgatgagagggagagcacttt

SEQ ID NO: 167863 - DNA, 368 bp, Arabidopsis thaliana nossen
gaagtcttgtctagctacttttgctctcgcagtgttagtaacacaaggaagcatttttagtttgtgtttggcctcctctgcttctacaaactctgttcctaattggtttcatcattggccgccgtttaaatggggaccaaaatttccatattctccacctaaaccgccgccaatcgagaaatatcctccaccggtgcagtatccaccaccgatcaagaagtatccaccgccaccatacgagcatccaccggtgaagtatccaccaccgatcaagacttaccctcatccgccggtgaagtatcctccaccagaacagtatccaccgccgattaagaagtatcctccaccagaacagtatccaccgccga

SEQ ID NO: 167864 - DNA, 373 bp, Arabidopsis thaliana nossen
cccacgcgtccgaataaacatacacacacatatagttgttcaaaaaaaaaaaaacatacacacatagcaaatggcgaacaagctcttcctagtctccgcaactctcgccttcttcttcttactcaccaacgcctccatctaccgcacggtcgtcgagttcgacgaagatagccaaataggcccatttggcccacaacaatgtcagaaggagtttgaacaaacacaacatctaagagcatgccagcaatggatccacatgcaagcaacgcaacccccttctggtccccgggccctcgagtttgaagacgacattgagaaccctcagggcccacagctgaaagtaacgctattccagcaatgctgcaatgagctt

SEQ ID NO: 167865 - DNA, 369 bp, Arabidopsis thaliana nossen
tccttattgtcattctgccagacaataatggatcattatatggtgatctgaagcgcatctgtgagaccgaactcggcattgtgtctcagtgctgcctgactaagcatgtctttaagatgagcaagcagtatatggccaatgtggctttgaaaattaatgtcaaagttggaggaaggaatacagtgcttgttgatgccttgtcaaggcgaattcctctggtcagtgatcgccctaccataatctttggtgctgatgtaacccatcctcatcctggagaggattcaagcccgtctattgctgctgttgtcgcatcccaggactggcctgaagttaccaagtatgctggactggtgtgtgctcaggcgcata

SEQ ID NO: 167866 - DNA, 360 bp, Arabidopsis thaliana nossen
aagcaaagcatctctctcattttcccacctgattcgtcaactgcctcttgctttgtctgtattacatacacaaagactgtgatctcgatctctgtatatcccatcaatggcggttcacaccgtgaaatattggctaacggagcatcctaacatcgttaacttccgttggagtccaactcaatcatacgcctccacgtggtttttcctcttcgccgccgtttcatcatacgtcatcgccgccgtctctctccacatcctcctcgcagtcacccgacgccgacgcggcctctccctcggccctatccccgctctgcacagcttagccatggctctgatctccgccgtcatattcgtcgggat

SEQ ID NO: 167867 - DNA, 374 bp, Arabidopsis thaliana nossen
aaacggtatgcactcgctcatactctatcaaataggacattatatatattatatatatatatatatattgatatgcttacagagtttacagtaacaattgtgaggtcagttattgtaatgttccttttttaccaagaattggatacatttctatttattacaaggagaatgtatataaacaaagttttgaaactgagggagtcgctaagatcttacggttaaacgtgatataacctctaacatgttcttatctcggcgatggtttaggcattccttttagttgttttatagagtttgtggtttatttattgggtttggcgagaatatgaagaaaactcggaagaaagcatggttaactgtaagcaataaactag

SEQ ID NO: 167868 - DNA, 399 bp, Arabidopsis thaliana nossen
ggggcgacccaggcgtccgaaacaaggttaaacacatacacaaatggcgaacacgctcttcctcgtctgggcaactcgggcctttttcttccttctgaccaatgcctccgcctacaggacggtcgcggcagtcgacttatattatttactaaccacacagccggcccatttaggattgcaaagtgtatgaaggagtatcagcaagcacaacacctaagacctcgccaacaatggctgcagcatcaaccaacgcactccggtagtggtcctagcttggccctcgccggtgagtttgattttgaagactacatggagaacccccagggctcacagcagacgccgacactactccagcagtgctgcaacgagctccaccaggaagagccactttgcgtttgt

SEQ ID NO: 167869 - DNA, 419 bp, Arabidopsis thaliana nossen
ggacgcctgcggtaccgctgcggcgacccacgcgtgcgcacgcgttcaacactgagagccatgctgcgcgacttgactggttcttttttcaggcttctgtaatctatctgtgtgaccgcacttaatatcccgactcacagctgtctgactaagcatgtctttaagattcaatcatgaaccttcttctcttctagaccccacaaagttgcccccttttatttgatcggcgacggagaagcctaagtctgatcccggaatgtctgtctccgagctcaaagaacgccacgccgtcgctacggagaccgttaataacctccgtgaccagcttagacagagacgcctccagctcctcgataccgatgtggcgaggtattcagcggcgcaaggacgtactcgggtgagcttcggagcaacggatc

SEQ ID NO: 167870 - DNA, 360 bp, Arabidopsis thaliana nossen
gccggagggtcccttcttgtcctctccagccgcacccttgggggaacaggcattgctttgactgttgggactcctctgcttgttatctttaacccaaaccacgcgccggctcttatcaccgtagcacttctcatcactggctttctctcctctggtgggtttggcattgcagctataaccgtcttctcctggatctataagtacgcaacgggagagcacccacaggggtcagataagttggacagtgcaaggatgaagctgggaaccaaagctcaggatattaaagacagagctcaatactacggacagcaacatacaggtggtgagcatgaccgtgaccgtacccgtggaacccatcac

SEQ ID NO: 167871 - DNA, 361 bp, Arabidopsis thaliana nossen
  unsure (1)..(361): unsure at all n locations
gtttaaagaccttaaagagttgtaatggtttatgtctgtggagaatcctgaagggttatgaagtgagagagagataaatagaaagaaaagaaaaaaagagaagagagaggttagagacatggtgggctcaggaggagatagaagcaaagatgctgtagggatgatggcacttcacgaagcacttaggagcgtatgtcttaactcagactggatttactctgttttctggaccattcgtccccgaccgagggtccgtggtggtaatggatgcaagattggtgatgaaagtggcagcttgatgttgatgtgggaagatgggttttgtggaggaggnggagaatgaagatctttgtctggaacc

SEQ ID NO: 167872 - DNA, 364 bp, Arabidopsis thaliana nossen
acgataatgggaagcgcaccagctcagattccgactagctggggccatgggcttagggctggttttcggtgccaactcgtcaagacctatgaccagtttagagacgctggttgcgagaattgtcctttcttcaagatggaagaggatcatgagcgtatcgtggaggtcactacccctaatttcaatggtataatctctgtgatggatccaagtagaagctgggcggctaggtggttaagaatcgggaagtttgctcctggttgctacacacttgctgtctcagagccactccctgaggaaatgcagcacttattccaagaggagcgtgtacaatatgttctggctaaacgcatgtgaagaaatt

SEQ ID NO: 167873 - DNA, 367 bp, Arabidopsis thaliana nossen
atcaaaattatagaacaataaggaattttaacttatcatggggaaagacaccattgctgatataataacctctatacgaaatgctgacatgaatagaaaaggaacggttcggataggatcgactaacatcacggaaagtattgttaaaatccttttacgagagggttttatcgaaaacgtaaggaaacatcgcgaaaacaaccaatattttttgattttaaccctaagacatagacgaaataagaaagaatcctacaaaacgattttaaatttaaagagaataagtcgaccgggtctacgaatctattctaactctcaacgaattccacgaattttaagcggaataagaattggaatcctttccact

SEQ ID NO: 167874 - DNA, 373 bp, Arabidopsis thaliana nossen
cggacgcgtgggttgcagtgtttcatcgagtcaaagtacagagacggtggacagacaaccgaatccgaggtagcgggtttgctcatcgctgctctctttgcaggacagcagacgagctctatcacttccacgtggaccggtgcttatctgatgaaatacaaagagtactcgtccgctgccttggatgagcagaagaagctgattgagaaacatggagacaagattgatcacgacatcatatcctcggagatgaatgttctctaccgttgcattaaggaagcgttgaggcttcaccctccgttgatcatgctaatgagagcctcccacagtgatttcaacgtaacaaccagggatgggaaaacgtatgacatcc

SEQ ID NO: 167875 - DNA, 376 bp, Arabidopsis thaliana nossen
cagcaaacaaaacaaagatttattgaaacctgtggcgatataacaataagtaaatcatccaagctaaagtagaaactaacctgaattgctgcgtaattgaagtgaccaagatcagcaaacatggcctcagcacctaaaacaaagactcaacgagttagattactgacattatttatggcgacattaacaatatcgatttcttatatatctcaccagttatgcacaacaagatcccgcctagagacatccatccgcttactctcgtctttctcaagaacatgaacatgtatgtaggagaaagagctttgtatatatgaggattccactgtattatattgtacaagccaataccacttatacagagcagccaagtgag

SEQ ID NO: 167876 - DNA, 315 bp, Arabidopsis thaliana nossen
agagtacaggaccaacaaaattacattctctttgcctttgcctatcgctgaattctgcttttattaccagagaaagcaagaatatataagaatcagaaattgggtgaagaagaatggtcttgattactaagatgtctctctctttctacatcattcatcttctgattttctccttgatttccacttgtgttgtctccaaccaggccgaggataatcttcttcaaggcctaaacagctaccgaactgctcaaagagttcctccatttgccaagaatgagaaggctgattgtgtggctgatgagatcgccgacaagc

SEQ ID NO: 167877 - DNA, 365 bp, Arabidopsis thaliana nossen
  unsure (1)..(365): unsure at all n locations
gaccaagtccctaggatgttccaaatagcagggagcaagacgcaagaacaacaacaacgagttgacttggccatcatggaaaaacgctttcagcggtttcgacccgaacataatcgcagaagcattcaagatcgacatcgagacagctaagaaactacagaaccagaaagacaacagaggaaacatagtccgagcaaacggtccgctacatttcatcagctccccgtcacgtcaatggcaacaagatgggaatggtaatggcatcgaagagacgtattgcacggcgaggctgcacgagaacatagacgatccagaacgtagcgactntttcagcacacgagccggcagaatcagcactcttaaca

SEQ ID NO: 167878 - DNA, 380 bp, Arabidopsis thaliana nossen
gccggagatggccgcaacatccgccgctgctgcagctgcttcttccatcatgggtactcgggtggctcccggtatccatcccggttcaggtcggttcacagccgtgttcggtttcggaaagaagaaggcagctcccaaaaagagtgccaaaaagacggtgactacggaccggcctctttggtacccaggcgccatttctcctgactggcttgatggttccttggttggagattacggttttgatcccttcggtttaggcaaaccggccgagtatcttcaattcgatatcgattcactagaccagaatctggctaagaacttggccggagacgtgatcggaacccgtacggaagctgccgacgccaaatcgacgccgtttc

SEQ ID NO: 167879 - DNA, 363 bp, Arabidopsis thaliana nossen
  unsure (1)..(363): unsure at all n locations
atacgttcaaaacaaaatatcgatgcatcagcacctncnaccattgtgcatacgcgaaatatttcgggctaaacaaccccccacacttcatttcacagtcatatacgggttcagaaagaagaacgcagctcccaaaaagagtaccaaaaagactgtgactacggacccgcctctttggcacccagtccccacctctccacaccggcttgatggttcctcggttggagattacggaaaacatcccttcggtttaagcaaaccggccgagtatctccaatacgaaatctattcactataccacaacctggctgagaacttagccggagacgtgatcggaacccccacggaagctgccgacgccaa

SEQ ID NO: 167880 - DNA, 309 bp, Arabidopsis thaliana nossen
cggacattatttcccagtaaccatgcaaaggtttttcgtttgaaggctctgacttgtgataatcaataaagcaatcatatgttcaaggaactgtcaacttctgaatggactcatcacttccactctattcaagtcgatgtctcggaaatggatgccatcatgatagagattgatgcactaaagccgaaagtgaagaacatacttatgtctttccaaggcaattgactcgacaaagaagagaatccttatgatatatatgctgataagccttggccttgcatgtcaatttgaggaagagatctatgagac

SEQ ID NO: 167881 - DNA, 359 bp, Arabidopsis thaliana nossen
agcctctctgctcgttttgcgtttccgagcaacaatgtcggtaactttgcacacgaacctgggtgacatcaagtgcgaaatcttctgtgacgaggttcccaagagtgctgagaactttttggcgttgtgtgctagtggctactacgatggtactatctttcatagaaatatcaaagggttcatgattcaaggaggagaccccaaggggaccggaaaaggaggaactagcatctggggcaagaaattcaatgatgagatccgagactcccttaagcacaatgcaagagggatgctgtcaatggcaaacagcggtccaaacaccaacggaagccagttcttcataacctatgcaaaacaac

SEQ ID NO: 167882 - DNA, 368 bp, Arabidopsis thaliana nossen
  unsure (1)..(368): unsure at all n locations
cggacgcgtgggcggacgcgtgggaagaaatttgccgagggttccaatcgcaatcttagagacaatgtcgacggtcggagaacttgcttgcagctacgctgttatgatccttgaggacgagggcatttccatcacttctgacaagattgcgactttggtcaaagccgctggtgtcgagattgagtcatactggccaatgctattcgccaagatggccgagaagcgtaacgttaccgacctcatcatgaatgtcngtgctggtggagggtgaggtggtgcacctgttgctgctgccgcccccgctgctggtggaggagccgcagctgctgcccctgccaaggaggagaagaaagacgagccagcagaag

SEQ ID NO: 167883 - DNA, 381 bp, Arabidopsis thaliana nossen
aaacaaaaagaaaatggttaagctcaacaatcttctcgttgcaaccttcggggttctcctcgtccttaacggctgccttgcgaggcaatcacttggggttcctcctcagctacagaacgagtgtaacctcgacaacctagatgttctccaagccaccgaaactatcaagagtgaagccggtcagatcgagtactgggaccacaaccaccctcagttccgatgtgttggtgtttccgttgctcgttatgtaattgaacaaggcggtctttacttgcccaccttcttcacttcctcaaaaattttctacgtcgttcaaggaacggttatcaacggaagagtggtccctggatgtgccgagaccttcatggactcgcagccgat

SEQ ID NO: 167884 - DNA, 389 bp, Arabidopsis thaliana nossen
caccccaaaaccgatccaaattccgagaaagacaaccaaattttcctttgcctctgcaaaaatgtttatggagagcttcaaagttgagagcccgaacgtgaagtacacagagaatgagattcactctgtgtacgattacgagacgacggaggttgttcatgagaagaccgtcaatggcacttaccaatggattgtgaagccaaagactgtcaaatacgatttcaaaaccgatattcgtgtccccaaattaggggttatgcttgtgggtttgggaggaaacaatggatcaactctcaccgcttgcgtgattgcgaacaaagaaagaatctcgtgggcaacgaaggacaaagtgccacaagggaattactttcggtcactaactcaagctt

SEQ ID NO: 167885 - DNA, 384 bp, Arabidopsis thaliana nossen
cgaagatgcgtgagattcttcatattcaaggaggtcaatgcggaaaccaaatcggttccaagttttgggaagtggttaatctcgagcacgggattgatcagacgggacggtatgtaggagattccgagttacagcttgagagggttaatgtatactacaacgaggcgagttgtggaaggtacgttcctcgcgctgttctcatggatttggagcctggaaccatggacagtgtcagatctggtccgtacggtcagatctttcgaccggataacttcgtctttggtcagtccggtgctgggaataactgggctaaaggtcactacactgaaggtgctgagcttattgattcggtccttgatgttgttcgcaaagaggctgagaact

SEQ ID NO: 167886 - DNA, 365 bp, Arabidopsis thaliana nossen
ctctcacttaaattaggattatatatggctacatctgctagaagagcatatggattcgggagagctgacgaggcgactcacccggactccattagagccactttggctgagtttctttccacgttcgtcttcgtctttgctggagaaggctcaatcctcgctctagacaagttgtattgggacacggcggctcacacggggacaaacacgcctggagggttagttctggtggcgttagctcatgcattggccttgttcgcggctgtttctgcagccatcaatgtctctggtggccacgtcaaccccgctgtcacttttgctgctctaatcggaggcaggatcttggtcattcgagctatctacta

SEQ ID NO: 167887 - DNA, 347 bp, Arabidopsis thaliana nossen
  unsure (1)..(347): unsure at all n locations
gtgagtctctcaaagaaaccaaaggcagagaaaagagataacacacacagaaaaaaatggcatcaacctcactcctcaaggcttctccggtgttggacaaatccgaatgggtcaagggacaaagcgttctcttccgtcagccttcttccgcttctgtcgtccttcgcaaccgtgccaactgcctcaccgtccgtgccgcttgctcctacgccgatgagcttggtaagacagcgaaaactattgccgtctcccggacgtggaatcttggcaatggacgagtcgaacgcgacttgcgggaaacgtttggattcgatagggctagagaacactgaggcanatcgtcaagc

SEQ ID NO: 167888 - DNA, 378 bp, Arabidopsis thaliana nossen
cccacgcgtccgtgaaaatgaaccaagtaactcgtgtttcatgtgttatcataagggcaattttcctaggcctcttaaagttttaataaattaagggcaatatttatatactttcagatttttttttttaatagttaaatagaattcaacaggacccggcttaatgtgtaacgggcctcattgtgtaatccaaggtaatcaacgtagttgcatgactatccaaaattaaagtaatgcttcatgtgttctacgttaaaggcctcgtaaaacttaataaatttagggccacatttctatataaattagatttcttcagttaattaatttccttttacttcttaatcactatattagattgcatcattaaatctttggtta

SEQ ID NO: 167889 - DNA, 287 bp, Arabidopsis thaliana nossen
ttttcgtttaacagtttttttttcttcttgttaaaagtacaacataacaggagagcccaaagaaattgaaatctcaaacccaaattacaacgccttttattgtatcaaatgaaacatgtaactaaaggtcgcacatatgcagattaacctcccattaccaaatagatcatgaaactaacaaacttctcaacatcgaccttgttctacccattgctcttgagctttttcttgactgtggaaaaactccaccatctgactacaaatgtcccgcttaatctatgtagaac

SEQ ID NO: 167890 - DNA, 384 bp, Arabidopsis thaliana nossen
  unsure (1)..(384): unsure at all n locations
taatgattgctgtaataattaataatgaacaggggaccttcccacacggtggccattggtctttccttgaactttaacctccaacatttccgtttttacaccaatcctgctgaacaaaaatggatggttaaagatttgttgttggtgccagttcatgcaactgaatcgatcatttacttgtgcaattcgaaattctcgctgccttgtgacattttgagaaactgctatgaagcttttgctttgtattcgtttggaagctacttggaggcatgtctaggtggtgaaagaagagttgttgaattaccttgaaaatgaatcacagaaacccttgttagaagaaagagcaaatgagagtnaaaagaagaagaagaagaattcattttg

SEQ ID NO: 167891 - DNA, 285 bp, Arabidopsis thaliana nossen
tttgctgctggttcccggcaccaatcgttctctccttccacgacaaggcctgacgctcacacaacacagggcgagatgtgcgacatctgcaattcacacgcgagacgatacacagccacgagggcgaggttgacggttctttgagccaagcatctttcaagactccaagggactgggactccccgctctgatcaagggccagcactgaagaaactcttacacctgctgcatgcacgatcggtgcatctctctccaacgatcaatcggactcttacggactctctg

SEQ ID NO: 167892 - DNA, 305 bp, Arabidopsis thaliana nossen
cttcggtttttttgtggaaaaagactcataatcggagattgtttgtttttggtttgctctgtaaattggagaagttttgttagagatcaaatggctgggatttgttgcggtgtagttggagagactgaaccggcggcaccggttgattcaacttctcgagcttctcttagaccggggttagatctactttcgtcgatcaaaattgttgctgactccgccgttgctcctccgcttgaaaactgccgtaaacggcaaaagcgtgagacagtagtgctcttgacgttacccggaaatctagatctgga

SEQ ID NO: 167893 - DNA, 373 bp, Arabidopsis thaliana nossen
cttcttttaaactctctctatctctctctttcttcttcacactttgttgttaatttcaagtgtgggatcataatggcaacatcagctcgtagagcatacggcttcggtagagccgatgaggctacacaccctgactccattagagcaactttagctgagtttctctccacttttgtcttcgtctatgcagctgaaggctctatcctctctctcgataagatgtattgggaacatgcggctcatgcggggaccaacacaccaagagggctgattttagtagcgttggctcatgcgtttgctctggttgctgctgtttcagcagccattaatgtctccggcggacacgttaacccggcagtcacttttggtgctc

SEQ ID NO: 167894 - DNA, 386 bp, Arabidopsis thaliana nossen
cggacgcgtgggcttcctctcttctcctctcctcttattaatctaatcctcctccccgaatatttctctgcctttagttctttcttttttggtaatatatttatttttcgttacgatttggtcaaaaccctagatttgttttccaaaagcatatctgaaaatgaaggacaactttcctcttctccttcggttataaatattctctccggttttgcttgtttaacctaaaagcctcagatctaactccaacaccttcaaagtctgcctcctttccaatcttctttcttctgttcgatctctaatctcagaatttgtgtcggtaaggtaaaggtgataatgagtgatgactgatgagggagttttgggacaaattttaagagaaacgc

SEQ ID NO: 167895 - DNA, 192 bp, Arabidopsis thaliana nossen
ggcaacaccactgctaatcaaaagggctttccgacgtggctttcccgtaaagataagagactcctgcgtgccgttcgagccaacctcgtggtggccaaggacggatcaggacatttcaacacggtacaagcggctattgacgtggcgggacggaaaaaggtgacgtcagggaggttcgttatatacgtaaaa

SEQ ID NO: 167896 - DNA, 326 bp, Arabidopsis thaliana nossen
cttatagccctcccgtaaaaccaccaccagtacaagtacctccaacaccaacttatagccctcccataaaaccaccaccggtacaagtgcctccaacaccaactactccatcacctccccaaggtggatacggtactcctcctccatatgcatatctatcgcatcctatagacataaggaactaggtaaacaagatacagtacatatatttcctcaaggatcgccaaataggctttctagcacaagagagatgtatgttaaagctacatatggtactgcatattatgtggtaaaataaaataaagttctataaatggttgttcaca

SEQ ID NO: 167897 - DNA, 382 bp, Arabidopsis thaliana nossen
attaagacaagccattttataacttgtgaccagtccctgtttatgtgggtttcaatctttaacctcaagtcttctggattgaatcatttttttataagaaccaaggcttttcgatatttctggtgtaggaccttttctcttgcttcgttgtctgacaataactcaagattccatactaattctggtaagctaccttactctggatcacggtactatgtttccgatgcaagagttagctcaagtaagcattttggtgaagattttgtttcgattctgaagaatattgatgtcccaagggattgtgttgagactattagaaatgtgcttgtgaaacacagttggatacagaaatatgagagtgggtttagtactgagcttgatc

SEQ ID NO: 167898 - DNA, 387 bp, Arabidopsis thaliana nossen
aaaacaacatggctgcctcttccacgaaggcatagatgttgccttcggatcatcaacataccgtgtctaccccgactcatacgctctttatcctactactcatctctaatttctcactactactactaccacacgtgacggcggctcctatctcctacgtcaaccaacccgaactcgctcttctcattcccttcggctaacagtatccgacaccgccaactctacatcttcttattatacaggaggcgagactatcgagaatgtgctgattataggctccagtcccgacggttatacggcggcgatatatgcaactctgcgccaattagaagccatgggattctgaagggtatcagatgggcggagttgccggtagacaatggatga

SEQ ID NO: 167899 - DNA, 374 bp, Arabidopsis thaliana nossen
cgaagatgcgtgatattttttatattaaaggaggtcaatgcgcaagccaaatatcttccaagggtggggaagtggataatttctagcacggtattgatcagacgggacagtttgtagtacaactcctgttacagcttgagagggttaatgtatactacaaccaggacgagttgtggaaggtacgttccttgctctggtttcatagattaggagcctgaatccatggacagtgtcatatttggtccggacggacagatctttcgaccgtataacttggcatctggtcagcacggtgctcggtataactgtgttcaatgttactacactgaaggtgctgagcttattgattgtgtccttgatgttgttttcaaaga

SEQ ID NO: 167900 - DNA, 309 bp, Arabidopsis thaliana nossen
aactttttctccaagaccctctacaactttcttgatggcggtaggaatctttggattgatcccaagctcatcaccagacgagctaaggaagattcttcaagcgctttcgacgaaatggggagacgtagttgaggattttgagagtcttgaagtgaagccaatgaaaggagcgatgactaacgaagtgttcatggttagttggcctagaaaagaaacgaatcttcgatgtagggagcttcttggtccggtttatggtgaaggtgttgagcttttcttcaatagagacgatgagattcgtacttttgagta

SEQ ID NO: 167901 - DNA, 352 bp, Arabidopsis thaliana nossen
  unsure (1)..(352): unsure at all n locations
gaccgacccatccgaacacgcnctgcaagaccctatacaactttctcgatggcggaaagaatggggggattgatccgaggctgatgacaatacnacctaattaagattgattaagcgcttttgacaaaaaggggagacgtagttgaggattttgagagtcttgaagtgaagccaatgaaaggagcaatgactaacgaagtgttcatggttagatggcctagaaaagaaactaatcttcgacgtagaagagcacttgttggtaaaaacaatcaaggtgccaaccttgtcttcacaaaaatatatcagagttgaacctttcaagcttttgttcaaaatggtcaccgacctacac

SEQ ID NO: 167902 - DNA, 390 bp, Arabidopsis thaliana nossen
cttctcccaaatacgagctcggtctccaagagaaaatgggaagagtctaagtttgaatgcatcttccgagatcccattgattttcaccgtgctacacaacatatcaaattggtctagatgatccaaagggtcctccattgataaacaatgaaacttagagctttgaaccatgttgatgaggcttgatttaatctcaaagttgttgttctcaaccggaggagcttgaataccgtttctatttccgcggatgtttggctcatcaaaggctccaattggttgatgagctcttggttgatgttgtggcatatgaccacccccattagcttggccatttccattatggcccccaacttcgggttcattcatgacgcctaaccgagcaaggtgttc

SEQ ID NO: 167903 - DNA, 367 bp, Arabidopsis thaliana nossen
cacaaatcgcagtgcaaatgacagtgatctaatcattcacatgacgacatggtaagaaaagatcgagtgtgaaacatcaagtgcagctactgatatggtaagcagaaggaatctaatgtcaaaggacatttactaatcttggatccaagaacacaacatagccacagacattattaatgtcaaggggcataatttagtactcaatcatttcttaatttcaacaatcaacagaacaaaagttcaagatattttaatacaagtgtaataaactataacagaaatcagcaaagactttctgtaaaaaccatgcaggacataatcattgtaattcttcacacaaaatctaggctatcagtaagaatctatc

SEQ ID NO: 167904 - DNA, 268 bp, Arabidopsis thaliana nossen
accgagagaaaatcagaaattaaattagagagagagcagagtgaatcaaaacttcaacttcacccaaaaagatgttcggagaacttagggatctgctcaccggcggcggaaatgagacgacgacgaagaaggtgaaaggaacggtggttctgatgaagaagaacgtcctcgatttcaacgatttcaatgcttcgtttctcgatcgtcttcatgaatttctcggaaacaaaatcactcttcgtcttgtaagctctgatgttactgattc

SEQ ID NO: 167905 - DNA, 255 bp, Arabidopsis thaliana nossen
cgtcgtttagcttcagaggacgacaatccggtaggcgagagagagagattaatcaatcggagacctttgtaattcgctcgtaattcgttttgattttcgtgtttttgcaacgaatttaacaacttctgtgtgtgtgtgtgtgtgagtttcttaagagaggtcagaaacaatgattgggttatttaaagtaaaggaaaagcaaagagaacaagctccaaatggttcttaaggggggggctttggttagaaaccatt

SEQ ID NO: 167906 - DNA, 367 bp, Arabidopsis thaliana nossen
  unsure (1)..(367): unsure at all n locations
aaaagaatcgttccacataactaaaggtgatgtggtaagaatcccttctggtgtcaccaactttatcaccaacactaaccagacggttcctctccgcctcgcccagatcaccgtccctgtcaacaatcccggcaactacaaggattacttccctgctgcatcccaatttcagcaatcctacttcaatgggtttaccaaagaagtcctctctaccagtttcaacgtgccggaagaattgctagggagattggttacgagatcaaaagaaattggtcaagggattatccgaagaatttcttcagaccaaatcaaggacttgctgagcacgctacatctncttcaaaccaacacaaagcccaaaaagaaa

SEQ ID NO: 167907 - DNA, 390 bp, Arabidopsis thaliana nossen
ctcattgcttcatcattaccaaatcatcaacttaatcgtttctctcaaatttagggttttctcttttctcgaaagtcttgcggttttctgaatcatctctatctggtttgagggtttcgtttgatatctggagaaaggggtttctggaaacaaggagttcataattcgcgatcttgatctatcgatcttcatttatatataaaagcgtgaatgagattatgatggagtcgaaaggtggtaaaaagaagtccagcagtagtagttccttattttacgaagctcccctcggttacagcattgaagacgttcgtccaaacggtggaatcaagaaattcaaatcttctgtctactcaaactgctccaagaggccatcctgagtaccagcgtgca

SEQ ID NO: 167908 - DNA, 393 bp, Arabidopsis thaliana nossen
cactcgccaaaaaccttgaaacctttaaaaaatcgaaactatggctaagctcattctcgttttcgcaactcttgccctcttcatcctcctagccaacgcatccatctaccgcacagtggtggagttcgaggaagatgatgacgtgagcaacccacaacaaggtaagtgccagagggagtttatgaagcatcagcaactaagaggttgcaagcaatggatccgcaagagagctcaacaaggaagaatcggatacgaagctgatgactttgagctcactcttgatgtcgatcttgaggacgatgagaacccaatggggcctcaacaacagtcatctcttaaaatgtgttgtaatgaattaaggcaagtggacaagatgtgtgtgtgtcctacacc

SEQ ID NO: 167909 - DNA, 391 bp, Arabidopsis thaliana nossen
cagaagaagagccacacactcacaaattaaaaagagagagagagagagagacagagagagagagagattgtgcggaggagcttcttcttcgtagggtgttcatcgttattaacgttatcgcccctacgtcagctccatctccagaaacatgggtgcaggtggaagaatgccggttcctacttcttccaagaaatcggaaaccgacaccacaaagcgtgtgccgtgcgagaaaccgcctttctcggtgggagatctgaagaaagcaatcccgccgcattgtttcaaacgctcaatccctcgctctttctcctaccttatcagtgacatcattatagcctcatgcttctactacgtcgccaccaattacttctctctcctccctcagcctctc

SEQ ID NO: 167910 - DNA, 387 bp, Arabidopsis thaliana nossen
atcaatatcgatacccccaaaaaaaaaaaaaaacagctacaaagaagtgagaattgacacagcaaatgggtcttccgggaaaaaataaaggtgcagttttgtcgaagatagcgactaacaatcaacacggagagaactcagagtactttgatggatggaaagcttacgacaaagatccttttcatctttcccgtaacccccatgggatcatccaaatgggtcttgcagagaatcagctttgcttagatttgatcaaagattgggtcaaagagaacccagaagcttctatttgcacccttgaaggtattcatcagtttagcgacatcgctaatttccaagactaccatggtcttaagaagtttagacaggcaattgcacatttcatgg

SEQ ID NO: 167911 - DNA, 386 bp, Arabidopsis thaliana nossen
caaaaccagttttcactctctattgccgattctcgtttcgtttgatatcgtaggaatctataaacaaaggttgaacaatgtttctcaaagtccaattaccatggaacgtgatgattccagctgaaaacatggatgccaaagggctgatgttgaagagagctatactagtagagttactagaggcgtttgcttccaagaaagcaaccaaggagcttggctactacgtggcagtcacaactttggacaagattggagaaggcaaaatcagggagcacaccggtgaagttttgttcccggtaatgttcagcggaatgactttcaagatcttcaaaggagagataattcacggtgtggtgcacaaggtgttgaagcacggtgtcttcatg

SEQ ID NO: 167912 - DNA, 393 bp, Arabidopsis thaliana nossen
ggaggtttcatatgtttctcttcttccattgagatcattcccacatgcgttggatcatccatcatcatcttggcgaccaaatagccagcgattgaccatgtctgagatttcctagcctgttttccgatgaatcttccagactttccgtcgtagtactccggccatccatccttcaacagtcgtgcctccgccaactctatagcccgtcgtgctatttgtggccgtccagtctttatgcttgccgccgttagtaaccatagaagcactacattttgcatcagccacatgagtcaacaatattgattgaatgattatatttccaaacaaaaaacaaaattaatcaaatgtggcgttagaaatagaaaatagggttgaatgaaagtatttacgtgg

SEQ ID NO: 167913 - DNA, 394 bp, Arabidopsis thaliana nossen
attttcactgagcgcataacatttttgagacaagagactctctctctctctgttctctctttctctccccctctctccggcgatggttgttgctatggaccaacgcaccaatgtgaacggagatcccggcgccggagaccggaagaaagaagaaaggtttgatccgagtgcacaaccaccgttcaagatcggagatataagggcggcgattcctaagcactgttgggttaagagtcctttgagatcaatgagttacgtcgtcagagacattatcgccgtcgcggctttggccatcgctgccgtgtatgttgatagctggttcctttggcctctttattgggccgcccaaggaacacttttctgggccatctttgttctcggccacgactgtgga

SEQ ID NO: 167914 - DNA, 396 bp, Arabidopsis thaliana nossen
cttccggtagaaaaagaaccatcaaaagtcccaccaccaaaatcaaagatcaacacgttgttgattccaacacttggtggcttcttggcaagaccataagcaatagcagcagccgtcggctcattgatgatacccaaaacattcaaaccagcaatcacaccaacgtcctttgtagcctgacgttgagaatcattgaagtatgcaagaacagggaccacagcgttcttgatcgaagaacccaagtaagcttcagcgatctcacgcatcttaatgagaaccattgaagagatttcttccgcagcgaattgtttctcttctcctttgtagtttacgaaaatcattggtttgtctgcttgtccaggggttaccttgaagggccaaaacttcatgtcgctt

SEQ ID NO: 167915 - DNA, 382 bp, Arabidopsis thaliana nossen
aaacttttagaatctagccttggttccatttttgttgaccttcataataaaatatgaacgataaaagatttgaaaaggagaaagaaatggtgtaaaatccatttttgagcatttacagaagaacattaacaatcctaagaaactgataatatcagactctagtctcctcatctggcattagaacactggcactcaagaacggaggctgtttcggacattcaaatttactatctttgttctgtaacatgaagacaatctcagacattgacggtctcaactctacagaagattgaacacacaataatccgatttgaagaaccttcaaggcctcttcctctacgaaactccctttcaaccgaggatcgatagagcgatctaaagt

SEQ ID NO: 167916 - DNA, 382 bp, Arabidopsis thaliana nossen
cggacgcgtggggtactttcgaattcgcttcttgatcaatcacagtgtatcttggagggtatgatgaggaggagaaagcagcgagggcatatgatttagcggctctgaagtattggggtcctaccactcacttaaatttccctttgagtaattacgaaaaggagatcgaggaactcaataacatgaatcggcaagaatttgttgccatgttgaggaggaatagcagcgggttttcgaggggagcttccgtgtatagaggagttacaaggcatcatcaacatggaaggtgggcagccagaattggaaagagtgctggaaacaaggacttgtaccttggaacatttagcacgcaagaagaagcagcggaggcgtacgatatcgc

SEQ ID NO: 167917 - DNA, 386 bp, Arabidopsis thaliana nossen
cacagcattgttgttaactgcatcaaccagccaggttgaatctgtccctctcttctctccggttgggcatccatacgagcaactaccgcaataatgtttctctgttgaattccttggcactattgtcacatccaaaccaagcttctcgcaacctttccgcagaatctggttctgaaacccttctctgatgattttctcagtgacacctaacctcttgcagacaatacccatcgccgccttatatttctcactagaatatattgaaatccctcgatgtactgaccattcttcgatgatagcatcaggtgtttttaaggacgctgcccagtttaccacagagccaccaccgactgttgatcctgccatgaaccggaacctgccatcat

SEQ ID NO: 167918 - DNA, 391 bp, Arabidopsis thaliana nossen
aacacacatcacacaccattttcacaacatcgtacttatcgccttcctgtctctctcaatacctgtctgaatttctggatccaccatgcaagctcttcaatcttcatctctccgtgcttctcctccaaacccacttcgcttaccatcaaatcgtcaatcacatcagctaattaccaatgcgagacctttgcgaagacaacaacgttccttcatctccgcatcagcatccactgtctccgctcctaaacgcgaaacagatccgaagaaacgagttgtcattactggtatgggtctcgtctctgtgtttggtaacgatgttgatgcttactacgagaaattgttgtctggtgagagtggaatcagtttgattgatcgtttcgatgcttccaag

SEQ ID NO: 167919 - DNA, 392 bp, Arabidopsis thaliana nossen
caccaaggttaagatccccttttatggaagctacacagaatccgatcctgtgaaaattgctgttgagggagttgataggttcaagaaagaaaagtgtgatcttattattgttgacaccagtggtcgccataaacaagcagcttctctctttgaagaaatgcgtcaagttgctgaagcaacggaaccagatcttgttatatttgttatggatagcagtattggtcaagctgcatttgaacaagctgaagcttttaaggaaactgtatctgttggagctgtaattattactaagatggacggccatgccaagggaggtggtgctcttagcgctgttgcagctacaaaaagtcctgtgatattcattggaacaggagagcatatggatgagtttg

SEQ ID NO: 167920 - DNA, 391 bp, Arabidopsis thaliana nossen
acgaaaagaagcgacttttgcctcttttggtctctccccttctccggagagatctgctctctctatcggtctctcaatctgtaagaagaagattcccacttcagtaaaagccctaactttacttgggaaagttcttcatctatcatccttcaatcgtcatcatccatggctgatcaacaaaccctagattcctctactcctcctcctactcaatccgatgatctatctcactcccactctacttcctctactacttcagcttcttcttcctcagatccatcactcttgaggtctctctccttaagtcgactcaacgccggagctcctgagttcgttcctggtcgaactactcctccgctgcctcaacctccgaggatgattatcccgcctc

SEQ ID NO: 167921 - DNA, 415 bp, Arabidopsis thaliana nossen
  unsure (1)..(415): unsure at all n locations
cggcccggaataccgggggggcccaagcctcccaggagatatatcaaaagaacaggngaaaggatatggnnggaaaacaataaacagaggcaagggtatttcggggtatagtcacagtgttctgcgcaatactgatccaagatatgtatgccaaagagaatttgccttgaagcatctacctgacgacccccttttccagctggtgtgaaagctttatgaagttgtgcctcctgttctcactgagcttggaaaggtgaagaacccgtggccaaatgttgatgctcacagtggggtcttgctgaaccactatggtctaaccgaagcaaggtactacaccgtgctctttggtgtttcaaggagtcttggcatctgctctcagcttatatgggaccgagctcttggacttgcacttgag

SEQ ID NO: 167922 - DNA, 380 bp, Arabidopsis thaliana nossen
agcgacttttgcctcttttggtctctccccttctccggagagatctgcggtgggctatctatctctcagtctgtaagaagaagattcccacttcagtaaaagccctaactttacttgggaaagttcttcatctatcatccttcaatcgtcatcatccatggctgatcaacaaaccctagattcctctactcctcctcctactcaatccgatgatctatctcactcccactctacttcctctactacttcagcttcttcttcctcagatccatcactcttgaggtctctctccttaagtcgactcaacgccggagctcctgagttcgttcctggtcgaactactcctccgctgcctcaacctccgaggatgattatcccgc

SEQ ID NO: 167923 - DNA, 391 bp, Arabidopsis thaliana nossen
cagaggatagcgaatgagactgttgagttacaagaccttgttgagattgttgctgagccagttgataagtggcaagatgttggacctgaccatttcaatatattggatgctttctactctgagcctcagaggtatgcttatactttccagaactatgtgtttgtcactcggctgatgcaggagaaagagtctgcttctggggttaaacctctcaggttgatggaaaggagtgtcttcagtgaccgaatggtgtttgtgcgtgcggttcatgaagcgaaatggatgaatgagatggagatcagcatttacgactcttggtttgatccggttgtctcttctttacctggacttgttcctgatgggtttatatacttaagggcgagtccagaca

SEQ ID NO: 167924 - DNA, 194 bp, Arabidopsis thaliana nossen
cagccctgatcataggcttggtcgtgggtactgctctacttgctcttgtttgcgtaatgtttcattttatgttgagaaagcaacatgatgaagagaagtcggatgtgactggagaaaagagtattgttcaaaaaactgaaccttcttcttccaatatgattgcagcaaagaacagtgtacagggaaaatgaatc

SEQ ID NO: 167925 - DNA, 381 bp, Arabidopsis thaliana nossen
cttctccgcctccttcaatctcactccgatctctctacgattcattcggtctatggcttccattgctgcttctgcttctatttcccttcaagctcgtcctcgccaactggcgatcgcggctaggcaagttaaaagctttagcaatggaagaagaagcagtctttcttttaatctccgccagcttcctacccgcttgactgtttcctgcgctgcaaaacctgagacagtggacaaggtgtgtgcagttgtcagaaagcaactctcacttaaagaggctgacgaaattactgctgccaccaaatttgctgcacttggtgctgattcccttgatacggtggagattgtgatgggactagaggaagagttcgggattgaaatggc

SEQ ID NO: 167926 - DNA, 391 bp, Arabidopsis thaliana nossen
tttctttcttctctttctctcgctatcttggctcatcaacgatctcttgcatggggatttctacagagacgcagcaaattgcggcttcagaggctgcacaaaagagatggactacaagcgatttcgatatcggaaagccacttggtagaggaaagtttggccatgtttatctagcaagagagaaacggagcgatcacattgtggctttaaaggttctttttaaggctcagcttcaacaatctcaagttgaacaccagttacgaagggaagtagagattcaatctcatcttcggcatcccaatattctgcggctctacggttacttctatgatcagaaaagagtttatttgattttggagtatgctgtaaggggtgagctttataaagagct

SEQ ID NO: 167927 - DNA, 388 bp, Arabidopsis thaliana nossen
aaatcaccaccaccaccaaatcgccgccatgtttaaacaagcttctcggctcctctcccgatctggcggcgccgcatcttccaaatcggtgacgactcgtgccttttcaacggaacttccatcgacgctcgattccactttcgtcgaggcatggaagaaagtcgcaccgaatatggacccaccgcagactccttctgctttcatgaaacctcgtccttccactccttcttctatcccgacgaagctcaccgtcaattttgtcctcccttacacatctgagcttaccgggaaagaggtcgacatggtcatcattcccgcatcaacaggacaaatgggtgtcttgcccggacacgttccaacaattgctgagctaaaacctggcatcatg

SEQ ID NO: 167928 - DNA, 391 bp, Arabidopsis thaliana nossen
gatccttttaatgtatcgcagaccatcctcagctatggcctcctgtgtgtccttttaggtatcttcggagctcttcaccgtaaataatcccgacccatctagaggacggagccgccggcgaggaaattcaggcagattagatcggcgatttggccttgttttcaacgaagatcgtcttgttagggtttcgtccgcatctatggattctctgtcaaatggggtattgatatgaatttcggctttcgtgatgacggaatctatctggttaaacgatcaatcttctcctcggtcgatgataccttcagcaaaaccagtggctaatgtccatcgccagaggtgtaggagtgtcttcaagttactagtccagagggaaatttcaccaaacacaaag

SEQ ID NO: 167929 - DNA, 388 bp, Arabidopsis thaliana nossen
cagagaaactttgcaatttgcaacacattcattaacccaatctcttctttagctcaaacatatctacacaagaggataagaagcttaagattctctccacaaaacaaaaatagttatcagattcacaaacaaagccatcaaatttcatcattgatttgttcaataagaaatgggaagcaaatggcgaaaagcaaaggtggctttaggtctcaatttatgtctctacgttcccaaaacacttgaagattcttctcctccaagaagatccgacgacgccgtttcactttctccggttattgttcaaagaccatcaacgccgactccttcctcctctggtctccgattacctcgttccatgagcaaatcctcatcaaagaaaacttgtgcg

SEQ ID NO: 167930 - DNA, 386 bp, Arabidopsis thaliana nossen
accagatcgataatcaacagaaaaaacaatatattctccttcattcactcaaggaggttattgtgagacagtctgttgataaagcggatttccagaattccagcgttgagaaaatacttgctttactgttcaaccactgtgaaagcgaggaagaaggtgtaaggaatgttgttgctgaatgcttgggaaaaatggctttgatagagcctgagaaacttgttccagcacttcaggtcaggacaacgagcccagctgcttttacccgtgcaactgttgttactgctgtgaaatattcagtagtggaacgacctgagaaattagacgaaatcatcttccctcagatttcttctttcctcatgctaatcaaagatggtgaccgtcatgtt

SEQ ID NO: 167931 - DNA, 389 bp, Arabidopsis thaliana nossen
attcggtgcctttaggtaacacttgcagaactgtgattcgtctctcacgtgggatttatcggcaacctgtgtatgtacccaagaggaagaatttcattaccttcgccggaatctcaccggagatcacggttttgacttggaacaatacagcttccaagattgagcatcaccaggcgtctagagtcattgggactggtacgtttggttgtggtagtgttattgttgaaggtgaagattttattgcagagaacattacttttgagaactctgctcctgagggatcagggcaagctgtggcgatacgagtcactgcagaccgttgcgccttttataattgtcgatttctcggttggcaggatacattgtatttacatcatgggaaacaatat

SEQ ID NO: 167932 - DNA, 208 bp, Arabidopsis thaliana nossen
aagagtcgacgaatcatccataccacttcaggaagcggagtttcagtgattggttccagtcaaaggaaggttttgtgagagtgctgcctaagttcacaaaacatgcaccggctctcttccgaggaatcgagaactacagattctcgttggtggagatggagccaacaactttctttgtgcctcaccatttggatgccgatgctgtttt

SEQ ID NO: 167933 - DNA, 384 bp, Arabidopsis thaliana nossen
gaaagaaaaaaaaatgacatgggcttatatttctttacgcggtccctggattcgagaattaaataatgaaatttctatctttcttggtgtctttgttcagactaaattgtgatatagtgagcatagcaaatgaagtaatggaaatttgaatatagcattagcaggaacgtttccacataactagttgcatatttcaatgcaaagaaaagaaacatgttatttaagaatataacaagaggatgtatgagttatgtgggtaaaattgaagttttttgctattttgggaaactttactatttttatttaaatttaaagagataaatgatagggtaacatactaacatgattttgtatcatgttgacatttaaattgtctttatagga

SEQ ID NO: 167934 - DNA, 385 bp, Arabidopsis thaliana nossen
ctctattcaagtcaatggagaacttgcagactattttaacagttaaagaggtctccgacagggattctctctcagcccatacttattcgtcatttgcatgaatgttctctcgcgcaagctagacatggctgcaaatgaaaaacagattggctatcagccgaactacaaaagcatgaaactcacacatttatgttttgcagatgacttgatggtatttgtagaaggcaagaagaagtccatagaaggagcctagcggtcttcgaggagtttgcatttcactcgggcttgaagataagtcttgagaaatccactatctacatggtcggagtagacacacatataaaagaagatatccttgctcaattcccgtttgaacagggatctc

SEQ ID NO: 167935 - DNA, 391 bp, Arabidopsis thaliana nossen
cttattcgtcttcttcgttctctagttttttcctcagtctctgtgctgagatcccttgtagtttccaagatcttccgataaaaatgtcgggtaaaggagaaggaccagctatcggtatcgatcttggtaccacttactcttgcgtcggagtatggcaacacgaccgtgttgagatcattgctaatgatcaaggaaacagaaccacgccatcttacgttgctttcaccgactccgagaggttgatcggtgacgcagctaagaatcaggtcgccatgaaccccgttaacaccgttttcgacgctaagaggttgatcggtcgtcgtttctctgacagctctgttcagagtgacatgaaattgtggccattcaagattcaagccggacctgccga

SEQ ID NO: 167936 - DNA, 392 bp, Arabidopsis thaliana nossen
catcatcaaggatcgaaaacattaagtagctagttaagagagagagagagatggagatgaacattaagtgtccagttatagacttgtctaagctcaatggtgaagagagagaccaaaccatggctttgatcgacgatgcttgtcaaaactggggcttcttcgagctggtgaaccatggactaccatatgatctaatggacaacattgagaggatgacaaaggaacactacaagaaacatatggaacaaaagttcaaagaaatgcttcgttccaaaggtttagataccctcgagaccgaagttgaagatgtcgattgggaaagcactttctacctccgtcatctccctcaatctaacctatacgacatccctgatatgtcaaatgaataccga

SEQ ID NO: 167937 - DNA, 389 bp, Arabidopsis thaliana nossen
gaagaagcaaagaatatttcaagaatgatgaagatgaatacaggaacatcggcgtcggtcatcggcggcgggactagtggtaatgagtgggagtctcgacctggaggaatggttgttcaacgtcggacagatcagaactccgatgtgccacgtgtcattcgtgttcgggttaaatacgggtcggtttatcacgagatcaacatcaattcccaatcttccttcggagagttgaagaagatgttgtctgatcaagtgggacttcaccatgaagacatgaaggttttgtacaaagacaaagagagagattcaaagatgtttcttgatctttgtggagttaaagatcggtcaaagcttgttgttaaagaagatccaatttctcaggagaaacg

SEQ ID NO: 167938 - DNA, 393 bp, Arabidopsis thaliana nossen
gaattcttattgggcgaaacttccggcggttaaagcggcgatgattgctcagcctgaggcggagtggatctggtgggttgattctgatgctttgtttacggatatggattttacgccgccgtggcgacggtataaggagcataatcttgttgttcatggttggccgggagtgatttataatgatcggagctggacggcgttaaacgccggagtttttctcattaggaattgtcagtggtctatggaactcattgacacgtggacaggtatgggaccagtgagtccagagtacgcaaaatggggacaaatccaacggtcaatattcaaagacaaactcttcccagagtcagatgatcaaacggctctgctttacttactctacaaacacagaga

SEQ ID NO: 167939 - DNA, 399 bp, Arabidopsis thaliana nossen
tctatgtgtaatcgtcaggttagctaaacgtgagacgagattacatgaatacgggctattgaatttgtaatgagtttataaatctgttataaaccggtacaaattccttcaatcaagacacaaaacataccccaacagacaagcaaaggagaagaagaagaagaagaagaagaagaagaagaagaagaagaagaagaagaagaagaagaagaagacagagagagagaggaaagagcttttgcattcgtacctgggacataaatgattaaaccagacagcttcagagagaaaaatccttttaaagaaacattgttccacttcagacctgcaaaaattttaattactcaagcagataaaagcataattttgtgttatatatccttcataatcaatgttatt

SEQ ID NO: 167940 - DNA, 385 bp, Arabidopsis thaliana nossen
gaaacccctaagatttttatttatttttttctcaatttcttcaacgatgaatgtattgaaatgtctagcgatcatttccgttctcggaatattcttcatacctcgttattctgaatccgctatatcttgcagtgttgtgttacaggatttgcagccatgtgtgagctacttgaccagcggaagtggaaaccctccggagacttgttgcgacggagttaagagtttagcggcggcaaccaccacatctgccgataagaaggcagcttgtcaatgcatcaagtcagtggctaatagtgttaccgtgaagcctgaattggctcaagcccttgctagcaattgtggtgcgagcttgcccgttgatgcttctcctactgtcgactgcact

SEQ ID NO: 167941 - DNA, 388 bp, Arabidopsis thaliana nossen
tttcccccacaaactaaacaaaaaaccattcacaaaaaaaatagagagaatcatctgagagagtagtagtgatgatatgatcgcttcttctcctacaatctcagaaacctccgatcacggttttagatatcttctacaacggatacaatggagagcaccgattcttccggtggtccaccaccgccacaacctaaccttcctccaggcttccggtttcaccctaccgacgaagagcttgttgttcactacctcaaacgcaaagcagcctctgctcctttacctgtcgccatcatcgccgaagtcgatctctataaatttgatccatgggaactttccgctaaagcatcgtttggagaacaagaatggtacttctttagtccacgagatc

SEQ ID NO: 167942 - DNA, 312 bp, Arabidopsis thaliana nossen
gaaaccgtgacccgtggaacatttttggatggatcgcaggcaaaatagagtggggactgttgtacttgctagcaagggatgaagaagggtttttgtcaaaagaagctattaggcggtgtttcgatggaagcttgttcgagtactgtgccaaaatctacgctggtatcagtgaagacaagacagcatactactaaaagtatcctttatgttaagtaattgatcgagccattttaagctaattaatcgatcaatgtgaagcttgtgcctatacggtaaatgaaggttcgggtagtagtatggacttttggtcta

SEQ ID NO: 167943 - DNA, 290 bp, Arabidopsis thaliana nossen
  unsure (1)..(290): unsure at all n locations
tganncagangaagagaaanncgagaggcaacactctcctcaagagtatagaagccatcttggtttgcctcacgtcgcagctcaaaatggacttggacgtaatggtgctaacgtctttggtgcttctgatgatttatctgactcagctactagcactgaagtttcatatgaagcacaagcttgtggtgtgcggaacaatatatcttcacataatgaatttgaaagacgaaatgttgaggctggaacttcaggaaggactctgaacgggacaagcacttcaacaagttcat

SEQ ID NO: 167944 - DNA, 209 bp, Arabidopsis thaliana nossen
ctaaaatattaagccacaaaatttaagcgtttggtaaaatgatattgaagtttcaataggaatctatcaattaaaatctgtaaccattgaacaaacttatatttaaaaatttgccagtggcaactataaatctatcatcattggattcaaatataaaagattgtcattaaacgtcatatttttgttattattaaacaaatatatcacct

SEQ ID NO: 167945 - DNA, 302 bp, Arabidopsis thaliana nossen
tccaccgggggtggccacaccatcactcaaatcctcgctgattctccagattactcttccttcaacagctacctttctcagacgaagctcgccgacgagatcaacagccgcacgacgattacagttctcgtccttaacaatggcgcaatgtctgctctcgccggaaaacatccactctccgttattaaaagcgctttaagcctcctcgtcctcctcgattactacgatccacaaaaactccacaagatctccaaaggcacaactctctccaccacactttaccaaaccaccggaaacgctcc

SEQ ID NO: 167946 - DNA, 395 bp, Arabidopsis thaliana nossen
caataaagaggaagaaaaatgggtcgagtctcatctattatctctttctctttgacactcttgatcctcttcaatggctacactgcccaacagtggcccaacgagtgccagctcgatcaactcaatgcgctcgaaccatcccaaatcatcaagagcgagggtggtcgcatcgaggtctgggaccaccatgcaccccagctccgttgctccggctttgcctttgagcgtttcgtcattgagcctcagggtcttttcttgcccactttcttgaacgccggcaaactcacgtttgttgttcacggaaggggtctaatgggaagagttattccgggatgcgccgagacgttcatggagtcaccggtatttggagaaggtcaaggtcagggtcagagtca

SEQ ID NO: 167947 - DNA, 397 bp, Arabidopsis thaliana nossen
tggagctcagctttctgctgctggtattacttccagcagtagtgatgtctatagctctgctactggtttcaacaatcccaaaggtccagacgctaatgcatacgaaaatggctacacaagtaccagcggacaagtcattgccaagggtcgcaaggcaagagtttcttctgcaagtgcttctaccgctaaaggtgatgctaaagctgcagtgactcgcaaagctgctgctgcacgagcaaatggtaaggtagcttcggcatcaagggtgaagggttcctctgagaagaagaagggcaaaggaaagaagggcaaaggaaaaaaggattgagcgtgaggtgatctcatattctcatgcatgcgaattcctcaaacctatatataaataatatcctaaaaa

SEQ ID NO: 167948 - DNA, 391 bp, Arabidopsis thaliana nossen
tcgctaaaatattgagccacaacagatcggcggagatggcttctacctccgcgatgtcattggtcacaccagttaaccagacccgttcgtctcctttcctcaagccattacctctgaaaccatccaaggctttggttgcaactggaggcagagcacagaggcttcaagttaaggccctcaagatggacaaggctttgaccggtatctccgcggctgctcttactgcttcgatggtgattccggagatagctgaagctgctggttctggaatctctccttccctcaagaatttcttgctcagcattgcttctggtggcctcgtcctcactgtcatcattggtgtcgtcgtcggcgtctccaactttgaccctgtcaagagaacctaagacct

SEQ ID NO: 167949 - DNA, 384 bp, Arabidopsis thaliana nossen
gatcttgcaaagaagatctgggcttttggacctgaaaccacagggcctaacatggttgtcgatatgtgtaagggagttcagtaccttaacgaaatcaaggattcagttgttgctggtttccagtgggcgtccaaggaaggtcctcttgctgaagagaacatgagaggtatctgttttgaggtctgtgatgtggtgcttcactctgatgccatccacagaggaggtggtcaggttatccccacagccagaagggtcatatatgcttcccagatcacggctaagcccagacttttggagccggtttacatggttgagatccaggcaccagagggagctcttggaggaatctacagtgtgctgaatcagaagcgtggacacgtgttc

SEQ ID NO: 167950 - DNA, 354 bp, Arabidopsis thaliana nossen
taatgattgctgtaataattaataatgaacatcttctttcccaacaagatttctgttaattatatttatatcaccaattagtaagataaaaagattttgattgtgactctttcactgccacaattagttaaacatttatggtttcttcttcttcttgtttttgtactttgaatttacttttgaagtatcgtaaaaatatggagaatgtgaaagaagagactacttaattttagctgaaattgtgaaaatataatggctcatcaaaatcttctggattgttgtactgaatagcgagcgaagtcaaaaaattttcttccaacacaaccacattatttctgcaataaagaacccaat

SEQ ID NO: 167951 - DNA, 368 bp, Arabidopsis thaliana nossen
gagagagaagagaagagagcatgtatgtttggttttataatctctctactcataccaaagatttgtctcagacccaccacttggacagagagaacccaagctcctttctctctttttctcgatctactccttcttaatctccttttttgaaacttgaagccactttcaacatcatccttaaacttttgttcccttattcacaatctcctgccacctctcatttctctagttgagttgttatctgcgtttttaagcactcgaatactgcatgcaaattccctgattgtttgctacatatatgggttctattagaggaaacattgaagagcctatatctcagtcattaacgaggcagaactctctctata

SEQ ID NO: 167952 - DNA, 370 bp, Arabidopsis thaliana nossen
agaaaatgtttatttaacattttagaattaccaagtgcatggttatatatattaaacaaattattgatctaagaatattgatatttgagagagttttgaggataataattcatatgatttttctctattaattgacgaatctatggttataaacaagtacaatattaatactcaagatgagtataacaacaccggattttaattatatatgctttaattatatttaggattgaaaatatgactatgttagaagaaccatgctgcttatcgtacgtggcttggtgtatagaggtttccagttcaagaaccttattcaaaccaaagcctttggagtgttcttcaacatcatggtatcttccaacttcaatct

SEQ ID NO: 167953 - DNA, 373 bp, Arabidopsis thaliana nossen
gcggtggtgaccattcatgggttgtttaagaagcttagtaagaaggaaacaagtcgactcttcaaatggcaaagcagagactcatcatcatcaccaacagcttgcaaaagcgttgacctttcctcacttgattgccattggtgttggatcaacaattggagcaggggtttatattcttgtgggaacagtagctagagagcattcaggacctgctcttgctttatccttccttatagctggaatttctgctgccctttctgcgttttgttatgccgaactatctagtcgttttccctctgctgggagtgcctatcattattcttacatttgcattggtgaaggtgttgcgtggttgattggctgggcgctgatt

SEQ ID NO: 167954 - DNA, 397 bp, Arabidopsis thaliana nossen
ccggagctccaccccatcgcggaaacacacaatcaacacagaccaaaggtgcttattaacccaagcaaaaactccacgctcctcaactgagatcaatctcaatcatcacctcttttaaccaagcaggcattcttctaaacagagaagacaaaacacaatctatttctcgtcaaccacttgagaaacagcctcttctcttcttttgaacatgaatttcaaaccagatcaagcttcaagagtagacaacaaaaacaacaacttcctctcttatcgagaaaaccaaaattataagaaatgctttgtatctagccagagcttcttgcagaaagacgtcatcattatctacatgagctcttgaaacctgcaacaaagacacacaaacaaattcgattacaac

SEQ ID NO: 167955 - DNA, 366 bp, Arabidopsis thaliana nossen
cgaagaaagagtgggttcttcctgagatcgatgacgacgacatcgtttcagcttttgaaggaaactcgaatctgttctgggcagagagatttggtaagcagtttctaggtatgaatgatctgtgggtgaaacactgtgggattagtcatacaggaagtttcaaggatcttggaatgactgttttggttagtcaagttaatcgtctgagaaagatgaaacgacctgtggttggtgtcggatgtgcttccaccggagatacttctgctgctctatctgcttactgcgcctccgctggaatcccatcgattgtgtttttaccggcgaacaagatctctatggctcagctggttcagccgatagctaatg

SEQ ID NO: 167956 - DNA, 373 bp, Arabidopsis thaliana nossen
ctttgggataagatttttggataggtcacttggcgtgttaaatgaacagtacaacttcactctctaatgtcctccccaacccaagaaagaaaaggaccatttgttcctatccttagtttctaaataaaactataaaacatatagatagaattggagataatttgctaacaaaacagtttgaagaattatttggacttttgtttactatatatactttgtttatcggatgtggacaagataacgtcttggtaagtgcatggtaactatatatgcaaaaaagggtcaaaccaactcaattaactttctttgaatttgaaaacgcgtgaatgagaaacgtaaaatgtcggttaaaatgatattgacatctacttaa

SEQ ID NO: 167957 - DNA, 371 bp, Arabidopsis thaliana nossen
ctctattgtagaagaagactcataatcggtgatcgtgtgtttttggctggctgtgtaaattggagaaggtgggttagagatcaaatggctgggatactcgtgcggtgctattggagagactgaaccggccgctccggctgattcatcttctcgagcttctcttagacggaggtcagatctactttcgtcgagcaaaattgttgctgactccgccgttgctactccgtttgaacactgccagcaacgtgctaagcgtgagacagctattgctctcgacgttgccgggacatctagatctggattcgtatgtgaggagtgataataagaaggctagatcagcggtgtcgaattcaaattctgttactgaagca

SEQ ID NO: 167958 - DNA, 324 bp, Arabidopsis thaliana nossen
cccagatcttctctgtctctgtcccgcggagtccccgagagattgatcaccatacttttgtaccttgcttgcactacctaaggactaagatagcttaaataagcctaacaccccttattttatatggattggtgaaagatcaacatttgaaacatgtggttttttttttgcggcaacagtagcttgagagcataaacgacctgctgttgatttatccttgcttatagaaagaatttcagatgccctttctgcgttgtgatatgccgaactatctagtcgttttccctctgctgggagtgccaatgattattcttacatttgcat

SEQ ID NO: 167959 - DNA, 367 bp, Arabidopsis thaliana nossen
agatggtgttgtcagttttctcccttctccaaatgaagtcaataactatgctcttgaccagaataataatgaagagagggtaaccttgactggatctccagatggacctcttgtggcgctggctttcaaattagaggagggtcgttttggtcaattgacatatttgagagtttacgaaggtgtgattaagaaaggtgattttatcataaatgtcaacactgggaagagaattaaggttccacgcttggtccgtatgcattcgaatgatatggaggatattcaagaggcacacgctggacaaattgtagctgtgtttggtattgagtgtgcatcaggtgatacatttacggatggatcagtcaagtac

SEQ ID NO: 167960 - DNA, 370 bp, Arabidopsis thaliana nossen
ggagtttctaatcatgtctctctctgttttcttcttattcttctatcaaaccgtcaagttgggaaacaaaacaaaactcgcaagtttaacaacgcgtcttctacctcctcctcatcggactatttatctatagtcttcgttagatcaattcctctgttttactcctaagtttcgagatccacatttctttttaacctcatctcatctcttagtcgagatcttcactttctgatgacaatagggtcgtttttctcttctctcttattctggcgcaattctcaggaccaggaggcgcagagagggaggatgcaggagatagatcttagtgttcacactataaagtcccatggaggaagagtcgcttctaaac

SEQ ID NO: 167961 - DNA, 372 bp, Arabidopsis thaliana nossen
agaaaaaatggcaataaccaacaaattaatcataacacttcttctccttatctgcatagctgtcgtccactgcttatccttccgtgtggagatcgacgagttcgagccaccacagcaaggagaacaagaaggtccccgtcgccgtcctggtggtggctctggcgagggatgggaggaagagtcgatgaatcatccataccacttcaggaagcggagtttcagtgattggttccagtcaaaggaaggttttgtgagagtgctgcctaagttcacaaaacatgcaccggctctcttccgaggaatcgagaactacagattctcgttggtggagatggagccaacaactttctttgtgcctcaccatttggatgc

SEQ ID NO: 167962 - DNA, 363 bp, Arabidopsis thaliana nossen
cacattgcctcccacgatccaagcttgcactccttgtactcgtcctcatcctccggttccgaaacctccacaacacggcggtggtggaggtggtggtagcaagccgcctccacatcacggtggaaaaggtggtggtaaacccccaccccacggtggaaaaggtggaggaccgccgcatcatggtggaggaggaggaggaggagggaaatcaccgccggttgttagacctcctcccgtagtggtgaggccaccgccaatcataagacctcctccggtcgtctatccaccaccaattgtgaggccaccgccaatcacaagacctcccatcataatccctccaattcaaccaccgccggttacaac

SEQ ID NO: 167963 - DNA, 373 bp, Arabidopsis thaliana nossen
cagaggatagcgaatgagactgttgagttacaagaccttgttgagattgttcctgagccagttgataagtggcaagatgttggacctgaccatttcaatatattggatgctttctactctgagcctcagaggtatgcttatactttccagaactatgtgtttgtcactcggctgatgcaggagaaagagtctgcttctggggttaaacctctcaggttgatggaaaggagtgtcttcagtgaccgaatggtgtttgtgcgtgcggttcatgaagcgaaatggatgaatgagatggagatcagcatttacgactcttggtttgatccggttgtctcttctttacctggacttgttcctgatgggtttatatact

SEQ ID NO: 167964 - DNA, 371 bp, Arabidopsis thaliana nossen
cacatcatcacacatgtttagtttaggtaatacatacaaggtatatcgagtcttaacaaaatttaacaaaattttcgtacatgttcgagcctatgtgatttatttaataggcattaaatagaaataaagcttttaataatttcaatcacgtgtgaagcggcgattgaattgcgaacggtgatgagatgcatttctattttctgatctattttttctatgaacaagtcaaaagtctttctaatagaaaaagggaaaaagaaaaataattttaagtaatttagtccaaaaaaaagaaaaatctataatgagaattatgctaaaaatagttttttcttatctaaagctcctatatttgactatcaaccaaggat

SEQ ID NO: 167965 - DNA, 372 bp, Arabidopsis thaliana nossen
atacttttacgaaaaaagcttttaaaacttatctagtttcgtttgatacacatttgaagaaagaaatggcatccaaccaacagagctacaaagctggtgagaccagaggcaaggcccaggagaagactggacaagctatgggaacgatgagggacaaggctgaggagggccgggacaagacttctcaaacggcccaaacagcccaacagaaggcccatgagacagcccagtcagctaaagataagacatctcaaactgcccaagcggctcagcagaaggcccatgaaacggcccagtcagcaaaagagaagacatctcaaactgcccaaacggcacagcaaaaggcccatgagacgacgcaagcagcaaaag

SEQ ID NO: 167966 - DNA, 359 bp, Arabidopsis thaliana nossen
actaaacctgagagaaaaagccagaagaaccaaactcagaccgagagatagagattgagggagagctctagctctgtagaaaagaaggattcattcatcatatccagaaatggctctaaagtttaaccctttggtggcatctcagccttacaaattcccttcctcgactcgtccgccaacttcttctttcagatctcccaagttcctctgcctcgcttcttcttctccggctctcagctccggccccaaggaggttgagagtttgaagaaaccatttacgccacccacggaagtgcatgttcaagtcttgcactccatgccacctcaaaagatcgagatcttcaaatctatggaaaact

SEQ ID NO: 167967 - DNA, 369 bp, Arabidopsis thaliana nossen
gaaaagaagtgacgaagaaagaatgagaagacgaagaaagagaaaacaagatccgattcaaaatatggaaacttgaatatcttcttcttcttcttccttctcctttctcatctctcactttgagggtgaatttggattttgtagaaaatggattcgaaggagatggttgtggaagaaatcatgagaattcatagatctctaccattgagaccagatatcgaagatgtagagacggcaacttctctgatacaaaacgttgaaaaagaagatcggaatcgtttagaagccattgataaacttgttaaaacctcttcttctgaggttcctttagagcttttcaatgtgttgaaggagatgaagaaaagtctt

SEQ ID NO: 167968 - DNA, 373 bp, Arabidopsis thaliana nossen
ggtgtgtataagaatcttttgcaagagatagctcaaagagtgggagctgctttaccgcgatatactactttcaggtcaggtcttggtcaccaacctgtgtttactggtactgtagaattggctggaattacgttcactggagatccagctaagaacaagaagcaagcagagaagaatgctgcaatggctgcttggtcttccctaaaacaattggcaaaagaaacatcaagttcaatgcctgagcctgagaacattgacgaactagaacaggtgattatagcaagagctttgataaactatcgtatcaaggaaaacattggcacaggaagctcctcgagtgccccagttccatttgcaaagaagttctttatgc

SEQ ID NO: 167969 - DNA, 385 bp, Arabidopsis thaliana nossen
catttcccatatggcttctccacagtcactaggttacccaactatctcccctttcaacacgaggtacatgtcaccgtatagacctagcccgagcaatgcatcacctgcaatggctggatcatcgaattatccgttgaatccactgcgttacagtgaatcagctggaactttctctccatacgcctctgcaaactcgcttccagactgttagaaagtctacagaaccaaccactcttggttcaggtcatataagattatttcttttgcatttgagttttactacgaaacgtacttctggcgtttgtgtgtggtgtgtgtgtgtgtaacgatgcttttatagtcttttggttgagatgaaacatcatcggatttaggttagagagat

SEQ ID NO: 167970 - DNA, 371 bp, Arabidopsis thaliana nossen
aaacaacaagaaaaaatggcaataaccaacaaattaatcataacacttcttctccttatctccatagctgtcgtccactgcttatccttccgtgtggagatcgacgagttcgagccaccacagcaaggagaacaagaaggtccccgtcgccgtcctggtggtggctctggcgagggatgggaggaagagtcgacgaatcatccataccacttcaggaagcggagtttcagtgattggttccagtcaaaggaaggttttgtgagagtgctgcctaagttcacaaaacatgcaccggctctcttccgaggaatcgagaactacagattctcgttggtggagatggagccaacaactttctttgtgcctcacca

SEQ ID NO: 167971 - DNA, 373 bp, Arabidopsis thaliana nossen
atgagacgacaatggttgacctctggactctcgagtctccctggattactacactcgagctcgacgatccttagaccaacttcgtcttcttcctcgagagcttctctgatctccttcgccgttaataatttccacacgatcgcttcttcttcgtctactctctcttctcgcttgacaactgtatcatcgtccatggcttctggtgacgaaggagctgttttcaatttgtctgattctagccttcttaagatccttaaaggagacatcaccaagtggtctgttgattcttcctccgatgctattgtcaatccagcaaatgagcgtatgttaggtggtggtggtgctgatggagcaatacatagagctgctgggc

SEQ ID NO: 167972 - DNA, 368 bp, Arabidopsis thaliana nossen
cttcggaccatcaaacatctctctacctaacggtaactgccgtgacaacccccaagacgccgtctccaaaatcgactgcacagctcactcgatcgaatacgacgtcgcaacgaacaccatccgacctttaacggtacaatccaacacatggtgctcatccggttcggttcgaccggacggtgttcttgtccaaaccggtggagaccgagacggagaacttaagacaagaaccttttctccttgtaataacaatcaatgtgattgggtcgaaatgaacaacggtttaaaaaagagaagatggtacgcttccaaccatattcttcccgacggtaaacaaatcgtcatgggaggtcaaggacaattcaact

SEQ ID NO: 167973 - DNA, 366 bp, Arabidopsis thaliana nossen
ggagagagacgcaatggagactgtggctccatatgctccggtgacttatcaccgccgtgttcgtggtgacttggatgacacacttcctaaaccttatttgccgagagcactacaagcacctgacatggaacacccacaaggaacaccagatcatagacataatggccttagtgttcttcagcaacatgtcgctttcttcgatttggacaataatggcatcatttatccctttgaaaccttctctgggttccggttactcggtttcaatttactcgcgtcgcttatcttggctgctggtatcaacatagctcttagctatgctactcttccgggatggttaccggcttcggtctttcctatatatat

SEQ ID NO: 167974 - DNA, 370 bp, Arabidopsis thaliana nossen
ccgctcttctcctcagagcttccagcaccaggtaattcctctgaaacaagtccatcctgaggctgtgtaacggacatgttacacggatatccacctgctactggtgacaaagggtacccattctgtgttatttctgcaccatttggggatgctaaatagccatttggtgacactggatacccattagaaacccaaggttgactcggtatgaactcagcagcatgggggttcattattcttgggccattgaattgattagcctcaccattggactcggtgctattggggaagcttggtttgttacgcggaaccctgtttccagatcggttgtaaccaccaccagagagtctaggcccataaggaactcgag

SEQ ID NO: 167975 - DNA, 377 bp, Arabidopsis thaliana nossen
  unsure (1)..(377): unsure at all n locations
gncgnacncgcttaaaaccgtttttttttaaaaaaaccgaaactatagcgggggttattcacgttttggggactctnaccctcatcatactcctagccaacgcatccatataccgcacagggattgagtaccaggaagatgatgacgtgcgcaacccacaacaaggtaattgccatatggagtttatgaaccatcaacaactaacatgctgcaagcaatggatcctaaagacatcttaacatggaagaatcgaataccaagcttattacttagagctcactcttgatgtctatcttgaagacgatgagaacccaatttgtcctcaacatcagtcatctcttaaaatgtaataaaattaattaatgcaatttgacaaa

SEQ ID NO: 167976 - DNA, 368 bp, Arabidopsis thaliana nossen
gaatgagcaaatgttgggccaacgcttaacgactgattctaaggtcggtccatacacatggatcacatataaggaagcccacgacgctgcaattcggattggatcagcaatcagaagccgaggcgttgatccgggacactgttgtggtatttacggagctaattgtccagaatggattattgcaatggaggcctgcatgagccaagggatcacctacgtgcctctatacgattctttaggcgtaaacgcagttgaattcatcatcaaccatgccgaggtttcgctagtatttgtgcaagagaagacagtttcatccatcttatcgtgccaaaagggatgttcttcgaatttgaagactattgtgagct

SEQ ID NO: 167977 - DNA, 377 bp, Arabidopsis thaliana nossen
ggatcctaaaccggagataccaaaattgcctgagctacctaaattcgaagttgccaagttgccggagttccctaaaccagagttgcccaagttacccgaatttccaaagcctgagttgccaaagatcccggagattccaaagccagagttaccaaaggtaccggagattccaaagcctgaggaaactaaactgccagatattcccaagcttgaattgcccaagtttccggaaattccaaaacctgagctcccaaagatgccagagattccaaaacctgagttaccaaaggtaccggagattcagaagcccgagttaccaaaaatgccggagattccaaagcctgaattaccaaagtttccagagattccaaagcctg

SEQ ID NO: 167978 - DNA, 371 bp, Arabidopsis thaliana nossen
gaactgggtttatgtgagatgggggaaaaaggtgcactgaagtggagcgatgaagatgcacaactttttcatgaggttgtttattccaatcctgtaacattggggcagaatttttggaggcacttggaagctgcattttgttcccgaactcagaaagagattgttagcttctactttaacgtatttgtcctcagaaggagagccatccagaacagagcttttatattggacattgatagtgatgatgatgaatggcatggatgttatggaggctcttctggtactcgttatgtagaagaagatgaagaagactctgcaatcgagtctcctcttcatcaagggactaagaaagtgtatccactccatcatga

SEQ ID NO: 167979 - DNA, 376 bp, Arabidopsis thaliana nossen
caacaagaaaaaatggcaataaccaacaaattaatcataacacttcttctgcttatctccatagctgtcgtccactgcttatccttccgtgtggagatcgacgagttcgagccaccacagcaaggagaacaagaaggtccccgtcgccgtcctggtggtggctctggcgagggatgggaggaagagtcgacgaatcatccataccacttcaggaagcggagtttcagtgattggttccagtcaaaggaaggttttgtgagagtgctgcctaagttcacaaaacatgcaccggctctcttccgaggaatcgagaactacagattctcgttggtggagatggagccaacaactttctttgtgcctcaccatttggatg

SEQ ID NO: 167980 - DNA, 362 bp, Arabidopsis thaliana nossen
accatcttcaactttggcacacaaaaagttgtcaagaactggcagctatgcctttgtgtttgtgttgggctttgggctggactcattattggtttcgtcactgagtactacactagtaacgcctacagccctgtgcaagatgttgcagattcatgcagaactggtgcagctaccaatgttatcttcggccttgctcttggttacaaatccgtcattattccaatctttgctattgctatcagtatattcgatagcttcagctttgctgctatgtatggtgttgctagagctgctcttggtatgctcagtaccattgccactggtttggcaattgatgcttatggtcccatcaatgacaatgc

SEQ ID NO: 167981 - DNA, 365 bp, Arabidopsis thaliana nossen
gctaagtggaggacctggctgctcttccatctctggccttctttttgagaatgggcctctggctatgaagctcgatgtttacaatggaactctcccttctttggtccctactacatattcttggacaaagacttcgagcatgatattcttggatcagcccgttggaactggcttctcctattcaagaactcaacaatataataaacctagtgattcaggagaagccaaacggattcatgagtttcttcaaaagtggctaagcaagcatcaagagttttcctccaacccattctatgtcgccggtgattcttattccggtatggttgttccagctaccgttcaagaaatctccaaaggaaattatc

SEQ ID NO: 167982 - DNA, 349 bp, Arabidopsis thaliana nossen
caatttctcaaaatcttaaaaactttctctcaattctctctaccgtgatcaagatgcagatctttggtaagactctcaccggaaagacaatcaccctcgaggtggaaagctccgacaccatcgacaacgttaaggccaagatccaggataaggagggcattcctccggatcagcagaggcttattttcgccggcaagcagctagaggatggccgtacgttggctgattacaatatccagaaggaatccaccctccacttggtcctcaggctccgtggtggtatgcagattttcgttaaaaccctaacgggaaagacgattactcttgaggtggagagttctgacaccat

SEQ ID NO: 167983 - DNA, 371 bp, Arabidopsis thaliana nossen
gctgatctctttgggctgtcttcgttctctatgtctcaatctctctttatcacttacacaatctttctctgtctctcttggttatctccatattaaggtaagaagatacgatctaaactctggcttgttcttgtttctagattttttgtgcgatctacttgcatgcgggaggagacctttagcctttaatcattcattatattttaagagatgggtagtatcgaaaaaagcttaatctattagttaacgcgtggttaagtgagattagcaatgtaacctagttgttaataggctggtccttaatttttctcgagtcatgtatatattatatcgtttctttttccactctgtctctctcgaggcgttttaat

SEQ ID NO: 167984 - DNA, 363 bp, Arabidopsis thaliana nossen
gctgatctcattgggctgtctttttactctatgcctcaatctctgggtggcacttacacaattttgcggtgcctctcttgcctatctccatattaaggtaagaagatacgatctaaactctggcttgttcttgtttatagattttttgtgcgaactactagcatgcgtcaggagacctttagcctttaatcattcataatattttaagagaaaattagtatcgaaaaaagctaaatctattatttaacgcatggttaattgagattagcagtgtaacctagttgttaataggctggtccttaaataatttcaagtcatgtatatattatatcgaaactattaccaactagactatctcgaggc

SEQ ID NO: 167985 - DNA, 374 bp, Arabidopsis thaliana nossen
attataagttatataatcatataatattttgtgttcgattagtgtaacgaaaatggggttagagaggaaagtgtacggtttggttatggtatctttggtacttatggctattgcaacgatgtgttgtgtccaagctacgatcgacgaagaagcggctaaggatgaatcatggactgattgggcaaaggagaagatcggtctcaagcacgaagacaacatccaacccactcacaccaccacgaccgttcaagacgacgcttggagagcgagtcaaaaagccgaggacgcaaaggaggcggctaaacgcaaagcagaggaagcggttggagccgcgaaggagaaagcgggttcggcatacgagacagctaaatcga

SEQ ID NO: 167986 - DNA, 366 bp, Arabidopsis thaliana nossen
cttttggagtatgagaagcatttaaggcaaaatggtgagcttaaccttcctggttcagcttctcttccgtcttcaggcattgaaaaggaggttagaattcctatgaaattgtgtaattcttatgcttttgggtaggtgaacactttgagaggaggtcaatttaagagtaggtaaaccatgttgttaaattagataaagtgaaagctctgcagttctttataaaatcattttatacagatggaaatttcgggcatgagtaatatcagcttaacatgttgaatactactctctgcaatctgattgaataaagctgtaccgttttgtgttatatgggaaacataagaaataatatgtacacaacacaga

SEQ ID NO: 167987 - DNA, 373 bp, Arabidopsis thaliana nossen
acctattaatgcgaaagcgccgtggagagcaacaaaagcccatagaccacctaattgacaccaacgagtaaaatctccttgtgcttcaggaccccacagtaacaacaaagaatgcgctaaactattagcaggagtagaaactgcagcggttaaaaaattgcaaccttctaaataggaactggccaatccatgagtataccatgaagttacaaaggttgtacctgtgaaccaaccccctaaagcgaaataggcacaaggaaagagcaatagaccagaccaacctacaaaaacgaagcggtccctccgtaaccagtcatccataatatcaaataaatctttttcgtccttggtaaatttaccaagggctatagtc

SEQ ID NO: 167988 - DNA, 375 bp, Arabidopsis thaliana nossen
attattttcactgagcgcataacatttttgagacaagagactctctctctctctcttctctctttctctccccctctctccggcgatggttgttgctatggaccaacgcaccaatgtgaacggagatcccggcgccggagaccggaagaaagaagaaaggtttgatccgagtgcacaaccaccgttcaagatcggagatataagggcggcgattcctaagcactgttgggttaagagtcctttgagatcaatgagttacgtcgtcagagacattatcgccgtcgcggctttggccatcgctgccgtgtatgttgatagctggttcctttggcctctttattgggccgcccaaggaacacttttctgggccatctt

SEQ ID NO: 167989 - DNA, 371 bp, Arabidopsis thaliana nossen
cggacgcgtgggttcgttttctagtgttatgtttgaaagactatccaagaatggtagagagtttgaagaggaaacacgggaccatgtaaacgagtatgctgatgcagggctgagaactttgatacttgcttatcgtgaacttgatgagaaagaatacaaagtattcaatgaaagaatcagtgaagccaagagttcggttagtgctgatcgagaatcgctgatagaggaagtcaccgagaaaattgaaaaagacttgattcttcttggagctactgctgttgaggataaactccaaaatggagtaagcaaacactgatgatagtcatataatcaatttatagttggtggattgaaatgtcttatcttctctc

SEQ ID NO: 167990 - DNA, 372 bp, Arabidopsis thaliana nossen
tcgggcctggtccaacggttttttggggcgttcgagtttatttatggcatgaaacaactcgaagtatgggtctagcttattggtacgttacccaaaaccttatttggataaatttgggaatccttttattttttttattggccaggacttgtacttaaaaaaggttaaaaatttttaattatatatttttttttgagtacgcgttctttggaacctggtgtatcttgtctttaccacgaatgattttccttggttaacaataattgttgtttttccaatatctgctggttcattaatgttatttctcccgcataggggaaataaagtcaataaatggtatactatatgcatttgcatcttagaacttcttct

SEQ ID NO: 167991 - DNA, 376 bp, Arabidopsis thaliana nossen
ctaatttgaccaatctagggtttctagtcacttgaagcttctcttaaaaaacctgtctcactcctcgtcaacctcttcctctcccgctgtcgccaagattgaatcttttttcagttgtggcttcaccggataataaggaattcagtaagagataagttcatcctgacaacatggagaccaagaatgagaattctgatgtttcacgggcagaggagtttaaaagtcaggccaacgaagcttttaaaggtcacaaatactccagtgctattgatctatatacaaaagctattgaactcaacagcaacaacgctgtgtattgggcaaatcgtgcatttgctcacacaaaactggaggaatatggagtgcaatacaggat
